United States Patent Application Publication US 2018/0126003 A1 - sequence listing, part 176

SEQ ID NO: 311598 - protein, 1486 aa, Artificial Sequence
  derived and/or modified sequence
PRDHSLNASQGHFMFILKKSSSLWQVAKLQSPTFSQTGPGCILSFWFYNYGLSVGAAELQLHMENSHDSTVIWRVLYNQGKQWLEATIQLGRLSQPFHLSLDKVSLGIYDGVSAIDDIRFENCTLPLPAESCEGLDHFWCRHTRACIEKLRLCDLVDDCGDRTDEVNCAPELQCNFETGICNWEQDAKDDFDWTRSQGPTPTLNTGPMKDNTLGTAKGHYLYIESSEPQAFQDSAALLSPILNATDTKGCTFRFYYHMFGKRIYRLAIYQRIWSDSRGQLLWQIFGNQGNRWIRKHLNISSRQPFQILVEASVGDGFTGDIAIDDLSFMDCTLYPGNLPADLPTPPETSVPVTLPPHNCTDNEFICRSDGHCIEKMQKCDFKYDCPDKSDEASCVMEVCSFEKRSLCKWYQPIPVHLLQDSNTFRWGLGNGISIHHGEENHRPSVDHTQNTTDGWYLYADSSNGKFGDTADILTPIISLTGPKCTLVFWTHMNGATVGSLQVLIKKDNVTSKLWAQTGQQGAQWKRAEVFLGIRSHTQIVFRAKRGISYIGDVAVDDISFQDCSPLLSPERKCTDHEFMCANKHCIAKDKLCDFVNDCADNSDETTFICRTSSGRCDFEFDLCSWKQEKDEDFDWNLKASSIPAAGTEPAADHTLGNSSGHYIFIKSLFPQQPMRAARISSPVISKRSKNCKIIFHYHMYGNGIGALTLMQVSVTNQTKVLLNLTVEQGNFWRREELSLFGDEDFQLKFEGRVGKGQRGDIALDDIVLTENCLSLHDSVQEELAVPLPTGFCPLGYRECHNGKCYRLEQSCNFVDNCGDNTDENECGSSCTFEKGWCGWQNSQADNFDWVLGVGSHQSLRPPKDHTLGNENAILLMRRHKYPIRSVNLHTVKHVLKAQTVGNCSVSKLEARLLDFLSVPNENTFGSSDHTNWHFMYLEATAVGLRGDKAHFRSTMWRESSAACTMSFWYFVSAKATGSIQILIKRGRRRRRAPNPVLSGSPTIPRQGSQQLGGWRGGSARHRARAFPEPECPRGRSALLKGPPQEKPNRRSALLSVGEISELCPEITDFLCRDKKCIASHLLCDYKPDCSDRSDEAHCAHYTSTTGSCNFETSSGNWTTACSLTQDSEDDLDWAIGSRIPAKALIPDSDHTPGSGQHFLYVNSSGSKEGSVARITTSKSFPASLGMCTVRFWFYMIDPRSMGILKVYTIEESGLNILVWSVIGNKRTGWTYGSVPLSSNSPFKVAFEADLDGNEDIFIALDDISFTPECVTGGPVPVQPSPCEADQFSCIYTLQCVPLSGKCDGHEDCIDGSDEMDCPLSPTPPLCSNMEFPCSTDECIPSLLLCDGVPDCHFNEDELICSNKSCSNGALVCASSNSCIPAHQRCDGFADCMDFQLDESSCSDTWTLLGIGLAFLMTHITVAVLCFLANRKVPIRKTEGSGNCAFVNPVYGNWSNPEKTESSVYSFSNPLYGTTSGSLETLSHHLK

SEQ ID NO: 311599 - protein, 350 aa, Artificial Sequence
  derived and/or modified sequence
MCTVRFWFYMIDPRSMGILKVYTIEESGLNILVWSVIGNKRTGWTYGSVPLSSNSPFKVAFEADLDGNEDIFIALDDISFTPECVTGGPVPVQPSPCEADQFSCIYTLQCVPLSGKCDGHEDCIDGSDEMDCPLSPTPPLCSNMEFPCSTDECIPSLLLCDGVPDCHFNEDELICSNKSCSNGALVCASSNSCIPAHQRCDGFADCMDFQLDESSCSECPLNYCRNGGTCVVEKNGPMCRCRQGWKGNRCHIKFNPPATDFTYAQNNTWTLLGIGLAFLMTHITVAVLCFLANRKVPIRKTEGSGNCAFVNPVYGNWSNPEKTESSVYSFSNPLYGTTSGSLETLSHHLK

SEQ ID NO: 311600 - DNA, 1761 bp, Artificial Sequence
  derived and/or modified sequence
agaatgcccaagaggaaggtcagctctgctgaaggggccgccacaggaaaagcctaacaggaggtcagcgctgttgtcagtgggagagatctctgagctttgtccggaaatcactgattttttgtgccgggacaagaagtgcattgcatcccaccttctttgtgactataagccagactgctctgataggtctgatgaagctcactgtgcacattatacaagcacaacaggaagctgcaattttgaaacaagttcaggaaactggaccacagcctgcagtcttactcaagactctgaggatgacttggactgggccattggcagcagaattcctgccaaagcattaattccagactctgatcacacgccaggtagtggtcagcacttcctgtacgtcaactcatctggctccaaggaaggatccgttgccagaattactacttccaaatccttcccagcaagccttggaatgtgtactgttcggttctggttctacatgattgatcccaggagtatgggaatattaaaggtgtataccattgaagaatcggggctaaacatcctggtgtggtcagtgattggaaataaaagaacgggatggacatatggctctgtgcctctctccagtaacagtccgtttaaggtggcatttgaagctgatttggatggaaatgaggacatctttattgctcttgatgacatctcttttaccccagagtgtgtgactggaggtcctgtcccagtgcagccatcaccctgtgaagctgatcagttttcttgtatctacacactccaatgtgtccctctctcagggaaatgtgatggacatgaagactgcatagatggatctgatgaaatggattgtcctctcagccccacccctccactctgtagtaacatggagttcccgtgctctacagacgagtgtataccttccctcctgctatgcgatggagtgcccgactgccactttaatgaagatgagctcatctgctccaacaaaagctgttctaatggagctctggtgtgtgcctcctccaacagctgtatcccagcccaccagcgctgtgatggttttgccgactgcatggatttccagcttgatgagtccagctgctccgaatgtccattaaattactgcagaaatggtgggacttgtgtagtggagaaaaatggtcctatgtgtcgatgtagacaaggctggaaaggaaatcgatgccatatcaagtttaatcctcctgctacagacttcacatacgctcagaataatacatggactctcctgggtattggattagcattcctgatgactcacatcacagttgcagtcttgtgttttcttgcaaacagaaaggtaccaataaggaaaaccgagggaagtggtaactgtgcctttgtcaatccagtttacgggaactggagcaacccagagaaaacagagagttctgtctattccttctcaaacccattatatggcacaacatcaggaagcctggagaccctgtcacatcatctcaaatagcagcatcgagaccaagtctgatccaacatgtgtagtttctagaaaattgaagtctccacaatctgatagaaactcatcttctacaatggtaaaaagagaaaggattgtaaatgccagtgtaattataacatttatgaatgaattttcttgcagaatatagagaatgtttatatggaatcagaatcagtaccttatcttcactgaacatctgaatattttaataaaatttctatttaatc

SEQ ID NO: 311601 - DNA, 4461 bp, Artificial Sequence
  derived and/or modified sequence
cctcgggatcatagtctcaacgcatctcaagggcattttatgttcattctgaagaaaagcagcagcttgtggcaagttgctaagcttcagagcccaactttcagccagacaggacctggatgcatactttccttctggttctataactatggcctgtcagtgggagcagctgagctgcagctacatatggaaaattctcatgactcaacagtgatttggagagtattatacaatcagggcaaacaatggttggaggcaaccattcagctagggcgcctttcgcagcccttccatttgtcactagataaagtcagtctgggcatttatgatggggtctcagctattgatgacatccgatttgaaaattgtactctccctcttcctgctgagagctgtgaagggctggatcatttctggtgtcgccacaccagggcttgcatagaaaagcttcggttatgtgatctggtggatgactgtggtgatcgtactgatgaagtcaactgtgcacctgagctgcagtgtaactttgaaactggaatctgtaactgggaacaagatgcaaaagatgactttgattggaccaggagccagggtccaactccaacacttaacacagggccaatgaaagataacactctgggcacagctaaaggacactatctctacatagaatcttcagagccacaggcttttcaagacagtgctgccttactcagcccaatccttaatgccactgatacaaaaggctgcaccttccgcttctattaccacatgtttggaaagcgcatttataggttggcaatctaccaacgaatctggagtgactcaaggggacagctgctgtggcagatatttgggaatcaaggcaacagatggattaggaaacacctcaacatttccagcaggcagccctttcagatattggtggaggcttcagtgggagatggcttcactggagatattgcgattgatgatctgtcatttatggactgcaccctctaccctggtaatttgccagcagacctcccaactccaccagaaacgtcagttcctgtaacattacctccacacaactgcacagacaatgaatttatctgcaggtctgatggtcactgcattgaaaaaatgcagaaatgtgattttaaatatgactgccctgacaaatcagatgaagcatcctgtgttatggaagtttgcagctttgagaaaagaagcctgtgtaaatggtatcaaccaatcccagtacatttgcttcaagattcaaacacattcaggtgggggcttgggaacgggatcagcattcatcatggggaagaaaaccacaggccatcagtggatcatacacaaaataccactgatggctggtacctgtatgctgacagttctaatgggaaatttggtgacacggctgacattctcactcctatcatttcactcacgggaccaaaatgtaccttggtgttctggacacatatgaatggggccaccgttggttctctccaggtgctcatcaagaaagataacgttacttctaaattgtgggctcaaactggacagcaaggtgcacagtggaagagagcagaagtgtttttaggcattcgttcacatacacagattgtcttcagagccaaacgtggtatcagttacataggagatgtagcagtggatgatatttccttccaagattgctcccctttgcttagcccagagagaaagtgtactgatcatgaattcatgtgtgctaataagcactgcattgccaaagacaagctgtgtgattttgtgaatgattgtgctgataattcagatgagactactttcatttgccgtacctccagtgggcgctgtgatttcgaatttgatctttgttcctggaagcaggagaaagatgaggactttgactggaacctgaaagctagcagcatccctgcagcaggcacagagccagcagcagatcacactttgggaaattcatctggtcattacatctttataaagagtttgtttcctcagcagcccatgagagctgccagaatttcaagtccagttataagtaagagaagcaaaaactgcaagattatttttcattatcacatgtatggaaatggcattggggcactcaccttaatgcaggtgtcagtcacaaaccaaacgaaggttctacttaacctcactgtagaacaaggcaatttctggcggagagaagaactgtcactgtttggtgatgaagacttccaactcaaatttgaaggtagagttgggaaaggtcagcgtggagacattgcacttgatgacattgtgcttacagaaaattgtctatcactccatgattccgtgcaagaagaactggcagtgcctcttccaacaggtttctgcccacttggctatagggaatgtcataatggaaaatgctataggctggaacaaagctgtaacttcgtagataactgtggagataatactgatgaaaatgagtgtggtagctcctgtacttttgaaaaaggctggtgtggctggcaaaactcccaggctgacaactttgattgggttttaggggttggctctcatcaaagcttaagacctcccaaagaccacacacttggaaatgaaaatgctatcttgttgatgcgacggcataaatatcccatcagatcagttaatctgcatactgtgaagcacgtgctaaaagcacagacagttggaaattgttctgtcagcaagctagaggcgaggctattagattttctttctgttccaaatgaaaatacttttggcagctcagatcatacgaattggcacttcatgtatctggaagctactgcagtgggccttcggggtgacaaagcacacttcaggagtaccatgtggcgagaatccagtgcagcctgcaccatgagcttctggtatttcgtatctgcaaaggccacaggatccattcagattctcatcaagcgggggcggaggagaaggcgggctcccaatccggttctatccggttctcccaccatcccccgccaggggtctcagcagctcggagggtggaggggcggcagcgccaggcaccgcgcacgcgcctttccggagccagaatgcccaagaggaaggtcagctctgctgaaggggccgccacaggaaaagcctaacaggaggtcagcgctgttgtcagtgggagagatctctgagctttgtccggaaatcactgattttttgtgccgggacaagaagtgcattgcatcccaccttctttgtgactataagccagactgctctgataggtctgatgaagctcactgtgcacattatacaagcacaacaggaagctgcaattttgaaacaagttcaggaaactggaccacagcctgcagtcttactcaagactctgaggatgacttggactgggccattggcagcagaattcctgccaaagcattaattccagactctgatcacacgccaggtagtggtcagcacttcctgtacgtcaactcatctggctccaaggaaggatccgttgccagaattactacttccaaatccttcccagcaagccttggaatgtgtactgttcggttctggttctacatgattgatcccaggagtatgggaatattaaaggtgtataccattgaagaatcggggctaaacatcctggtgtggtcagtgattggaaataaaagaacgggatggacatatggctctgtgcctctctccagtaacagtccgtttaaggtggcatttgaagctgatttggatggaaatgaggacatctttattgctcttgatgacatctcttttaccccagagtgtgtgactggaggtcctgtcccagtgcagccatcaccctgtgaagctgatcagttttcttgtatctacacactccaatgtgtccctctctcagggaaatgtgatggacatgaagactgcatagatggatctgatgaaatggattgtcctctcagccccacccctccactctgtagtaacatggagttcccgtgctctacagacgagtgtataccttccctcctgctatgcgatggagtgcccgactgccactttaatgaagatgagctcatctgctccaacaaaagctgttctaatggagctctggtgtgtgcctcctccaacagctgtatcccagcccaccagcgctgtgatggttttgccgactgcatggatttccagcttgatgagtccagctgctccgatacatggactctcctgggtattggattagcattcctgatgactcacatcacagttgcagtcttgtgttttcttgcaaacagaaaggtaccaataaggaaaaccgagggaagtggtaactgtgcctttgtcaatccagtttacgggaactggagcaacccagagaaaacagagagttctgtctattccttctcaaacccattatatggcacaacatcaggaagcctggagaccctgtcacatcatctcaaatag

SEQ ID NO: 311602 - DNA, 774 bp, Artificial Sequence
  derived and/or modified sequence
ctcaaatttgaaggtagagttgggaaaggtcagcgtggagacattgcacttgatgacattgtgcttacagaaaattgtctatcactccatgattccgtgcaagaagaactggcagtgcctcttccaacaggtttctgcccacttggctatagggaatgtcataatggaaaatgctataggctggaacaaagctgtaacttcgtagataactgtggagataatactgatgaaaatgagtgtggtagctcctgtacttttgaaaaaggctggtgtggctggcaaaactcccaggctgacaactttgattgggttttaggggttggctctcatcaaagcttaagacctcccaaagaccacacacttggaaatgaaaatgggcacttcatgtatctggaagctactgcagtgggccttcggggtgacaaagcacacttcaggagtaccatgtggcgagaatccagtgcagcctgcaccatgagcttctggtatttcgtatctgcaaaggccacaggatccattcagattctcatcaagacagagaaaggactatcaaaagtatggcaagaaagtaagcagaaccctggtaatcattggcaaaaggctgacatcctgctaggaaagttaaggaattttgaagtcatatttcaaggtatcagaacaagggacctgggaggaggagctgcaattgatgatattgaatttaaaaactgcacaactgtgggagagatctctgagctttgtccggaaatcactgattttttgtgccgggacaag

SEQ ID NO: 311603 - DNA, 4661 bp, Artificial Sequence
  derived and/or modified sequence
atgttcattctgaagaaaagcagcagcttgtggcaagttgctaagcttcagagcccaactttcagccagacaggacctggatgcatactttccttctggttctataactatggcctgtcagtgggagcagctgagctgcagctacatatggaaaattctcatgactcaacagtgatttggagagtattatacaatcagggcaaacaatggttggaggcaaccattcagctagggcgcctttcgcagcccttccatttgtcactagataaagtcagtctgggcatttatgatggggtctcagctattgatgacatccgatttgaaaattgtactctccctcttcctgctgagagctgtgaagggctggatcatttctggtgtcgccacaccagggcttgcatagaaaagcttcggttatgtgatctggtggatgactgtggtgatcgtactgatgaagtcaactgtgcacctgagctgcagtgtaactttgaaactggaatctgtaactgggaacaagatgcaaaagatgactttgattggaccaggagccagggtccaactccaacacttaacacagggccaatgaaagataacactctgggcacagctaaaggacactatctctacatagaatcttcagagccacaggcttttcaagacagtgctgccttactcagcccaatccttaatgccactgatacaaaaggctgcaccttccgcttctattaccacatgtttggaaagcgcatttataggttggcaatctaccaacgaatctggagtgactcaaggggacagctgctgtggcagatatttgggaatcaaggcaacagatggattaggaaacacctcaacatttccagcaggcagccctttcagatattggtggaggcttcagtgggagatggcttcactggagatattgcgattgatgatctgtcatttatggactgcaccctctaccctggtaatttgccagcagacctcccaactccaccagaaacgtcagttcctgtaacattacctccacacaactgcacagacaatgaatttatctgcaggtctgatggtcactgcattgaaaaaatgcagaaatgtgattttaaatatgactgccctgacaaatcagatgaagcatcctgtgttatggaagtttgcagctttgagaaaagaagcctgtgtaaatggtatcaaccaatcccagtacatttgcttcaagattcaaacacattcaggtgggggcttgggaacgggatcagcattcatcatggggaagaaaaccacaggccatcagtggatcatacacaaaataccactgatggctggtacctgtatgctgacagttctaatgggaaatttggtgacacggctgacattctcactcctatcatttcactcacgggaccaaaatgtaccttggtgttctggacacatatgaatggggccaccgttggttctctccaggtgctcatcaagaaagataacgttacttctaaattgtgggctcaaactggacagcaaggtgcacagtggaagagagcagaagtgtttttaggcattcgttcacatacacagattgtcttcagagccaaacgtggtatcagttacataggagatgtagcagtggatgatatttccttccaagattgctcccctttgcttagcccagagagaaagtgtactgatcatgaattcatgtgtgctaataagcactgcattgccaaagacaagctgtgtgattttgtgaatgattgtgctgataattcagatgagactactttcatttgccgtacctccagtgggcgctgtgatttcgaatttgatctttgttcctggaagcaggagaaagatgaggactttgactggaacctgaaagctagcagcatccctgcagcaggcacagagccagcagcagatcacactttgggaaattcatctggtcattacatctttataaagagtttgtttcctcagcagcccatgagagctgccagaatttcaagtccagttataagtaagagaagcaaaaactgcaagattatttttcattatcacatgtatggaaatggcattggggcactcaccttaatgcaggtgtcagtcacaaaccaaacgaaggttctacttaacctcactgtagaacaaggcaatttctggcggagagaagaactgtcactgtttggtgatgaagacttccaactcaaatttgaaggtagagttgggaaaggtcagcgtggagacattgcacttgatgacattgtgcttacagaaaattgtctatcactccatgattccgtgcaagaagaactggcagtgcctcttccaacaggtttctgcccacttggctatagggaatgtcataatggaaaatgctataggctggaacaaagctgtaacttcgtagataactgtggagataatactgatgaaaatgagtgtggtagctcctgtacttttgaaaaaggctggtgtggctggcaaaactcccaggctgacaactttgattgggttttaggggttggctctcatcaaagcttaagacctcccaaagaccacacacttggaaatgaaaatgctatcttgttgatgcgacggcataaatatcccatcagatcagttaatctgcatactgtgaagcacgtgctaaaagcacagacagttggaaattgttctgtcagcaagctagaggcgaggctattagattttctttctgttccaaatgaaaatacttttggcagctcagatcatacgaattggcacttcatgtatctggaagctactgcagtgggccttcggggtgacaaagcacacttcaggagtaccatgtggcgagaatccagtgcagcctgcaccatgagcttctggtatttcgtatctgcaaaggccacaggatccattcagattctcatcaagcgggggcggaggagaaggcgggctcccaatccggttctatccggttctcccaccatcccccgccaggggtctcagcagctcggagggtggaggggcggcagcgccaggcaccgcgcacgcgcctttccggagccagaatgcccaagaggaaggtcagctctgctgaaggggccgccacaggaaaagcctaacaggaggtcagcgctgttgtcagtgggagagatctctgagctttgtccggaaatcactgattttttgtgccgggacaagaagtgcattgcatcccaccttctttgtgactataagccagactgctctgataggtctgatgaagctcactgtgcacattatacaagcacaacaggaagctgcaattttgaaacaagttcaggaaactggaccacagcctgcagtcttactcaagactctgaggatgacttggactgggccattggcagcagaattcctgccaaagcattaattccagactctgatcacacgccaggtagtggtcagcacttcctgtacgtcaactcatctggctccaaggaaggatccgttgccagaattactacttccaaatccttcccagcaagccttggaatgtgtactgttcggttctggttctacatgattgatcccaggagtatgggaatattaaaggtgtataccattgaagaatcggggctaaacatcctggtgtggtcagtgattggaaataaaagaacgggatggacatatggctctgtgcctctctccagtaacagtccgtttaaggtggcatttgaagctgatttggatggaaatgaggacatctttattgctcttgatgacatctcttttaccccagagtgtgtgactggaggtcctgtcccagtgcagccatcaccctgtgaagctgatcagttttcttgtatctacacactccaatgtgtccctctctcagggaaatgtgatggacatgaagactgcatagatggatctgatgaaatggattgtcctctcagccccacccctccactctgtagtaacatggagttcccgtgctctacagacgagtgtataccttccctcctgctatgcgatggagtgcccgactgccactttaatgaagatgagctcatctgctccaacaaaagctgttctaatggagctctggtgtgtgcctcctccaacagctgtatcccagcccaccagcgctgtgatggttttgccgactgcatggatttccagcttgatgagtccagctgctccgatacatggactctcctgggtattggattagcattcctgatgactcacatcacagttgcagtcttgtgttttcttgcaaacagaaaggtaccaataaggaaaaccgagggaagtggtaactgtgcctttgtcaatccagtttacgggaactggagcaacccagagaaaacagagagttctgtctattccttctcaaacccattatatggcacaacatcaggaagcctggagaccctgtcacatcatctcaaatagcagcatcgagaccaagtctgatccaacatgtgtagtttctagaaaattgaagtctccacaatctgatagaaactcatcttctacaatggtaaaaagagaaaggattgtaaatgccagtgtaattataacatttatgaatgaattttcttgcagaatatagagaatgtttatatggaatcagaatcagtaccttatcttcactgaacatctgaatattttaataaaatttctatttaatc

SEQ ID NO: 311604 - DNA, 1524 bp, Artificial Sequence
  derived and/or modified sequence
tgagagtgccccagaggcagaagcgccctgctgaagggccccccccaggagaagcccaacagaagaagcgccctgctgagcgtgggcgagatcagcgagctgtgccccgagatcaccgacttcctgtgcagagacaagaagtgcatcgccagccacctgctgtgcgactacaagcccgactgcagcgacagaagcgacgaggcccactgcgcccactacaccagcaccaccggcagctgcaacttcgagaccagcagcggcaactggaccaccgcctgcagcctgacccaggacagcgaggacgacctggactgggccatcggcagcagaatccccgccaaggccctgatccccgacagcgaccacacccccggcagcggccagcacttcctgtacgtgaacagcagcggcagcaaggagggcagcgtggccagaatcaccaccagcaagagcttccccgccagcctgggcatgtgcaccgtgagattctggttctacatgatcgaccccagaagcatgggcatcctgaaggtgtacaccatcgaggagagcggcctgaacatcctggtgtggagcgtgatcggcaacaagagaaccggctggacctacggcagcgtgcccctgagcagcaacagccccttcaaggtggccttcgaggccgacctggacggcaacgaggacatcttcatcgccctggacgacatcagcttcacccccgagtgcgtgaccggcggccccgtgcccgtgcagcccagcccctgcgaggccgaccagttcagctgcatctacaccctgcagtgcgtgcccctgagcggcaagtgcgacggccacgaggactgcatcgacggcagcgacgagatggactgccccctgagccccaccccccccctgtgcagcaacatggagttcccctgcagcaccgacgagtgcatccccagcctgctgctgtgcgacggcgtgcccgactgccacttcaacgaggacgagctgatctgcagcaacaagagctgcagcaacggcgccctggtgtgcgccagcagcaacagctgcatccccgcccaccagagatgcgacggcttcgccgactgcatggacttccagctggacgagagcagctgcagcgagtgccccctgaactactgcagaaacggcggcacctgcgtggtggagaagaacggccccatgtgcagatgcagacagggctggaagggcaacagatgccacatcaagttcaacccccccgccaccgacttcacctacgcccagaacaacacctggaccctgctgggcatcggcctggccttcctgatgacccacatcaccgtggccgtgctgtgcttcctggccaacagaaaggtgcccatcagaaagaccgagggcagcggcaactgcgccttcgtgaaccccgtgtacggcaactggagcaaccccgagaagaccgagagcagcgtgtacagcttcagcaaccccctgtacggcaccaccagcggcagcctggagaccctgagccaccacctgaagtag

SEQ ID NO: 311605 - DNA, 4461 bp, Artificial Sequence
  derived and/or modified sequence
cccagagaccacagcctgaacgccagccagggccacttcatgttcatcctgaagaagagcagcagcctgtggcaggtggccaagctgcagagccccaccttcagccagaccggccccggctgcatcctgagcttctggttctacaactacggcctgagcgtgggcgccgccgagctgcagctgcacatggagaacagccacgacagcaccgtgatctggagagtgctgtacaaccagggcaagcagtggctggaggccaccatccagctgggcagactgagccagcccttccacctgagcctggacaaggtgagcctgggcatctacgacggcgtgagcgccatcgacgacatcagattcgagaactgcaccctgcccctgcccgccgagagctgcgagggcctggaccacttctggtgcagacacaccagagcctgcatcgagaagctgagactgtgcgacctggtggacgactgcggcgacagaaccgacgaggtgaactgcgcccccgagctgcagtgcaacttcgagaccggcatctgcaactgggagcaggacgccaaggacgacttcgactggaccagaagccagggccccacccccaccctgaacaccggccccatgaaggacaacaccctgggcaccgccaagggccactacctgtacatcgagagcagcgagccccaggccttccaggacagcgccgccctgctgagccccatcctgaacgccaccgacaccaagggctgcaccttcagattctactaccacatgttcggcaagagaatctacagactggccatctaccagagaatctggagcgacagcagaggccagctgctgtggcagatcttcggcaaccagggcaacagatggatcagaaagcacctgaacatcagcagcagacagcccttccagatcctggtggaggccagcgtgggcgacggcttcaccggcgacatcgccatcgacgacctgagcttcatggactgcaccctgtaccccggcaacctgcccgccgacctgcccaccccccccgagaccagcgtgcccgtgaccctgcccccccacaactgcaccgacaacgagttcatctgcagaagcgacggccactgcatcgagaagatgcagaagtgcgacttcaagtacgactgccccgacaagagcgacgaggccagctgcgtgatggaggtgtgcagcttcgagaagagaagcctgtgcaagtggtaccagcccatccccgtgcacctgctgcaggacagcaacaccttcagatggggcctgggcaacggcatcagcatccaccacggcgaggagaaccacagacccagcgtggaccacacccagaacaccaccgacggctggtacctgtacgccgacagcagcaacggcaagttcggcgacaccgccgacatcctgacccccatcatcagcctgaccggccccaagtgcaccctggtgttctggacccacatgaacggcgccaccgtgggcagcctgcaggtgctgatcaagaaggacaacgtgaccagcaagctgtgggcccagaccggccagcagggcgcccagtggaagagagccgaggtgttcctgggcatcagaagccacacccagatcgtgttcagagccaagagaggcatcagctacatcggcgacgtggccgtggacgacatcagcttccaggactgcagccccctgctgagccccgagagaaagtgcaccgaccacgagttcatgtgcgccaacaagcactgcatcgccaaggacaagctgtgcgacttcgtgaacgactgcgccgacaacagcgacgagaccaccttcatctgcagaaccagcagcggcagatgcgacttcgagttcgacctgtgcagctggaagcaggagaaggacgaggacttcgactggaacctgaaggccagcagcatccccgccgccggcaccgagcccgccgccgaccacaccctgggcaacagcagcggccactacatcttcatcaagagcctgttcccccagcagcccatgagagccgccagaatcagcagccccgtgatcagcaagagaagcaagaactgcaagatcatcttccactaccacatgtacggcaacggcatcggcgccctgaccctgatgcaggtgagcgtgaccaaccagaccaaggtgctgctgaacctgaccgtggagcagggcaacttctggagaagagaggagctgagcctgttcggcgacgaggacttccagctgaagttcgagggcagagtgggcaagggccagagaggcgacatcgccctggacgacatcgtgctgaccgagaactgcctgagcctgcacgacagcgtgcaggaggagctggccgtgcccctgcccaccggcttctgccccctgggctacagagagtgccacaacggcaagtgctacagactggagcagagctgcaacttcgtggacaactgcggcgacaacaccgacgagaacgagtgcggcagcagctgcaccttcgagaagggctggtgcggctggcagaacagccaggccgacaacttcgactgggtgctgggcgtgggcagccaccagagcctgagaccccccaaggaccacaccctgggcaacgagaacgccatcctgctgatgagaagacacaagtaccccatcagaagcgtgaacctgcacaccgtgaagcacgtgctgaaggcccagaccgtgggcaactgcagcgtgagcaagctggaggccagactgctggacttcctgagcgtgcccaacgagaacaccttcggcagcagcgaccacaccaactggcacttcatgtacctggaggccaccgccgtgggcctgagaggcgacaaggcccacttcagaagcaccatgtggagagagagcagcgccgcctgcaccatgagcttctggtacttcgtgagcgccaaggccaccggcagcatccagatcctgatcaagagaggcagaagaagaagaagagcccccaaccccgtgctgagcggcagccccaccatccccagacagggcagccagcagctgggcggctggagaggcggcagcgccagacacagagccagagccttccccgagcccgagtgccccagaggcagaagcgccctgctgaagggccccccccaggagaagcccaacagaagaagcgccctgctgagcgtgggcgagatcagcgagctgtgccccgagatcaccgacttcctgtgcagagacaagaagtgcatcgccagccacctgctgtgcgactacaagcccgactgcagcgacagaagcgacgaggcccactgcgcccactacaccagcaccaccggcagctgcaacttcgagaccagcagcggcaactggaccaccgcctgcagcctgacccaggacagcgaggacgacctggactgggccatcggcagcagaatccccgccaaggccctgatccccgacagcgaccacacccccggcagcggccagcacttcctgtacgtgaacagcagcggcagcaaggagggcagcgtggccagaatcaccaccagcaagagcttccccgccagcctgggcatgtgcaccgtgagattctggttctacatgatcgaccccagaagcatgggcatcctgaaggtgtacaccatcgaggagagcggcctgaacatcctggtgtggagcgtgatcggcaacaagagaaccggctggacctacggcagcgtgcccctgagcagcaacagccccttcaaggtggccttcgaggccgacctggacggcaacgaggacatcttcatcgccctggacgacatcagcttcacccccgagtgcgtgaccggcggccccgtgcccgtgcagcccagcccctgcgaggccgaccagttcagctgcatctacaccctgcagtgcgtgcccctgagcggcaagtgcgacggccacgaggactgcatcgacggcagcgacgagatggactgccccctgagccccaccccccccctgtgcagcaacatggagttcccctgcagcaccgacgagtgcatccccagcctgctgctgtgcgacggcgtgcccgactgccacttcaacgaggacgagctgatctgcagcaacaagagctgcagcaacggcgccctggtgtgcgccagcagcaacagctgcatccccgcccaccagagatgcgacggcttcgccgactgcatggacttccagctggacgagagcagctgcagcgacacctggaccctgctgggcatcggcctggccttcctgatgacccacatcaccgtggccgtgctgtgcttcctggccaacagaaaggtgcccatcagaaagaccgagggcagcggcaactgcgccttcgtgaaccccgtgtacggcaactggagcaaccccgagaagaccgagagcagcgtgtacagcttcagcaaccccctgtacggcaccaccagcggcagcctggagaccctgagccaccacctgaagtag

SEQ ID NO: 311606 - DNA, 777 bp, Artificial Sequence
  derived and/or modified sequence
ctgaagttcgagggcagagtgggcaagggccagagaggcgacatcgccctggacgacatcgtgctgaccgagaactgcctgagcctgcacgacagcgtgcaggaggagctggccgtgcccctgcccaccggcttctgccccctgggctacagagagtgccacaacggcaagtgctacagactggagcagagctgcaacttcgtggacaactgcggcgacaacaccgacgagaacgagtgcggcagcagctgcaccttcgagaagggctggtgcggctggcagaacagccaggccgacaacttcgactgggtgctgggcgtgggcagccaccagagcctgagaccccccaaggaccacaccctgggcaacgagaacggccacttcatgtacctggaggccaccgccgtgggcctgagaggcgacaaggcccacttcagaagcaccatgtggagagagagcagcgccgcctgcaccatgagcttctggtacttcgtgagcgccaaggccaccggcagcatccagatcctgatcaagaccgagaagggcctgagcaaggtgtggcaggagagcaagcagaaccccggcaaccactggcagaaggccgacatcctgctgggcaagctgagaaacttcgaggtgatcttccagggcatcagaaccagagacctgggcggcggcgccgccatcgacgacatcgagttcaagaactgcaccaccgtgggcgagatcagcgagctgtgccccgagatcaccgacttcctgtgcagagacaagtag

SEQ ID NO: 311607 - DNA, 4422 bp, Artificial Sequence
  derived and/or modified sequence
atgttcatcctgaagaagagcagcagcctgtggcaggtggccaagctgcagagccccaccttcagccagaccggccccggctgcatcctgagcttctggttctacaactacggcctgagcgtgggcgccgccgagctgcagctgcacatggagaacagccacgacagcaccgtgatctggagagtgctgtacaaccagggcaagcagtggctggaggccaccatccagctgggcagactgagccagcccttccacctgagcctggacaaggtgagcctgggcatctacgacggcgtgagcgccatcgacgacatcagattcgagaactgcaccctgcccctgcccgccgagagctgcgagggcctggaccacttctggtgcagacacaccagagcctgcatcgagaagctgagactgtgcgacctggtggacgactgcggcgacagaaccgacgaggtgaactgcgcccccgagctgcagtgcaacttcgagaccggcatctgcaactgggagcaggacgccaaggacgacttcgactggaccagaagccagggccccacccccaccctgaacaccggccccatgaaggacaacaccctgggcaccgccaagggccactacctgtacatcgagagcagcgagccccaggccttccaggacagcgccgccctgctgagccccatcctgaacgccaccgacaccaagggctgcaccttcagattctactaccacatgttcggcaagagaatctacagactggccatctaccagagaatctggagcgacagcagaggccagctgctgtggcagatcttcggcaaccagggcaacagatggatcagaaagcacctgaacatcagcagcagacagcccttccagatcctggtggaggccagcgtgggcgacggcttcaccggcgacatcgccatcgacgacctgagcttcatggactgcaccctgtaccccggcaacctgcccgccgacctgcccaccccccccgagaccagcgtgcccgtgaccctgcccccccacaactgcaccgacaacgagttcatctgcagaagcgacggccactgcatcgagaagatgcagaagtgcgacttcaagtacgactgccccgacaagagcgacgaggccagctgcgtgatggaggtgtgcagcttcgagaagagaagcctgtgcaagtggtaccagcccatccccgtgcacctgctgcaggacagcaacaccttcagatggggcctgggcaacggcatcagcatccaccacggcgaggagaaccacagacccagcgtggaccacacccagaacaccaccgacggctggtacctgtacgccgacagcagcaacggcaagttcggcgacaccgccgacatcctgacccccatcatcagcctgaccggccccaagtgcaccctggtgttctggacccacatgaacggcgccaccgtgggcagcctgcaggtgctgatcaagaaggacaacgtgaccagcaagctgtgggcccagaccggccagcagggcgcccagtggaagagagccgaggtgttcctgggcatcagaagccacacccagatcgtgttcagagccaagagaggcatcagctacatcggcgacgtggccgtggacgacatcagcttccaggactgcagccccctgctgagccccgagagaaagtgcaccgaccacgagttcatgtgcgccaacaagcactgcatcgccaaggacaagctgtgcgacttcgtgaacgactgcgccgacaacagcgacgagaccaccttcatctgcagaaccagcagcggcagatgcgacttcgagttcgacctgtgcagctggaagcaggagaaggacgaggacttcgactggaacctgaaggccagcagcatccccgccgccggcaccgagcccgccgccgaccacaccctgggcaacagcagcggccactacatcttcatcaagagcctgttcccccagcagcccatgagagccgccagaatcagcagccccgtgatcagcaagagaagcaagaactgcaagatcatcttccactaccacatgtacggcaacggcatcggcgccctgaccctgatgcaggtgagcgtgaccaaccagaccaaggtgctgctgaacctgaccgtggagcagggcaacttctggagaagagaggagctgagcctgttcggcgacgaggacttccagctgaagttcgagggcagagtgggcaagggccagagaggcgacatcgccctggacgacatcgtgctgaccgagaactgcctgagcctgcacgacagcgtgcaggaggagctggccgtgcccctgcccaccggcttctgccccctgggctacagagagtgccacaacggcaagtgctacagactggagcagagctgcaacttcgtggacaactgcggcgacaacaccgacgagaacgagtgcggcagcagctgcaccttcgagaagggctggtgcggctggcagaacagccaggccgacaacttcgactgggtgctgggcgtgggcagccaccagagcctgagaccccccaaggaccacaccctgggcaacgagaacgccatcctgctgatgagaagacacaagtaccccatcagaagcgtgaacctgcacaccgtgaagcacgtgctgaaggcccagaccgtgggcaactgcagcgtgagcaagctggaggccagactgctggacttcctgagcgtgcccaacgagaacaccttcggcagcagcgaccacaccaactggcacttcatgtacctggaggccaccgccgtgggcctgagaggcgacaaggcccacttcagaagcaccatgtggagagagagcagcgccgcctgcaccatgagcttctggtacttcgtgagcgccaaggccaccggcagcatccagatcctgatcaagagaggcagaagaagaagaagagcccccaaccccgtgctgagcggcagccccaccatccccagacagggcagccagcagctgggcggctggagaggcggcagcgccagacacagagccagagccttccccgagcccgagtgccccagaggcagaagcgccctgctgaagggccccccccaggagaagcccaacagaagaagcgccctgctgagcgtgggcgagatcagcgagctgtgccccgagatcaccgacttcctgtgcagagacaagaagtgcatcgccagccacctgctgtgcgactacaagcccgactgcagcgacagaagcgacgaggcccactgcgcccactacaccagcaccaccggcagctgcaacttcgagaccagcagcggcaactggaccaccgcctgcagcctgacccaggacagcgaggacgacctggactgggccatcggcagcagaatccccgccaaggccctgatccccgacagcgaccacacccccggcagcggccagcacttcctgtacgtgaacagcagcggcagcaaggagggcagcgtggccagaatcaccaccagcaagagcttccccgccagcctgggcatgtgcaccgtgagattctggttctacatgatcgaccccagaagcatgggcatcctgaaggtgtacaccatcgaggagagcggcctgaacatcctggtgtggagcgtgatcggcaacaagagaaccggctggacctacggcagcgtgcccctgagcagcaacagccccttcaaggtggccttcgaggccgacctggacggcaacgaggacatcttcatcgccctggacgacatcagcttcacccccgagtgcgtgaccggcggccccgtgcccgtgcagcccagcccctgcgaggccgaccagttcagctgcatctacaccctgcagtgcgtgcccctgagcggcaagtgcgacggccacgaggactgcatcgacggcagcgacgagatggactgccccctgagccccaccccccccctgtgcagcaacatggagttcccctgcagcaccgacgagtgcatccccagcctgctgctgtgcgacggcgtgcccgactgccacttcaacgaggacgagctgatctgcagcaacaagagctgcagcaacggcgccctggtgtgcgccagcagcaacagctgcatccccgcccaccagagatgcgacggcttcgccgactgcatggacttccagctggacgagagcagctgcagcgacacctggaccctgctgggcatcggcctggccttcctgatgacccacatcaccgtggccgtgctgtgcttcctggccaacagaaaggtgcccatcagaaagaccgagggcagcggcaactgcgccttcgtgaaccccgtgtacggcaactggagcaaccccgagaagaccgagagcagcgtgtacagcttcagcaaccccctgtacggcaccaccagcggcagcctggagaccctgagccaccacctgaagtag

SEQ ID NO: 311608 - DNA, 1053 bp, Artificial Sequence
  derived and/or modified sequence
atgtgcaccgtgagattctggttctacatgatcgaccccagaagcatgggcatcctgaaggtgtacaccatcgaggagagcggcctgaacatcctggtgtggagcgtgatcggcaacaagagaaccggctggacctacggcagcgtgcccctgagcagcaacagccccttcaaggtggccttcgaggccgacctggacggcaacgaggacatcttcatcgccctggacgacatcagcttcacccccgagtgcgtgaccggcggccccgtgcccgtgcagcccagcccctgcgaggccgaccagttcagctgcatctacaccctgcagtgcgtgcccctgagcggcaagtgcgacggccacgaggactgcatcgacggcagcgacgagatggactgccccctgagccccaccccccccctgtgcagcaacatggagttcccctgcagcaccgacgagtgcatccccagcctgctgctgtgcgacggcgtgcccgactgccacttcaacgaggacgagctgatctgcagcaacaagagctgcagcaacggcgccctggtgtgcgccagcagcaacagctgcatccccgcccaccagagatgcgacggcttcgccgactgcatggacttccagctggacgagagcagctgcagcgagtgccccctgaactactgcagaaacggcggcacctgcgtggtggagaagaacggccccatgtgcagatgcagacagggctggaagggcaacagatgccacatcaagttcaacccccccgccaccgacttcacctacgcccagaacaacacctggaccctgctgggcatcggcctggccttcctgatgacccacatcaccgtggccgtgctgtgcttcctggccaacagaaaggtgcccatcagaaagaccgagggcagcggcaactgcgccttcgtgaaccccgtgtacggcaactggagcaaccccgagaagaccgagagcagcgtgtacagcttcagcaaccccctgtacggcaccaccagcggcagcctggagaccctgagccaccacctgaagtag

SEQ ID NO: 311609 - DNA, 1524 bp, Artificial Sequence
  derived and/or modified sequence
taggagtgccccaggggccgctccgcccttctcaaaggccctccccaggagaaaccaaaccgtcggagtgctctgttgagcgtgggcgaaatttcagagctgtgcccagaaatcacagactttttgtgccgtgataaaaagtgcattgcctcccatctcctatgtgactacaaacctgattgtagtgaccggagtgatgaggctcactgcgctcattatacgagtacaacaggctcatgcaacttcgagacctcttccggcaattggacaaccgcttgcagcctcacccaggatagcgaagacgacttggactgggctataggtagccgaatcccagcgaaggctttgattcctgactcagaccacactccggggtccggccaacatttcctctatgttaactccagcggttccaaggagggaagtgtcgcccgcatcactaccagcaaatcctttcccgcgagccttggaatgtgtacagtcaggttttggttctatatgatcgatccgcgctccatggggattcttaaggtgtatactatcgaggagtccggactcaacatactagtatggtccgtgattgggaataagagaactggatggacatacggttccgttccactctcctctaactcaccattcaaggttgcctttgaggccgatctggacggaaacgaggacatttttatcgccctggacgatatttcttttacgcctgaatgtgttactggtgggcccgtccccgtccagccatcgccatgcgaagctgatcagttttcatgcatttatactctccagtgcgtgcccctgagtgggaaatgcgacggccatgaggactgtatcgatggctcagatgaaatggattgtccactcagcccgactcctcccctgtgcagtaatatggaattcccttgttcaaccgatgagtgtatcccaagcttgttgctgtgcgatggggttccagattgtcactttaatgaggacgaattaatttgttcaaacaaaagttgttctaacggtgcgctcgtgtgtgcatcttcaaacagttgcatccccgcccaccagcgctgcgatggatttgctgactgcatggatttccagctggatgagagcagttgtagcgaatgccctctcaattattgtaggaacggcggtacatgtgtagtagaaaaaaacgggcccatgtgtcggtgtagacaggggtggaaagggaataggtgccacatcaagtttaacccacctgcaactgatttcacttatgcccagaacaacacatggacattgctgggtatagggctcgcttttctgatgacccacattaccgtggcggtgctgtgtttcttggctaatcgcaaggtaccaatccgtaaaacggaagggtctggcaattgcgctttcgtgaacccagtctatggcaactggagtaatcccgagaaaacagagtcttccgtgtactcctttagtaaccccttgtatggtaccaccagtgggtcattagaaaccctgagtcaccatctgaaatag

SEQ ID NO: 311610 - DNA, 4461 bp, Artificial Sequence
  derived and/or modified sequence
ccccgtgatcatagcctcaatgcctcacagggacacttcatgtttatcctcaagaagtcaagctctctgtggcaggtggctaagttgcaaagtcccactttctcccagacaggcccagggtgcatcctcagcttctggttctataactacggactctccgtgggcgccgctgagctgcagttgcatatggagaactctcacgattcaacggtaatatggagagtgctgtataatcaggggaagcagtggttggaagcaacaattcagctgggtcgattaagtcagccattccacctcagtctggataaggtgtctttaggcatctacgatggtgtgagcgcaatcgacgatattaggtttgagaactgcactctgccattgccagctgagtcttgtgagggcctcgatcacttttggtgtaggcacacgcgcgcctgtattgagaagctacggctttgtgaccttgtcgacgactgtggtgatcggaccgacgaagtgaattgcgcacctgaattgcaatgtaactttgaaaccggcatctgtaattgggagcaggatgccaaagacgacttcgactggacccgtagccaggggcccacccctactcttaacacaggccctatgaaagacaacaccctgggcacagccaaaggtcattatctctatattgagtctagcgaaccccaagccttccaggatagcgcggccctcctgtcaccaatcctcaacgcaactgatacaaaaggttgcaccttccggttctactaccacatgtttgggaagcgaatataccgattggccatttatcagcggatctggtctgattctagaggccagttgctttggcagatcttcggcaatcagggcaaccggtggatccggaagcatctgaacatctcctctcgccagccattccaaattctggtggaggcctcagtcggagatgggttcacaggcgacattgccattgacgacctgagtttcatggactgtacgttgtaccctggaaacttgcccgctgacttgccaacgcctccagaaacctctgtgcccgtcacacttcctccgcataattgcacggacaacgagtttatctgcaggtcagatggtcattgtatcgagaaaatgcagaaatgtgactttaaatacgactgccccgacaagagcgatgaggctagctgtgtcatggaagtttgttcttttgagaagagatccttatgcaagtggtaccagcccatacccgtccacttgctccaggattctaataccttcaggtgggggctgggaaatggtatctcaattcatcacggagaggaaaaccataggcccagcgtcgaccatacacagaatactaccgatgggtggtatttgtatgccgactccagcaacggcaaattcggggatactgcagatatcctcactcccatcatcagccttacagggccaaagtgtactctcgtgttttggacacatatgaatggagccaccgtaggcagccttcaagtgctgattaaaaaggacaacgtcactagcaagttatgggcgcagacaggccagcagggcgcccagtggaagagagcagaggtatttcttggcatccgtagccatacgcagatagtgttcagggctaagcgtggtatttcatatattggagacgtggctgtagacgacatcagcttccaggattgctctcccttactgtctccagagaggaagtgtaccgatcacgagtttatgtgtgcaaataaacactgtatcgccaaagataaactgtgcgactttgtcaacgattgcgccgataactctgatgagacaacctttatctgtaggacaagcagtggccgatgcgatttcgagtttgacctctgcagctggaagcaagagaaggatgaggattttgactggaacctgaaggcttctagcattcctgctgctggaaccgaacctgccgccgatcatacactagggaactcctctggccactatatatttattaaatcactgttcccccagcaacccatgagagccgcccgtatctcctcacctgttatttcaaagcggtccaaaaattgtaaaattattttccactatcatatgtatggtaatggaataggtgctcttacccttatgcaggtaagcgtaacaaatcagacaaaagtcctgctgaacctgaccgtggaacagggcaacttctggcggagggaagagctgtctctttttggagatgaggactttcagctgaagtttgaggggcgcgtcgggaaaggacagaggggtgacatcgcgttggatgacatagtcttgactgagaactgtctgagtttgcacgattccgtgcaagaggagttggccgtaccgctgcccaccggtttttgtcccctgggctaccgagaatgccacaacggcaaatgttataggttggagcagagttgcaacttcgtggacaattgtggagacaacaccgatgaaaatgagtgtgggtccagttgcacctttgagaaaggctggtgtggttggcagaattcccaggctgacaatttcgattgggtcctgggtgtgggcagccatcagagtctcaggcctccaaaagaccataccctggggaatgagaacgctatactcctgatgaggcggcacaaatacccaatcagaagtgtgaatcttcacaccgtgaagcatgtcctaaaggcccagaccgtaggcaactgctctgtctctaaactggaggcacgcctgctggattttctgagcgtaccgaatgaaaatacattcggtagctccgaccacaccaactggcattttatgtacctagaagccacagctgtcggccttcgaggagataaagcgcactttaggagtacaatgtggcgggagagctcagccgcctgtactatgtctttttggtacttcgtaagtgcaaaagcgactggtagcattcaaattctcataaaacgcgggcggagacgcagaagggcaccaaatccagtgcttagtgggtccccgaccatacccaggcaggggagccagcagttaggcggctggcgcggtggctccgcacggcaccgcgccagggcctttcccgaacccgaatgccctcgtggaaggagtgccttgttgaaagggccaccacaggaaaagcctaacagacgaagcgccttattgtctgtcggcgaaatcagcgaactctgccccgagattacggacttcctctgccgcgacaaaaagtgtatcgcctcacacctgctctgcgactacaagcctgactgttcagaccgatcagacgaggcacactgtgcccactacaccagtacaacaggctcttgtaacttcgagacctcttccggtaactggactactgcttgttctctgacacaggattctgaggatgacttggattgggctatcgggtcacgaataccggccaaagcactgatccccgatagcgaccacacacctggttctgggcagcacttcttgtatgttaattcgagcggcagtaaagaggggtccgtggcgcgcataaccacctccaagtcattccccgcttccttgggcatgtgtactgtccggttttggttttatatgattgacccaaggagtatgggaatcctgaaagtgtacaccatcgaagaatccggactgaacatcctcgtgtggagtgtgatcggaaataagagaacaggatggacctacggctccgtccccttgagctccaattccccctttaaggtggccttcgaggcagacctcgatgggaacgaagacatcttcattgctctggacgatatctcttttacccctgagtgcgtgacgggcggccctgtgcctgtccagccatccccatgtgaagcagatcagttttcttgtatttatactcttcagtgtgttccgctatctggcaagtgcgatggtcatgaggactgtattgatggcagtgatgagatggattgcccactcagcccgactccaccactatgcagtaacatggagttcccatgttccactgatgaatgtataccctcattactgctgtgtgatggggtgcctgattgtcacttcaacgaagacgaacttatctgctcaaacaagtcttgttcaaatggagcattggtttgtgcctcatctaacagctgtatcccggcccatcaacgttgcgacgggttcgcagactgcatggacttccagcttgacgagtcctcttgttccgacacctggacactcctcggtatcgggcttgccttccttatgacccacatcaccgttgcggtcctatgcttcctggcgaatcggaaggtccccatcagaaagaccgagggaagtggcaactgtgcctttgtgaatcccgtatacggcaattggagtaatccagaaaagaccgaatcaagcgtgtattctttctccaatccattgtacgggaccaccagcgggtcactcgagactctctcgcaccatctaaagtag

SEQ ID NO: 311611 - DNA, 777 bp, Artificial Sequence
  derived and/or modified sequence
ctgaaattcgaagggagggtcggaaaggggcagcgcggagacatcgccttagatgacattgtgttgactgagaattgcctaagtttgcatgattcagtgcaagaggagcttgccgttccactgccgacaggtttctgccctctcggatacagggagtgccataatggcaagtgctacagactcgaacagtcctgcaactttgttgataattgtggtgacaatactgatgagaacgagtgcggatctagctgtacatttgagaaaggatggtgcggttggcagaactcacaggccgataatttcgactgggtcctaggcgtaggctcgcatcagtctctgcgacctcccaaggatcataccttggggaatgagaacggtcactttatgtacctcgaggccacggctgtggggttgcgtggcgataaggctcacttccggtctacgatgtggcgagaatcttcagcggcgtgtacgatgagcttctggtattttgtgagcgctaaagctactggatctatccaaatcctgattaagacagagaagggcttgtccaaagtttggcaggaatctaagcagaatcccgggaatcattggcagaaggccgacattctgttgggcaagctgaggaatttcgaggtgattttccagggcatcaggacacgtgacctgggcgggggcgcagctattgatgacattgagttcaagaattgcaccaccgtcggtgagatatccgaactgtgcccagaaataactgatttcctctgcagagacaagtag

SEQ ID NO: 311612 - DNA, 4422 bp, Artificial Sequence
  derived and/or modified sequence
atgttcattctcaaaaaatcctcatcattatggcaagtggcaaaactgcagagtcctacgttttctcagactggaccggggtgtatactcagcttttggttctataattatggcctgtcagtgggtgccgccgagctgcagctccacatggagaactctcacgacagcacagtgatttggcgagtcctgtacaatcaggggaagcaatggctcgaggctacaatacagctgggccggctcagccagccatttcatctgtctctggataaagtctctctgggtatttacgatggagtgtcagccatcgatgacattagattcgagaattgcaccctgcccctgcctgcggagtcatgtgaagggctagatcatttttggtgtcgtcacactcgcgcctgtatcgagaaacttcgcctgtgtgatcttgtggacgattgtggagacagaaccgacgaagtcaactgtgctccagagttacagtgtaattttgagactgggatttgcaattgggagcaggatgctaaggacgactttgactggacacgcagccagggtccaactccgaccctaaatactggccctatgaaagataacaccctgggtacagccaaggggcattatctctacatagaatccagcgagccccaagcctttcaagattcggccgcactgctcagtccaattctcaatgcgacagatacaaagggatgcacttttcgattctactaccatatgttcggcaagcgtatctacaggctagctatctaccagcgtatttggagcgatagtcggggccagctactatggcagatctttgggaaccaggggaaccggtggatacgcaagcacctcaatatttcttcccgccagccgtttcagatcctcgtcgaggcctctgtgggcgatggctttactggcgatatagccatcgacgacctgtccttcatggactgcactctgtatcccggcaatttacctgctgatctgcccacccctcctgagacttccgtgccagtgacgttaccccctcataactgcacagacaatgagttcatatgccggtcggacggtcattgcatagaaaaaatgcagaagtgcgatttcaaatacgactgtcctgataagtctgacgaagccagctgtgtgatggaggtgtgttctttcgagaagcggagtctttgtaagtggtatcagcccattccagttcacctgctgcaggatagcaatacctttcgatggggccttgggaacggtatctccattcaccacggagaagagaaccaccgcccgtctgtggatcacacacagaacacaacggatgggtggtatctctacgccgactcttcgaacggcaaatttggggacacagccgacattctaacccccatcatcagtctcaccggcccaaaatgcacactagtgttctggacccacatgaacggcgccactgtgggaagtctccaagtattgattaagaaggataacgttacttctaaactgtgggcccagactggccagcagggagcccagtggaagcgcgctgaagtgttcctcggtattcggagtcacacccagatcgtgttcagggctaaaagaggaatctcctacattggcgatgtggccgtggacgatatctcctttcaggactgttcccctttgctctcacccgagcgcaaatgcactgaccatgagttcatgtgtgctaacaagcattgcatagcgaaggacaagttgtgcgacttcgtgaacgactgcgcagataactccgacgaaactacgtttatttgtcggaccagcagcggaaggtgcgatttcgaatttgatctctgcagctggaaacaggaaaaagacgaggactttgattggaacctgaaagccagtagcatccctgctgccggaaccgagccagcggctgatcacactctcggcaattcctccggtcactatatattcattaaatctctttttccacaacaaccgatgcgggcagcacgcatatcctcacctgtcatctccaaacgctctaagaactgtaagataatcttccactaccacatgtatggcaatggtatcggcgcactgacacttatgcaagtctccgtgactaatcagaccaaggtgttactgaacctcaccgttgagcagggaaacttctggaggagggaggagttatctttgttcggggacgaggatttccagctcaaatttgaaggcagagtgggcaaaggccaacgcggtgacatcgcactggacgacatcgtccttaccgaaaactgcctctcactgcatgacagcgtacaggaggaacttgcagtccccctcccaaccgggttttgtcccttggggtacagggaatgccataacgggaagtgttaccgacttgaacaatcttgcaattttgtggacaactgtggagacaataccgatgagaatgaatgcggctcctcgtgtaccttcgagaaaggttggtgcggttggcagaacagccaggctgacaacttcgactgggtcttaggcgtcgggagtcaccagagccttcgtccccccaaagatcacaccctcggcaatgaaaatgccattctcctcatgcggaggcacaagtacccaatacgctcagttaacctgcacactgtcaagcacgtcttgaaggcacagaccgtgggaaactgttctgttagcaagctcgaggcacggctgctggacttcctctcagtgccaaatgaaaatacattcggatcctcagatcacaccaattggcacttcatgtacctggaggcaacagccgtggggcttcggggagataaggcccacttcagaagcacaatgtggagggagagttccgccgcgtgcactatgtctttctggtacttcgtgagtgctaaggcaaccggaagcatacaaatacttataaaacggggccggcggaggcgtcgggcccctaatccagtgctgtccggcagtcccacaattcccaggcaaggatcacaacagctcggcggctggaggggagggtcagcacgccacagagcccgtgcctttcccgagcccgagtgccctagaggccgtagcgcactgctgaaggggccaccacaggaaaagccaaataggcgcagcgctcttttgtcagtcggtgagatcagcgagttgtgcccggagatcactgacttcctctgcagggataaaaagtgtatagcaagccacttgctgtgcgattacaagcccgattgctcagataggagcgatgaagcccattgcgctcattatactagcacaacagggtcttgtaacttcgagacctcttccggcaattggacgacggcctgtagcctgactcaggattctgaggatgacctcgactgggcgatcgggtcacggatccccgctaaggccctcatacctgactctgatcacacacctggcagtggtcaacatttcctgtacgtgaactcatctggctctaaagagggttccgttgccaggatcactaccagtaaatcgtttcctgccagcttgggcatgtgcaccgtgagattctggttttatatgatcgaccctcggtccatgggcatcttaaaagtctatacgatagaggagtcaggcctgaacatcctggtttggtctgtgattggcaataagagaactgggtggacatacggcagtgtaccgttgtcatcaaactcacctttcaaggtcgccttcgaagcggacctcgacggcaacgaagatatttttatagcactggacgacataagcttcacaccggagtgtgtaactggaggcccggttccagtacagcccagcccctgcgaggccgatcagtttagctgcatatatacactgcaatgtgttccactgtctggcaagtgtgacgggcacgaggattgtatcgacgggagtgatgaaatggactgcccgctgagcccaactcctcccctgtgttctaacatggagtttccatgttcaaccgatgagtgcattccctcgttactgctgtgtgacggcgttcctgattgtcatttcaacgaagatgagctcatttgttctaacaaaagctgtagtaatggagccctcgtatgcgcttctagcaactcttgcatcccggcacaccagcggtgcgacgggttcgccgactgtatggattttcaacttgatgaatctagctgctccgacacgtggaccctgctgggcatcggattagcgttcctgatgacacatataactgtggctgtcttatgtttcctggcaaatagaaaggtgcccatacggaagacggagggtagtggaaattgtgccttcgtgaatcccgtgtacgggaactggtccaaccctgaaaaaacagagagtagcgtttattctttctccaatcctctgtacggtacaacctccggttccctggagacactaagccaccacctgaagtag

SEQ ID NO: 311613 - DNA, 1053 bp, Artificial Sequence
  derived and/or modified sequence
atgtgcaccgtcaggttttggttttatatgatcgaccctagatcgatgggcattttaaaagtctacactattgaggaaagcggactgaatatactagtgtggtctgtcatcggtaacaagcggaccggctggacttacggcagcgtgcccctgagctcaaactcaccgttcaaggtcgctttcgaggctgaccttgacgggaacgaggatatattcatcgctcttgatgacatctctttcacaccagaatgcgttactggcggacctgtccctgtgcaaccatcaccatgtgaggctgatcagttctcgtgcatctatacactgcagtgtgtcccactgtccgggaagtgcgatgggcatgaagattgcatagatggatccgatgagatggattgtccactatcacctacccccccactttgcagcaatatggaatttccttgttccaccgatgaatgcatcccgtctctgctcctgtgtgacggggtgcccgactgccactttaatgaagacgagctcatatgttcaaacaagtcctgttctaacggcgcactggtgtgtgcaagttctaactcatgtatcccagcacaccagcgttgtgacggtttcgctgactgcatggactttcaattggacgagagttcttgtagtgagtgcccactgaactattgccgcaacggtggaacttgcgtcgtcgagaagaacggtcctatgtgtcgttgtcgccaaggatggaaaggcaataggtgccatattaaattcaacccacctgctaccgactttacctatgctcaaaacaacacatggaccctgctgggcatcggattggcttttttgatgacgcacatcactgtggccgtcctctgcttccttgccaaccggaaggtccccatcagaaagacagagggcagcggcaattgcgcctttgtgaatccagtgtacggaaattggagcaatcctgagaaaaccgaaagctcggtctactcgttttccaatccactgtacggcactacctccggatctttagagacccttagccatcacctgaaatag

SEQ ID NO: 311614 - DNA, 1524 bp, Artificial Sequence
  derived and/or modified sequence
tgagaatgtccccggggccgcagcgccctgctgaagggccccccccaggagaagcccaacagaagaagtgccctgctgtctgtgggggagatcagcgagctgtgcccagagatcacagacttcctgtgccgggacaagaagtgcatcgccagccacctgctgtgtgactacaagccagactgcagcgacagaagtgatgaggcccactgtgcccactacaccagcaccaccggcagctgcaactttgagaccagcagcggcaactggaccacagcctgcagcctgacccaggacagtgaagatgacctggactgggccatcggcagccgcatcccagccaaggccctgatcccagacagcgaccacaccccaggcagcggccagcacttcctgtatgtgaacagcagcggcagcaaggagggctctgtggcccgcatcaccaccagcaagagcttccctgccagcctgggcatgtgcaccgtgcgcttctggttctacatgattgaccccaggtccatgggcatcctgaaggtgtacaccatcgaggagagcggcctgaacatcctggtgtggagcgtcatcggcaacaagaggacaggctggacctacggctctgtgcccctgagcagcaacagccccttcaaggtggcctttgaggccgacctggatggaaatgaagacatcttcatcgccctggatgacatctccttcaccccagaatgtgtgactggaggccctgtgcctgtgcagcccagcccctgtgaggccgaccagttcagctgcatctacaccctgcagtgtgtgcccctgtctggaaaatgtgatggccacgaggactgcattgatggcagtgatgagatggactgccccctgagccccaccccacccctgtgcagcaacatggagttcccctgcagcacagatgagtgcatccccagcctgctgctgtgtgatggagtgcctgactgccacttcaatgaagatgagctgatctgcagcaacaagagctgcagcaatggagccctggtgtgtgccagcagcaacagctgcatcccagcccaccagagatgtgatggctttgctgactgcatggacttccagctggatgagagcagctgcagtgaatgtcccctgaactactgcagaaatggaggcacctgtgtggtggagaagaatggccccatgtgccgctgccggcagggctggaagggcaaccgctgccacatcaagttcaaccccccagccacagacttcacctacgcccagaacaacacctggaccctgctgggcatcggcctggccttcctgatgacccacatcaccgtggccgtgctgtgcttcctggccaacaggaaggtgcccatcaggaagacagagggcagcggcaactgtgcctttgtgaaccctgtgtatggcaactggagcaaccctgagaagacagagagctctgtgtacagcttcagcaaccccctgtatggcaccaccagcggcagcctggagaccctgagccaccacctgaagtag

SEQ ID NO: 311615 - DNA, 4461 bp, Artificial Sequence
  derived and/or modified sequence
ccccgggaccacagcctgaatgccagccagggccacttcatgttcatcctgaagaagagcagcagcctgtggcaggtggccaagctgcagagccccaccttcagccagacaggccctggctgcatcctgtccttctggttctacaactacggcctgtctgtgggcgctgctgagctgcagctgcacatggagaacagccatgacagcaccgtcatctggagggtgctgtacaaccagggcaagcagtggctggaggccaccatccagctgggccgcctgagccagcccttccacctgagcctggacaaggtgtccctgggcatctatgatggagtgtctgccattgatgacatccgctttgagaactgcaccctgcccctgcctgctgagagctgtgagggcctggaccacttctggtgccgccacacccgggcctgcatcgagaagctgcggctgtgtgacctggtggatgactgtggggacagaacagatgaggtgaactgtgcccctgagctgcagtgcaactttgagaccggcatctgcaactgggagcaggatgccaaggatgactttgactggaccaggagccagggccccacccccaccctgaacacaggccccatgaaggacaacaccctgggcacagccaagggccactacctgtacatcgagagcagcgagccccaggccttccaggacagcgctgccctgctgagccccatcctgaatgccacagacaccaagggctgcaccttccgcttctactaccacatgtttgggaagaggatctaccgcctggccatctaccagaggatctggagcgacagccggggccagctgctgtggcagatctttggaaaccagggcaaccgctggatcaggaagcacctgaacatcagcagccggcagcccttccagatcctggtggaggcctctgtgggagatggcttcaccggggacatcgccattgatgacctgtccttcatggactgcaccctgtacccaggcaacctgcctgctgacctgcccaccccacctgagacctctgtgcctgtgaccctgcccccccacaactgcacagacaatgagttcatctgccgcagtgatggccactgcatcgagaagatgcagaagtgtgacttcaagtatgactgcccagacaagagtgatgaggccagctgtgtgatggaggtgtgcagctttgagaagaggagcctgtgcaagtggtaccagcccatccctgtgcacctgctgcaggacagcaacaccttccgctggggcctgggcaatggcatcagcatccaccacggggaggagaaccaccggcccagcgtggaccacacccagaacaccacagatggctggtacctgtatgctgacagcagcaatggcaagtttggagacacagctgacatcctgacccccatcatcagcctgaccggccccaagtgcaccctggtgttctggacccacatgaatggagccaccgtgggcagcctgcaggtgctgatcaagaaggacaacgtgaccagcaagctgtgggcccagacaggccagcagggcgcccagtggaagagagctgaggtgttcctgggcatccgcagccacacccagatcgtgttccgggccaagaggggcatctcctacatcggagatgtggccgtggatgacatctccttccaggactgcagccccctgctgagccctgagaggaagtgcacagaccacgagttcatgtgtgccaacaagcactgcatcgccaaggacaagctgtgtgactttgtgaatgactgtgccgacaacagtgatgagaccaccttcatctgcaggaccagcagcggccgctgtgactttgaatttgacctgtgctcctggaagcaggagaaggatgaagattttgactggaacctgaaggccagcagcatcccagctgctggaacagagcctgctgctgaccacaccctgggcaacagcagcggccactacatcttcatcaagagcctcttcccccagcagcccatgagagctgcccgcatcagcagccctgtgatcagcaagaggagcaagaactgcaagatcatcttccactaccacatgtatggaaatggcatcggggccctgaccctgatgcaggtgtctgtgaccaaccagaccaaggtgctgctgaacctgactgtggagcagggcaacttctggaggcgggaggagctgagcctgtttggagatgaggacttccagctgaagtttgagggccgggtgggcaagggccagagaggagacatcgccctggatgacatcgtgctgacagagaactgcctgagcctgcatgacagcgtgcaggaggagctggccgtgcccctgcccaccggcttctgccccctgggctaccgggagtgccacaacgggaagtgctaccgcctggagcagagctgcaactttgtggacaactgtggggacaacacagatgaaaatgaatgtggcagcagctgcacctttgagaagggctggtgtggctggcagaacagccaggccgacaactttgactgggtgctgggcgtgggcagccaccagagcctgcggccccccaaggaccacaccctgggcaatgaaaatgccatcctgctgatgagaagacacaagtaccccatccgctctgtgaacctgcacacagtgaagcacgtgctgaaggcccagacagtgggcaactgcagcgtgtccaagctggaggcccggctgctggacttcctgtctgtgcccaatgaaaacaccttcggcagcagtgaccacaccaactggcacttcatgtacctggaggccacagctgtgggcctgcggggggacaaggcccacttccgcagcaccatgtggagggagagcagcgctgcctgcaccatgtccttctggtactttgtgtctgccaaggccaccggcagcatccagatcctgatcaagagaggaagaagaagaagaagagcccccaaccctgtgctgagcggcagccccaccatcccccggcagggcagccagcagctgggcggctggaggggcggcagcgcccggcaccgggcccgggccttccctgagcctgagtgcccccggggccgcagcgccctgctgaagggccccccccaggagaagcccaacagaagaagtgccctgctgtctgtgggggagatcagcgagctgtgcccagagatcacagacttcctgtgccgggacaagaagtgcatcgccagccacctgctgtgtgactacaagccagactgcagcgacagaagtgatgaggcccactgtgcccactacaccagcaccaccggcagctgcaactttgagaccagcagcggcaactggaccacagcctgcagcctgacccaggacagtgaagatgacctggactgggccatcggcagccgcatcccagccaaggccctgatcccagacagcgaccacaccccaggcagcggccagcacttcctgtatgtgaacagcagcggcagcaaggagggctctgtggcccgcatcaccaccagcaagagcttccctgccagcctgggcatgtgcaccgtgcgcttctggttctacatgattgaccccaggtccatgggcatcctgaaggtgtacaccatcgaggagagcggcctgaacatcctggtgtggagcgtcatcggcaacaagaggacaggctggacctacggctctgtgcccctgagcagcaacagccccttcaaggtggcctttgaggccgacctggatggaaatgaagacatcttcatcgccctggatgacatctccttcaccccagaatgtgtgactggaggccctgtgcctgtgcagcccagcccctgtgaggccgaccagttcagctgcatctacaccctgcagtgtgtgcccctgtctggaaaatgtgatggccacgaggactgcattgatggcagtgatgagatggactgccccctgagccccaccccacccctgtgcagcaacatggagttcccctgcagcacagatgagtgcatccccagcctgctgctgtgtgatggagtgcctgactgccacttcaatgaagatgagctgatctgcagcaacaagagctgcagcaatggagccctggtgtgtgccagcagcaacagctgcatcccagcccaccagagatgtgatggctttgctgactgcatggacttccagctggatgagagcagctgcagcgacacctggaccctgctgggcatcggcctggccttcctgatgacccacatcaccgtggccgtgctgtgcttcctggccaacaggaaggtgcccatcaggaagacagagggcagcggcaactgtgcctttgtgaaccctgtgtatggcaactggagcaaccctgagaagacagagagctctgtgtacagcttcagcaaccccctgtatggcaccaccagcggcagcctggagaccctgagccaccacctgaagtag

SEQ ID NO: 311616 - DNA, 777 bp, Artificial Sequence
  derived and/or modified sequence
ctgaagtttgagggccgggtgggcaagggccagagaggagacatcgccctggatgacatcgtgctgacagagaactgcctgagcctgcatgacagcgtgcaggaggagctggccgtgcccctgcccaccggcttctgccccctgggctaccgggagtgccacaacgggaagtgctaccgcctggagcagagctgcaactttgtggacaactgtggggacaacacagatgaaaatgaatgtggcagcagctgcacctttgagaagggctggtgtggctggcagaacagccaggccgacaactttgactgggtgctgggcgtgggcagccaccagagcctgcggccccccaaggaccacaccctgggcaatgaaaatggccacttcatgtacctggaggccacagctgtgggcctgcggggggacaaggcccacttccgcagcaccatgtggagggagagcagcgctgcctgcaccatgtccttctggtactttgtgtctgccaaggccaccggcagcatccagatcctgatcaagacagagaagggcctgagcaaggtgtggcaggagagcaagcagaaccctggcaaccactggcagaaggctgacatcctgctgggcaagctgaggaactttgaagtcatcttccagggcatccgcacccgggacctgggcggcggggccgccattgatgacatcgagttcaagaactgcaccaccgtgggggagatcagcgagctgtgcccagagatcacagacttcctgtgccgggacaagtag

SEQ ID NO: 311617 - DNA, 4422 bp, Artificial Sequence
  derived and/or modified sequence
atgttcatcctgaagaagagcagcagcctgtggcaggtggccaagctgcagagccccaccttcagccagacaggccctggctgcatcctgtccttctggttctacaactacggcctgtctgtgggcgctgctgagctgcagctgcacatggagaacagccatgacagcaccgtcatctggagggtgctgtacaaccagggcaagcagtggctggaggccaccatccagctgggccgcctgagccagcccttccacctgagcctggacaaggtgtccctgggcatctatgatggagtgtctgccattgatgacatccgctttgagaactgcaccctgcccctgcctgctgagagctgtgagggcctggaccacttctggtgccgccacacccgggcctgcatcgagaagctgcggctgtgtgacctggtggatgactgtggggacagaacagatgaggtgaactgtgcccctgagctgcagtgcaactttgaaacaggcatctgcaactgggagcaggatgccaaggatgactttgactggaccaggagccagggccccacccccaccctgaacacaggccccatgaaggacaacaccctgggcacagccaagggccactacctgtacatcgagagcagcgagccccaggccttccaggacagcgctgccctgctgagccccatcctgaatgccacagacaccaagggctgcaccttccgcttctactaccacatgtttgggaagaggatctaccgcctggccatctaccagaggatctggagcgacagccggggccagctgctgtggcagatcttcggcaaccagggcaaccgctggatcaggaagcacctgaacatcagcagccggcagcccttccagatcctggtggaggcctctgtgggagatggcttcaccggggacatcgccattgatgacctgtccttcatggactgcaccctgtacccaggcaacctgcctgctgacctgcccaccccacctgagacctctgtgcctgtgaccctgcccccccacaactgcacagacaatgagttcatctgccgcagtgatggccactgcatcgagaagatgcagaagtgtgacttcaagtatgactgcccagacaagagtgatgaggccagctgtgtgatggaggtgtgcagctttgagaagaggagcctgtgcaagtggtaccagcccatccctgtgcacctgctgcaggacagcaacaccttccgctggggcctgggcaatggcatcagcatccaccacggggaggagaaccaccggcccagcgtggaccacacccagaacaccacagatggctggtacctgtatgctgacagcagcaatggcaagtttggagacacagctgacatcctgacccccatcatcagcctgaccggccccaagtgcaccctggtgttctggacccacatgaatggagccaccgtgggcagcctgcaggtgctgatcaagaaggacaacgtgaccagcaagctgtgggcccagacaggccagcagggcgcccagtggaagagagctgaggtgttcctgggcatccgcagccacacccagatcgtgttccgggccaagaggggcatctcctacatcggagatgtggccgtggatgacatctccttccaggactgcagccccctgctgagccctgagaggaaatgtacagaccacgagttcatgtgtgccaacaagcactgcatcgccaaggacaagctgtgtgactttgtgaatgactgtgccgacaacagtgatgagaccaccttcatctgcaggaccagcagcggccgctgtgactttgaatttgacctgtgctcctggaagcaggagaaggatgaggactttgactggaacctgaaggccagcagcatcccagctgctggaacagagcctgctgctgaccacaccctgggcaacagcagcggccactacatcttcatcaagagcctcttcccccagcagcccatgagagctgcccgcatcagcagccctgtgatcagcaagaggagcaagaactgcaagatcatcttccactaccacatgtatggaaatggaattggagccctgaccctgatgcaggtgtctgtgaccaaccagaccaaggtgctgctgaacctgactgtggagcagggcaacttctggaggcgggaggagctgagcctgtttggagatgaggacttccagctgaagtttgagggccgggtgggcaagggccagagaggagacatcgccctggatgacatcgtgctgacagagaactgcctgagcctgcatgattctgtgcaggaggagctggccgtgcccctgcccaccggcttctgccccctgggctaccgggagtgccacaacgggaagtgctaccgcctggagcagagctgcaactttgtggacaactgtggggacaacacagatgaaaatgaatgtggcagcagctgcacctttgagaagggctggtgtggctggcagaacagccaggccgacaactttgactgggtgctgggcgtgggcagccaccagagcctgcggccccccaaggaccacaccctgggcaatgaaaatgccatcctgctgatgaggaggcacaagtaccccatccgctctgtgaacctgcacacagtgaagcacgtgctgaaggcccagacagtgggcaactgcagcgtgtccaagctggaggcccggctgctggacttcctgtctgtgcccaatgaaaacaccttcggcagcagtgaccacaccaactggcacttcatgtacctggaggccacagctgtgggcctgcggggggacaaggcccacttccgcagcaccatgtggagggagagcagcgctgcctgcaccatgtccttctggtactttgtgtctgccaaggccaccggcagcatccagatcctgatcaagagaggaagaagaagaagaagagcccccaaccctgtgctgagcggcagccccaccatcccccggcagggcagccagcagctgggcggctggaggggcggcagcgcccggcaccgggcccgggccttccctgagccagaatgtccccggggccgcagcgccctgctgaagggccccccccaggagaagcccaacagaagaagtgccctgctgtctgtgggggagatcagcgagctgtgcccagagatcacagacttcctgtgccgggacaagaagtgcatcgccagccacctgctgtgtgactacaagccagactgcagcgacagaagtgatgaggcccactgtgcccactacaccagcaccaccggcagctgcaactttgagaccagcagcggcaactggaccacagcctgcagcctgacccaggacagtgaagatgacctggactgggccatcggcagccgcatcccagccaaggccctgatcccagacagcgaccacaccccaggcagcggccagcacttcctgtatgtgaacagcagcggcagcaaggagggctctgtggcccgcatcaccaccagcaagagcttccctgccagcctgggcatgtgcaccgtgcgcttctggttctacatgattgaccccaggtccatgggcatcctgaaggtgtacaccatcgaggagagcggcctgaacatcctggtgtggagcgtgattggcaacaagaggacaggctggacctacggctctgtgcccctgagcagcaacagccccttcaaggtggcctttgaagctgacctggatggaaatgaagacatcttcatcgccctggatgacatctccttcaccccagaatgtgtgactggaggccctgtgcctgtgcagcccagcccctgtgaggccgaccagttcagctgcatctacaccctgcagtgtgtgcccctgagcgggaaatgtgatggccacgaggactgcattgatggcagtgatgagatggactgccccctgagccccaccccacccctgtgcagcaacatggagttcccctgcagcacagatgagtgcatccccagcctgctgctgtgtgatggagtgcctgactgccacttcaatgaagatgagctgatctgcagcaacaagagctgcagcaatggagccctggtgtgtgccagcagcaacagctgcatcccagcccaccagagatgtgatggctttgctgactgcatggacttccagctggatgagagcagctgcagcgacacctggaccctgctgggcatcggcctggccttcctgatgacccacatcaccgtggccgtgctgtgcttcctggccaacaggaaggtgcccatcaggaagacagagggcagcggcaactgtgcctttgtgaaccctgtgtatggcaactggagcaaccctgagaagacagagagctctgtgtacagcttcagcaaccccctgtatggcaccaccagcggcagcctggagaccctgagccaccacctgaagtag

SEQ ID NO: 311618 - DNA, 1053 bp, Artificial Sequence
  derived and/or modified sequence
atgtgcaccgtgcgcttctggttctacatgattgaccccaggtccatgggcatcctgaaggtgtacaccatcgaggagagcggcctgaacatcctggtgtggagcgtgattggcaacaagaggacaggctggacctacggctctgtgcccctgagcagcaacagccccttcaaggtggcctttgaagctgacctggatggaaatgaagacatcttcatcgccctggatgacatctccttcaccccagaatgtgtgactggaggccctgtgcctgtgcagcccagcccctgtgaggccgaccagttcagctgcatctacaccctgcagtgtgtgcccctgagcgggaaatgtgatggccacgaggactgcattgatggcagtgatgagatggactgccccctgagccccaccccacccctgtgcagcaacatggagttcccctgcagcacagatgagtgcatccccagcctgctgctgtgtgatggagtgcctgactgccacttcaatgaagatgagctgatctgcagcaacaagagctgcagcaatggagccctggtgtgtgccagcagcaacagctgcatcccagcccaccagagatgtgatggctttgctgactgcatggacttccagctggatgagagcagctgcagcgagtgccccctgaactactgcagaaatggaggcacctgtgtggtggagaagaatggccccatgtgccgctgccggcagggctggaagggcaaccgctgccacatcaagttcaaccccccagccacagacttcacctacgcccagaacaacacctggaccctgctgggcatcggcctggccttcctgatgacccacatcaccgtggccgtgctgtgcttcctggccaacaggaaggtgcccatcaggaagacagagggcagcggcaactgtgcctttgtgaaccctgtgtatggcaactggagcaaccctgagaagacagagagctctgtgtacagcttcagcaaccccctgtatggcaccaccagcggcagcctggagaccctgagccaccacctgaagtag

SEQ ID NO: 311619 - DNA, 1524 bp, Artificial Sequence
  derived and/or modified sequence
tgagagtgcccccggggccggagcgccctgctgaagggccccccccaggagaagcccaatcggaggagtgctctcctttctgtcggtgaaatttccgagttatgtcctgagataactgacttcctgtgtagagataagaaatgcatcgcttctcacttattatgcgactataagcctgattgtagcgaccgctccgacgaagcacattgtgctcactacacgagcaccaccggctcgtgcaacttcgaaacgtcaagcggcaactggaccaccgcatgttcccttacacaggactctgaagatgatctggattgggcaatcggttccaggatccctgccaaggccttgataccagactcggaccacaccccgggatctggccagcactttctatacgtaaactcaagcggctctaaagaagggtctgttgctagaataacgacttcgaaatccttcccagccagtctggggatgtgtacagtgagattctggttctatatgatcgacccaagaagtatgggtatcctgaaggtttatacaattgaagagtccgggctgaacattttggtgtggtccgtgatcggcaataagaggaccggttggacttacggctcggtgccgctgagttccaacagccccttcaaggtggcattcgaagccgatctagacggcaatgaggacattttcatcgccttagacgacatatcattcactcccgaatgtgttactggcggacccgttcctgtacaaccctccccttgcgaagccgaccaattttcttgcatctacacactgcagtgcgtgccactcagcggtaagtgtgacggtcacgaggactgtatcgatggctccgacgagatggattgccctctttcaccgaccccgccactctgtagcaacatggagttcccatgcagcaccgatgagtgcattccctctctgctcctgtgtgatggtgtgcctgactgtcactttaacgaggacgagttgatttgttctaataagagctgttcaaacggcgctctcgtctgcgcttccagcaattcttgcatccccgcgcaccaacgctgcgacgggttcgctgactgcatggatttccagctggacgaaagttcatgcagcgaatgtccactgaactattgtaggaacgggggaacatgcgtcgtggagaaaaacggtccaatgtgccggtgcaggcagggatggaaaggaaaccgctgtcatatcaagttcaatcctcctgctaccgacttcacctatgcacaaaacaatacatggaccctcctgggaatcggactggcctttttgatgacccacattactgtggcagtgctgtgctttcttgccaaccggaaagtgccaatccgcaaaactgaggggtccggcaattgtgctttcgtcaaccctgtctacggaaattggagcaatccagagaagacggagtcttcggtgtatagcttctctaaccctctttatggtacaacgagcggaagtttggaaactctcagccatcatctgaagtag

SEQ ID NO: 311620 - DNA, 4461 bp, Artificial Sequence
  derived and/or modified sequence
ccccgggaccacagcctgaacgccagccagggccacttcatgttcattctgaagaagtcaagctcgctgtggcaggtcgccaaattacagtcccctactttttctcagacgggacccgggtgtatcctcagcttttggttttacaattatggattgagcgtgggagctgccgaactgcaactgcacatggagaactctcatgactctaccgtgatctggcgagtcctctataaccagggaaagcaatggctggaggccacgattcagctggggcgcctgagtcaaccttttcacttaagcttagacaaagtgtcactgggcatttatgatggcgtctcggcaattgacgatatccgattcgaaaactgtactctccccctgcccgcagaatcgtgcgagggacttgatcatttttggtgccgacatactagggcatgcatcgagaaactgaggctctgtgacctggttgacgactgtggagacagaacggatgaagttaactgtgcacccgagcttcagtgcaactttgaaaccggaatctgcaattgggagcaagacgccaaagatgacttcgattggacaagatcccaggggcccaccccaactttaaacacaggccccatgaaggataatacactggggactgccaagggacactatctgtacatcgagagctcagagccccaggcctttcaggactcagctgccctactctcaccaattcttaacgccactgatacaaaagggtgcacttttcgcttctactaccatatgtttggaaaacggatctatcggctcgccatctaccagcgtatttggtctgacagcaggggacagctcctttggcagattttcgggaaccaaggcaaccgatggattcggaaacatctgaacataagctccagacagcccttccaaattttggtcgaagcatcagtcggggatggatttaccggagatattgctatcgacgacctctcattcatggattgcactctgtaccccgggaacctgcccgccgatctccctacacctcccgagacatccgtcccagtgaccctgcctccccataattgcacagataatgaattcatctgccgctccgatggccactgtatagagaagatgcagaaatgtgatttcaagtatgattgccctgacaaatcagatgaagcaagctgtgtgatggaggtttgctcgttcgaaaagcggtcactgtgcaaatggtaccaacccatccctgtgcacctgctgcaggactccaacaccttcaggtggggccttggaaatgggataagtattcaccatggagaggagaaccaccgcccatctgtcgatcatacccagaacactactgacggctggtatttatatgccgactcaagtaacggcaaattcggtgacacggccgatatcctcactccaataatcagcctgacaggccctaaatgtactttggtgttttggactcacatgaatggtgccaccgtgggaagcctccaggtgcttataaaaaaggacaatgtgacctcaaaactctgggcccagaccggccagcagggagctcagtggaagcgtgctgaagtttttctaggaatccgcagtcacacacagatagtctttcgtgcaaagcgtgggatttcttatatcggagacgtggctgtcgacgacattagtttccaagactgctcgcccttactttcgcccgaacggaaatgtacagaccacgagtttatgtgtgccaacaaacactgcattgccaaggataagctgtgcgattttgttaacgactgcgccgacaattcagatgagactacattcatctgtcgcacttcttctggccgatgcgacttcgaattcgacttatgttcttggaagcaggaaaaagacgaagattttgattggaatcttaaggcgagtagcatccccgccgccgggactgagcctgccgctgatcataccctgggcaattcttcgggacactatatctttataaaaagcctgttcccccaacagccgatgcgcgccgccaggatctccagtcctgtcattagtaagcgtagcaaaaactgtaagattatctttcactatcatatgtatggcaatggaatcggggccctgaccctcatgcaagtcagcgtgactaaccagaccaaagtccttttaaacctgactgtggagcagggtaacttttggaggcgcgaggaactgtctctctttggggatgaagactttcagctgaagttcgagggccgggttggcaagggacagcgcggggatatcgcgttagacgacatcgttctcacggagaactgcctaagcctgcatgattccgtacaggaagaactggccgtgcccctgccaacaggcttttgtcctttgggttatagggagtgtcacaatgggaaatgctacaggcttgaacagagttgtaacttcgttgataattgtggggataataccgacgaaaacgagtgcgggagttcctgcactttcgaaaagggctggtgcggctggcaaaatagtcaggcagataacttcgactgggtcctcggcgtcggctcgcaccagtctctgcggccccctaaggatcataccttgggcaatgagaacgccattctgcttatgagacggcacaaataccccattaggagtgtcaatctgcatacagtgaaacacgtcctgaaagcccagacagtagggaattgctcagtctctaaactggaggctcgcctcttggacttcctgtctgttcctaacgagaacacattcgggagcagtgatcatactaattggcattttatgtacctcgaggcaactgccgttggcctgcgcggtgacaaggctcactttagaagcactatgtggagagaaagctcagcagcttgcaccatgtcgttttggtactttgtgtccgccaaggctacaggatctatccagatcttgatcaagcggggcaggaggaggaggcgcgccccaaatcctgttttgtcgggctcccccactatcccccgccaaggatctcagcagctgggggggtggcgtggtggtagcgcaaggcaccgggctagggcatttcctgaacctgaatgcccgcggggacggagtgctctattaaaaggcccccctcaggaaaaaccaaatcggaggtccgccctgctcagcgtcggcgaaatctccgaactgtgccccgaaataaccgattttctgtgccgggataagaaatgtatcgcatcccacctgttgtgtgactataaacccgactgtagtgacagatctgacgaggctcattgtgcccactacacatccaccacaggcagttgcaattttgagaccagtagcggaaactggactaccgcatgttctcttacacaagattctgaagatgacctggattgggctataggcagcagaatcccagcaaaggcgcttatacccgatagtgaccacactccaggcagcggacagcattttctgtacgtgaactcctcaggttccaaagaaggcagcgtggcccggattaccaccagcaaatctttcccagctagtctgggcatgtgtaccgtacgtttctggttttacatgattgacccaagaagtatggggatattaaaagtgtacacaattgaggaaagcggcctcaatatcctcgtgtggtctgtgatcgggaataaacgaactgggtggacttatggcagcgttcccttgagttctaactcgccctttaaagtcgcgtttgaggccgaccttgacggtaacgaggacatctttatcgcactggacgatatttcctttacaccggagtgtgtcactgggggccctgttccagttcagccatccccttgcgaggctgaccagttcagttgtatctataccctacagtgtgttcctctgtccggaaagtgtgacggacacgaggattgcatagacgggtctgatgagatggattgccccttgtcccctacaccgcccctgtgttccaatatggaatttccctgcagtactgacgagtgcatcccctctcttctactctgtgacggggttccagactgccacttcaacgaagacgagcttatctgctccaataagtcatgttcaaacggtgctttggtgtgtgcaagctctaacagttgcatacccgctcatcagaggtgtgatgggttcgccgactgcatggatttccaacttgacgagtcttcgtgctctgacacatggacgctgctgggcattggcttggcctttctaatgacgcacatcacagtagcagtcctttgcttcctggctaatcggaaggtgcccattaggaaaaccgagggatcgggaaactgcgctttcgtcaatccggtgtacgggaattggtctaatccggaaaagaccgagtcctccgtgtattctttttccaatcctctttatggcacaaccagcggaagcctggagaccctctcacatcacctgaaatag

SEQ ID NO: 311621 - DNA, 777 bp, Artificial Sequence
  derived and/or modified sequence
ctgaagttcgagggccgggtgggcaagggccagcggggcgacatcgctctcgacgacatcgttctcactgagaattgcttatcgctccacgatagcgtacaggaagagctggcagtgccgcttccgacagggttttgtccgctcggatatagggaatgtcataacggaaaatgctatcgcctggagcagagctgcaattttgtcgacaattgtggggataacacagatgaaaacgaatgtggatccagttgcactttcgagaaaggatggtgtggatggcagaactcccaggccgacaatttcgattgggtccttggcgtaggctcacaccagagcctgaggccgcccaaggatcacacactggggaacgaaaacggacatttcatgtacctggaagctaccgcagtggggctgcggggcgacaaggctcacttcaggagcacaatgtggcgggaatcaagtgccgcttgtaccatgtccttctggtactttgtgtctgccaaagccactggctccatccaaatcctgattaaaaccgagaagggactctccaaggtgtggcaggaaagcaaacagaatcctgggaatcactggcagaaagctgacattctattgggtaagctgaggaatttcgaagtgatttttcagggaattcggacacgcgatctgggcggcggtgcagcaattgacgacattgagttcaagaattgcacaacagtgggggaaatctccgagctctgtcccgagatcacagattttctgtgccgagacaagtag

SEQ ID NO: 311622 - DNA, 4422 bp, Artificial Sequence
  derived and/or modified sequence
atgttcatcctgaagaagagcagcagcctgtggcaggtggccaagttgcaatcccccactttcagtcagaccgggcctgggtgcatcctcagtttttggttctacaactacggcctcagcgtgggggccgccgaactgcagttgcatatggaaaacagtcatgactccacagtcatttggcgcgtgctctacaaccagggtaagcagtggctggaggctactatccagttgggccggctgtcgcagccatttcacctgtcattagataaagtatctctgggcatttacgacggcgtctcagcaatcgatgatatccgcttcgaaaactgcacgctgccccttcctgccgaaagttgcgaaggacttgaccacttctggtgccgtcataccagagcctgtattgaaaagctcagactgtgcgacctcgtggacgactgcggggatcggacagatgaggtaaattgtgcgccagagctccagtgcaatttcgaaaccggaatctgcaattgggagcaggacgcgaaagacgattttgactggactcgctctcaaggaccaacccctaccctcaataccggtccgatgaaagacaatactctcggcacagcaaaggggcactatctctacatcgaaagttcagaaccccaggcattccaggactccgccgctttactgtctcctatactgaatgccacagacaccaaagggtgcacctttcggttttattaccatatgttcggcaagcgcatatacaggctggccatttatcagcgcatatggagcgatagtaggggtcagctgctctggcaaatcttcgggaatcaagggaaccgctggatacgtaaacatctcaatatctcctcgagacaaccattccagatcttagtcgaggcttctgttggggacggattcactggcgatatagctatagatgacctcagttttatggactgcaccctgtacccgggaaatctgcccgcagatctcccaacaccacccgaaacgtcagtgccagtgacattgcccccccacaattgtaccgataacgagtttatctgtcggtcagatggtcattgtattgagaaaatgcagaaatgtgactttaagtatgactgccctgacaagtccgatgaggccagctgcgtcatggaagtctgttcctttgagaagcgaagcttgtgtaagtggtatcagccaatccctgtgcacctcctgcaagattccaacacgttcaggtgggggctgggcaatggcatcagcatccaccacggggaggaaaatcatcgaccctcagtggatcacactcagaacacgacagatgggtggtacctttacgcagactcttctaacggcaagtttggagacacggcagacattcttacgcccataattagtctcaccggtccaaaatgcactttggtcttttggacacacatgaacggagccactgtaggcagcctccaggtgctcatcaagaaggacaacgttacatccaagctgtgggctcaaactggacagcaaggggctcagtggaaacgtgccgaagtcttccttggcatccgcagccacacgcaaattgtttttagggcaaaaaggggcattagctacatcggtgatgtggctgtggatgacatttcctttcaagactgtagccctctgctttccccggagcggaaatgcactgatcatgaatttatgtgtgctaataagcactgtatagcaaaagacaaactatgtgatttcgtcaatgactgtgccgataattccgacgagacaaccttcatttgccgaacctccagcggaaggtgcgatttcgagtttgatctgtgttcttggaaacaggagaaggatgaggattttgactggaacctcaaagcctcctctattccagctgcgggcaccgaaccggccgctgaccacacccttggcaacagctccggccattatatcttcataaaatccctgtttcctcagcagccgatgagggctgcccggatcagctcccctgtaatttctaaaaggtcaaaaaattgcaagatcatcttccactaccacatgtacggcaacggaattggtgccttaacactcatgcaagtctccgttaccaatcaaacaaaggtcttacttaatctgacagtagaacagggcaacttttggcggcgcgaagagctcagcctgtttggtgatgaggatttccagctcaagtttgaggggagggttggcaaggggcaaagaggcgacatcgccctggacgatatcgtgcttactgagaattgcttgtcgttgcacgattcagtgcaggaggagcttgctgtgccgctgcctacagggttttgccccctggggtaccgggaatgtcacaatggaaaatgctaccggcttgaacagtcttgtaatttcgttgacaattgcggagacaataccgatgagaacgagtgtggctccagttgcacctttgagaaggggtggtgtgggtggcaaaacagtcaggcagacaatttcgactgggtgttgggagtgggatctcatcagtctctgcgacccccaaaagaccataccctcgggaacgagaatgccattctcctgatgcgccgccataaatatcccattcgctctgtgaacctgcacactgtcaagcacgtgctgaaggcccagactgtggggaactgctcggtcagcaagttggaggctcggcttctcgacttcctctctgtgccaaatgaaaacacctttgggtcctctgaccataccaactggcactttatgtatctcgaagcaaccgccgtggggctcagaggtgacaaggcccattttcgcagcactatgtggcgtgagtccagtgccgcctgtacaatgtccttttggtatttcgtctccgctaaggctaccggttcaatccagatcctgataaaacgcgggcgtcgtagacgccgggctcccaacccggtgctgagtgggagtcctaccattccccgccagggttcgcaacaactagggggctggaggggcgggtcagccagacaccgcgctagggctttcccagagcctgaatgcccgagaggacggtctgcactcctgaaaggtcccccacaggagaaaccaaaccgcagaagcgctctgctgagtgtaggcgagattagcgaactctgcccggaaattaccgacttcctgtgccgagacaaaaaatgcattgcctctcatctcctgtgcgattataaaccagattgctcagatcgatccgacgaagcacactgcgctcattacacctctaccaccggatcttgcaactttgaaaccagcagcggtaattggactacagcctgttcccttacacaggacagcgaggacgatttggattgggcgatcggcagccgtatccccgccaaagcccttatccctgacagcgaccacactcctggctcaggccagcacttcctatatgtgaattcatccggctccaaagagggctccgttgctcggatcaccacttcaaagtcttttccagcctctttggggatgtgtacagtgcggttctggttttacatgatcgatcccaggagtatgggcatacttaaggtctacacaatcgaggaatcaggactcaatattcttgtgtggagcgttattggcaataagcggacggggtggacctatggctccgtaccactatcgtctaacagccccttcaaggtggccttcgaggcagatttggacggaaatgaggatatctttattgcactcgatgatatctcctttactcccgaatgcgtgacgggaggcccagtccccgtgcagcctagcccttgcgaggccgaccaattctcctgcatatatacgctgcaatgtgtgccactgtctggtaaatgcgatggccatgaagattgtattgacggctctgacgagatggactgtcctctctctcctaccccaccactatgttctaatatggagttcccatgctccactgatgagtgcatcccaagcctgctgctctgcgacggcgtgccagactgccattttaacgaagacgagctgatctgctcaaacaaaagctgcagtaatggtgcattagtttgcgcaagcagcaattcatgtattccagctcaccaacggtgtgatggttttgccgattgtatggatttccagctagacgaaagcagttgctctgatacctggactctcctcggaatcggactagcctttctgatgacccacataacagtcgctgtcttgtgttttctggctaacagaaaggtaccaatccggaagacggagggatccggtaattgcgcgttcgtcaaccccgtgtatggaaattggagtaaccctgagaagaccgagagtagcgtttactcattcagcaaccccctgtatgggactacctctgggagtcttgagactctttctcatcacttgaagtag

SEQ ID NO: 311623 - DNA, 1053 bp, Artificial Sequence
  derived and/or modified sequence
atgtgcaccgtgcggttctggttctacatgatcgacccccggagcatgggcattctaaaggtttatacgatcgaagaatctggccttaacatactggtgtggtcagttatcggcaataagagaacgggttggacatacgggtccgtgcccctgagttcaaacagtccattcaaagtggcatttgaggccgatctggacgggaatgaagacattttcattgcacttgatgacatatcatttactcccgagtgcgttaccggaggacctgtccctgtgcagccgagcccatgcgaggcagaccagttctcctgtatttacacgttgcagtgcgttcctctgtcagggaagtgtgatgggcatgaggactgtatcgacggctctgacgagatggattgtcccctgtctccaacccccccactctgcagtaacatggaatttccctgcagtacagatgaatgcattcccagcttgctcttgtgcgatggggtcccagattgtcattttaacgaggacgagctgatttgcagcaacaagtcctgctccaatggagctttagtgtgcgcgtcatcaaatagctgtattccggctcatcagcgctgcgacggcttcgccgattgcatggatttccagctggatgagtcaagttgttcggagtgtccactgaactattgccggaacggggggacctgtgtcgttgagaagaacggtcctatgtgtcgatgtcgacagggatggaagggaaatcgctgtcacatcaagttcaatccaccagctaccgatttcacgtatgcacagaacaacacctggacgctattggggataggccttgcctttttaatgactcacatcaccgtggcagtcctttgttttctggcgaatagaaaggtgcccattcgtaaaacagaaggctcaggaaattgcgctttcgttaaccctgtgtatggaaattggagtaatccggaaaagactgaatctagtgtgtactcattctctaatccactgtatggaactacctctggctctttagagactctctcccaccacttgaagtag

SEQ ID NO: 311624 - DNA, 1524 bp, Artificial Sequence
  derived and/or modified sequence
taggaatgtccacgaggtcggagcgcacttcttaaggggcctccgcaggagaagcccaaccgtcgaagtgcactgctgagcgtcggtgagattagcgaactctgcccagaaattacagatttcctgtgtagagataagaaatgtattgcttctcatctgctgtgtgattataaacctgattgctctgaccggtcagacgaggcacactgtgcccactacacctccaccactggctcctgcaactttgagacttcctccggcaactggacaactgcctgcagtttgacccaggattcagaggacgacctcgactgggcaattggctcccgtatccctgccaaagctttgattcctgattctgaccacacacccggttctggccagcactttctctacgtaaattctagcggtagtaaggagggttctgtggcgaggatcacaacaagcaaaagtttcccagcttctctgggcatgtgcactgtgcggttctggttctacatgatcgatcccagatccatggggatcctaaaggtgtataccatcgaagagagcggactaaatattctggtctggtctgtcatcggcaacaagaggactggctggacgtacggatccgttccactgagctctaactcccctttcaaagttgccttcgaagccgatctggacggaaatgaggacatctttattgcactcgacgatatttcttttacacccgagtgcgttactggcggtccagtcccagtccagcctagtccttgtgaagctgaccagttctcctgcatttacaccctgcaatgcgtgcctctttccggcaagtgtgacgggcacgaggattgcatagatggctccgatgaaatggattgtccattgtcgcctacacctccactttgttcaaacatggaattcccctgttcgactgatgaatgcattccaagccttctcctgtgtgatggtgtccctgactgccacttcaatgaagatgagcttatttgctccaataagagctgcagtaatggggcattagtgtgtgcctcctccaattcctgtatcccggcacaccagcgctgtgatggctttgccgactgcatggactttcaactggacgagtcaagttgttctgaatgtccgttgaattattgccggaacggtgggacatgcgtggtcgaaaagaacggcccaatgtgccgatgtaggcagggatggaaagggaacaggtgccatattaaatttaacccccctgctaccgattttacctacgcccagaacaatacatggacactgctaggtattgggttggcattcctgatgactcacataactgtagctgtgctctgcttccttgcgaatagaaaggtgccaattcgaaaaactgaaggctctgggaactgcgcttttgtgaacccagtgtacggcaattggtctaatcccgaaaaaacggaatccagcgtgtattctttttcaaaccctttatacggtaccacttctggttctctagaaaccctgtctcatcacctaaagtag

SEQ ID NO: 311625 - DNA, 4461 bp, Artificial Sequence
  derived and/or modified sequence
ccacgggatcactcattaaacgccagccaggggcactttatgtttatcctgaagaaatcatcctctctctggcaggtggcaaagttgcagtccccaacttttagccagacgggacccggatgtatactgtcattttggttctataattatggcctttccgtgggcgctgccgaattgcagctgcacatggagaactcacatgattccaccgtcatctggcgcgtgctatacaaccaggggaagcagtggcttgaggcaaccattcagctgggccgactgtctcagccctttcatctctccctggacaaggtgagcctgggaatttatgatggcgtgtctgccatcgacgacataagatttgaaaattgtactctgcctcttccagccgaatcatgcgaaggcctcgaccacttttggtgccggcatacccgcgcatgtattgaaaaactgaggctgtgtgatctggtggacgattgcggcgatcgaaccgacgaggtgaattgcgcaccggaattacagtgtaattttgaaacaggaatctgcaactgggagcaggatgcgaaggacgatttcgactggacacggtctcagggcccaacccccacacttaacacaggacccatgaaggacaacacgctagggacagcgaaaggccactacctctatatcgaaagctcagagcctcaagcgtttcaggactcagccgctttattgagccccatcctgaatgctaccgatacaaaaggatgcacgttcaggttctactatcatatgtttgggaagagaatttaccggttagccatctaccaacggatttggagcgattctagaggccagcttctttggcagatctttggcaatcagggtaacaggtggatccggaagcaccttaacatttcaagccgacagcctttccagatccttgttgaagcatcggtgggggacggctttactggagacatcgcaattgatgacctatccttcatggactgcaccctgtatccaggcaacctgcctgccgatctaccaacaccacccgaaacatccgtgcctgttactctgccccctcacaactgcaccgataatgaatttatttgtaggtccgacggacattgtatcgagaaaatgcagaagtgtgacttcaagtatgattgtcccgataagagcgatgaggcgtcctgtgtcatggaagtgtgctcgttcgaaaagcgatccctatgcaagtggtatcaacccatccctgttcatcttcttcaggatagtaacacatttcggtggggactcggcaatgggataagcattcatcacggggaggaaaaccaccggccatctgtcgaccatacccagaacactactgatggttggtacctgtacgctgacagctcaaacggaaagtttggagacaccgcagatatcctcactccaatcattagtctgacgggcccaaagtgtaccttagtgttttggacgcacatgaatggcgcaacagttggtagcctccaggtcctgatcaaaaaagataacgtgacgtctaagctgtgggcccaaacggggcagcaaggagctcagtggaagcgggcagaagtgtttttggggattcgcagtcatacacaaattgtgttcagagcaaagagagggattagttacatcggagacgtcgctgtggatgatatatcctttcaagactgcagccccttgctgagtcctgagagaaagtgcacagaccatgaattcatgtgcgctaacaagcactgtatcgccaaggataaactgtgcgacttcgtcaatgattgcgcagacaattccgacgagaccacattcatctgtcggacgagcagcggacggtgcgacttcgaatttgatttgtgtagctggaaacaggagaaagacgaagacttcgattggaatttaaaggcttcaagtatccctgcagcgggaacggaaccagccgctgatcacactctcgggaattcgtctggccattacatcttcattaagtctctgttcccccagcagccgatgagagccgctcgaatttcatcccctgtcatctctaaaaggtcaaagaactgtaaaattatctttcactaccacatgtacggtaacgggattggggcacttaccctgatgcaggtttcagtgacaaatcagactaaggtgttgctgaaccttactgtggaacaaggcaacttctggcgacgcgaggagctcagtctcttcggcgatgaggacttccagctgaagtttgaaggtcgtgtaggaaaagggcagagaggagacatcgcactcgatgacatcgtactgacagaaaattgtctgagcctgcacgacagtgtccaagaggaacttgcggtaccgctgccaactggcttttgtcctctggggtatcgagaatgtcacaacggcaagtgctatcgcttagaacagtcctgcaacttcgtcgacaactgtggtgacaacacagatgaaaatgaatgcggtagttcctgcacgtttgaaaagggctggtgtggttggcaaaacagtcaggccgataacttcgattgggttctgggagtcgggagccaccagagcctgaggccacccaaggatcacaccctcggaaatgagaatgcaatcttactgatgcgtaggcacaaataccccattcggagtgtaaacttgcacacagtgaagcacgtgcttaaggcccagaccgtgggcaattgttctgtgtcgaagctcgaggcgaggctgcttgatttcttatcagtccccaatgagaacaccttcggctcctccgatcataccaactggcactttatgtatctggaggccactgcagttggattgcggggtgataaagcccacttccggtccaccatgtggcgggagagttccgccgcttgtacgatgagcttctggtattttgtaagcgctaaggcaacaggaagcattcagattttgatcaagcgcggtaggcggaggcgcagagccccaaatcctgttttgtccggaagtccaactatccccagacagggaagccaacagctggggggatggcgcggtggcagcgcccgacatcgagccagggcttttccagagccggaatgtcccagaggcagatccgcacttctgaagggccctccgcaagaaaagccaaacagacgctccgcattgctttctgtgggcgagattagcgagttgtgtcccgagattaccgactttctgtgtcgcgataagaaatgtattgcctcccacctcctgtgtgattacaagccggactgttctgatcggagtgatgaggcccactgcgcgcactacacatccacgactggttcttgcaatttcgagacctctagtggcaattggaccacagcttgctcactgactcaggactctgaggacgaccttgattgggccatcggttcccggattccagccaaggccttgatacccgactcggatcacactccaggcagcggacagcactttctgtatgtaaatagcagtggaagcaaggaaggatccgtggccagaattaccactagcaaatcatttccagcttcacttggaatgtgtacagtgcggttctggttttacatgatcgatcccaggtctatgggtattcttaaggtgtatactattgaggaatccggtctgaacattctcgtctggtcagtaattggtaataaacgaaccggatggacctatggttccgttccattgtcctctaattcaccattcaaagtggcgtttgaggcggacctggatggaaacgaggatatctttatcgctcttgatgatatttctttcaccccggagtgcgttacgggcggaccagtgcccgtccagcccagtccctgcgaagcggaccagtttagctgtatttataccttacagtgtgtccccttgtctggcaaatgcgacggtcatgaagattgcatcgacgggagcgatgaaatggattgcccactgtcccccactcctccactgtgctctaacatggaattcccctgctcaactgatgagtgcattccttccttgctgttatgcgatggggttcctgattgccacttcaacgaggacgagctgatctgcagcaataagtcctgtagtaacggcgcacttgtctgtgcatcctccaattcatgcattccggcacatcagagatgtgacggcttcgccgattgtatggattttcaactggacgaatccagttgctcagatacatggaccctcctgggaataggcctggcatttctgatgacacatattacggtggcagtcttatgtttcctagcaaaccgtaaggtacccatcagaaagactgagggctcaggtaactgcgctttcgtcaacccggtgtacggcaactggagtaacccagaaaaaacagagagcagtgtgtactcattctccaaccccctttatggcaccaccagcggatccctggagacgctgtcccatcatctcaagtag

SEQ ID NO: 311626 - DNA, 777 bp, Artificial Sequence
  derived and/or modified sequence
ctgaagttcgaggggagagttggtaagggacagaggggcgatatagcattagatgacatcgtgctcaccgagaactgtctgtcccttcatgattcggtgcaggaggaactcgccgttcctctccccacaggattttgtccactcggctacagggagtgccacaatggaaaatgctaccgcctggaacagagctgcaactttgttgataactgcggggacaacaccgacgagaacgaatgtgggtcttcctgcacatttgaaaagggctggtgtggatggcagaactcacaggccgacaacttcgattgggtgctgggtgtcgggtctcatcaatctctgaggcctccgaaggaccatacacttgggaacgagaacggacacttcatgtatctcgaggccacagccgtaggtctccgaggagataaggctcactttcgctcaactatgtggagggagtcttctgccgcatgtactatgtcattctggtactttgtgtccgccaaagccaccgggtctatacaaatcttgatcaaaacagagaaaggcctctccaaggtgtggcaggagtccaaacagaatccaggcaatcactggcaaaaggccgacatactccttggaaagttgcgcaacttcgaggtcatattccagggtattcggacccgagacctaggcggaggagccgcaatcgacgacattgaattcaaaaactgtacaaccgttggcgaaatcagcgaattgtgccccgagatcacagattttctgtgcagggataaatag

SEQ ID NO: 311627 - DNA, 4422 bp, Artificial Sequence
  derived and/or modified sequence
atgttcattctcaagaaaagctcttcattgtggcaggtcgcaaaactccagagcccaacctttagccagaccggcccaggttgtatcctcagcttctggttctataactacgggctcagcgtcggagccgcagagcttcagctgcacatggagaactcccatgatagcacagtgatttggcgggtgctgtataatcaaggaaagcagtggctggaggcgaccatccagctgggtaggctttctcaaccgtttcatctgtcactcgataaggtatccctcgggatatatgatggtgtctccgcaattgatgatataagatttgagaattgtacgcttcccctgcccgcagagtcatgcgagggccttgatcatttctggtgcagacacacacgggcatgcatcgaaaaactgaggctgtgcgatctcgtggatgactgcggcgaccggacagacgaggtgaattgcgcccctgagttgcaatgtaatttcgagacgggtatctgcaattgggaacaggacgctaaagatgactttgactggacccggagccaaggccctacccctacactgaacacaggaccaatgaaagacaacacgctgggcaccgcaaaaggccactacctgtacattgagagtagcgagccccaggccttccaggattccgccgctttgctgagcccgattctgaatgcaacagatacaaaaggttgcacgtttcggttctactaccacatgtttggaaagagaatctaccggctggccatctaccagcggatctggagcgatagcagaggacagcttctatggcagatttttggcaaccaggggaatcgctggatccgcaaacaccttaatatctccagtcgccaaccctttcagatacttgttgaggcctccgttggtgacggcttcacaggcgatatcgccatcgacgacctgtcgttcatggattgcaccttgtacccaggtaatttgcctgccgacttacctacccctcccgaaacctctgtccctgtgaccttgccccctcataactgcactgacaacgagttcatttgtaggagcgatggacactgcattgaaaagatgcagaaatgtgatttcaaatacgactgccccgataagtctgacgaagccagctgtgtcatggaagtgtgtagtttcgagaaacggtcactgtgtaaatggtatcagccgatcccggtgcatctgctgcaggattcgaataccttccggtggggactggggaatggaattagtatccaccatggggaagaaaatcatcgcccatcggtggaccacactcagaatacaactgacggctggtatttatacgccgactcctccaatggaaagtttggagacaccgccgacattctcaccccgatcatctctttaacaggcccaaaatgcactctggtgttctggacccatatgaacggagccaccgttggttcgctccaggtcctcataaagaaggacaacgttaccagtaagctttgggctcagactggacagcagggcgctcagtggaaacgcgcagaggtattcctgggaataaggagtcatacccagatcgtgttccgggcaaaacggggaattagttatattggggatgtggccgtcgatgatatcagcttccaggactgcagcccgctcttgtctcccgaacgtaagtgcactgatcacgaattcatgtgtgcgaacaaacactgtattgccaaggacaagttgtgcgatttcgttaatgattgtgccgacaacagtgacgagactactttcatctgccggacttctagcggacgctgtgactttgaattcgacctgtgcagttggaagcaggagaaagacgaggattttgattggaacttgaaggcatcatcgatccccgctgctggaacagagcctgcggcagaccacaccctgggaaactcttcaggtcattacatttttatcaaatctctgttcccccagcagcctatgagggccgctcgcatatcctcgcctgtgatttcaaagagatccaaaaactgtaagatcatattccattatcacatgtacggtaacgggatcggtgccttgacactgatgcaggtctcagtgactaatcagaccaaggtgctactgaatctgaccgttgaacagggcaacttctggcgaagagaggaactgagcctgtttggagacgaagactttcaactgaaattcgaagggagggttgggaagggacaaaggggggacatcgcgttagatgatattgtcttgacagagaattgtctctctctccacgattctgtacaggaagagctggccgtgccactgccaacaggattttgtcccctcggataccgggagtgtcataacgggaagtgttatcggctggagcagagctgtaacttcgtagataactgtggagacaacaccgacgagaatgagtgtggctcctcatgtacatttgagaagggctggtgtggttggcagaattcccaagctgacaattttgactgggtcctgggtgttggaagccaccagtccctgcggccacctaaagatcacacacttggcaacgagaacgccatcctgctgatgcgtcggcataagtaccctatccggtcggttaatttgcacacagtcaagcacgtactgaaagctcagactgtgggtaactgttctgtgtctaaacttgaggctagactgctcgactttctgagcgtgcccaacgaaaacacttttgggtctagcgaccatactaattggcatttcatgtatcttgaagcaacagctgtcggtcttcggggagacaaggcgcacttcaggagcaccatgtggcgggaatcctcagccgcatgcaccatgagtttctggtactttgtttccgctaaagccaccggaagcatccaaattctcattaagaggggtcggaggcgacggagggctccgaaccctgtgctgagcggtagccctaccattccccgtcagggctcgcagcaactcgggggatggcgtggaggaagcgcccgacatcgcgctcgcgcttttccagagcctgagtgccctaggggtcggtctgctctgctcaaaggtccacctcaagagaaaccaaaccgacgcagcgctcttctatcagttggtgagattagcgaactgtgtcccgaaattaccgacttcttatgtcgtgataagaagtgcatcgcctcccatttgctgtgtgactataagcctgactgctctgaccggagcgatgaggctcactgtgcccattacacatcaaccactggaagttgcaatttcgagacgagctcaggtaactggacaacagcatgtagtcttactcaggactctgaggacgatctggactgggctataggatccaggatcccggctaaagctctgatccctgacagtgaccacacaccaggcagtggccagcactttctgtacgtcaactcctcagggagcaaggaagggagcgtggccagaatcactactagcaagagctttccagcttcgttgggcatgtgcacagttcgcttctggttctatatgattgatccaagatccatggggattcttaaggtgtataccattgaagagtctgggcttaacatcttggtatggagcgtgatcggaaataaacggacaggatggacttatggatccgtacccctttcttcgaactccccttttaaggttgcttttgaggccgacctcgatggcaacgaggatatattcattgctttagatgatatttcattcacacccgaatgtgtaacaggtggtccggtacccgtccagccttccccctgcgaggcagatcaatttagttgtatttacaccctccagtgcgtaccactctcggggaaatgcgatggtcacgaggattgcatagatggaagtgacgagatggattgtccactctccccaacaccacccctttgctcaaacatggagttcccatgcagcaccgatgaatgtattccaagtttgttgctctgcgatggtgtgccagattgtcactttaatgaagatgaactcatctgttccaacaagtcctgctctaacggagctctggtttgtgcatcctctaattcctgcattccagcgcatcaacgctgcgatggtttcgccgattgcatggattttcagctcgatgaatcttcgtgcagcgacacttggaccctgcttggaattgggctagcattcctgatgacacacattaccgtcgcagtgctgtgtttcctcgctaaccggaaggtcccgatccggaaaacggaaggaagtggaaactgcgccttcgtcaatcctgtttatgggaactggtccaaccccgagaagacagagagcagcgtttattcattctctaaccctctttacggtaccacatcaggctccctggagactctaagccaccacttgaagtag

SEQ ID NO: 311628 - DNA, 1053 bp, Artificial Sequence
  derived and/or modified sequence
atgtgtacagtacgtttttggttctacatgatcgatccaaggtctatgggcatcctgaaagtgtacacaatcgaggaaagcggcctgaacatcctcgtatggagcgtgatcgggaataaacggaccggctggacctatggcagtgtgcctctcagcagcaattctccttttaaggtggccttcgaggcggaccttgatgggaacgaagatatttttattgccctggacgacatatcctttacacccgaatgcgtgactggcggtcccgttccagtgcagcccagcccctgcgaagcggaccaatttagctgtatttacacattacagtgtgtcccactctcaggcaagtgtgacgggcatgaggactgcatagatggaagtgacgagatggattgtcctctaagcccgactccccctctgtgtagtaatatggagtttccctgcagcacagacgagtgtattcccagcttgttgctgtgcgatggcgttccagattgtcatttcaatgaagacgaactcatatgctctaacaagtcttgctcaaatggtgcgctcgtgtgcgcgtcatcaaatagttgcatcccagcccaccagagatgtgatggctttgcagactgtatggattttcagttggacgagtcatcttgttcggagtgtccgctgaactactgtcgcaatgggggaacttgcgtcgtggagaaaaacggcccaatgtgcaggtgccgtcaaggatggaaggggaatcggtgtcacataaaatttaatccacccgctaccgatttcacctacgcacagaacaacacctggacattattgggaataggtctcgccttcctcatgacccacataacagtagcggtcctttgctttctggcaaataggaaagtgccaatcaggaaaaccgaagggagcggaaactgcgcattcgtgaatcccgtctacggcaattggtctaacccagaaaaaaccgagagttcggtgtacagtttttcgaaccctttgtatggaacaacttcgggatcactggaaactcttagtcaccatcttaaatag

SEQ ID NO: 311629 - DNA, 240 bp, Artificial Sequence
  derived and/or modified sequence
atgcatcatgtccggcagctcatgatgccaatctgcccaatggctctgaatagcacaactagttctagcaccacatttggtgcatttagaattatgacactgaacgtggaagagtgggctaccgcatggaaagtgctgattcttctagaggcagcagtggaagaagagaagcgctcagaagaaaagcgcattctggtttgcggaacctgtggaacccgcagttctcagaaaaatctgtag

SEQ ID NO: 311630 - DNA, 759 bp, Artificial Sequence
  derived and/or modified sequence
atggccccacggagggcccgtggttgtcgcacactgggtcttccagctctgctgttactcttgctgttgcgtcctcccgctactagggggattacttgtccccccccaatgtcagtcgagcatgccgatatttgggtaaagagctacagtctctactcacgcgagaggtacatctgtaacagtgggtttaagaggaaagccgggacgtcatctttaactgaatgcgtattaaacaaggcaactaacgtggcccattggactactccaagtcttaaatgcattcgcgacccagccctggtgcatcaaaggcccgctccaccgtcgaccgtgaccacggccggagtgacgcctcagcctgagagcctctccccatccggcaaggaaccagctgcatcttcaccttcttcaaataacactgcggccaccacagccgccattgtacccggatctcagctgatgcccagcaaatccccctccaccggtacgaccgaaatttccagccacgagtcatcacacggtacccctagtcaaaccaccgccaagaattgggaacttactgcatcagccagtcaccagcctccaggtgtctacccgcaaggccacagcgacaccacagtagctatcagcaccagcacggtgttgctctgcgggctgtcggctgttagtttacttgcctgctacctcaaatcacgcgccagtgtctgttcttgccatccgaggtccgccgggcatacctgttctgtggggagcgtgtgttag

SEQ ID NO: 311631 - DNA, 564 bp, Artificial Sequence
  derived and/or modified sequence
atggcgccaaggcgcgcacgaggctgtcgaacactgggccttcccgccttgctgctgctgctcttgctccggcccccggcaacacggggtgacccagcgctggtccaccagcgccctgctcctccgtccacggtcacaacagcaggcgttacgccacagcccgaatcactgtccccatctggtaaagagcctgctgcctcctcccctagttctaacaataccgccgctactaccgccgcaatagtccctggaagccagctgatgccaagcaaatccccttccacaggcacaacagagatatctagccacgaaagcagccatgggacaccatcccagaccacagccaagaattgggagctgaccgccagcgcttctcaccagccgcccggggtctatcctcagggccactccgatactacagtggccatttccacttcgacagtactgctttgtggtttgtcagccgtgagcctgctggcttgttatctgaaatccagggcgagcgtatgttcctgccacccgcgaagcgcagggcatacgtgttctgttggctctgtatgttag

SEQ ID NO: 311632 - DNA, 660 bp, Artificial Sequence
  derived and/or modified sequence
atggctccccggcgcgcccggggatgtagaacccttggtctgccggccctgctgctgttgttgctcctgcggcctccagccacacggggcattacctgtcctccacccatgtctgttgaacacgccgacatttgggtgaagtcctattctctgtactcacgggaacgctatatttgtaatagtggcttcaagagaaaagctgggacaagcagtcttactgagtgtgtgttgaacaaggccactaacgtggcccattggaccaccccgagcctgaagtgtattaagcctgcagcctcctcccccagcagcaacaatactgcagccactaccgccgcaatcgttcctggcagtcaactgatgccgagtaagtccccatctactggtacgactgagatcagctcacacgagtcaagtcacgggaccccaagccagacgaccgctaaaaattgggagctgacggcttctgcgtcacaccagccccctggtgtatatccccaggggcactctgatacaactgtggccatctctacaagtactgtgttgctctgcggtctttctgccgtgtctctgctggcgtgctaccttaaaagtagagcctccgtgtgtagctgccatccccggagtgcagggcacacgtgttctgtcggaagcgtctgttag

SEQ ID NO: 311633 - DNA, 759 bp, Artificial Sequence
  derived and/or modified sequence
atggccccgcggcgggcgcgcggctgccggaccctcggtctcccggcgctgctactgctgctgctgctccggccgccggcgacgcggggcatcacgtgccctccccccatgtccgtggaacacgcagacatctgggtcaagagctacagcttgtactccagggagcggtacatttgtaactctggtttcaagcgtaaagccggcacgtccagcctgacggagtgcgtgttgaacaaggccacgaatgtcgcccactggacaacccccagtctcaaatgcattagagaccctgccctggttcaccaaaggccagcgccaccctccacagtaacgacggcaggggtgaccccacagccagagagcctctccccttctggaaaagagcccgcagcttcatctcccagctcaaacaacacagcggccacaacagcagctattgtcccgggctcccagctgatgccttcaaaatcaccttccacaggaaccacagagataagcagtcatgagtcctcccacggcaccccctctcagacaacagccaagaactgggaactcacagcatccgcctcccaccagccgccaggtgtgtatccacagggccacagcgacaccactgtggctatctccacgtccactgtcctgctgtgtgggctgagcgctgtgtctctcctggcatgctacctcaagtcaagggcctctgtctgctcctgccatccccgcagtgctggacatacatgctcagtgggaagcgtctgttga

SEQ ID NO: 311634 - DNA, 564 bp, Artificial Sequence
  derived and/or modified sequence
atggccccgcggcgggcgcgcggctgccggaccctcggtctcccggcgctgctactgctgctgctgctccggccgccggcgacgcggggagaccctgccctggttcaccaaaggccagcgccaccctccacagtaacgacggcaggggtgaccccacagccagagagcctctccccttctggaaaagagcccgcagcttcatctcccagctcaaacaacacagcggccacaacagcagctattgtcccgggctcccagctgatgccttcaaaatcaccttccacaggaaccacagagataagcagtcatgagtcctcccacggcaccccctctcagacaacagccaagaactgggaactcacagcatccgcctcccaccagccgccaggtgtgtatccacagggccacagcgacaccactgtggctatctccacgtccactgtcctgctgtgtgggctgagcgctgtgtctctcctggcatgctacctcaagtcaagggcctctgtctgctcctgccatccccgcagtgctggacatacatgctcagtgggaagcgtctgttga

SEQ ID NO: 311635 - DNA, 660 bp, Artificial Sequence
  derived and/or modified sequence
atggccccgcggcgggcgcgcggctgccggaccctcggtctcccggcgctgctactgctgctgctgctccggccgccggcgacgcggggcatcacgtgccctccccccatgtccgtggaacacgcagacatctgggtcaagagctacagcttgtactccagggagcggtacatttgtaactctggtttcaagcgtaaagccggcacgtccagcctgacggagtgcgtgttgaacaaggccacgaatgtcgcccactggacaacccccagtctcaaatgcattaagcccgcagcttcatctcccagctcaaacaacacagcggccacaacagcagctattgtcccgggctcccagctgatgccttcaaaatcaccttccacaggaaccacagagataagcagtcatgagtcctcccacggcaccccctctcagacaacagccaagaactgggaactcacagcatccgcctcccaccagccgccaggtgtgtatccacagggccacagcgacaccactgtggctatctccacgtccactgtcctgctgtgtgggctgagcgctgtgtctctcctggcatgctacctcaagtcaagggcctctgtctgctcctgccatccccgcagtgctggacatacatgctcagtgggaagcgtctgttga

SEQ ID NO: 311636 - DNA, 759 bp, Artificial Sequence
  derived and/or modified sequence
atggccccccggcgggcccggggctgcaggaccctgggcctgcctgccctgctgctgctgctgctgctgcggcccccagccacccggggcatcacctgccccccacccatgtctgtggagcacgccgacatctgggtgaagagctacagcctgtacagccgggagcgctacatctgcaacagcggcttcaagaggaaggccggcaccagcagcctgacagaatgtgtgctgaacaaggccaccaacgtggcccactggaccacccccagcctgaagtgcatccgggaccctgccctggtgcaccagaggcctgccccacccagcacagtgaccacagctggggtgaccccccagcctgagagcctgagccccagcggcaaggagcctgctgccagcagccccagcagcaacaacacagctgccaccacagctgccatcgtgcccggcagccagctgatgcccagcaagagccccagcacaggcaccacagagatcagcagccatgagagcagccacggcacccccagccagaccacagccaagaactgggagctgacagccagcgccagccaccagcccccaggagtgtacccccagggccacagcgacaccaccgtggccatcagcaccagcacagtgctgctgtgtggcctgtctgctgtgtccctgctggcctgctacctgaagagccgggcctctgtgtgcagctgccaccccaggtctgctggccacacctgcagcgtgggctctgtgtgctag

SEQ ID NO: 311637 - DNA, 564 bp, Artificial Sequence
  derived and/or modified sequence
atggccccccggcgggcccggggctgcaggaccctgggcctgcctgccctgctgctgctgctgctgctgcggcccccagccaccaggggggaccctgccctggtgcaccagaggcctgccccacccagcacagtgaccacagctggggtgaccccccagcctgagagcctgagccccagcggcaaggagcctgctgccagcagccccagcagcaacaacacagctgccaccacagctgccatcgtgcccggcagccagctgatgcccagcaagagccccagcacaggcaccacagagatcagcagccatgagagcagccacggcacccccagccagaccacagccaagaactgggagctgacagccagcgccagccaccagcccccaggagtgtacccccagggccacagcgacaccaccgtggccatcagcaccagcacagtgctgctgtgtggcctgtctgctgtgtccctgctggcctgctacctgaagagccgggcctctgtgtgcagctgccaccccaggtctgctggccacacctgcagcgtgggctctgtgtgctag

SEQ ID NO: 311638 - DNA, 660 bp, Artificial Sequence
  derived and/or modified sequence
atggccccccggcgggcccggggctgcaggaccctgggcctgcctgccctgctgctgctgctgctgctgcggcccccagccacccggggcatcacctgccccccacccatgtctgtggagcacgccgacatctgggtgaagagctacagcctgtacagccgggagcgctacatctgcaacagcggcttcaagaggaaggccggcaccagcagcctgacagaatgtgtgctgaacaaggccaccaacgtggcccactggaccacccccagcctgaagtgcatcaagccagctgccagcagccccagcagcaacaacacagctgccaccacagctgccatcgtgcccggcagccagctgatgcccagcaagagccccagcacaggcaccacagagatcagcagccatgagagcagccacggcacccccagccagaccacagccaagaactgggagctgacagccagcgccagccaccagcccccaggagtgtacccccagggccacagcgacaccaccgtggccatcagcaccagcacagtgctgctgtgtggcctgtctgctgtgtccctgctggcctgctacctgaagagccgggcctctgtgtgcagctgccaccccaggtctgctggccacacctgcagcgtgggctctgtgtgctag

SEQ ID NO: 311639 - DNA, 759 bp, Artificial Sequence
  derived and/or modified sequence
atggccccccggcgggcccggggctgccggaccctgggcctgcccgccctactgctgcttcttcttttaagaccccccgccacaagaggaatcacctgtcctccaccaatgtccgtagaacacgctgacatctgggttaagtcctacagcctgtattctcgtgagagatacatctgcaactcaggctttaagcgaaaggcaggaacctcatcgctaacagagtgtgttttgaacaaggcaactaatgtggcgcattggactaccccttcattgaagtgcatacgggatcccgctctagtgcaccaacggccagccccaccttccacagtgactacagctggcgtgactccccagccagagtcactgtcccctagtgggaaggagcctgctgcaagcagtccaagcagtaataataccgccgccactaccgccgccattgttccagggtcacagctgatgcctagcaagtctccatctacaggcactacagagatctcttcacatgagtcctcccatggtacgccatcccagactacagctaagaattgggagcttacagcctcggccagtcaccagcctcccggggtgtatccacagggacactccgataccaccgtggccatatccacgtctaccgttcttctgtgcggattatccgctgtgagtctgctcgcgtgctatctcaagtcccgtgcttctgtctgcagctgccacccccggtcagctggacacacttgctcagtggggtccgtatgctag

SEQ ID NO: 311640 - DNA, 564 bp, Artificial Sequence
  derived and/or modified sequence
atggccccccggcgggcccggggctgccggaccctgggcctgcccgccctcttgctactgttactcctacgacctcccgccacaaggggggatcctgcgctggtgcatcagcggccagctcctccgagtactgttacaacagccggcgttacaccccagccagagagtttgtcccctagtgggaaggagcccgcagccagctccccatccagcaacaataccgcagccaccaccgcagccattgttcctggtagtcagctgatgccttcgaaaagccccagcacaggaactaccgagatatcgagccatgagagttcgcatggcaccccctctcaaacaaccgcaaagaactgggagctcaccgcttcagcctctcaccagcctccaggggtgtaccctcaaggccattccgacactactgtggccatttctacgtcgacagtgctgctgtgtggactctcggctgtttctctgctcgcttgctacttaaaatcccgagccagcgtatgttcctgtcatcctcgctctgcgggtcatacatgtagcgtaggcagtgtgtgctag

SEQ ID NO: 311641 - DNA, 660 bp, Artificial Sequence
  derived and/or modified sequence
atggccccccggcgggcccggggctgccggaccctgggcctgcccgctttactgctgctgttactgctgcggcctcctgctacccgcggaataacttgtcccccacccatgagtgtggagcatgctgacatatgggtgaagtcgtattctctctattctcgcgagaggtacatctgtaacagtggattcaaacgcaaggccggtactagtagcctgactgaatgcgtcctgaataaagcgacaaatgtggcacattggactactccttccctgaagtgcatcaagcctgccgcttcaagtcctagttctaataataccgccgccacaaccgccgcaattgtacccggtagtcaactcatgccatccaaatctccatctacgggaacaaccgaaatctcatcacacgagtcttctcatgggacgcccagtcagaccacagccaagaactgggagcttactgctagcgcctcccatcagccaccaggagtgtatcctcagggacatagtgacaccacagtcgccatttcaacgtcgaccgttcttctgtgtggcctgagcgccgtttccctgttggcctgttatctgaagtccagggcctctgtctgttcctgtcatcctaggtcggcaggacacacctgtagtgtgggctctgtatgttag

SEQ ID NO: 311642 - DNA, 759 bp, Artificial Sequence
  derived and/or modified sequence
atggcaccgcgacgcgctaggggttgcaggaccctgggactcccagccctgctgctcttgctactgctgcggccacccgctacccgcggaataacctgccccccacccatgagcgtggaacacgccgatatttgggttaagtcttattcactgtatagccgtgaaagatacatctgcaattcggggtttaaaagaaaggctgggacctcaagtctaaccgaatgcgtcctgaacaaggcaacgaatgtagcccactggactaccccttcccttaagtgtatcagggacccagcactggttcatcagcgcccagccccaccatcaaccgttacaacagctggcgtgacaccccagcccgagtcactatcaccatcaggcaaggagccggctgcctcctcacctagttctaataacactgccgctaccacagccgcaatagtccccggatcccagttaatgccatctaaatccccaagcacaggcacaaccgaaatttcttctcatgaaagctctcatggtactccatctcagacaactgcaaaaaactgggagttaacggcctcggcatcccatcagcctccgggagtgtacccgcagggacactccgacacgaccgtggccatttccactagcaccgttctgctctgtggactgtcagcagttagtttgctcgcatgttacttgaaatcacgagcatccgtgtgttcatgtcacccgcgatcagcgggacatacctgtagcgtcggcagcgtctgttag

SEQ ID NO: 311643 - DNA, 564 bp, Artificial Sequence
  derived and/or modified sequence
atggcgcctaggcgcgctcgaggatgtcgcacactcggattacccgctcttttgctattgctgctgttacgaccccctgcaactcggggagatcctgccctcgttcatcagcggcctgcccctcccagcacggtcacgacagcaggggtgactccccaacccgagagcctcagcccgtcaggcaaggaacctgctgcaagctctccatctagcaacaatacagccgcaactacggccgctatcgtgccgggtagtcagctcatgcctagtaagagcccctctaccggaacaaccgaaatatcttctcatgaatcatctcacgggaccccctctcagaccacagcaaagaactgggagttgactgctagcgcaagtcatcaaccaccaggtgtgtatcctcagggacactcggacacaactgtcgccatcagcacctccacagttctgttatgtggcctctctgcagtaagcctcctggcttgttaccttaagagtagagcttccgtgtgcagttgccacccacggtcagccggtcacacctgctctgttggctctgtgtgctag

SEQ ID NO: 311644 - DNA, 660 bp, Artificial Sequence
  derived and/or modified sequence
atggcgccacggagagctcggggatgtcgcaccttaggactgcccgctctgctgctcctccttctgctgcgtccgccagcaacgcgagggattacctgccccccacccatgagtgtggaacatgccgacatatgggtgaagtcttactcgctttactcccgtgaacgatatatctgcaactctggatttaaacggaaggctggcacctcctcactcaccgaatgcgtacttaataaggccaccaatgttgcacattggaccacaccaagtctgaaatgcataaaaccagcggcaagttcaccgtccagcaacaatactgccgcaacgactgcagccatcgttcctggtagtcagctcatgccaagcaaaagtcctagtacaggtacaaccgagatttctagtcacgagagctcccatggaaccccaagtcagacgaccgcaaaaaattgggaactgaccgccagcgccagtcatcagcctcccggagtctatccccagggccattccgacactacagtagccatctctacctcaactgtgctcttgtgtggactcagtgctgtgagtttgctcgcatgttatttgaagagtagggcatcagtttgcagctgtcacccacgaagcgccggtcatacctgtagcgtgggcagtgtatgttag

SEQ ID NO: 311645 - DNA, 759 bp, Artificial Sequence
  derived and/or modified sequence
atggcccccagaagagccagaggctgcagaaccctgggcctgcccgccctgctgctgctgctgctgctgagaccccccgccaccagaggcatcacctgccccccccccatgagcgtggagcacgccgacatctgggtgaagagctacagcctgtacagcagagagagatacatctgcaacagcggcttcaagagaaaggccggcaccagcagcctgaccgagtgcgtgctgaacaaggccaccaacgtggcccactggaccacccccagcctgaagtgcatcagagaccccgccctggtgcaccagagacccgccccccccagcaccgtgaccaccgccggcgtgaccccccagcccgagagcctgagccccagcggcaaggagcccgccgccagcagccccagcagcaacaacaccgccgccaccaccgccgccatcgtgcccggcagccagctgatgcccagcaagagccccagcaccggcaccaccgagatcagcagccacgagagcagccacggcacccccagccagaccaccgccaagaactgggagctgaccgccagcgccagccaccagccccccggcgtgtacccccagggccacagcgacaccaccgtggccatcagcaccagcaccgtgctgctgtgcggcctgagcgccgtgagcctgctggcctgctacctgaagagcagagccagcgtgtgcagctgccaccccagaagcgccggccacacctgcagcgtgggcagcgtgtgctag

SEQ ID NO: 311646 - DNA, 564 bp, Artificial Sequence
  derived and/or modified sequence
atggcccccagaagagccagaggctgcagaaccctgggcctgcccgccctgctgctgctgctgctgctgagaccccccgccaccagaggcgaccccgccctggtgcaccagagacccgccccccccagcaccgtgaccaccgccggcgtgaccccccagcccgagagcctgagccccagcggcaaggagcccgccgccagcagccccagcagcaacaacaccgccgccaccaccgccgccatcgtgcccggcagccagctgatgcccagcaagagccccagcaccggcaccaccgagatcagcagccacgagagcagccacggcacccccagccagaccaccgccaagaactgggagctgaccgccagcgccagccaccagccccccggcgtgtacccccagggccacagcgacaccaccgtggccatcagcaccagcaccgtgctgctgtgcggcctgagcgccgtgagcctgctggcctgctacctgaagagcagagccagcgtgtgcagctgccaccccagaagcgccggccacacctgcagcgtgggcagcgtgtgctag

SEQ ID NO: 311647 - DNA, 660 bp, Artificial Sequence
  derived and/or modified sequence
atggcccccagaagagccagaggctgcagaaccctgggcctgcccgccctgctgctgctgctgctgctgagaccccccgccaccagaggcatcacctgccccccccccatgagcgtggagcacgccgacatctgggtgaagagctacagcctgtacagcagagagagatacatctgcaacagcggcttcaagagaaaggccggcaccagcagcctgaccgagtgcgtgctgaacaaggccaccaacgtggcccactggaccacccccagcctgaagtgcatcaagcccgccgccagcagccccagcagcaacaacaccgccgccaccaccgccgccatcgtgcccggcagccagctgatgcccagcaagagccccagcaccggcaccaccgagatcagcagccacgagagcagccacggcacccccagccagaccaccgccaagaactgggagctgaccgccagcgccagccaccagccccccggcgtgtacccccagggccacagcgacaccaccgtggccatcagcaccagcaccgtgctgctgtgcggcctgagcgccgtgagcctgctggcctgctacctgaagagcagagccagcgtgtgcagctgccaccccagaagcgccggccacacctgcagcgtgggcagcgtgtgctag

SEQ ID NO: 311648 - DNA, 839 bp, Artificial Sequence
  derived and/or modified sequence
aaaagcgaaagcgaatgcgactggcggggcggcaggtcccagagcagcgctcgccacctccccccggcctgggcagcgctcgcccggggagtccagcggtgtcctgtggagctgccgccatggccccgcggcgggcgcgcggctgccggaccctcggtctcccggcgctgctactgctgctgctgctccggccgccggcgacgcggggcatcacgtgccctccccccatgtccgtggaacacgcagacatctgggtcaagagctacagcttgtactccagggagcggtacatttgtaactctggtttcaagcgtaaagccggcacgtccagcctgacggagtgcgtgttgaacaaggccacgaatgtcgcccactggacaacccccagtctcaaatgcattagagaccctgccctggttcaccaaaggccagcgccaccctccacagtaacgacggcaggggtgaccccacagccagagagcctctccccttctggaaaagagcccgcagcttcatctcccagctcaaacaacacagcggccacaacagcagctattgtcccgggctcccagctgatgccttcaaaatcaccttccacaggaaccacagagataagcagtcatgagtcctcccacggcaccccctctcagacaacagccaagaactgggaactcacagcatccgcctcccaccagccgccaggtgtgtatccacagggccacagcgacaccactgtggctatctccacgtccactgtcctgctgtgtgggctgagcgctgtgtctctcctggcatgctacctcaagtcaagtggtgctgttcttagctattcaggatga

SEQ ID NO: 311649 - protein, 203 aa, Artificial Sequence
  derived and/or modified sequence
MSVEHADIWVKSYSLYSRERYICNSGFKRKAGTSSLTECVLNKATNVAHWTTPSLKCIRDPALVHQRPAPPSTVTTAGVTPQPESLSPSGKEPAASSPSSNNTAATTAAIVPGSQLMPSKSPSTGTTEISSHESSHGTPSQTTAKNWELTASASHQPPGVYPQGHSDTTVAISTSTVLLCGLSAVSLLACYLKSSGAVLSYSG

SEQ ID NO: 311650 - DNA, 612 bp, Artificial Sequence
  derived and/or modified sequence
atgagcgtggaacatgccgatatttgggtgaagagctactctctttacagtcgggaacgttacatttgtaactctgggtttaaaaggaaggccggaacgagcagcctcacagagtgtgttctgaacaaagctacgaatgttgcccactggaccacacctagccttaagtgtattcgagaccccgcacttgtgcaccaacgtcctgctcctccgagtactgtgactactgccggtgtgacgccccagcctgaatctttatcgcctagcggaaaggaacctgcagcttcgagccctagtagtaacaacactgccgccactaccgctgcaatcgtgcccggttcgcaactaatgcccagtaaatcaccctccacagggacaaccgagatcagctctcacgaatcttcccatggcactcccagtcaaactacagctaagaactgggaactcactgcgtcagcatcccatcagcccccaggagtttacccccaaggtcactcggatactacagtggcaataagcacttccacggtactgctttgtggtttatcagcagtcagcctgctcgcctgctatcttaagagcagtggagcagtgttaagctattctgggtag

SEQ ID NO: 311651 - DNA, 612 bp, Artificial Sequence
  derived and/or modified sequence
atgtctgtggagcacgccgacatctgggtgaagagctacagcctgtacagccgggagcgctacatctgcaacagcggcttcaagaggaaggccggcaccagcagcctgacagaatgtgtgctgaacaaggccaccaacgtggcccactggaccacccccagcctgaagtgcatccgggaccctgccctggtgcaccagaggcctgccccacccagcacagtgaccacagctggggtgaccccccagcctgagagcctgagccccagcggcaaggagcctgctgccagcagccccagcagcaacaacacagctgccaccacagctgccatcgtgcccggcagccagctgatgcccagcaagagccccagcacaggcaccacagagatcagcagccatgagagcagccacggcacccccagccagaccacagccaagaactgggagctgacagccagcgccagccaccagcccccaggagtgtacccccagggccacagcgacaccaccgtggccatcagcaccagcacagtgctgctgtgtggcctgtctgctgtgtccctgctggcctgctacctgaagagcagtggagctgtgctgagctacagcggctag

SEQ ID NO: 311652 - DNA, 612 bp, Artificial Sequence
  derived and/or modified sequence
atgagcgtggagcacgccgacatctgggtgaagagctacagcctgtactctagagaaagatacatctgcaactctggctttaagcgcaaggccggaacttcgagcttaacagagtgtgtgcttaacaaggccacaaatgttgcccactggactactcctagtttgaagtgtataagggaccccgctctcgtgcaccagcgacctgctccgccctccacagttaccaccgccggagtgacaccccagccagagtcactttcgccatctggaaaagagcctgccgcctcaagcccatccagtaacaataccgccgctactaccgcggccattgtgccagggtcacaacttatgccctctaagtccccatctactggcactactgaaatcagcagccacgaatcatcccacggcacacctagccaaaccactgccaaaaattgggaactgacggcaagcgcatctcatcaaccgcccggagtgtatccccagggtcacagtgacaccacagtcgctatctcgacaagcaccgtacttttatgtggtcttagtgcggttagcttgcttgcttgctaccttaaaagttccggagcagtcctctcttattccggttag

SEQ ID NO: 311653 - DNA, 612 bp, Artificial Sequence
  derived and/or modified sequence
atgtccgtcgagcatgctgatatctgggtcaaatcctattccctgtatagccgggagcggtacatctgtaatagcggattcaagcgcaaggctggtaccagttcactaaccgaatgcgtgctgaacaaggccactaacgttgcacactggactacgccaagtttgaaatgtatcagagaccccgcacttgtgcatcagagaccggctccgccatcgacggtcaccacagcaggggttacaccccagcccgagtctttgtccccttcaggtaaagaacctgctgcaagctcaccctcgtctaacaataccgccgcaaccactgccgctatagttccaggaagccagctgatgcctagtaagtcaccaagtacaggcacaaccgagatctcatctcatgagtccagccacgggacacctagtcagacaactgccaagaattgggagctgactgccagtgcttcccatcagcctccaggggtctatcctcagggtcactccgatacgaccgtagcaatcagcacttccactgtgctgctgtgcgggctgtcagcagtgtctctgctagcttgctacttgaagtccagcggagccgtattaagctactctggttag

SEQ ID NO: 311654 - DNA, 612 bp, Artificial Sequence
  derived and/or modified sequence
atgagcgtggagcacgccgacatctgggtgaagagctacagcctgtacagcagagagagatacatctgcaacagcggcttcaagagaaaggccggcaccagcagcctgaccgagtgcgtgctgaacaaggccaccaacgtggcccactggaccacccccagcctgaagtgcatcagagaccccgccctggtgcaccagagacccgccccccccagcaccgtgaccaccgccggcgtgaccccccagcccgagagcctgagccccagcggcaaggagcccgccgccagcagccccagcagcaacaacaccgccgccaccaccgccgccatcgtgcccggcagccagctgatgcccagcaagagccccagcaccggcaccaccgagatcagcagccacgagagcagccacggcacccccagccagaccaccgccaagaactgggagctgaccgccagcgccagccaccagccccccggcgtgtacccccagggccacagcgacaccaccgtggccatcagcaccagcaccgtgctgctgtgcggcctgagcgccgtgagcctgctggcctgctacctgaagagcagcggcgccgtgctgagctacagcggctag

SEQ ID NO: 311655 - protein, 187 aa, Artificial Sequence
  derived and/or modified sequence
MAPRRARGCRTLGLPALLLLLLLRPPATRGDPALVHQRPAPPSTVTTAGVTPQPESLSPSGKEPAASSPSSNNTAATTAAIVPGSQLMPSKSPSTGTTEISSHESSHGTPSQTTAKNWELTASASHQPPGVYPQGHSDTTVAISTSTVLLCGLSAVSLLACYLKSRASVCSCHPRSAGHTCSVGSVC

SEQ ID NO: 311656 - protein, 169 aa, Artificial Sequence
  derived and/or modified sequence
MAPRRARGCRTLGLPALLLLLLLRPPATREPAASSPSSNNTAATTAAIVPGSQLMPSKSPSTGTTEISSHESSHGTPSQTTAKNWELTASASHQPPGVYPQGHSDTTVAISTSTVLLCGLSAVSLLACYLKSRQTPPLASVEMEAMEALPVTWGTSSRDEDLENCSHHL

SEQ ID NO: 311657 - DNA, 510 bp, Artificial Sequence
  derived and/or modified sequence
atggccccaagacgtgctcgagggtgccgcacactcgggcttccagccctgcttctgctgctgctgctgagacctcctgccacaagggagcctgccgccagctctccctcaagtaacaacactgctgctacaaccgctgccattgtccccggcagccagcttatgccctcgaagtccccgagcaccggaacgaccgagataagctcacacgaatcttcccatggaaccccttctcagacaacagcaaaaaattgggagctgactgccagcgcgagccaccagccccccggcgtgtatccccaggggcattccgacactacggtagctatcagtactagcactgtgctgctatgtggactcagcgctgtttccctgctggcctgctatctcaaatcgaggcagacaccgcctctggctagcgttgagatggaagctatggaagccctgcccgtcacttggggaacatcctcgcgggatgaagatctggagaactgcagccatcatttatag

SEQ ID NO: 311658 - DNA, 584 bp, Artificial Sequence
  derived and/or modified sequence
agtccagcggtgtcctgtggagctgccgccatggccccgcggcgggcgcgcggctgccggaccctcggtctcccggcgctgctactgctgctgctgctccggccgccggcgacgcgggagcccgcagcttcatctcccagctcaaacaacacagcggccacaacagcagctattgtcccgggctcccagctgatgccttcaaaatcaccttccacaggaaccacagagataagcagtcatgagtcctcccacggcaccccctctcagacaacagccaagaactgggaactcacagcatccgcctcccaccagccgccaggtgtgtatccacagggccacagcgacaccactgtggctatctccacgtccactgtcctgctgtgtgggctgagcgctgtgtctctcctggcatgctacctcaagtcaaggcaaactcccccgctggccagcgttgaaatggaagccatggaggctctgccggtgacttgggggaccagcagcagagatgaagacttggaaaactgctctcaccacctatgaaactcggggaaaccagcccagctaagtccggagtgaaggagcct

SEQ ID NO: 311659 - DNA, 510 bp, Artificial Sequence
  derived and/or modified sequence
atggccccccggcgggcccggggctgcaggaccctgggcctgcctgccctgctgctgctgctgctgctgcggcccccagccacccgggagcctgctgccagcagccccagcagcaacaacacagctgccaccacagctgccatcgtgcccggcagccagctgatgcccagcaagagccccagcacaggcaccacagagatcagcagccatgagagcagccacggcacccccagccagaccacagccaagaactgggagctgacagccagcgccagccaccagcccccaggagtgtacccccagggccacagcgacaccaccgtggccatcagcaccagcacagtgctgctgtgtggcctgtctgctgtgtccctgctggcctgctacctgaagagccggcagaccccacccctggcctctgtggagatggaggccatggaggccctgcctgtgacctggggcaccagcagcagagatgaggacctggagaactgcagccaccacctgtag

SEQ ID NO: 311660 - DNA, 510 bp, Artificial Sequence
  derived and/or modified sequence
atggccccccggcgggcccggggctgccggaccctgggcctgcccgcccttttgcttctcctacttctgcggcccccggccacaagggaaccagcggcctctagccccagctccaataacacagcagccacgacagccgccatcgtgccaggctcccagctaatgcccagcaaatctccctcaaccggcaccaccgagatcagcagtcacgagtcctctcacggaactcctagccagacgaccgccaagaactgggagctgactgcaagcgctagtcaccagccgcctggcgtgtacccgcagggccatagcgacacgaccgtggccatatcaacaagcacagttctattgtgtggtctttcagcagtgagcctcctggcttgttacctgaaaagtagacagactcccccgttggcatcggtggagatggaggcaatggaggctctccctgtcacctggggaacgtctagtcgggatgaggatctcgagaactgctctcatcacctgtag

SEQ ID NO: 311661 - DNA, 510 bp, Artificial Sequence
  derived and/or modified sequence
atggcgcctcgcagggcccgaggctgtagaactctcggtcttcccgctttacttttgctactcttgttacgcccacctgccactagggaacctgccgcatcgtcacccagcagcaataacaccgcggctaccaccgctgctattgtccccggatcacagctgatgccaagcaaaagtccatccaccggcactacagaaatttcttctcacgagagtagccatgggactccatctcaaaccactgccaagaactgggagttgaccgccagcgcaagccaccagcccccaggagtatatccccaaggacattctgacaccacagtcgccatttccacgagcactgtgttgctttgtggtctctctgccgtgtccctgctggcatgctacctgaagtccagacaaacaccacccctcgcttccgtggaaatggaagcaatggaagccctgccagtaacttggggtacctcaagcagggatgaagacttggagaattgcagtcatcacctttag

SEQ ID NO: 311662 - DNA, 510 bp, Artificial Sequence
  derived and/or modified sequence
atggcccccagaagagccagaggctgcagaaccctgggcctgcccgccctgctgctgctgctgctgctgagaccccccgccaccagagagcccgccgccagcagccccagcagcaacaacaccgccgccaccaccgccgccatcgtgcccggcagccagctgatgcccagcaagagccccagcaccggcaccaccgagatcagcagccacgagagcagccacggcacccccagccagaccaccgccaagaactgggagctgaccgccagcgccagccaccagccccccggcgtgtacccccagggccacagcgacaccaccgtggccatcagcaccagcaccgtgctgctgtgcggcctgagcgccgtgagcctgctggcctgctacctgaagagcagacagaccccccccctggccagcgtggagatggaggccatggaggccctgcccgtgacctggggcaccagcagcagagacgaggacctggagaactgcagccaccacctgtag

SEQ ID NO: 311663 - protein, 154 aa, Artificial Sequence
  derived and/or modified sequence
MAPRRARGCRTLGLPALLLLLLLRPPATREPAASSPSSNNTAATTAAIVPGSQLMPSKSPSTGTTEISSHESSHGTPSQTTAKNWELTASASHQPPGVYPQGHSDTTVAISTSTVLLCGLSAVSLLACYLKSRASVCSCHPRSAGHTCSVGSVC

SEQ ID NO: 311664 - DNA, 465 bp, Artificial Sequence
  derived and/or modified sequence
atggcccccagacgtgctcgagggtgcaggactctgggcctgcccgccctgctgctattactgctgctgcgaccacccgcaactcgggagcctgcagcaagcagcccctccagcaacaatacggcggctacaaccgctgccatcgtaccagggagtcagcttatgccctccaagtctccttccaccggaaccacagaaatttcatctcacgagtcttctcacggaaccccaagtcagacgactgctaaaaactgggagttaactgcttcagcctcccaccaaccaccaggggtgtatccacaagggcacagtgatacaactgtggctatctctacttcaactgtgctcctgtgtgggcttagcgccgtcagccttctcgcttgttatctcaaaagcagagcatccgtgtgctcatgccaccccaggtccgccgggcatacttgttccgtgggctctgtgtgttag

SEQ ID NO: 311665 - DNA, 588 bp, Artificial Sequence
  derived and/or modified sequence
tgtggagctgccgccatggccccgcggcgggcgcgcggctgccggaccctcggtctcccggcgctgctactgctgctgctgctccggccgccggcgacgcgggagcccgcagcttcatctcccagctcaaacaacacagcggccacaacagcagctattgtcccgggctcccagctgatgccttcaaaatcaccttccacaggaaccacagagataagcagtcatgagtcctcccacggcaccccctctcagacaacagccaagaactgggaactcacagcatccgcctcccaccagccgccaggtgtgtatccacagggccacagcgacaccactgtggctatctccacgtccactgtcctgctgtgtgggctgagcgctgtgtctctcctggcatgctacctcaagtcaagggcctctgtctgctcctgccatccccgcagtgctggacatacatgctcagtgggaagcgtctgttgatttgagggcaaccccctcctcttttcaaaacctatgaaccacctgctttgcaggcaaactcccccgctggccagcgttgaaatggaagccatggaggctctgccggtg

SEQ ID NO: 311666 - DNA, 465 bp, Artificial Sequence
  derived and/or modified sequence
atggccccccggcgggcccggggctgcaggaccctgggcctgcctgccctgctgctgctgctgctgctgcggcccccagccacccgggagcctgctgccagcagccccagcagcaacaacacagctgccaccacagctgccatcgtgcccggcagccagctgatgcccagcaagagccccagcacaggcaccacagagatcagcagccatgagagcagccacggcacccccagccagaccacagccaagaactgggagctgacagccagcgccagccaccagcccccaggagtgtacccccagggccacagcgacaccaccgtggccatcagcaccagcacagtgctgctgtgtggcctgtctgctgtgtccctgctggcctgctacctgaagagccgggcctctgtgtgcagctgccaccccaggtctgctggccacacctgcagcgtgggctctgtgtgctag

SEQ ID NO: 311667 - DNA, 465 bp, Artificial Sequence
  derived and/or modified sequence
atggccccccggcgggcccggggctgccggaccctgggcctgcccgcgctgctgctgttgctattgcttagaccaccagccaccagggagcccgcggcttcaagcccttccagcaataatactgccgccacgacagctgcgatcgttccggggtctcagctcatgccaagtaaatccccctccacgggaaccaccgaaatctccagccacgagtcaagccatggtacaccctcccaaaccacagccaagaactgggaacttaccgcctctgcgtctcatcagcctccaggggtatatccacagggtcatagcgatactaccgttgccatctccaccagtaccgtgcttctgtgcggtctctctgctgtttccctcctcgcctgctacctcaagtcacgtgcctccgtatgtagctgtcacccccgcagtgccggccatacatgttcagtgggatcagtttgctag

SEQ ID NO: 311668 - DNA, 465 bp, Artificial Sequence
  derived and/or modified sequence
atggcccctcgacgtgcaagagggtgtagaaccttggggctgcccgctctgctccttctgctcttgctccgtccgcctgcgaccagagagcctgcggcatccagcccctcttccaacaatacagccgctactactgctgccatcgttcctgggtcacagctcatgcctagtaaatcaccgtcaactggcactacagagatcagttcccatgagtccagtcatggcaccccaagtcagactaccgcaaaaaactgggaattaaccgctagtgcttcacaccaacccccaggggtttatccacaaggccattctgacactactgtggctatcagcacctcaacagtgctgctctgtggcctctcagcagtatctctcttagcttgctacctcaagtctcgggctagtgtgtgctcatgtcacccaaggagtgcagggcatacatgctctgttggatcagtttgctag

SEQ ID NO: 311669 - DNA, 465 bp, Artificial Sequence
  derived and/or modified sequence
atggcccccagaagagccagaggctgcagaaccctgggcctgcccgccctgctgctgctgctgctgctgagaccccccgccaccagagagcccgccgccagcagccccagcagcaacaacaccgccgccaccaccgccgccatcgtgcccggcagccagctgatgcccagcaagagccccagcaccggcaccaccgagatcagcagccacgagagcagccacggcacccccagccagaccaccgccaagaactgggagctgaccgccagcgccagccaccagccccccggcgtgtacccccagggccacagcgacaccaccgtggccatcagcaccagcaccgtgctgctgtgcggcctgagcgccgtgagcctgctggcctgctacctgaagagcagagccagcgtgtgcagctgccaccccagaagcgccggccacacctgcagcgtgggcagcgtgtgctag

SEQ ID NO: 311670 - DNA, 753 bp, Artificial Sequence
  derived and/or modified sequence
atgaagatggtcgcagctgccaagtacgctagagccgagagggaacttaaacctgctaggatttacggcctcgggtccctggcgttgtacgaaaaagcagacataaaaggccccgaggacaagaaaaaacacctgctaattggggtgagttcagacaggggtctctgtggagccatccattctagcattgctaagcaaatgaagtccgaggttgctaccttaactgctgccgggaaggaagtaatgctggtcgggattggggacaaaattcggggcattctctaccgcacccattctgaccagttcctcgtcgctttcaaggaggtggggcgtaagccccctacgttcggagacgcttccgttattgctctagaacttctgaatagcggctacgagttcgacgaggggtccatcattttcaataaatttagatccgtgatatcctataagactgaggagaagcccatattttcactgaataccgtggcatcagcagatagcatgagcatatatgacgacattgatgccgacgtccttcagaattatcaggagtacaaccttgccaatataatttactatagcctgaaggaaagtacgacttcagagcagtccgccaggatgacagcgatggataatgcgtccaagaatgccagcgagatgatagataaactgaccctgacctttaaccgcacacgccaagcggtcattacaaaggaacttatcgagattatctctggggcagctgcgctgtag

SEQ ID NO: 311671 - DNA, 753 bp, Artificial Sequence
  derived and/or modified sequence
atgaagatggtggccgccgccaagtatgcccgggcagagcgggagctgaagccagcccgcatctacggcctgggcagcctggccctgtatgagaaggctgacatcaagggccctgaggacaagaagaagcacctgctgattggagtgtccagtgaccggggcctgtgtggggccatccacagcagcatcgccaagcagatgaagtctgaggtggccaccctgacagctgctgggaaggaggtgatgctggtgggcatcggggacaagatccggggcatcctgtaccgcacccacagcgaccagttcctggtggccttcaaggaggtgggcaggaagccacccacctttggagatgccagcgtcatcgccctggagctgctgaacagcggctatgaatttgatgagggcagcatcatcttcaacaagttccgcagcgtcatctcctacaagacagaggagaagcccatcttcagcctgaacacagtggccagcgctgacagcatgagcatctatgatgacattgatgctgatgtgctgcagaactaccaggagtacaacctggccaacatcatctactacagcctgaaggagagcaccaccagcgagcagagcgccaggatgacagccatggacaatgccagcaagaatgccagcgagatgattgacaagctgaccctgaccttcaacagaacccggcaggccgtcatcaccaaggagctgattgagatcatctctggagctgctgccctgtag

SEQ ID NO: 311672 - DNA, 753 bp, Artificial Sequence
  derived and/or modified sequence
atgaagatggtggccgccgccaagtacgcccgggccgagcgggagctcaaaccagccagaatttatggcttagggtccttggctctttacgaaaaggctgatattaaaggtcctgaagacaagaaaaaacatctgctgattggagtaagttccgatcgggggctatgcggtgcaatccacagctcgattgccaagcagatgaaatcagaggtggcaacgctcaccgcagcaggaaaggaagtgatgctcgtaggcataggggataaaatcagagggatcttgtaccgcacacactcagaccaattcctcgtcgcttttaaggaggttggccgcaagccccccactttcggggacgcatcagtgatcgcacttgaactgctaaactctggatacgagtttgatgaggggagtatcatcttcaataaatttagaagtgtgatatcttataaaaccgaagaaaagcccatattttcactgaacactgtagccagcgcagacagcatgtctatctatgacgacatcgatgccgacgttctccagaattaccaagagtacaatctggcaaacatcatatattatagcttaaaggaatccaccacttcggaacagagcgccagaatgacagctatggacaacgcgtcgaagaatgcttccgagatgattgacaagctgacattaaccttcaaccgcaccagacaggctgtcatcaccaaagagctgattgagataatctccggggctgcggccctgtag

SEQ ID NO: 311673 - DNA, 753 bp, Artificial Sequence
  derived and/or modified sequence
atgaaaatggtagctgcggcaaagtatgctcgtgcggaaagggagttaaaaccagccaggatttatggcctaggtagcctcgccctgtacgagaaggctgatattaagggccctgaagataaaaagaagcacttacttattggcgtgtcctctgacagaggactttgtggtgcaatacatagcagcatagcaaaacagatgaaatctgaagttgccacattaaccgcagcaggcaaagaggttatgctcgtgggaataggcgataagattagggggatcttatacaggacgcactctgaccagtttctagtggcctttaaagaggttggaagaaaaccccctacatttggcgatgcctctgttatcgccctcgaattgctgaattcagggtacgaattcgacgaaggctctattatattcaataagtttcggagcgtgattagctacaagaccgaagaaaagccgattttttccctgaacacagtagcttccgccgactccatgtctatatacgatgacattgacgctgacgtgctccagaactatcaggaatataacctagctaacataatttactactcactgaaggagtccaccacttccgagcagagtgctaggatgacggcaatggataacgctagtaagaacgcgtctgagatgatcgataaacttaccctgacattcaaccgcacccggcaggccgtgatcacaaaggagttgatcgaaatcatctctggggcagccgcactctag

SEQ ID NO: 311674 - DNA, 753 bp, Artificial Sequence
  derived and/or modified sequence
atgaagatggtggccgccgccaagtacgccagagccgagagagagctgaagcccgccagaatctacggcctgggcagcctggccctgtacgagaaggccgacatcaagggccccgaggacaagaagaagcacctgctgatcggcgtgagcagcgacagaggcctgtgcggcgccatccacagcagcatcgccaagcagatgaagagcgaggtggccaccctgaccgccgccggcaaggaggtgatgctggtgggcatcggcgacaagatcagaggcatcctgtacagaacccacagcgaccagttcctggtggccttcaaggaggtgggcagaaagccccccaccttcggcgacgccagcgtgatcgccctggagctgctgaacagcggctacgagttcgacgagggcagcatcatcttcaacaagttcagaagcgtgatcagctacaagaccgaggagaagcccatcttcagcctgaacaccgtggccagcgccgacagcatgagcatctacgacgacatcgacgccgacgtgctgcagaactaccaggagtacaacctggccaacatcatctactacagcctgaaggagagcaccaccagcgagcagagcgccagaatgaccgccatggacaacgccagcaagaacgccagcgagatgatcgacaagctgaccctgaccttcaacagaaccagacaggccgtgatcaccaaggagctgatcgagatcatcagcggcgccgccgccctgtag

SEQ ID NO: 311675 - protein, 188 aa, Artificial Sequence
  derived and/or modified sequence
MNIHVQPRTIYLCRHGENEHNLQGRIGGDSGLSSRGKKFASALSKFVEEQNLKDLRVWTSQLKSTIQTAEALRLPYEQWKALNEIDASYQDLVQRLEPVIMELERQENVLVICHQAVLRCLLAYFLDKSAEEMPYLKCPLHTVLKLTPVAYGCRVESIYLNVESVCTHRERSENMKGSRSSADSSRKH

SEQ ID NO: 311676 - protein, 86 aa, Artificial Sequence
  derived and/or modified sequence
MPYLKCPLHTVLKLTPVAYGCRVESIYLNVESVCTHRERSEGLSLFPRLECGGAVTAHCSLNLLGSSDPPASASRVAETTGCKEGT

SEQ ID NO: 311677 - protein, 143 aa, Artificial Sequence
  derived and/or modified sequence
  misc_feature (1)..(1): Xaa can be any naturally occurring amino acid
XVEEQNLKDLRVWTSQLKSTIQTAEALRLPYEQWKALNEIDASYQDLVQRLEPVIMELERQENVLVICHQAVLRCLLAYFLDKSAEEMPYLKCPLHTVLKLTPVAYGCRVESIYLNVESVCTHRERSENMKGSRSSADSSRKH

SEQ ID NO: 311678 - DNA, 567 bp, Artificial Sequence
  derived and/or modified sequence
atgaatatccacgtccaaccacgaacaatttacttatgccggcacggcgagaatgagcataaccttcagggccgcatcggcggcgacagcggcctgagcagccggggcaaaaagttcgctagcgctctgtcaaaattcgtagaggaacagaatcttaaggatctgcgggtatggactagccagctaaagagcacgatccaaactgccgaggcactgaggctgccatacgaacagtggaaggctctcaatgagattgatgcctcttatcaggatctggtgcaaaggcttgagcctgtgataatggaactggagagacaggaaaacgtgttggtgatctgccaccaggcagttctccgctgtctcctggcttactttctggacaagagcgccgaggaaatgccatatctgaaatgtcctctgcacactgtcctgaaactgacgcctgtggcatatggctgccgggtggagtctatctatctgaacgtggaatctgtgtgtactcaccgtgaaagatctgaaaacatgaaaggaagtcggtcttccgcagactcctctcggaagcactag

SEQ ID NO: 311679 - DNA, 96 bp, Artificial Sequence
  derived and/or modified sequence
atttacctgaacgtggagtctgtatgcactcatcgggagcgctctgagaacatgaagggcagccgctcaagcgccgactcgtcacgcaaacattag

SEQ ID NO: 311680 - DNA, 261 bp, Artificial Sequence
  derived and/or modified sequence
atgccttacctgaagtgtcctctacacacagtgctgaaattgacccctgtcgcttacggttgccgagttgaaagtatctacttgaatgtagaaagtgtctgcacacatcgagagcgttccgagggcttatcacttttccccaggctcgagtgcgggggagctgtgaccgcgcactgctcccttaacctactgggctcttcggacccccctgctagcgctagccgggtggcggagaccacaggatgtaaggagggaacatag

SEQ ID NO: 311681 - DNA, 432 bp, Artificial Sequence
  derived and/or modified sequence
taggtggaggagcagaacctcaaggatttgagagtctggaccagtcagctgaagtcaactatacagacagccgaggccctgagacttccttatgagcagtggaaggccttaaatgaaatcgatgccagctaccaggacctggtgcagagactggagcccgtgatcatggaactggagaggcaagaaaacgtgcttgtgatttgtcaccaagctgtcctgcgatgtctactggcttattttctggataagtcagccgaggagatgccctacttgaaatgcccattgcacactgtactcaagctgactcccgtggcatacggctgtagggtggaatctatatacctcaatgttgaatcagtgtgtacacacagggagcgctctgaaaacatgaaagggagtcgatcatctgctgacagttctaggaagcattag

SEQ ID NO: 311682 - DNA, 567 bp, Artificial Sequence
  derived and/or modified sequence
atgaacatccacgtgcagcccaggaccatctacctgtgcagacatggagaaaatgagcacaacctgcagggccgcatcggcggggacagcggcctgagcagccggggcaagaagtttgccagcgccctgagcaagtttgtggaggagcagaacctgaaggacctgcgggtgtggaccagccagctgaagagcaccatccagacagctgaggccctgcggctgccctatgagcagtggaaggccctgaatgaaattgatgccagctaccaggacctggtgcagaggctggagcccgtcatcatggagctggagcggcaggagaatgtgctggtgatctgccaccaggccgtgctgcgctgcctgctggcctacttcctggacaagtctgctgaggagatgccctacctgaagtgccccctgcacacagtgctgaagctgacccctgtggcctacggctgccgggtggagagcatctacctgaatgtggagagcgtgtgcacccaccgggagaggtctgagaacatgaagggcagccgcagcagcgctgacagcagcaggaagcactag

SEQ ID NO: 311683 - DNA, 96 bp, Artificial Sequence
  derived and/or modified sequence
atctacctgaatgtggagagcgtgtgcacccaccgggagaggtctgagaacatgaagggcagccgcagcagcgctgacagcagcaggaagcactag

SEQ ID NO: 311684 - DNA, 261 bp, Artificial Sequence
  derived and/or modified sequence
atgccctacctgaagtgccccctgcacacagtgctgaagctgacccctgtggcctacggctgccgggtggagagcatctacctgaatgtggagagcgtgtgcacccaccgggagaggtctgagggcctgagcctcttcccccggctggagtgtggcggcgctgtgacagcccactgcagcctgaacctgctgggcagcagtgaccccccagccagcgccagccgggtggccgagaccaccggctgcaaggagggcacctag

SEQ ID NO: 311685 - DNA, 432 bp, Artificial Sequence
  derived and/or modified sequence
tgagtggaggagcagaacctgaaggacctgcgggtgtggaccagccagctgaagagcaccatccagacagctgaggccctgcggctgccctatgagcagtggaaggccctgaatgaaattgatgccagctaccaggacctggtgcagaggctggagcctgtgatcatggagctggagcggcaggagaatgtgctggtgatctgccaccaggccgtgctgcgctgcctgctggcctacttcctggacaagtctgctgaggagatgccctacctgaagtgccccctgcacacagtgctgaagctgacccctgtggcctacggctgccgggtggagagcatctacctgaatgtggagagcgtgtgcacccaccgggagaggtctgagaacatgaagggcagccgcagcagcgctgacagcagcaggaagcactag

SEQ ID NO: 311686 - DNA, 567 bp, Artificial Sequence
  derived and/or modified sequence
atgaacatccacgtgcagccccggaccatctacctgtgccggcacggcgaaaacgaacacaatctgcaagggagaattggcggcgattcgggcctttcttcacgtggcaagaaatttgccagcgctttgtctaaattcgtggaggaacagaacctgaaagacttacgtgtctggacttcacagcttaagtcaaccatccagactgcagaggcactccggttgccatacgaacaatggaaggctctgaatgagatcgacgcaagctatcaggatctggtgcaacggttggagccagtgatcatggaactggagaggcaggaaaacgtgctggttatttgccatcaggcagtgttaagatgcttactcgcgtattttctggacaagagcgccgaagagatgccatacctgaagtgtccgctgcataccgtgctgaaactgactcctgtggcatacggatgccgggtggagtctatatacctgaacgtggagtctgtgtgcacccaccgcgaaagatctgagaacatgaaggggagcaggtccagcgccgatagttctcgcaagcactag

SEQ ID NO: 311687 - DNA, 96 bp, Artificial Sequence
  derived and/or modified sequence
atctacctgaacgtggagagcgtgtgcacccaccgggagcggagcgagaacatgaagggaagcagatctagtgcagattccagccggaagcactag

SEQ ID NO: 311688 - DNA, 261 bp, Artificial Sequence
  derived and/or modified sequence
atgccctacctgaagtgccccctgcacaccgtgctgaagctgaccccagttgcatacgggtgtagggtcgagtctatctacctgaacgttgaatccgtttgtactcacagagagagatcagagggcttgagcttgttccctcggctcgaatgcggtggggctgtgaccgcccattgcagcctgaacctcttaggctccagcgatcctcccgcaagcgcgtcaagagttgctgaaaccaccggttgcaaggaaggcacctag

SEQ ID NO: 311689 - DNA, 432 bp, Artificial Sequence
  derived and/or modified sequence
tgagtggaggagcagaacctgaaggacctgcgggtgtggaccagccagctgaaaagtactattcagaccgccgaggccttgcgactgccctatgagcagtggaaagcgctcaacgagatcgacgcttcctaccaggacttggtgcaaagactggaacccgtgataatggaactggagcggcaagaaaacgttctggtcatttgccatcaggccgtgctgagatgcttgctagcttacttccttgacaaatccgccgaagagatgccctatctgaaatgccccctgcacactgtgttaaagctcacacccgtcgcatatggctgccgtgtggaatctatctacttgaatgtggagtcagtgtgtactcatcgcgagcggtcggaaaatatgaaggggtcaagaagctctgctgatagttcacggaagcactag

SEQ ID NO: 311690 - DNA, 567 bp, Artificial Sequence
  derived and/or modified sequence
atgaatattcacgtccagcccaggactatttacctgtgtagacatggcgagaatgaacacaacctgcagggacgcattggtggagactccggtctgtctagccgcggaaagaagttcgcctcagctctaagcaagttcgtggaagaacagaacctgaaggatctgcgtgtgtggacctcacagctcaagtctacgatacagactgccgaggcactgagactcccatacgaacagtggaaggccctgaacgagattgacgcaagttatcaagatttggtgcagagactcgagcctgttatcatggagctggagaggcaggagaacgtgcttgttatctgtcaccaggccgtgctgagatgcctgttagcttattttctcgacaagagcgctgaggaaatgccatatctaaagtgtcccctccacacggtcctgaaattgacacctgtcgcgtatgggtgccgggtcgagtctatctacctgaacgtagagagcgtctgcactcaccgcgaaaggtcagagaatatgaagggatctagaagctcagccgacagcagtcgaaaacattag

SEQ ID NO: 311691 - DNA, 96 bp, Artificial Sequence
  derived and/or modified sequence
atttatctcaacgtggaaagtgtgtgcactcatcgggaacgttccgagaacatgaagggcagtaggagttctgctgactcttctcggaagcattag

SEQ ID NO: 311692 - DNA, 261 bp, Artificial Sequence
  derived and/or modified sequence
atgccctacctcaaatgccccctccacacagtgctgaaattgactcccgtcgcgtatgggtgccgagtggagtctatttacctgaatgtagagagcgtctgcacccaccgcgagcgcagtgaaggacttagtctctttcctcggctggaatgtggcggagcagtgaccgcgcattgttcgctgaacttattaggttcgagcgatccccctgcctcagcctcacgtgtggccgaaacgactggatgtaaagagggcacgtag

SEQ ID NO: 311693 - DNA, 432 bp, Artificial Sequence
  derived and/or modified sequence
tgagtcgaggagcagaacttaaaggaccttagggtgtggacctcccagttaaagtccaccatccaaaccgcagaggctcttagactgccttacgagcagtggaaggccctcaacgaaattgacgccagttatcaggacctggttcagcgcctggaacctgtgattatggagctggaacggcaagagaacgtgctggtcatctgtcatcaggcggtgctccgctgccttcttgcctattttttagacaagagcgccgaggaaatgccttatctcaagtgccccctgcatactgtgctgaaactcacacctgttgcttatgggtgtagggtggagagtatctatctgaatgttgagtccgtgtgtacgcatcgggagaggtctgagaacatgaaaggatccagatcttcagctgatagttctcggaaacattag

SEQ ID NO: 311694 - DNA, 3856 bp, Artificial Sequence
  derived and/or modified sequence
gtctgggtgtcgcgggccggccccgcggggagcgcccccggcgcgatgcccttcaggaaagcctgtgggccaaagctgaccaactcccccaccgtcatcgtcatggtgggcctccccgcccggggcaagacctacatctccaagaagctgactcgctacctcaactggattggcgtccccacaaaagtgttcaacgtcggggagtatcgccgggaggctgtgaagcagtacagctcctacaacttcttccgccccgacaatgaggaagccatgaaagtccggaagcaatgtgccttagctgccttgagagatgtcaaaagctacctggcgaaagaagggggacaaattgcggttttcgatgccaccaatactactagagagaggagacacatgatccttcattttgccaaagaaaatgactttaaggcgtttttcatcgagtcggtgtgcgacgaccctacagttgtggcctccaatatcatggaagttaaaatctccagcccggattacaaagactgcaactcggcagaagccatggacgacttcatgaagaggatcagttgctatgaagccagctaccagcccctcgaccccgacaaatgcgacagggacttgtcgctgatcaaggtgattgacgtgggccggaggttcctggtgaaccgggtgcaggaccacatccagagccgcatcgtgtactacctgatgaacatccacgtgcagccgcgtaccatctacctgtgccggcacggcgagaacgagcacaacctccagggccgcatcgggggcgactcaggcctgtccagccggggcaagaagtttgccagtgctctgagcaagttcgtggaggagcagaacctgaaggacctgcgcgtgtggaccagccagctgaagagcaccatccagacggccgaggcgctgcggctgccctacgagcagtggaaggcgctcaatgagatcgacgcgtcctaccaggacctggtccagcgcttggagccagtgatcatggagctggagcggcaggagaatgtgctggtcatctgccaccaggccgtcctgcgctgcctgcttgcctacttcctggataagagtgcagaggagatgccctacctgaaatgccctcttcacaccgtcctgaaactgacgcctgtcgcttatggctgccgtgtggaatccatctacctgaacgtggagtccgtctgcacacaccgggagaggtcagagaacatgaaaggctcccggagcagcgctgactcctccaggaaacactgaggcagacgtgtcggttccattccatttccatttctgcagcttagcttgtgtcctgccctccgcccgaggcaaaacgtatcctgaggacttcttccggagagggtggggtggagcagcgggggagccttggccgaagagaaccatgcttggcaccgtctgtgtcccctcggccgctggacaccagaaagccacgtgggtccctggcgccctgcctttagccgtggggcccccacctccactctctgggtttcctaggaatgtccagcctcggagaccttcacaaagccttgggagggtgatgagtgctggtcctgacaggaggccgctggggacactgtgctgttttgtttcgtttctgtgatctcccggcacgtttggagctgggaagaccacactggtggcagaatcctaaaattaaaggaggcaggctcctagttgctgaaagttaaggaatgtgtaaaacctccacgtgactgtttggtgcatcttgacctgggaagacgcctcatgggaacgaacttggacaggtgttgggttgaggcctcttctgcaggaagtccctgagctgagacgcaagttggctgggtggtccgcaccctggctctcctgcaggtccacacaccttccaggcctgtggcctgcctccaaagatgtgcaagggcaggctggctgcacggggagagggaagtattttgccgaaatatgagaactggggcctcctgctcccagggagctccagggcccctctctcctcccacctggacttggggggaactgagaaacactttcctggagctgctggcttttgcacttttttgatggcagaagtgtgacctgagagtcccaccttctcttcaggaacgtagatgttggggtgtcttgccctggggggcttggaacctctgaaggtggggagcggaacacctggcatccttccccagcacttgcattaccgtccctgctcttcccaggtggggacagtggcccaagcaaggcctcactcgcagccacttcttcaagagctgcctgcacactgtcttggagcatctgccttgtgcctggcactctgccggtgccttgggaaggtcggaagagtggactttgtcctggccttcccttcatggcgtctatgacacttttgtggtgatggaaagcatgggacctgtcgtctcagcctgttggtttctcctcattgcctcaaaccctggggtaggtgggacggggggtctcgtgcccagatgaaaccatttggaaactcggcagcagagtttgtccaaatgacccttttcaggatgtctcaaagcttgtgccaaaggtcacttttctttcctgccttctgctgtgagccctgagatcctcctcccagctcaagggacaggtcctgggtgagggtgggagatttagacacctgaaactgggcgtggagagaagagccgttgctgtttgttttttgggaagagcttttaaagaatgcatgtttttttcctggttggaattgagtaggaactgaggctgtgcttcaggtatggtacaatcaagtgggggattttcatgctgaaccattcaagccctccccgcccgttgcacccactttggctggcgtctgctggagaggatgtctctgtccgcattcccgtgcagctccaggctcgcgcagttttctctctctccctggatgttgagtctcatcagaatatgtgggtagggggtggacgtgcacgggtgcatgattgtgcttaacttggttgtatttttcgatttgacatggaaggcctgttgctttgctcttgagaatagtttctcgtgtccccctcgcaggcctcattctttgaacatcgactctgaagtttgatacagataggggcttgatagctgtggtcccctctcccctctgactacctaaaatcaatacctaaatacagaagccttggtctaacacgggacttttagtttgcgaagggcctagatagggagagaggtaacatgaatctggacagggagggagatactatagaaaggagaacactgcctactttgcaagccagtgacctgccttttgaggggacattggacgggggccgggggcgggggttgggtttgagctacagtcatgaacttttggcgtctactgattcctccaactctccaccccacaaaataacggggaccaatatttttaactttgcctatttgtttttgggtgagtttcccccctccttattctgtcctgagaccacgggcaaagctcttcattttgagagagaagaaaaactgtttggaaccacaccaatgatatttttctttgtaatacttgaaatttatttttttattattttgatagcagatgtgctatttatttatttaatatgtataaggagcctaaacaatagaaagctgtagagattgggtttcattgttaattggtttgggagcctcctatgtgtgacttatgacttctctgtgttctgtgtatttgtctgaattaatgacctgggatataaagctatgctagctttcaaacaggagatgcctttcagaaatttgtatattttgcagttgccagaccaataaaatacctggttgaaat

SEQ ID NO: 311695 - DNA, 244 bp, Artificial Sequence
  derived and/or modified sequence
atctacctgaacgtggagtccgtctgcacacaccgggagaggtcagagaacatgaaaggctcccggagcagcgctgactcctccaggaaacactgaggcagacgtgtcggttccattccatttccatttctgcagcttagcttgtgtcctgccctccgcccgaggcaaaacgtatcctgaggacttcttccggagagggtggggtggagcagcgggggagccttggccgaagagaaccatgctt

SEQ ID NO: 311696 - DNA, 595 bp, Artificial Sequence
  derived and/or modified sequence
cgtggaggagcagaacctgaaggacctgcgcgtgtggaccagccagctgaagagcaccatccagacggccgaggcgctgcggctgccctacgagcagtggaaggcgctcaatgagatcgacgcgtcctaccaggacctggtccagcgcttggagccagtgatcatggagctggagcggcaggagaatgtgctggtcatctgccaccaggccgtcctgcgctgcctgcttgcctacttcctggataagagtgcagaggagatgccctacctgaaatgccctcttcacaccgtcctgaaactgacgcctgtcgcttatggctgccgtgtggaatccatctacctgaacgtggagtccgtctgcacacaccgggagaggtcagagaacatgaaaggctcccggagcagcgctgactcctccaggaaacactgaggcagacgtgtcggttccattccatttccatttctgcagcttagcttgtgtcctgccctccgcccgaggcaaaacgtatcctgaggacttcttccggagagggtggggtggagcagcgggggagccttggccgaagagaaccatgcttggcaccgtctgtgtccc

SEQ ID NO: 311697 - DNA, 567 bp, Artificial Sequence
  derived and/or modified sequence
atgaacatccacgtgcagcccagaaccatctacctgtgcagacacggcgagaacgagcacaacctgcagggcagaatcggcggcgacagcggcctgagcagcagaggcaagaagttcgccagcgccctgagcaagttcgtggaggagcagaacctgaaggacctgagagtgtggaccagccagctgaagagcaccatccagaccgccgaggccctgagactgccctacgagcagtggaaggccctgaacgagatcgacgccagctaccaggacctggtgcagagactggagcccgtgatcatggagctggagagacaggagaacgtgctggtgatctgccaccaggccgtgctgagatgcctgctggcctacttcctggacaagagcgccgaggagatgccctacctgaagtgccccctgcacaccgtgctgaagctgacccccgtggcctacggctgcagagtggagagcatctacctgaacgtggagagcgtgtgcacccacagagagagaagcgagaacatgaagggcagcagaagcagcgccgacagcagcagaaagcactag

SEQ ID NO: 311698 - DNA, 96 bp, Artificial Sequence
  derived and/or modified sequence
atctacctgaacgtggagagcgtgtgcacccacagagagagaagcgagaacatgaagggcagcagaagcagcgccgacagcagcagaaagcactag

SEQ ID NO: 311699 - DNA, 261 bp, Artificial Sequence
  derived and/or modified sequence
atgccctacctgaagtgccccctgcacaccgtgctgaagctgacccccgtggcctacggctgcagagtggagagcatctacctgaacgtggagagcgtgtgcacccacagagagagaagcgagggcctgagcctgttccccagactggagtgcggcggcgccgtgaccgcccactgcagcctgaacctgctgggcagcagcgacccccccgccagcgccagcagagtggccgagaccaccggctgcaaggagggcacctag

SEQ ID NO: 311700 - DNA, 432 bp, Artificial Sequence
  derived and/or modified sequence
tgagtggaggagcagaacctgaaggacctgagagtgtggaccagccagctgaagagcaccatccagaccgccgaggccctgagactgccctacgagcagtggaaggccctgaacgagatcgacgccagctaccaggacctggtgcagagactggagcccgtgatcatggagctggagagacaggagaacgtgctggtgatctgccaccaggccgtgctgagatgcctgctggcctacttcctggacaagagcgccgaggagatgccctacctgaagtgccccctgcacaccgtgctgaagctgacccccgtggcctacggctgcagagtggagagcatctacctgaacgtggagagcgtgtgcacccacagagagagaagcgagaacatgaagggcagcagaagcagcgccgacagcagcagaaagcactag

SEQ ID NO: 311701 - DNA, 648 bp, Artificial Sequence
  derived and/or modified sequence
atcaacgagctgagccacgtgcagatccccgtgatgctgatgcccgacgacttcaaggcctacagcaagatcaaggtggacaaccacctgttcaacaaggagaacatgcccagccacttcaagttcaaggagtactgccccatggtgttcagaaacctgagagagagattcggcatcgacgaccaggacttccagaacagcctgaccagaagcgcccccctgcccaacgacagccaggccagaagcggcgccagattccacaccagctacgacaagagatacatcatcaagaccatcaccagcgaggacgtggccgagatgcacaacatcctgaagaagtaccaccagtacatcgtggagtgccacggcatcaccctgctgccccagttcctgggcatgtacagactgaacgtggacggcgtggagatctacgtgatcgtgaccagaaacgtgttcagccacagactgagcgtgtacagaaagtacgacctgaagggcagcaccgtggccagagaggccagcgacaaggagaagagccccacccccgccatcgtggtgctgcccgtgccccacagcgccgccaccagcgagaagcactgcatcgaccccatgagagtgctgctgcacttcagcagcagcaactgctag

SEQ ID NO: 311702 - DNA, 648 bp, Artificial Sequence
  derived and/or modified sequence
attaatgagctgagccatgtgcaaattcctgtgatgctgatgccagatgactttaaggcgtatagtaagatcaaggtggataatcatctttttaacaaggaaaatatgccaagccactttaaatttaaggaatactgccccatggtctttcggaatttgcgagaacggtttgggattgatgaccaagattttcagaactcattgacacgaagtgctccactcccaaatgactcccaagcccgctctggagctagattccatacatcctatgacaaacgttacataattaaaaccataacaagtgaggatgtggcagagatgcacaacatcctgaaaaagtaccaccaatatattgtggagtgccacgggatcactctgctaccccagttcctggggatgtatcgcctgaatgtggacggtgttgaaatttatgtcatcgtgacacgtaatgtcttttcacatcgcctcagcgtgtatcgaaagtacgatctcaagggaagcactgttgcacgagaagcttctgataaggaaaaatcccctactccggcgatcgtcgtgctgccggtgccccattctgctgccaccagcgaaaagcattgcatcgaccccatgcgggtgctgcttcatttctctagctccaattgctag

SEQ ID NO: 311703 - DNA, 648 bp, Artificial Sequence
  derived and/or modified sequence
atcaatgagctgagccacgtgcagatccctgtgatgctgatgccagatgacttcaaggcctacagcaagatcaaggtggacaaccacctgttcaacaaggagaacatgcccagccacttcaagttcaaggagtactgccccatggtgttcaggaacctgcgggagagatttggaattgatgaccaggacttccagaacagcctgaccaggtctgcccccctgcccaatgacagccaggcccggagcggggcccgcttccacaccagctatgacaagcgctacatcatcaagaccatcaccagtgaagatgtggccgagatgcacaacatcctgaagaagtaccaccagtacatcgtggagtgccacggcatcaccctgctgccccagttcctgggcatgtaccgcctgaatgtggatggagtggagatctacgtgattgtgaccagaaatgtgttcagccaccggctgtctgtgtacagaaaatatgacctgaagggcagcacagtggcccgggaggccagtgacaaggagaagagccccaccccagccatcgtggtgctgcctgtgccccacagcgctgccaccagcgagaagcactgcatcgaccccatgagggtgctgctgcacttcagcagcagcaactgctag

SEQ ID NO: 311704 - DNA, 648 bp, Artificial Sequence
  derived and/or modified sequence
atcaacgagctgagccacgtgcagatccccgtgatgctgatgcccgatgattttaaagcctattccaagatcaaagtcgataatcatctgtttaacaaggagaatatgccctcccactttaaattcaaggaatactgcccaatggtgtttcgcaacttgagggaaagatttgggatcgacgatcaggattttcaaaactccctcactcgatcagcacctctgccgaacgattcccaggctcgatccggggcccgctttcatacatcctatgacaagcggtatattattaagaccatcacatctgaggacgttgcggaaatgcacaatatcttaaagaagtatcatcagtatattgtggagtgccatggcatcaccttactccctcagttcctcgggatgtaccgcctaaatgtggacggcgtggaaatctatgttatcgtaacaagaaacgtgtttagccaccgactgtccgtatatcgtaagtacgacttaaaaggatcgactgtcgcgcgcgaggcctccgataaggagaaatccccaacacccgcgatcgtggtacttcctgtcccccactcggcagctacaagtgaaaagcattgcattgatccaatgcgcgtccttctgcacttttctagcagcaactgttag

SEQ ID NO: 311705 - DNA, 768 bp, Artificial Sequence
  derived and/or modified sequence
atcaatgaactgagccatgttcaaatccctgttatgttgatgccagatgacttcaaagcctattcaaaaataaaggtggacaatcacctttttaacaaagaaaacatgccgagccatttcaagtttaaggaatactgcccgatggtcttccgtaacctgcgggagaggtttggaattgatgatcaagatttccagaattccctgaccaggagcgcacccctccccaacgactcccaggcccgcagtggagctcgttttcacacttcctacgacaaaagatacatcatcaagactattaccagtgaagacgtggccgaaatgcacaacatcctgaagaaataccaccagtacatagtggaatgtcatgggatcacccttcttccccagttcttgggcatgtaccggcttaatgttgatggagttgaaatatatgtgatagttacaagaaatgtattcagccaccgtttgtctgtgtataggaaatacgacttaaagggctctacagtggctagagaagctagtgacaaagaaaagtctcccacccctgctattgtggttcttcctgttccccattctgctgccaccagcgagaaacactgtattgacccgatgagagttctacttcatttctcttcatcaaattgttgaatagtgaaacagttatttgttgcaagcatggttggaaggaacattccacatgcaacttgctcttgaaaaacacagccacctgtgcagtaaacctataatcgaaaatggcactgacagctg

SEQ ID NO: 311706 - DNA, 1436 bp, Artificial Sequence
  derived and/or modified sequence
gcagctgctgcggggcggggagccggagtcagccctggacctccggctgctcgcccgcctcgaagcccccagccccgcggcgcgtgcccccagccctctgggccgcccaggcaccaccacttgcgtcccctttagatctatggcccggtgcgggtcgggggtcccgtgtgcatatcaatgaactgagccatgttcaaatccctgttatgttgatgccagatgacttcaaagcctattcaaaaataaaggtggacaatcacctttttaacaaagaaaacatgccgagccatttcaagtttaaggaatactgcccgatggtcttccgtaacctgcgggagaggtttggaattgatgatcaagatttccagaattccctgaccaggagcgcacccctccccaacgactcccaggcccgcagtggagctcgttttcacacttcctacgacaaaagatacatcatcaagactattaccagtgaagacgtggccgaaatgcacaacatcctgaagaaataccaccagtacatagtggaatgtcatgggatcacccttcttccccagttcttgggcatgtaccggcttaatgttgatggagttgaaatatatgtgatagttacaagaaatgtattcagccaccgtttgtctgtgtataggaaatacgacttaaagggctctacagtggctagagaagctagtgacaaagaaaaggccaaagaactgccaactctgaaagataatgatttcattaatgagggccaaaagatttatattgatgacaacaacaagaaggtcttcctggaaaaactaaaaaaggatgttgagtttctggcccagctgaagctcatggactacagtctgctggtgggaattcatgatgtggagagagccgaacaggaggaagtggagtgtgaggagaacgatggggaggaggagggcgagagcgatggcacccacccggtgggaacccccccagatagccccgggaatacactgaacagctcaccacccctggctcccggggagttcgatccgaacatcgacgtctatggaattaagtgccatgaaaactcgcctaggaaggaggtgtacttcatggcaattattgacatccttactcattatgatgcaaaaaagaaagctgcccatgctgcaaaaactgttaaacatggcgctggcgcggagatctccaccgtgaacccagaacagtattcaaagcgctttttggactttattggccacatcttgacgtaacctcctgcgcagcctcggacagacatgaacattggatggacagaggtggcttcggtgtaggaaaaatgaaaaccaaactcagtgaagtactcatcttgcaggaagcaaacctccttgtttacatcttcaggccaagatgactgatttgggggctactcgctttacagctacctgattttcccagca

SEQ ID NO: 311707 - DNA, 648 bp, Artificial Sequence
  derived and/or modified sequence
atcaacgagctttcccatgtgcaaatcccagtaatgcttatgccagacgactttaaagcgtactcaaaaatcaaagtagataaccacttatttaataaagaaaatatgccttcccattttaaattcaaggagtactgtcctatggtgttccgaaacctgagggaacgattcggaatcgacgaccaggacttccagaattcacttaccagaagcgctccactgcccaatgacagtcaggcacggtcgggggcaaggttccacacttcttacgacaaaaggtacattattaagaccatcacaagtgaagacgtggctgaaatgcacaatatcctcaagaaataccaccagtacatagtcgaatgtcacggcattaccctgcttccgcagtttttggggatgtaccggcttaatgtcgacggggtagaaatatatgtgatagtgacaagaaatgtattctctcaccgtctctcggtataccggaagtatgacctcaaagggtccacggtggccagggaggcgtctgacaaggaaaagtcccccacacctgcaatcgtggtactccccgtgccccactcagcagctacttcagagaaacactgcattgaccctatgagagttctgttacacttctcgtcaagtaattgctag

SEQ ID NO: 311708 - DNA, 801 bp, Artificial Sequence
  derived and/or modified sequence
atgcacaacatcctgaagaagtaccaccagtacatcgtggagtgccacggcatcaccctgctgccccagttcctgggcatgtacagactgaacgtggacggcgtggagatctacgtgatcgtgaccagaaacgtgttcagccacagactgagcgtgtacagaaagtacgacctgaagatggccaacctgaaggccaccttcaccttccccaagcccaccggcagcaccgtggccagagaggccagcgacaaggagaaggccaaggagctgcccaccctgaaggacaacgacttcatcaacgagggccagaagatctacatcgacgacaacaacaagaaggtgttcctggagaagctgaagaaggacgtggagttcctggcccagctgaagctgatggactacagcctgctggtgggcatccacgacgtggagagagccgagcaggaggaggtggagtgcgaggagaacgacggcgaggaggagggcgagagcgacggcacccaccccgtgggcaccccccccgacagccccggcaacaccctgaacagcagcccccccctggcccccggcgagttcgaccccaacatcgacgtgtacggcatcaagtgccacgagaacagccccagaaaggaggtgtacttcatggccatcatcgacatcctgacccactacgacgccaagaagaaggccgcccacgccgccaagaccgtgaagcacggcgccggcgccgagatcagcaccgtgaaccccgagcagtacagcaagagattcctggacttcatcggccacatcctgacctag

SEQ ID NO: 311709 - DNA, 1044 bp, Artificial Sequence
  derived and/or modified sequence
atgctgatgcccgacgacttcaaggcctacagcaagatcaaggtggacaaccacctgttcaacaaggagaacatgcccagccacttcaagttcaaggagtactgccccatggtgttcagaaacctgagagagagattcggcatcgacgaccaggacttccagaacagcctgaccagaagcgcccccctgcccaacgacagccaggccagaagcggcgccagattccacaccagctacgacaagagatacatcatcaagaccatcaccagcgaggacgtggccgagatgcacaacatcctgaagaagtaccaccagtacatcgtggagtgccacggcatcaccctgctgccccagttcctgggcatgtacagactgaacgtggacggcgtggagatctacgtgatcgtgaccagaaacgtgttcagccacagactgagcgtgtacagaaagtacgacctgaagggcagcaccgtggccagagaggccagcgacaaggagaaggccaaggagctgcccaccctgaaggacaacgacttcatcaacgagggccagaagatctacatcgacgacaacaacaagaaggtgttcctggagaagctgaagaaggacgtggagttcctggcccagctgaagctgatggactacagcctgctggtgggcatccacgacgtggagagagccgagcaggaggaggtggagtgcgaggagaacgacggcgaggaggagggcgagagcgacggcacccaccccgtgggcaccccccccgacagccccggcaacaccctgaacagcagcccccccctggcccccggcgagttcgaccccaacatcgacgtgtacggcatcaagtgccacgagaacagccccagaaaggaggtgtacttcatggccatcatcgacatcctgacccactacgacgccaagaagaaggccgcccacgccgccaagaccgtgaagcacggcgccggcgccgagatcagcaccgtgaaccccgagcagtacagcaagagattcctggacttcatcggccacatcctgacctag

SEQ ID NO: 311710 - DNA, 801 bp, Artificial Sequence
  derived and/or modified sequence
atgcacaacatcctgaagaaatatcatcaatatatcgttgagtgccacgggatcacgcttctgccacaattcctcggcatgtaccgtttaaacgtagacggggtggagatttacgtaattgttactagaaacgttttttcacacaggctttcagtgtacaggaagtacgacctgaaaatggcgaatctgaaggcgaccttcacattccccaagcctacaggcagtactgtggccagggaggcttccgataaggaaaaggctaaggagctgcccacattgaaggataatgactttatcaacgagggacagaagatttatattgacgacaataacaagaaggtgtttctggagaaacttaagaaggatgtggagttcttggcgcagctgaagcttatggactactccctgcttgtcggcatacacgacgtggaacgtgcagaacaggaagaagtggaatgtgaggaaaacgacggtgaggaggaaggagagtcagacggtacccatcctgtgggtacaccgcctgattctccgggtaacacccttaattcatctccccccctagcccctggggagttcgatcctaacatagacgtgtacggtataaagtgccacgaaaactctccccggaaagaggtctacttcatggctatcattgatatacttactcattacgatgctaagaagaaagctgcacacgccgccaaaaccgttaagcacggggctggagctgaaattagtacagtgaatccagagcaatattcaaaaagattcctagatttcattgggcacatccttacctag

SEQ ID NO: 311711 - DNA, 1044 bp, Artificial Sequence
  derived and/or modified sequence
atgcttatgccagacgacttcaaagcgtatagcaagatcaaggtggacaatcacctttttaataaggagaatatgccaagccatttcaagtttaaggaatattgcccgatggttttcagaaacctgagagaaaggttcggcatcgacgaccaagactttcagaactctctgacccggtctgctccgctccctaatgacagccaggccagaagcggggccaggtttcacacatcttacgataagcgctatattatcaaaactatcacaagcgaggatgtagccgagatgcacaacatcctcaagaagtatcatcaatacatcgttgagtgtcacgggatcaccctacttccccaattcttgggtatgtaccgtcttaacgtagacggcgtcgagatctatgtcatcgtcacaaggaatgtgttttcccacaggctgtcggtgtaccgtaagtatgacctaaagggatcaacagtcgctagggaggcgtctgataaggagaaagctaaagagctgcctaccttaaaggacaacgactttatcaatgaggggcagaaaatatacatagacgacaataacaagaaagtgtttttagagaaacttaagaaggatgtggagttcctcgctcagctcaagcttatggattattccctgctggtaggaattcacgacgtcgagcgggcggaacaggaagaggtggaatgcgaggagaatgacggagaagaagagggagagagcgatggaacccatcccgtcgggacacccccggattccccaggcaatactcttaattcctcaccacctctggcacctggcgagttcgaccctaatattgatgtctatgggattaaatgtcacgagaactctcccagaaaagaagtatattttatggccattatagacatcctgactcactatgacgcaaagaagaaggccgcccacgcagctaagacagtgaagcacggagctggagctgagatttccacagtaaaccccgagcagtattcaaaaaggttcctggatttcatcggtcacattcttacttag

SEQ ID NO: 311712 - DNA, 801 bp, Artificial Sequence
  derived and/or modified sequence
atgcacaacatcctgaagaagtaccaccagtacatcgtggagtgccacggcatcaccctgctgccccagttcctgggcatgtaccgcctgaatgtggatggagtggagatctacgtgattgtgaccagaaatgtgttcagccaccggctgtctgtgtacagaaaatatgacctgaagatggccaacctgaaggccaccttcaccttccccaagcccaccggcagcacagtggcccgggaggccagtgacaaggagaaggccaaggagctgcccaccctgaaggacaatgacttcatcaatgaaggccagaagatctacattgatgacaacaacaagaaggtgttcctggagaagctgaagaaggatgtggagttcctggcccagctgaagctgatggactacagcctgctggtgggcatccatgatgtggagcgggcagagcaggaggaggtggagtgtgaagaaaatgatggagaggaggagggggagagtgatggcacccaccctgtgggcaccccaccagacagccctggcaacaccctgaacagcagcccccccctggcccctggagaatttgaccccaacattgatgtgtatggcatcaagtgccacgagaacagccccaggaaggaggtgtacttcatggccatcatcgacatcctgacccactatgatgccaagaagaaggccgcccatgctgccaagacagtgaagcatggagctggagctgagatcagcacagtgaaccctgagcagtacagcaagcgcttcctggacttcatcggccacatcctgacctag

SEQ ID NO: 311713 - DNA, 1044 bp, Artificial Sequence
  derived and/or modified sequence
atgctgatgccagatgacttcaaggcctacagcaagatcaaggtggacaaccacctgttcaacaaggagaacatgcccagccacttcaagttcaaggagtactgccccatggtgttcaggaacctgcgggagcgcttcggcattgatgaccaggacttccagaacagcctgaccaggtctgcccccctgcccaatgacagccaggcccggagcggggcccgcttccacaccagctatgacaagcgctacatcatcaagaccatcaccagtgaagatgtggccgagatgcacaacatcctgaagaagtaccaccagtacatcgtggagtgccacggcatcaccctgctgccccagttcctgggcatgtaccgcctgaatgtggatggagtggagatctacgtgattgtgaccagaaatgtgttcagccaccggctgtctgtgtacagaaaatatgacctgaagggcagcacagtggcccgggaggccagtgacaaggagaaggccaaggagctgcccaccctgaaggacaatgacttcatcaatgaaggccagaagatctacattgatgacaacaacaagaaggtgttcctggagaagctgaagaaggatgtggagttcctggcccagctgaagctgatggactacagcctgctggtgggcatccatgatgtggagagagctgagcaggaggaggtggagtgtgaggagaatgatggagaggaggagggggagagtgatggcacccaccctgtgggcaccccaccagacagccctggcaacaccctgaacagcagcccccccctggcccctggagaatttgaccccaacattgatgtgtatggcatcaagtgccacgagaacagccccaggaaggaggtgtacttcatggccatcatcgacatcctgacccactatgatgccaagaagaaggccgcccacgccgccaagacagtgaagcacggggccggggctgagatcagcacagtgaaccctgagcagtacagcaagcgcttcctggacttcatcggccacatcctgacctag

SEQ ID NO: 311714 - DNA, 801 bp, Artificial Sequence
  derived and/or modified sequence
atgcacaacatcctgaagaagtaccaccagtacatcgtggagtgccacggaattacactgctgcctcaatttctcggaatgtatcgactgaatgttgatggtgtcgaaatctatgtgattgtgacccgcaatgtgttttcacaccgcttgagcgtgtaccgcaaatacgatttaaaaatggccaacttgaaggccacgttcactttcccgaagccaacagggtctactgtggctcgggaggcctccgacaaagagaaggcaaaggagctgccaacactgaaagataacgattttatcaacgaggggcaaaaaatctacatcgatgacaacaacaagaaagtattcctcgagaagctcaagaaagatgtagaattcctagcgcagctaaagctaatggattattcactgttggtgggaatccacgacgtcgagcgcgctgaacaggaagaggtagagtgtgaagaaaatgatggtgaagaagaaggggagagcgacggaactcacccagtgggtactccacctgatagtcccggcaatactctgaacagctcaccgccgctggctcccggggagttcgatcccaacatagacgtctacggcatcaaatgccatgagaactcccctcgtaaggaggtttattttatggcaatcattgacattctcacccattacgatgccaagaaaaaagcagcccatgccgccaaaacagtcaaacacggggcgggagccgaaatctcgaccgtgaatcccgaacagtattctaaaaggttcttagacttcattggccatattctgacctag

SEQ ID NO: 311715 - DNA, 1044 bp, Artificial Sequence
  derived and/or modified sequence
atgctgatgcccgacgacttcaaggcctacagcaagatcaaggtggacaatcatctgttcaacaaagaaaacatgccaagccactttaagttcaaagagtattgccctatggtgttcagaaaccttcgtgagcgctttggaatcgacgatcaggatttccagaattctttgaccagatccgcgcccctgccaaacgacagtcaggcaaggagcggcgcgcggttccatacgagctacgataagagatatatcatcaaaacaatcacctccgaagatgtggcggagatgcacaacattttgaaaaaataccaccaatatatcgtggaatgccacggtatcacactgctgcctcaatttctgggcatgtatcgcctaaatgtggacggcgtcgaaatctacgttatcgtgactaggaatgttttttctcatcgcttaagcgtatacaggaagtacgatcttaaggggagtaccgtggcgcgggaagcttcggataaagaaaaggccaaagagctgccgaccttaaaggacaacgatttcattaatgagggccagaaaatctacatagacgacaataacaaaaaagtatttcttgaaaaacttaaaaaggacgttgaattcctcgctcagctgaagttgatggattactcattgctcgtaggtattcacgacgtggaacgcgctgaacaagaggaggtggagtgcgaagaaaacgacggggaggaagagggtgagtccgatggtactcatcctgtggggacacctcctgatagccccggcaacactttgaattcatctccaccactcgctcctggagagttcgaccccaatattgacgtgtacgggataaagtgccatgagaacagcccccgaaaggaagtttactttatggctatcatcgatatcctgactcactacgatgccaagaagaaagcggcgcacgcggcgaaaaccgttaagcatggggcaggagccgaaatctcaacagtgaatccagaacaatactcaaaacgcttcctcgactttatcggacacatccttacctag

SEQ ID NO: 311716 - DNA, 1319 bp, Artificial Sequence
  derived and/or modified sequence
ttcctacgacaaaagatacatcatcaagactattaccagtgaagacgtggccgaaatgcacaacatcctgaagaaataccaccagtacatagtggaatgtcatgggatcacccttcttccccagttcttgggcatgtaccggcttaatgttgatggagttgaaatatatgtgatagttacaagaaatgtattcagccaccgtttgtctgtgtataggaaatacgacttaaagatggccaatctaaaagccactttcacttttcccaagccaactggctctacagtggctagagaagctagtgacaaagaaaaggccaaagaactgccaactctgaaagataatgatttcattaatgagggccaaaagatttatattgatgacaacaacaagaaggtcttcctggaaaaactaaaaaaggatgttgagtttctggcccagctgaagctcatggactacagtctgctggtgggaattcatgatgtggagagagccgaacaggaggaagtggagtgtgaggagaacgatggggaggaggagggcgagagcgatggcacccacccggtgggaacccccccagatagccccgggaatacactgaacagctcaccacccctggctcccggggagttcgatccgaacatcgacgtctatggaattaagtgccatgaaaactcgcctaggaaggaggtgtacttcatggcaattattgacatccttactcattatgatgcaaaaaagaaagctgcccatgctgcaaaaactgttaaacatggcgctggcgcggagatctccaccgtgaacccagaacagtattcaaagcgctttttggactttattggccacatcttgacgtaacctcctgcgcagcctcggacagacatgaacattggatggacagaggtggcttcggtgtaggaaaaatgaaaaccaaactcagtgaagtactcatcttgcaggaagcaaacctccttgtttacatcttcaggccaagatgactgatttgggggctactcgctttacagctacctgattttcccagcatcgttctagctatttctgactttgtgtatatgtgtgtgtgtgtgtgttgggggggggtgagtgtgtgcgcgcgtgtgcattttaaaagtcataaattaattaaaacagatccacttcggtcagtatgtgtcccaacaaagaccctttgattccagctatggccgaatgaatgagtgagtgagtgagtgagtgaatgaacacacgtgtgggggaggggagaaggaagtgcatgatgtcaggcaccgtgttggcatcacacaacaaactgtggatcagt

SEQ ID NO: 311717 - DNA, 801 bp, Artificial Sequence
  derived and/or modified sequence
atgcataacattctgaagaaatatcaccaatatattgtagagtgccatggaatcacattgttgccccagttcctgggcatgtacaggctgaacgtcgatggggtggagatctacgtgattgtgactcggaatgtgttttctcacaggctctccgtctacaggaagtatgatctcaaaatggccaacctgaaagctacattcacattccctaagcccactggctctactgtcgctcgggaagcttctgataaggagaaggccaaggaactgcccacgctgaaggataatgacttcatcaatgagggccaaaagatctacatcgacgataacaacaagaaggttttccttgaaaaattaaaaaaggatgtggagtttctggcccagctcaagcttatggactattccctgttggtgggaatacacgacgtagagagagccgagcaggaggaggtggaatgcgaagagaacgatggggaggaggagggagagagcgacggcacccatcccgtaggaaccccacctgactctccaggaaacacattaaattctagccctcctttagctcccggagagtttgacccaaacattgacgtttacgggatcaagtgtcatgaaaactcacctaggaaagaagtgtattttatggctattattgatatactgacccattacgacgccaaaaagaaggccgcacatgcagcaaaaaccgtgaagcatggtgccggagctgagatatcaaccgttaatcctgagcagtattctaagaggttcctggattttatcggccacattctcacttag

SEQ ID NO: 311718 - DNA, 1044 bp, Artificial Sequence
  derived and/or modified sequence
atgctaatgcctgatgacttcaaggcctactctaagattaaggtggataaccatttatttaataaggaaaatatgccgtcccacttcaaattcaaggagtattgcccaatggtgttccgtaatttacgagagcggttcggaatagacgatcaagacttccagaattctctgaccaggtcagcccctttgcccaatgattctcaggctcgttcaggggctaggttccatacatcctatgacaagagatacatcattaagactatcacttccgaagatgtcgctgagatgcataatattctcaaaaagtaccaccagtacatcgtcgaatgccacgggatcacactcctacctcagtttctagggatgtataggttgaatgtggatggggtcgagatttacgtaatcgtgacccggaatgtgttcagtcatcgcctgagtgtttatcgcaagtacgacctgaagggatccacagtcgccagagaagccagcgataaagaaaaagccaaggaacttcccacattaaaagacaatgacttcattaatgaagggcagaagatatacattgatgataataacaagaaggttttcctggagaagctcaagaaggatgtcgaatttctagcccagctcaagctcatggactattccctgctggttggaatccacgatgttgagcgcgcagagcaagaggaggtcgaatgcgaagagaatgacggcgaagaggagggtgaatccgacggtactcacccagtcgggacgcctcccgactctcctgggaacacactcaatagctctccaccacttgccccaggcgaattcgaccctaatatagacgtttacgggatcaagtgccacgaaaactcccccagaaaggaagtatacttcatggccattatcgacattctcacacactatgatgctaagaaaaaggcggcacacgccgcaaaaaccgtcaaacacggcgctggagctgaaatatcgactgtgaatccagaacaatactccaagaggtttcttgactttatcggacacattctcacttag

SEQ ID NO: 311719 - DNA, 228 bp, Artificial Sequence
  derived and/or modified sequence
atcaacgagctgagccacgtgcagatccccgtgatgctgatgcccgacgacttcaaggcctacagcaagatcaaggtggacaaccacctgttcaacaaggagaacatgcccagccacttcaagttcaaggagtactgccccatggtgttcagaaacctgagagagagattcggcatcgacgaccaggacttccaggtgagctgcgtgtgcaacatctgcttccagtag

SEQ ID NO: 311720 - DNA, 228 bp, Artificial Sequence
  derived and/or modified sequence
atcaatgagctgtctcacgtgcaaattcctgtcatgctgatgcctgatgacttcaaagcttatagtaaaataaaagtcgacaatcacctctttaacaaagagaatatgccaagccactttaagttcaaggagtactgcccaatggtgttcagaaatctgagagaacgcttcggaatcgacgatcaggattttcaggtgtcttgcgtctgtaacatttgcttccaatag

SEQ ID NO: 311721 - DNA, 228 bp, Artificial Sequence
  derived and/or modified sequence
atcaatgagctgagccacgtgcagatccctgtgatgctgatgccagatgacttcaaggcctacagcaagatcaaggtggacaaccacctgttcaacaaggagaacatgcccagccacttcaagttcaaggagtactgccccatggtgttcaggaacctgcgggagagatttggaattgatgaccaggacttccaggtgtcctgtgtgtgcaacatctgcttccagtag

SEQ ID NO: 311722 - DNA, 228 bp, Artificial Sequence
  derived and/or modified sequence
atcaacgagctgagccacgtgcagatccccgtgatgctgatgcccgatgattttaaagcctactcgaagataaaagtggacaatcatctgtttaataaggaaaatatgcccagtcacttcaagttcaaagagtactgtccgatggtctttagaaatttacgagagcgctttggaattgatgatcaggacttccaggtaagctgtgtctgcaacatatgctttcagtag

SEQ ID NO: 311723 - DNA, 304 bp, Artificial Sequence
  derived and/or modified sequence
atcaatgaactgagccatgttcaaatccctgttatgttgatgccagatgacttcaaagcctattcaaaaataaaggtggacaatcacctttttaacaaagaaaacatgccgagccatttcaagtttaaggaatactgcccgatggtcttccgtaacctgcgggagaggtttggaattgatgatcaagatttccaggtgagttgcgtttgtaacatttgcttccagtaggaaatgggttttgccatgacttttgctgtgtcaattgggatctgtatttttgtcaataaaagtattatataatagt

SEQ ID NO: 311724 - DNA, 228 bp, Artificial Sequence
  derived and/or modified sequence
atcaacgaattgagtcacgttcagatcccagtaatgctgatgccagatgattttaaagcttactcaaagatcaaagtagataaccatctgtttaataaggaaaatatgcctagccacttcaagtttaaggaatactgccctatggttttccgcaaccttcgggaacggttcggcatcgatgatcaggatttccaagtgtcctgcgtctgtaatatctgttttcagtag

SEQ ID NO: 311725 - protein, 1616 aa, Artificial Sequence
  derived and/or modified sequence
MFPLIGKTIIFDNFPDPSDTWEITETIGKGTYGKVFKVLNKKNGQKAAVKILDPIHDIDEEIEAEYNILKALSDHPNVVRFYGIYFKKDKVNGDKLWLVLELCSGGSVTDLVKGFLKRGERMSEPLIAYILHEALMGLQHLHNNKTIHRDVKGNNILLTTEGGVKLVDFGVSAQLTSTRHRRNTSVGTPFWMAPEVIACEQQLDTTYDARCDTWSLGITAIELGDGDPPLADLHPMRALFKIPRNPPPKLRQPELWSAEFNDFISKCLTKDYEKRPTVSELLQHKFITQIEGKDVMLQKQLTEFIGIHQCMGGTEKARRERIHTKKGNFNRPLISNLKDVDDLATLEILDENTVSEQLEKCYSRDQIYVYVGDILIALNPFQSLGLYSTKHSKLYIGSKRTASPPHIFAMADLGYQSMITYNSDQCIVISGESGAGKTENAHLLVQQLTVLGKANNRTLQEKILQVNNLVEAFGNACTIINDNSSRFGKYLEMKFTSSGAVVGAQISEYLLEKSRVIHQAIGEKNFHIFYYIYAGLAEKKKLAHYKLPENKPPRYLQNDHLRTVQDIMNNSFYKSQYELIEQCFKVIGFTMEQLGSIYSILAAILNVGNIEFSSVATEHQIDKSHISNHTALENCASLLCIRADELQEALTSHCVVTRGETIIRPNTVEKATDVRDAMAKTLYGRLFSWIVNCINSLLKHDSSPSGNGDELSIGILDIFGFENFKKNSFEQLCINIANEQIQYYYNQHVFAWEQNEYLNEDVDARVIEYEDNWPLLDMFLQKPMGLLSLLDEESRFPKATDQTLVEKFEGNLKSQYFWRPKRMELSFGIHHYAGKVLYNASGFLAKNRDTLPTDIVLLLRSSDNSVIRQLVNHPLTKTGNLPHSKTKNVINYQMRTSEKLINLAKGDTGEATRHARETTNMKTQTVASYFRYSLMDLLSKMVVGQPHFVRCIKPNSERQARKYDKEKVLLQLRYTGILETARIRRLGFSHRILFANFIKRYYLLCYKSSEEPRMSPDTCATILEKAGLDNWALGKTKVFLKYYHVEQLNLMRKEAIDKLILIQACVRAFLCSRRYQKIQEKRKESAIIIQSAARGHLVRKQRKEIVDMKNTAVTTIQTSDQEFDYKKNFENTRESFVKKQAENAISANERFISAPNNKGSVSVVKTSTFKPEEETTNAVESNNRVYQTPKKMNNVYEEEVKQEFYLVGPEVSPKQKSVKDLEENSNLRKVEKEEAMIQSYYQRYTEERNCEESKAAYLERKAISERPSYPVPWLAENETSFKKTLEPTLSQRSIYQNANSMEKEKKTSVVTQRAPICSQEEGRGRLRHETVKERQVEPVTQAQEEEDKAAVFIQSKYRGYKRRQQLRKDKMSSFKHQRIVTTPTEVARNTHNLYSYPTKHEEINNIKKKDNKDSKATSEREACGLAIFSKQISKLSEEYFILQKKLNEMILSQQLKSLYLGVSHHKPINRRVSSQQCLSGVCKGEEPKILRPPRRPRKPKTLNNPEDSTYYYLLHKSIQEEKRRPRKDSQGKLLDLEDFYYKEFLPSRSGPKEHSPSLRERRPQQELQNQCIKANERCWAAESPEKEEEREPAANPYDFRRLLRKTSQRRRLVQQS

SEQ ID NO: 311726 - protein, 197 aa, Artificial Sequence
  derived and/or modified sequence
MFPLIGKTIIFDNFPDPSDTWEITETIGKGTYGKVFKVLNKKNGQKAAVKILDPIHDIDEEIEAEYNILKALSDHPNVVRFYGIYFKKDKVNGDKLWLVLELCSGGSVTDLVKGFLKRGERMSEPLIAYILHEALMGLQHLHNNKTIHRDVKGNNILLTTEGGVKLVDFGVSAQLTSTRHRRNTSVGTPFWMAPEVR

SEQ ID NO: 311727 - DNA, 4851 bp, Artificial Sequence
  derived and/or modified sequence
atgttccccttaattggaaaaactatcatttttgataatttccctgatccttcagacacgtgggaaattaccgaaacgatcggaaaagggacttatggaaaagtatttaaggtgcttaacaaaaagaacgggcagaaagctgccgtgaagattctcgacccaattcacgacattgatgaggagattgaagctgagtacaacattctgaaggctttatccgatcacccaaacgtagtcagattctatggtatctatttcaaaaaggacaaggtgaacggcgataagctctggttggtgctggaactgtgtagtggcggatcagttactgacttagtcaaaggtttcttaaagcggggcgagcgtatgagtgaacccctcattgcttacatcctgcacgaagccctgatgggacttcagcacctgcacaacaacaaaactattcatagagacgttaaaggcaataacatccttttgactactgaagggggtgtgaaactggttgatttcggggtgtctgctcagctcacaagcacacggcacagaaggaacacctcagtggggaccccattctggatggccccagaagtcatcgcttgtgagcagcagctggacacaacttatgacgcgcggtgtgacacatggtctttaggcatcacagccatcgaactgggtgatggagatccaccacttgctgacctgcacccgatgagggccctgttcaaaatccccagaaatccccctccgaagctgaggcagcccgagctgtggtccgccgagttcaacgatttcataagcaaatgcctcacgaaagattacgagaagcgcccgaccgtcagtgagttgctgcagcataagtttattacgcagattgagggcaaagacgtcatgctgcagaaacagctgaccgaattcatcggaatccatcaatgtatggggggaacagaaaaagctcgccgagaacgcatacatacgaagaagggcaattttaaccgccctttgatttctaacctgaaggacgtggacgacttggcgacactagagattctcgatgaaaacaccgtttcagaacaactggaaaaatgttacagccgcgaccaaatctacgtctatgtgggagacattctgatcgcccttaatccattccaaagtctcggcctctactcaacgaaacattctaagctgtacatcggaagcaaacgaacagcatctccgccacacattttcgctatggcggacctgggctaccagagcatgatcacttacaattctgatcagtgcattgtgatttcaggagagtcaggagccgggaaaacagaaaacgctcatctgctggtacagcagctgaccgtgctgggcaaagcaaataaccgcacactgcaagagaaaatcctgcaagtgaataacttagtggaggcatttggaaacgcctgcacgattatcaacgacaactctagcaggtttggaaaatacctcgaaatgaagtttacttcttcgggtgctgttgtgggggctcagatatcagaatatctcctggagaaatctagggtcatacatcaagcaattggcgaaaaaaactttcatattttttattacatctatgcaggtctcgcggaaaaaaaaaagctcgctcactataaactcccagagaataagccaccccgctatctgcagaacgaccatctgcgtactgttcaggacataatgaacaactctttctataaaagccagtacgagctgattgagcagtgctttaaggtaatcggtttcaccatggagcagctgggatctatttatagcatactggccgcaattttaaatgttgggaacatcgaattttcaagtgtcgccactgagcaccaaatcgacaagtctcatatcagcaaccataccgcgctcgaaaattgcgcctcactgctgtgcataagggctgatgagctccaagaggccctcacctcacattgtgtcgttactcgaggcgagaccatcattaggcctaatacagttgagaaggccactgacgtcagggatgcgatggctaagacactctatggccgactcttctcgtggattgttaactgcattaacagcttgttgaaacatgattcatcgccatctgggaacggggacgagctgtccattggaatcctcgacatctttgggtttgagaacttcaaaaagaatagctttgagcagctgtgcattaacatcgcaaatgaacagattcagtattattacaaccagcatgtcttcgcttgggagcagaatgagtaccttaatgaagacgtggacgccagggttatcgaatacgaggacaactggcctctcctcgacatgtttctgcagaagccaatgggcttgttgtcactgttggacgaagagtctcgatttcccaaggcaaccgatcaaacactcgtcgaaaaatttgaagggaacttaaagagtcagtatttctggcgccctaaaaggatggagctctccttcgggattcatcattacgccgggaaggtgctctataatgcctcgggcttcctcgctaagaatcgggacactttaccaacagatatcgtgctgttgcttaggtcatcagataactccgttatacggcagctggtgaatcaccccctgaccaagaccggaaacctgccccacagcaagacaaagaatgtcataaactatcagatgcggacctctgagaagctgattaacctggccaaaggggacaccggcgaggccacacgccatgccagagagactactaatatgaaaacccagactgtggcatcctatttccgatattcactgatggacctactgagcaagatggttgtcggccaacctcattttgttcggtgcatcaagcccaatagtgaaagacaggcccgtaaatacgacaaagagaaggtgctcttgcagctgcgctacacagggatattagagactgcccgcattagacgcctgggtttctcacacaggatcctcttcgccaatttcattaagaggtactatctcttgtgttataagtcgtcggaggagccccgcatgtctccggacacttgcgctacgatattagagaaagcaggtttagataactgggcactcggcaagacaaaggtttttctcaagtactaccacgtggagcagctgaatctcatgagaaaagaagcaatagacaagctgatcctgattcaggcctgcgttcgggcgtttctttgctctaggaggtaccagaagatacaagaaaaaaggaaagagtctgccattataattcagagcgccgcacggggacatcttgtgcgaaaacagcgcaaggagattgtggacatgaagaacaccgctgttacaacaattcaaaccagtgatcaagagtttgattacaagaagaacttcgagaacaccagggagagcttcgtgaaaaaacaagccgagaacgccatcagcgcaaatgagcggtttatcagcgcaccaaataacaaggggtcagtgtcagtcgtcaaaacatccacattcaagcccgaagaagagacaacgaatgctgtcgaaagcaataatcgcgtctaccagaccccgaagaaaatgaacaatgtgtacgaagaagaagtaaagcaggagttctacttagtcggtccagaggtgtctcctaagcagaaatctgtgaaggatctagaagaaaattccaacctccgcaaggtagagaaggaggaggctatgattcagagctattaccagcgatacaccgaggaaaggaactgcgaggagtcaaaggccgcttacctggagagaaaggcaatcagcgagaggccttcctatcccgtgccctggctggcagagaatgaaacctctttcaagaagacactggaacccactctgtcccagcgatccatttaccagaatgcgaattctatggaaaaagagaagaagacatccgtggtgactcaacgagctccaatctgtagccaggaagagggtcggggtagactgaggcacgaaaccgttaaagagaggcaagtggaacctgtgactcaagcacaagaggaagaagataaggcagccgtctttattcagtctaagtaccgggggtacaagcggcgccagcagttgagaaaggataagatgtcatctttcaagcatcaacggattgtcacaacccccaccgaagttgccagaaatacgcataacctgtactcttacccaaccaagcacgaagaaattaataacataaaaaagaaggacaacaaggactcaaaagccacaagcgagagagaagcttgcggcctggccatatttagtaagcaaataagcaaactttctgaagagtatttcatcctccagaagaaactcaacgaaatgatacttagccagcagctgaagtctctgtacctcggtgtgagccatcataaaccgatcaacagaagagtctcttcccagcagtgccttagcggggtttgtaagggtgaagagccgaaaattttgaggcctccacgtagacctcgtaagccgaaaaccctgaacaaccccgaagattccacctactattatttgctgcataagagcattcaagaagaaaagcgcagacctagaaaggatagccaggggaaattactcgacctagaggacttttactacaaggaattcctgccaagtagatccggccctaaggaacacagcccctctttgagggagagaaggccgcaacaggaattacagaatcagtgcattaaggccaatgagcgttgctgggccgccgaaagccccgagaaagaggaagagcgggagccagccgcgaatccctacgatttccgtaggctattaaggaaaactagccaacggagacgactagtgcaacagtcatag

SEQ ID NO: 311728 - DNA, 4851 bp, Artificial Sequence
  derived and/or modified sequence
atgttccccctgattggcaagaccatcatctttgacaacttcccagaccccagcgacacctgggagatcacagagaccatcggcaagggcacctacggcaaggtgttcaaggtgctgaacaagaagaatggccagaaggctgctgtgaagatcctggaccccatccatgacattgatgaggagattgaggccgagtacaacatcctgaaggccctgagtgaccaccccaacgtggtgcgcttctacggcatctacttcaagaaggacaaggtgaatggagacaagctgtggctggtgctggagctgtgcagcggcggctctgtgacagacctggtgaagggcttcctgaagagaggagagaggatgtctgagcccctgattgcctacatcctgcacgaggccctgatgggcctgcagcacctgcacaacaacaagaccatccacagagatgtgaagggcaacaacatcctgctgaccacagagggcggcgtgaagctggtggactttggagtgtctgcccagctgaccagcaccaggcacagaagaaacacctctgtgggcacccccttctggatggcccctgaggtgattgcctgtgagcagcagctggacaccacctatgatgcccgctgtgacacctggagcctgggcatcacagccatcgagctgggagatggagacccccccctggccgacctgcaccccatgagggccctcttcaagatccccaggaaccccccacccaagctgcggcagcctgagctgtggagcgctgagttcaatgacttcatcagcaagtgcctgaccaaggactatgagaagaggcccaccgtgtctgagctgctgcagcacaagttcatcacccagatcgagggcaaggatgtgatgctgcagaagcagctgacagagttcatcggcatccaccagtgcatgggcggcacagagaaggcccggcgggagcgcatccacaccaagaagggcaacttcaaccggcccctcatcagcaacctgaaggatgtggatgacctggccaccctggagatcctggatgaaaatacagtgtctgagcagctggagaagtgctacagccgggaccagatctacgtgtatgtgggggacatcctgattgccctgaaccccttccagagcctgggcctgtacagcaccaagcacagcaagctgtacatcggcagcaagaggacagccagccccccccacatctttgccatggctgacctgggctaccagagcatgatcacctacaacagcgaccagtgcatcgtcatcagcggggagagcggggccggcaagacagaaaatgcccacctgctggtgcagcagctgactgtgctgggcaaggccaacaacagaaccctgcaggagaagatcctgcaggtgaacaacctggtggaggcctttggaaatgcctgcaccatcatcaatgacaacagcagcagatttgggaagtacctggagatgaagttcaccagcagcggggctgtggtgggcgcccagatcagcgagtacctgctggagaagagcagggtcatccaccaggccatcggggagaagaacttccacatcttctactacatctatgccggcctggccgagaagaagaagctggcccactacaagctgcctgagaacaagccaccccgctacctgcagaatgaccacctgaggacagtgcaggacatcatgaacaacagcttctacaagagccagtatgagctgattgagcagtgcttcaaggtgattggcttcaccatggagcagctgggcagcatctacagcatcctggccgccatcctgaatgtgggcaacatcgagttcagctctgtggccacagagcaccagattgacaagagccacatcagcaaccacacagccctggagaactgtgccagcctgctgtgcatccgggcagatgagctgcaggaggccctgaccagccactgtgtggtgaccagaggagagaccatcatccggcccaacacagtggagaaggccacagatgtgagagatgccatggccaagaccctgtatggccgcctcttctcctggatcgtgaactgcatcaacagcctgctgaagcatgacagcagccccagcggaaatggagatgagctgagcatcggcatcctggacatctttggatttgagaacttcaagaagaacagctttgagcagctgtgcatcaacatcgccaatgagcagatccagtactactacaaccagcacgtgtttgcctgggagcagaatgagtacctgaatgaagatgtggatgcccgggtgattgaatatgaggacaactggcccctgctggacatgttcctgcagaagcccatgggcctgctgagcctgctggatgaggagagccgcttccccaaggccacagaccagaccctggtggagaagtttgagggcaacctgaagagccagtacttctggaggcccaagaggatggagctgagctttggcatccaccactacgccggcaaggtgctgtacaatgccagcggcttcctggccaagaacagagacaccctgcccacagacatcgtgctgctgctgcggagcagtgacaacagcgtcatccggcagctggtgaaccaccccctgaccaagacaggcaacctgccccacagcaagaccaagaatgtcatcaactaccagatgaggaccagcgagaagctgatcaacctggccaagggggacaccggggaggccaccaggcatgcccgggagaccaccaacatgaagacccagacagtggccagctacttccgctacagcctgatggacctgctgagcaagatggtggtgggccagccccactttgtgcgctgcatcaagcccaacagcgagcggcaggccaggaaatatgacaaggagaaggtgctgctgcagctgcgctacacaggcatcctggagacagcccgcatccggcggctgggcttcagccaccgcatcctgtttgccaacttcatcaagcgctactacctgctgtgctacaagagcagcgaggagcccaggatgagcccagacacctgtgccaccatcctggagaaggccggcctggacaactgggccctgggcaagaccaaggtgttcctgaagtactaccacgtggagcagctgaacctgatgaggaaggaggccatcgacaagctgatcctgatccaggcctgtgtgcgggccttcctgtgcagccgccgctaccagaagatccaggagaagaggaaggagagcgccatcatcatccagagcgctgcccggggccacctggtgaggaagcagaggaaggagatcgtggacatgaagaacacagctgtgaccaccatccagaccagtgaccaggagtttgactacaagaagaactttgagaacacccgggagagctttgtgaagaagcaggccgagaatgccatcagcgccaatgaacgcttcatcagcgcccccaacaacaagggctctgtgtctgtggtgaagaccagcaccttcaagccagaggaggagaccaccaatgctgtggagagcaacaacagagtgtaccagacccccaagaagatgaacaacgtgtatgaggaggaggtgaagcaggagttctacctggtgggccctgaggtgagccccaagcagaagtctgtgaaggacctggaggagaacagcaacctgaggaaggtggagaaggaggaggccatgatccagagctactaccagcgctacacagaggagaggaactgtgaggagagcaaggccgcctacctggagaggaaggccatcagcgagcggcccagctaccctgtgccctggctggccgagaatgagaccagcttcaagaagaccctggagcccaccctgagccagaggagcatctaccagaatgccaacagcatggagaaggagaagaagacctctgtggtgacccagagggcccccatctgcagccaggaggagggccggggccgcctgcggcatgagaccgtgaaggagcggcaggtggagcctgtgacccaggcccaggaggaggaggacaaggctgctgtgttcatccagagcaagtaccggggctacaagaggcggcagcagctgaggaaggacaagatgagcagcttcaagcaccagagaattgtgaccacccccacagaggtggccaggaacacccacaacctgtacagctaccccaccaagcatgaggagatcaacaacatcaagaagaaggacaacaaggacagcaaggccaccagcgagcgggaggcctgtggcctggccatcttcagcaagcagatcagcaagctgtctgaggagtacttcatcctgcagaagaagctgaatgagatgatcctgagccagcagctgaagagcctgtacctgggcgtgagccaccacaagcccatcaacagaagagtgagcagccagcagtgcctgtctggagtgtgcaagggggaggagcccaagatcctgcggcccccccggcggcccaggaagcccaagaccctgaacaaccctgaggacagcacctactactacctgctgcacaagagcatccaggaggagaagagaagacccaggaaggacagccagggcaagctgctggacctggaggacttctactacaaggagttcctgcccagccgcagcggccccaaggagcacagccccagcctgcgggagcggcggccccagcaggagctgcagaaccagtgcatcaaggccaatgaacgctgctgggccgctgagagccctgagaaggaggaggagcgggagcctgctgccaacccctatgacttccggcggctgctgaggaagaccagccagaggcggcggctggtgcagcagagctag

SEQ ID NO: 311729 - DNA, 5581 bp, Artificial Sequence
  derived and/or modified sequence
agggagcgcccgtagccagcgcccccgtaaagaaataaggaggcgcccggcttcccgcccaggcccagggccccagtgcagcctggacacagtattcaaagttttggcgtctgagcattgttatgcgttattttcaagctttgctaacggtttttaaacctttgagatgtttccattaattggaaaaacaatcatctttgataactttcctgatccttctgatacatgggaaatcactgagacaattggcaaaggaacttatgggaaagtttttaaagtattgaataagaaaaatggccaaaaagcagcagtcaaaattcttgatccaattcacgatattgacgaagagattgaagcagaatataacatcttaaaagcactttctgaccaccctaatgtggtcagattctatgggatatactttaagaaggataaagtaaatggagacaagctgtggttggttcttgagctctgcagtggaggatcagtgactgaccttgtgaaaggatttctgaagaggggtgaaagaatgagtgagcctctaattgcctatattttacatgaagcactaatgggacttcaacatttgcataacaacaaaactatccacagagatgtgaaaggcaataacattctattgaccacggaaggtggagtgaaactagtagattttggtgtgtctgcacagctcaccagtacccggcaccgtcggaacacatccgtaggaacaccgttttggatggctcctgaggtgattgcatgtgaacagcaattggataccacttatgacgccagatgtgacacttggtccctgggtatcacggccattgagctgggtgatggagatcctccactagctgaccttcatcccatgagagcactcttcaaaataccaaggaatccacccccaaaactaaggcagcctgagctatggtcagcagaattcaatgacttcataagcaagtgcttgactaaagattatgaaaagcgtccaacagtgtcagaacttttacagcataaattcattactcaaattgagggcaaagatgtgatgctacaaaaacaactaacggaattcattggcatccatcaatgcatgggaggcacagaaaaggccagacgtgaacgtattcacacgaagaaagggaacttcaaccgacctctaatatccaatctgaaggatgtagatgatttagcaaccctagaaattttggatgagaatacagtctcagagcaacttgagaagtgttattccagagatcagatctacgtctatgtgggagacatactcattgctcttaacccttttcagagtctgggtctttactccacaaagcattccaaactatatattggatcaaagagaactgccagtcctcctcacatttttgcaatggctgacttaggatatcaatctatgataacatataattcagatcagtgcattgttatttctggagaaagtggtgctggaaagactgaaaatgctcatcttttagttcagcagctgacagtgcttggaaaggctaataacagaaccttgcaagagaagattttacaagtgaacaatttggtagaagcctttggcaatgcctgcactattataaatgacaattctagcagatttggaaaatacttagaaatgaaattcacctcttctggagcggtagtgggagcacagatttctgaatatctcctggaaaaatcccgagttatccaccaagctattggagaaaaaaattttcatattttttactacatttatgctggtttggctgaaaagaagaaactagcccattacaaactgcctgaaaataagcctcccaggtacctacaaaatgaccacctcagaacagtacaagacatcatgaataatagtttctataaatcccagtatgaattaattgagcaatgtttcaaagtcataggttttacaatggagcaacttggtagtatatacagcatactcgctgcaatcttgaatgttggcaacattgaattttcttctgtggcaactgaacaccagattgacaagagccacatttctaatcatacagccctggagaactgtgcttctttgctttgcattcgggcagatgagctacaagaagctctcacctcccactgtgtggtcactagaggagaaacaattatacgacccaatactgtagaaaaagctaccgatgtcagggatgccatggctaaaactttatatggacgtctctttagttggatagtcaattgcattaacagtttgttgaagcatgactcatcaccaagtgggaatggtgatgagctgagcattggcattcttgatatatttggctttgaaaatttcaaaaaaaattccttcgagcagctgtgcattaacattgcaaatgaacaaattcagtattattataatcaacatgtgtttgcatgggaacagaatgaatacctaaatgaagatgtggatgctagagttattgaatatgaggataactggcccctcttagatatgtttctgcaaaagccaatgggtttactttccctacttgatgaagaaagtagatttcccaaggccactgaccagactcttgtagaaaaatttgaaggtaacctgaaatcacaatacttctggagacccaaaagaatggaacttagttttggaattcaccattatgcaggaaaggtcctctataatgcaagtggattcttagccaaaaacagagacactcttcctactgacattgtgctacttttgaggtcatccgacaacagtgtaattaggcaactagtcaaccaccctctgaccaaaacaggtaatctgccacattctaaaactaaaaatgttataaactatcaaatgaggacttcagaaaaattaatcaacctggcaaagggcgacactggagaagccacacgtcatgccagagagacaaccaacatgaaaacacaaacggttgcatcatattttagatattccctgatggatttgttgtctaaaatggtggtgggccaacctcattttgtccgttgcatcaaaccaaatagtgagcgtcaggcaagaaaatatgacaaagagaaagttctgctacagcttcggtacacaggaattctggaaacagcaagaattcgaagactaggattctcccatcggatactttttgctaactttataaagcggtactaccttctctgctacaagtcgagcgaggagccccgcatgagccctgacacctgtgccaccattttggaaaaagctggtctcgataactgggctcttggaaaaacaaaagtgttccttaagtattatcacgtggagcagttaaatctaatgcgaaaggaagctattgacaagcttattttgattcaagcttgtgtcagagcattcttgtgttcaagaagataccaaaaaatacaggagaaaaggaaagaaagcgctataataatacagtcagctgcaagaggacaccttgtcaggaaacaaagaaaagaaattgttgacatgaaaaacacagcagtaacaaccattcaaacttctgatcaggaattcgactacaagaaaaactttgaaaatacaagggaatctttcgtgaagaaacaagcagaaaatgcaatctctgctaatgaaagattcatttcagctccaaataataaaggaagtgtatctgtagtgaagacttccactttcaaacctgaagaggaaaccaccaatgctgtggagagtaacaacagagtgtatcagactccaaaaaaaatgaataatgtgtatgaggaagaggttaagcaagaattctaccttgtagggccagaagtaagccccaaacagaagtctgtcaaagacctggaagagaacagcaatctaaggaaagtggagaaagaggaagctatgatccagagttactatcagaggtacacagaggagaggaattgtgaagagtcaaaagcagcatatctagaaaggaaggccatatcagaaaggccaagctacccagtgccttggttagctgaaaatgagacttcctttaaaaaaactttggaacctacacttagccaaaggtcaatttatcaaaatgcaaacagcatggaaaaagaaaagaagacatctgtagttacccagcgtgcaccgatatgcagccaggaggaaggcagaggccgtctgaggcatgagacagtcaaagagaggcaagttgaaccagtgacacaggcccaggaggaagaagataaagcagcggtattcattcagagcaaataccggggttacaagagaaggcagcagttgaggaaggacaagatgtcttcttttaagcatcagaggattgtcacaacaccaacagaagtagcaagaaacactcataatttgtattcctatcccacaaaacatgaggaaatcaataacatcaagaagaaggataacaaagactcgaaagcaacttcagaaagagaagcatgtggtttggcaattttttcaaaacagatatcaaagttatctgaagaatatttcattctgcagaaaaaattgaatgaaatgattttgtcacagcaactgaagtcactttatctgggtgtctcgcaccataagccaattaatagacgagtttcttctcagcagtgcctctcaggtgtctgtaaaggagaggagccaaaaatattgagacccccaagacgaccccggaaacccaaaacattaaataaccctgaagactccacatactattatctacttcataagtcaatccaagaagaaaaacgaagaccaaggaaagacagtcagggaaaattattagatttggaagatttctattataaggaatttttgcccagtcgttctggaccaaaggaacatagccctagtttaagagaacgaagaccacagcaagaactccagaatcaatgtattaaggctaatgaaaggtgctgggcggcggagagccccgagaaggaggaggagagagagccagcagccaacccctacgacttcaggaggctcctgcgcaaaacctcccagcgccggcgcctcgtccagcagtcctaaccgttcaacgaggcagtcaccgccgtcggaaggcgctggagcctgcggggcagcaggggccaagcaggcactctggggctggcaccagcaggcactgaagctgcggccctgatctccgcagaggctgcctgctgcgctcggccctcaagtgcccgggccggccttcgtgctccgaaacaagagacctgggagccctcgggaaacctcccccgacgctctctctcggaactcccgcaccctcctttctcaccagcccgccagttgtggcaaccctgtccttgttcccctaatctatcactttgttctttttttttgtgactcctgtggactccactgcgcctgggatctcgccaacccctctctcatttggggtgactgaattcacagatttttttttttattggaaacggcttttcttggccaacagaacacttgctagcggttgaatcttagagaaaaaagcccgggaggggtggggagaatttcgaagatgtatttcatctcaagcttgctctttctcttcctttggttattaaggtcactaaataaaggaagtgccttgga

SEQ ID NO: 311730 - DNA, 4851 bp, Artificial Sequence
  derived and/or modified sequence
atgttccccctgatcggcaagaccatcatcttcgacaacttccccgacccaagtgacacttgggaaattactgaaacaattgggaaagggacctatggcaaagtattcaaagtgttgaataaaaagaacgggcagaaggctgccgtgaaaatcctcgatcctatccacgacatagatgaggaaatcgaagcagaatacaatattctcaaggcactgtctgatcaccctaacgttgtccggttttacggaatttacttcaagaaggacaaggttaacggtgacaagttgtggttagtgctggagctctgctcaggcggttctgtgacagatttggttaagggcttcctgaaaaggggcgaacgcatgagtgaaccgttaatcgcttatatcctgcacgaagccctgatgggtttgcagcatcttcacaacaacaagacaatccatcgagatgtcaagggcaacaacattctcttaactacagagggaggcgtcaagctcgtggacttcggcgtctccgcccagctgactagcacacgtcaccgcagaaacacgtctgtgggtacccctttctggatggccccagaggtgatcgcctgtgagcagcaactagacaccacttatgacgctcggtgcgatacgtggtccttaggaatcactgccattgaactgggcgacggcgacccacctctggccgacctgcaccccatgcgggccctatttaagattccaaggaatccacctccaaagctgcgacaaccagaactatggagtgcagagttcaatgatttcatcagcaaatgcctcaccaaagattatgaaaaacgaccgacggtaagcgagctgctgcagcataaattcataacacagattgagggcaaagatgtcatgcttcagaaacagttgacagagttcatcggcatccaccagtgcatgggtgggacggagaaggcacgacgggaacgtatccatacaaaaaagggaaatttcaacagacccttgatttctaacctgaaggacgtggatgaccttgctacgctggaaatcttggacgaaaatactgtgtctgagcagttggaaaagtgctattctcgagaccaaatctacgtgtatgtgggggatattctgatcgctctaaacccgtttcagtctctcgggttatactccacgaagcactcaaaactgtacattggctctaagcgcactgcctcccccccccatatttttgctatggctgacctcggataccagtccatgattacatacaatagtgatcaatgtatcgttatcagcggggagtctggagccggaaagacggagaacgcccacttgttggtgcaacagcttaccgtgctgggcaaggccaataataggacgcttcaggagaagatcctgcaggttaacaacctcgtggaagcttttgggaacgcctgcacgatcatcaacgacaactcttccaggttcggaaagtatctcgagatgaaattcactagctccggcgctgtggtcggagcacaaatctctgagtacctgctagaaaaatcgcgcgtcatccaccaagccatcggggaaaaaaacttccatatattttactatatatacgccgggctggcagagaagaagaaattggctcattataaactcccagaaaataagcccccaagatatcttcaaaatgatcatctgcgcacagtgcaggacattatgaacaacagcttctataagtctcagtacgagctgatcgaacagtgctttaaagtcattggcttcaccatggagcagttaggctctatttattcgattctcgctgccattctgaatgttggaaacatcgagttctcttccgtagcaacagagcatcagattgataagtctcacatctcaaatcacacagcattagagaattgtgctagtctgttatgcattagggcagacgagcttcaggaggcccttaccagtcactgtgtagtgacccgcggtgagaccattattcgcccaaacactgtagagaaagccactgatgtgagggatgccatggccaaaacactgtatggaaggctgttcagctggattgtaaactgtattaactccctcctgaagcacgacagtagtccctctgggaatggcgatgaattgtccatcggcatactggacattttcggcttcgaaaacttcaaaaagaactctttcgaacaactgtgcattaatattgccaatgaacaaatccagtattactacaaccaacatgttttcgcctgggaacagaatgaatatctgaatgaggatgtggacgcgcgagttatagaatatgaagacaactggccattgttggatatgttcctgcagaagcccatgggcttacttagtttacttgatgaagaatcgaggtttccaaaggctacagaccagactctggtcgagaaatttgaaggcaatctgaagagccagtacttctggagacccaagagaatggagctgtcatttggcattcaccattacgcgggtaaggtgctgtataacgcctccggtttcctcgccaagaacagggacaccttaccaacagacattgtattactgctcagaagttccgacaattcagttatcaggcagctggtgaatcacccactgacaaagactggcaaccttccacattcaaaaactaaaaacgtgattaactaccaaatgcgcacctctgaaaaactgataaaccttgcaaaaggcgatactggagaagccacaaggcatgcaagggagaccaccaatatgaaaacccagaccgttgctagctactttagatatagcctcatggacctgctgtcaaaaatggtggtggggcagccccactttgtacgctgcatcaagcctaacagcgaaagacaggcgaggaagtatgataaggagaaggtgttgctccagctgagatatacagggattttggaaacggccaggattcgacggttaggattttctcatagaatcctttttgccaatttcattaaacggtactatctgctttgctataagagctccgaggaacctagaatgtcccccgatacctgcgccaccatacttgaaaaagccggactggataattgggcccttggaaaaaccaaagtattcctaaaatactaccacgttgagcaactgaatttgatgcgaaaggaggccatcgataagttaatacttattcaggcatgcgtgcgcgctttcctctgtagtcgtcgctaccaaaaaattcaggaaaagcgaaaggaatcagcaatcattattcagagcgcagccaggggccacctcgtgagaaaacagcggaaggagatcgttgatatgaaaaacacagctgtaactacaattcagaccagcgatcaggagttcgactacaaaaagaatttcgagaacacaagggaatcattcgtcaaaaagcaggcggagaacgcaatatctgctaacgagaggttcatatccgcccctaataataagggcagcgtgtccgtagtgaagacctcaacattcaagccagaagaggagaccaccaatgcagtcgaatccaataatagagtgtatcagacacctaagaaaatgaataatgtgtatgaggaggaagtaaagcaggagttctatctggtggggcctgaggtgagccccaaacaaaagtcagtaaaagatctggaggagaacagcaaccttcgcaaagtcgaaaaggaagaggccatgatccagtcttactatcagcgttatacggaggagcgaaactgtgaggagagcaaggccgcctatctggaacggaaggcaatcagcgaacgcccatcctacccagtaccctggctggcggagaacgaaaccagctttaagaagacactggagcccaccctgtctcagaggagcatttaccaaaatgccaattcaatggagaaagagaagaagacgtccgtggtgacgcaaagggcccctatctgttcccaagaagaaggaagaggccggctgagacacgaaacagttaaggaaaggcaggttgagcccgtcacacaggctcaagaggaagaagataaggcggctgtatttatccagtcaaagtataggggctataagagaagacagcaacttcggaaggacaagatgagttcttttaaacatcagcggatcgtgactactcctaccgaagtcgctaggaatactcataacttatactcctacccgactaaacacgaggaaataaacaatatcaagaaaaaagacaataaggactccaaggccacttctgaaagggaagcctgcggcctggcaattttttccaaacaaattagtaagcttagcgaggaatacttcatcctgcaaaagaaactgaatgagatgatcttatcgcagcagctgaaatccctttatctgggggtgagccaccataaaccgattaacagacgtgtatcgagccagcagtgcttgagcggggtgtgtaagggcgaggaaccaaaaatcctgcgccctccccgtaggccacgaaaacccaagacacttaacaatcccgaagactcaacatattactacttgttgcacaagtcaatccaggaagagaagaggcgccctcgtaaggatagccagggaaagctcttggacctggaagacttctactataaagaattcctcccttcaaggtcaggccctaaagaacactctccatctctgcgggagaggaggccccagcaggagctccaaaaccaatgcatcaaggcgaacgaacggtgttgggctgccgagagccccgaaaaagaggaggaaagggaacctgcggcgaacccttacgactttcggagactgctgcgtaaaactagtcagcgcagaagattggtgcagcaatcttag

SEQ ID NO: 311731 - DNA, 4851 bp, Artificial Sequence
  derived and/or modified sequence
atgttcccactcattggtaaaactataatctttgataattttccggaccccagtgacacttgggaaataaccgagacaatcgggaaaggcacctacgggaaggtgtttaaagtgttaaacaaaaaaaacgggcagaaggcggcagtgaagatcttggaccctatccatgatatagatgaagagatcgaagctgagtacaacattctgaaagcgctctctgaccacccaaacgtcgtcagattttacggaatctactttaagaaagacaaagtaaatggcgataagctgtggcttgttctggaactgtgctctgggggatcggttacagatttggtgaaaggcttccttaagaggggagagaggatgtctgaacctctcatagcttatatactccacgaagcactcatggggctccagcacctgcataataacaaaacaatccatcgggatgtgaagggcaataatattctgctgacaactgaggggggagtaaagctagtggatttcggcgtgtctgcccagctgacaagcaccaggcaccgacggaatacatctgtggggacacccttctggatggctccggaggtgatcgcatgtgagcagcagctagataccacatacgatgccagatgtgatacctggtctctcggtattactgccatagagttgggagatggagaccctcctctcgccgatttacatccgatgcgagcgctctttaagataccccgtaacccacctccaaaattacgccaacccgaactgtggagtgcagagtttaatgactttatctcgaaatgcctcaccaaggattacgagaaacggccaaccgtctctgagctgctgcagcataaattcataacgcaaattgaggggaaggacgtcatgttgcagaagcagctgacagagttcatcggtatacatcagtgcatgggcggaactgagaaggccaggcgggagagaatccacaccaagaagggcaacttcaatcgtccgctaatctctaaccttaaagacgtcgatgacttagcgacacttgagatccttgacgaaaatactgtatctgaacagctggagaagtgttattctagagatcagatctatgtttatgtgggtgatattttaattgcccttaatccctttcaatccctgggactgtacagcacaaagcacagcaagctgtacattggctctaagcggacggctagtccaccccacatctttgcaatggctgacctggggtatcagtctatgatcacttacaattccgaccagtgcatcgttatttccggggaaagcggggctggaaagacagagaacgcacacctcctggtgcagcaactgacggttctgggcaaagcaaataacagaaccctccaagagaagattcttcaagtgaacaatctggtggaagccttcgggaatgcatgcacaattataaatgataattcttctcgatttggtaagtacttggagatgaagtttacctccagtggagccgtagtgggcgcacagatttccgaatacctgttagagaaaagtagagtcatacaccaggccatcggagagaaaaactttcacatattttattacatctatgccggactcgcggagaagaaaaaactggctcactataagttgcctgagaataagcccccacgctacctccagaatgaccacttgagaaccgtccaggacatcatgaacaattcattttacaaaagccagtatgagctcatcgaacagtgcttcaaagtcatcgggtttactatggaacagctaggcagcatttattccatcctcgctgccatcttaaacgtcgggaatatagaattcagttccgtagccacagaacatcagatcgataaatcgcatattagcaatcacacggccctggagaactgcgctagcctgctctgcattcgtgctgatgagctccaggaagccctaacgtctcactgtgttgtgacgagaggagaaacgatcattagacccaatacggtcgagaaagccaccgacgtacgagatgccatggccaagacactctacggacgtctgtttagttggattgtgaactgcataaactccctcctgaagcatgacagctcaccctcaggcaatggggatgagcttagcatcgggatccttgacatttttggatttgagaacttcaaaaagaattcttttgagcaattatgcataaacatcgcaaatgagcagatccagtattactacaaccaacacgtgttcgcctgggaacagaatgagtacctgaatgaggacgtcgatgcccgagttatcgaatatgaggacaactggcccttgctggatatgtttctgcaaaagccaatgggactgttaagcctattggacgaggaaagccgatttcctaaagccacagatcagaccctggttgagaagtttgagggaaacctgaagagtcagtatttttggcgaccaaagagaatggagttaagtttcgggattcatcactacgcagggaaggttctgtacaacgctagcgggttcctggccaagaaccgggatactctcccaaccgatattgtactgcttctgaggtcgagcgataacagtgtcattcggcagcttgtcaaccatccgctaaccaagactgggaatctgccccattcgaaaactaaaaacgtgatcaactatcagatgcgaacatccgaaaagctgatcaacctggccaaaggggacactggagaagctacccgacatgcaagggaaacaacgaacatgaagacccaaaccgtcgcaagctatttcagatactccttaatggacctactttctaagatggtcgtggggcagccccattttgtgagatgtattaagccaaactccgagcggcaggcacggaaatatgataaggagaaggtgctgcttcaactgcgctacacgggaatattagagaccgctaggatacgacgtctgggcttcagtcacaggatcttattcgcaaactttataaagcgatattatctgctatgctacaagagtagcgaggagccgagaatgagcccagatacctgcgccaccatcctggaaaaggcaggtctagacaattgggctctgggtaaaactaaagtgttcctgaaatactatcatgtcgaacagttaaatctgatgcgaaaagaggccatcgacaagctcatcctcatacaggcttgcgtgcgagctttcctgtgctctagaaggtatcagaagattcaagaaaaacggaaggagtcggcaatcattattcaaagcgcagctagaggacacttggtgaggaaacagcgcaaggaaatcgtggatatgaaaaacaccgccgtgacaacaatccagaccagcgatcaggaattcgactataagaaaaatttcgagaatactcgagaaagcttcgttaagaagcaggccgagaatgccatttccgcgaatgaacggtttatttctgccccaaataacaagggctctgtgtctgtggttaagacgagtactttcaagccagaagaagagacgaccaatgccgttgaaagcaataaccgggtctaccagactcctaaaaagatgaataacgtctacgaggaagaagtgaagcaggagttctacctggtggggcctgaggtgtctcctaagcaaaagtcagtgaaggatctcgaggagaactctaatctgcggaaagttgagaaagaggaagcaatgatccaatcgtactaccagcgctacaccgaagagagaaactgcgaggaatccaaggctgcatacttggaacggaaggccatatccgagaggccgtcttatccagtgccctggctggctgagaacgaaaccagtttcaagaagactcttgaaccaactctatcccagcggtccatttatcagaatgctaattcaatggagaaagagaagaagacttctgtcgtgacgcagagggccccaatatgctcccaagaagaggggagaggacggctgcggcacgaaactgtgaaggaacgccaagttgagccagtgacccaggcccaagaagaggaagataaggctgcagtttttatccagagcaaataccggggatataaacgcagacagcagctgagaaaggataagatgagttcgtttaaacatcagcggattgtaactaccccaacagaggtggcacgtaacacccacaacctttatagttacccaacaaagcacgaagagattaacaatattaaaaagaaggataacaaggattctaaagccacaagtgagcgggaggcgtgcggcctggctatcttctcaaagcaaatttcaaaactctcagaggagtactttattctccaaaaaaagctgaatgagatgattctgagccagcagctcaagtcactctatcttggtgtgagtcatcataaaccaattaatcgacgagtatcttctcagcagtgcttatcgggcgtttgcaaaggtgaagagcccaagatcttaaggccaccccgtcgcccacgcaagccaaaaactttgaataacccagaagactccacctattactatttactgcataagagtatacaagaggaaaagaggagaccccgtaaggattcacagggaaagctcctggatctcgaggatttttattacaaagagtttctcccctcacgatctggcccaaaggaacatagtccctccttgcgcgagcggaggccacaacaggaacttcaaaaccagtgcataaaggctaatgagagatgttgggcagcggagtcccccgaaaaagaagaagaaagagaacctgccgctaatccttacgatttcaggcgactgctgaggaagacatcccagcggaggcgattagtgcagcagagttag

SEQ ID NO: 311732 - DNA, 4851 bp, Artificial Sequence
  derived and/or modified sequence
atgttccccctgatcggcaagaccatcatcttcgacaacttccccgaccccagcgacacctgggagatcaccgagaccatcggcaagggcacctacggcaaggtgttcaaggtgctgaacaagaagaacggccagaaggccgccgtgaagatcctggaccccatccacgacatcgacgaggagatcgaggccgagtacaacatcctgaaggccctgagcgaccaccccaacgtggtgagattctacggcatctacttcaagaaggacaaggtgaacggcgacaagctgtggctggtgctggagctgtgcagcggcggcagcgtgaccgacctggtgaagggcttcctgaagagaggcgagagaatgagcgagcccctgatcgcctacatcctgcacgaggccctgatgggcctgcagcacctgcacaacaacaagaccatccacagagacgtgaagggcaacaacatcctgctgaccaccgagggcggcgtgaagctggtggacttcggcgtgagcgcccagctgaccagcaccagacacagaagaaacaccagcgtgggcacccccttctggatggcccccgaggtgatcgcctgcgagcagcagctggacaccacctacgacgccagatgcgacacctggagcctgggcatcaccgccatcgagctgggcgacggcgacccccccctggccgacctgcaccccatgagagccctgttcaagatccccagaaaccccccccccaagctgagacagcccgagctgtggagcgccgagttcaacgacttcatcagcaagtgcctgaccaaggactacgagaagagacccaccgtgagcgagctgctgcagcacaagttcatcacccagatcgagggcaaggacgtgatgctgcagaagcagctgaccgagttcatcggcatccaccagtgcatgggcggcaccgagaaggccagaagagagagaatccacaccaagaagggcaacttcaacagacccctgatcagcaacctgaaggacgtggacgacctggccaccctggagatcctggacgagaacaccgtgagcgagcagctggagaagtgctacagcagagaccagatctacgtgtacgtgggcgacatcctgatcgccctgaaccccttccagagcctgggcctgtacagcaccaagcacagcaagctgtacatcggcagcaagagaaccgccagccccccccacatcttcgccatggccgacctgggctaccagagcatgatcacctacaacagcgaccagtgcatcgtgatcagcggcgagagcggcgccggcaagaccgagaacgcccacctgctggtgcagcagctgaccgtgctgggcaaggccaacaacagaaccctgcaggagaagatcctgcaggtgaacaacctggtggaggccttcggcaacgcctgcaccatcatcaacgacaacagcagcagattcggcaagtacctggagatgaagttcaccagcagcggcgccgtggtgggcgcccagatcagcgagtacctgctggagaagagcagagtgatccaccaggccatcggcgagaagaacttccacatcttctactacatctacgccggcctggccgagaagaagaagctggcccactacaagctgcccgagaacaagccccccagatacctgcagaacgaccacctgagaaccgtgcaggacatcatgaacaacagcttctacaagagccagtacgagctgatcgagcagtgcttcaaggtgatcggcttcaccatggagcagctgggcagcatctacagcatcctggccgccatcctgaacgtgggcaacatcgagttcagcagcgtggccaccgagcaccagatcgacaagagccacatcagcaaccacaccgccctggagaactgcgccagcctgctgtgcatcagagccgacgagctgcaggaggccctgaccagccactgcgtggtgaccagaggcgagaccatcatcagacccaacaccgtggagaaggccaccgacgtgagagacgccatggccaagaccctgtacggcagactgttcagctggatcgtgaactgcatcaacagcctgctgaagcacgacagcagccccagcggcaacggcgacgagctgagcatcggcatcctggacatcttcggcttcgagaacttcaagaagaacagcttcgagcagctgtgcatcaacatcgccaacgagcagatccagtactactacaaccagcacgtgttcgcctgggagcagaacgagtacctgaacgaggacgtggacgccagagtgatcgagtacgaggacaactggcccctgctggacatgttcctgcagaagcccatgggcctgctgagcctgctggacgaggagagcagattccccaaggccaccgaccagaccctggtggagaagttcgagggcaacctgaagagccagtacttctggagacccaagagaatggagctgagcttcggcatccaccactacgccggcaaggtgctgtacaacgccagcggcttcctggccaagaacagagacaccctgcccaccgacatcgtgctgctgctgagaagcagcgacaacagcgtgatcagacagctggtgaaccaccccctgaccaagaccggcaacctgccccacagcaagaccaagaacgtgatcaactaccagatgagaaccagcgagaagctgatcaacctggccaagggcgacaccggcgaggccaccagacacgccagagagaccaccaacatgaagacccagaccgtggccagctacttcagatacagcctgatggacctgctgagcaagatggtggtgggccagccccacttcgtgagatgcatcaagcccaacagcgagagacaggccagaaagtacgacaaggagaaggtgctgctgcagctgagatacaccggcatcctggagaccgccagaatcagaagactgggcttcagccacagaatcctgttcgccaacttcatcaagagatactacctgctgtgctacaagagcagcgaggagcccagaatgagccccgacacctgcgccaccatcctggagaaggccggcctggacaactgggccctgggcaagaccaaggtgttcctgaagtactaccacgtggagcagctgaacctgatgagaaaggaggccatcgacaagctgatcctgatccaggcctgcgtgagagccttcctgtgcagcagaagataccagaagatccaggagaagagaaaggagagcgccatcatcatccagagcgccgccagaggccacctggtgagaaagcagagaaaggagatcgtggacatgaagaacaccgccgtgaccaccatccagaccagcgaccaggagttcgactacaagaagaacttcgagaacaccagagagagcttcgtgaagaagcaggccgagaacgccatcagcgccaacgagagattcatcagcgcccccaacaacaagggcagcgtgagcgtggtgaagaccagcaccttcaagcccgaggaggagaccaccaacgccgtggagagcaacaacagagtgtaccagacccccaagaagatgaacaacgtgtacgaggaggaggtgaagcaggagttctacctggtgggccccgaggtgagccccaagcagaagagcgtgaaggacctggaggagaacagcaacctgagaaaggtggagaaggaggaggccatgatccagagctactaccagagatacaccgaggagagaaactgcgaggagagcaaggccgcctacctggagagaaaggccatcagcgagagacccagctaccccgtgccctggctggccgagaacgagaccagcttcaagaagaccctggagcccaccctgagccagagaagcatctaccagaacgccaacagcatggagaaggagaagaagaccagcgtggtgacccagagagcccccatctgcagccaggaggagggcagaggcagactgagacacgagaccgtgaaggagagacaggtggagcccgtgacccaggcccaggaggaggaggacaaggccgccgtgttcatccagagcaagtacagaggctacaagagaagacagcagctgagaaaggacaagatgagcagcttcaagcaccagagaatcgtgaccacccccaccgaggtggccagaaacacccacaacctgtacagctaccccaccaagcacgaggagatcaacaacatcaagaagaaggacaacaaggacagcaaggccaccagcgagagagaggcctgcggcctggccatcttcagcaagcagatcagcaagctgagcgaggagtacttcatcctgcagaagaagctgaacgagatgatcctgagccagcagctgaagagcctgtacctgggcgtgagccaccacaagcccatcaacagaagagtgagcagccagcagtgcctgagcggcgtgtgcaagggcgaggagcccaagatcctgagaccccccagaagacccagaaagcccaagaccctgaacaaccccgaggacagcacctactactacctgctgcacaagagcatccaggaggagaagagaagacccagaaaggacagccagggcaagctgctggacctggaggacttctactacaaggagttcctgcccagcagaagcggccccaaggagcacagccccagcctgagagagagaagaccccagcaggagctgcagaaccagtgcatcaaggccaacgagagatgctgggccgccgagagccccgagaaggaggaggagagagagcccgccgccaacccctacgacttcagaagactgctgagaaagaccagccagagaagaagactggtgcagcagagctag

SEQ ID NO: 311733 - protein, 664 aa, Artificial Sequence
  derived and/or modified sequence
MFPLIGKTIIFDNFPDPSDTWEITETIGKGTYGKVFKVLNKKNGQKAAVKILDPIHDIDEEIEAEYNILKALSDHPNVVRFYGIYFKKDKVNGDKLWLVLELCSGGSVTDLVKGFLKRGERMSEPLIAYILHEALMGLQHLHNNKTIHRDVKGNNILLTTEGGVKLVDFGVSAQLTSTRHRRNTSVGTPFWMAPEVIACEQQLDTTYDARCDTWSLGITAIELGDGDPPLADLHPMRALFKIPRNPPPKLRQPELWSAEFNDFISKCLTKDYEKRPTVSELLQHKFITQIEGKDVMLQKQLTEFIGIHQCMGGTEKARRERIHTKKGNFNRPLISNLKDVDDLATLEILDENTVSEQLEKCYSRDQIYVYVGDILIALNPFQSLGLYSTKHSKLYIGSKRTASPPHIFAMADLGYQSMITYNSDQCIVISGESGAGKTENAHLLVQQLTVLGKANNRTLQEKILQVNNLVEAFGNACTIINDNSSRFGKYLEMKFTSSGAVVGAQISEYLLEKSRVIHQAIGEKNFHIFYYIYAGLAEKKKLAHYKLPENKPPRYLQNDHLRTVQDIMNNSFYKSQYELIEQCFKVIGFTMEVLGGGEPREGGGERASSQPLRLQEAPAQNLPAPAPRPAVLTVQRGSHRRRKALEPAGQQGPSRHSGAGTSRH

SEQ ID NO: 311734 - protein, 247 aa, Artificial Sequence
  derived and/or modified sequence
MFPLIGKTIIFDNFPDPSDTWEITETIGKGTYGKVFKVLNKKNGQKAAVKILDPIHDIDEEIEAEYNILKALSDHPNVVRFYGIYFKKDKVNGDKLWLVLELCSGGSVTDLVKGFLKRGERMSEPLIAYILHEALMGLQHLHNNKTIHRDVKGNNILLTTEGGVKLVDFGVSAQLTSTRHRRNTSVGTPFWMAPEVIACEQQLDTTYDARCDTWSLGITAIELGDGDPPLADLHPMRALFKIPRSDD

SEQ ID NO: 311735 - DNA, 594 bp, Artificial Sequence
  derived and/or modified sequence
atgtttcccctcattggcaagactatcatctttgataactttcccgatccatccgacacatgggaaattaccgagaccatcggtaaaggaacttacggaaaggtgtttaaggtcctcaataagaagaacggccagaaggctgcggtcaagattctggacccaatccacgacatagatgaggagatcgaggctgagtacaatatactcaaagccttgagcgaccatcctaacgtggttcgcttttacggcatttactttaagaaggacaaagtgaacggagacaaactgtggctggtgcttgaactatgtagtggggggagtgtaactgatctcgtgaaaggtttcctcaaaagaggggaacgtatgagcgagcccctcatagcctatatccttcacgaagccctaatgggacttcagcatttacataacaacaaaactatccacagagacgtcaagggcaataatatcctgttgactaccgaaggaggagtcaaactcgttgattttggcgtttctgcccagttgacatctacacgccaccggaggaatacatcagttggcaccccattctggatggctcccgaggtgcgatag

SEQ ID NO: 311736 - DNA, 744 bp, Artificial Sequence
  derived and/or modified sequence
atgttcccactcatcggcaagacaattatctttgacaacttcccagacccttcagacacgtgggagataactgagaccatcggaaaggggacctacggcaaagttttcaaggtgctgaacaaaaagaatgggcagaaggcagctgttaaaatcctggaccctattcatgacatagatgaggagatcgaggctgagtataacatcctgaaagcattgagtgaccaccctaacgttgtgagattctatggcatctacttcaaaaaagataaagtgaatggtgataagctttggttggtactggagctctgcagtggtgggagcgtgacagatcttgtcaagggtttcctgaagaggggcgaaaggatgtcagagcccctgatcgcttacattctgcatgaagcactgatgggcttacagcatctccataacaataaaaccatacacagagatgtgaaaggtaacaacatcctccttaccacagagggcggggtgaagctggttgactttggcgtttctgcccagctcactagcacccgtcaccgcagaaatacatctgtggggactcccttctggatggccccggaggtgatcgcctgtgagcagcaactggacaccacctacgatgcccggtgcgacacctggagtctcgggattaccgccattgagctcggcgatggagatcccccgctcgctgatctgcatccaatgagggcccttttcaaaatccccaggtccgatgattag

SEQ ID NO: 311737 - DNA, 1995 bp, Artificial Sequence
  derived and/or modified sequence
atgttcccactcatcggcaaaaccatcatctttgacaattttcctgatccttcagacacatgggagataaccgaaaccattgggaagggcacatatggtaaggtcttcaaggttctcaacaaaaagaacggtcaaaaagcggctgtgaagatcctggatccgatacacgatatcgatgaggagatcgaagccgagtacaatatcctgaaagccctctccgatcaccctaacgtcgttagattttatggaatatacttcaaaaaagacaaagtgaacggcgacaagctttggcttgtcctggagctttgcagtggaggctcagtgaccgacctggtcaaaggattcctgaagagaggagaacgcatgtcggagcccttgatcgcttacatcctgcatgaagcccttatgggcctgcagcacctgcacaacaacaaaacaattcacagagacgttaaaggcaacaacatattgctcacaaccgaggggggtgtcaagcttgttgatttcggcgtgtccgcccagctcacatctacacgccaccggagaaatacttccgtcggcacaccattttggatggcacctgaggtgatcgcttgtgaacagcagttagataccacttatgatgctcgctgtgatacgtggtccctcgggataactgcaattgagctgggtgacggtgatcccccgctggctgaccttcaccctatgagagcactgttcaaaattccgcgcaatcctcctccaaagttgcggcagcccgaattatggtctgccgaatttaatgattttatcagcaaatgcctgaccaaggattacgagaagcgacccaccgtcagcgagctgctgcagcacaaatttatcactcagatagaaggtaaggatgtgatgctccagaagcagctgactgaattcatcgggattcaccagtgtatgggcggtacagagaaagcccggagagagcgcattcacactaagaaagggaattttaatcgccctttgatatctaatttgaaggacgtggatgatttggcaactttagagatcctggacgaaaacaccgtgagcgagcagcttgaaaagtgttacagccgggatcaaatttacgtgtatgttggggacatcctgatcgccctcaatcccttccagtccctcggcctttatagcactaaacatagtaagctatacatcggttccaagcggaccgcgtcaccacctcacatttttgccatggccgatctcgggtaccagtccatgatcacatataacagcgatcagtgcatcgtcatttccggcgaatcaggagctggcaagacagagaacgctcatctattggtccagcagcttacagtgcttgggaaggccaataataggacgcttcaggaaaagattctgcaggtgaacaacttagtcgaggcttttggtaatgcttgcactattatcaatgataattcttctagattcggcaaatacctggagatgaagttcaccagttctggcgccgtcgtcggtgctcaaatctcagagtaccttctcgagaagtcgagagttatccaccaagcaatcggcgagaagaacttccacattttctactacatctatgcagggttggccgagaagaagaagctagcgcactataaattaccagaaaataagccccctaggtacctccagaacgatcacctgaggactgtccaggacattatgaataacagtttctacaagagtcagtatgagctgatcgagcaatgtttcaaggtgatcgggttcacaatggaagtcctcgggggaggcgagccccgagagggggggggcgaacgtgccagcagccagcccctcaggctgcaggaggctcccgcccagaatctgccagcccctgccccacgcccagctgttctgacagtccagcgaggatcccacaggcgtagaaaagcgctggagccagcgggccagcagggaccaagccgccattcaggcgctggtactagtcgtcactag

SEQ ID NO: 311738 - DNA, 594 bp, Artificial Sequence
  derived and/or modified sequence
atgttccccctgattggcaagaccatcatctttgacaacttcccagaccccagcgacacctgggagatcacagagaccatcggcaagggcacctacggcaaggtgttcaaggtgctgaacaagaagaatggccagaaggctgctgtgaagatcctggaccccatccatgacattgatgaggagattgaggccgagtacaacatcctgaaggccctgagtgaccaccccaacgtggtgcgcttctacggcatctacttcaagaaggacaaggtgaatggagacaagctgtggctggtgctggagctgtgcagcggcggctctgtgacagacctggtgaagggcttcctgaagagaggagagaggatgtctgagcccctgattgcctacatcctgcacgaggccctgatgggcctgcagcacctgcacaacaacaagaccatccacagagatgtgaagggcaacaacatcctgctgaccacagagggcggcgtgaagctggtggactttggagtgtctgcccagctgaccagcaccaggcacagaagaaacacctctgtgggcacccccttctggatggcccctgaggtgaggtag

SEQ ID NO: 311739 - DNA, 744 bp, Artificial Sequence
  derived and/or modified sequence
atgttccccctgattggcaagaccatcatctttgacaacttcccagaccccagcgacacctgggagatcacagagaccatcggcaagggcacctacggcaaggtgttcaaggtgctgaacaagaagaatggccagaaggctgctgtgaagatcctggaccccatccatgacattgatgaggagattgaggccgagtacaacatcctgaaggccctgagtgaccaccccaacgtggtgcgcttctacggcatctacttcaagaaggacaaggtgaatggagacaagctgtggctggtgctggagctgtgcagcggcggctctgtgacagacctggtgaagggcttcctgaagagaggagagaggatgtctgagcccctgattgcctacatcctgcacgaggccctgatgggcctgcagcacctgcacaacaacaagaccatccacagagatgtgaagggcaacaacatcctgctgaccacagagggcggcgtgaagctggtggactttggagtgtctgcccagctgaccagcaccaggcacagaagaaacacctctgtgggcacccccttctggatggcccctgaggtgattgcctgtgagcagcagctggacaccacctatgatgcccgctgtgacacctggagcctgggcatcacagccatcgagctgggagatggagacccccccctggccgacctgcaccccatgagggccctcttcaagatccccaggagtgatgactag

SEQ ID NO: 311740 - DNA, 1995 bp, Artificial Sequence
  derived and/or modified sequence
atgttccccctgattggcaagaccatcatctttgacaacttcccagaccccagcgacacctgggagatcacagagaccatcggcaagggcacctacggcaaggtgttcaaggtgctgaacaagaagaatggccagaaggctgctgtgaagatcctggaccccatccatgacattgatgaggagattgaggccgagtacaacatcctgaaggccctgagtgaccaccccaacgtggtgcgcttctacggcatctacttcaagaaggacaaggtgaatggagacaagctgtggctggtgctggagctgtgcagcggcggctctgtgacagacctggtgaagggcttcctgaagagaggagagaggatgtctgagcccctgattgcctacatcctgcacgaggccctgatgggcctgcagcacctgcacaacaacaagaccatccacagagatgtgaagggcaacaacatcctgctgaccacagagggcggcgtgaagctggtggactttggagtgtctgcccagctgaccagcaccaggcacagaagaaacacctctgtgggcacccccttctggatggcccctgaggtgattgcctgtgagcagcagctggacaccacctatgatgcccgctgtgacacctggagcctgggcatcacagccatcgagctgggagatggagacccccccctggccgacctgcaccccatgagggccctcttcaagatccccaggaaccccccacccaagctgcggcagcctgagctgtggagcgctgagttcaatgacttcatcagcaagtgcctgaccaaggactatgagaagaggcccaccgtgtctgagctgctgcagcacaagttcatcacccagatcgagggcaaggatgtgatgctgcagaagcagctgacagagttcatcggcatccaccagtgcatgggcggcacagagaaggcccggcgggagcgcatccacaccaagaagggcaacttcaaccggcccctcatcagcaacctgaaggatgtggatgacctggccaccctggagatcctggatgaaaatacagtgtctgagcagctggagaagtgctacagccgggaccagatctacgtgtatgtgggggacatcctgattgccctgaaccccttccagagcctgggcctgtacagcaccaagcacagcaagctgtacatcggcagcaagaggacagccagccccccccacatctttgccatggctgacctgggctaccagagcatgatcacctacaacagcgaccagtgcatcgtcatcagcggggagagcggggccggcaagacagaaaatgcccacctgctggtgcagcagctgactgtgctgggcaaggccaacaacagaaccctgcaggagaagatcctgcaggtgaacaacctggtggaggcctttggaaatgcctgcaccatcatcaatgacaacagcagcagatttgggaagtacctggagatgaagttcaccagcagcggggctgtggtgggcgcccagatcagcgagtacctgctggagaagagcagggtcatccaccaggccatcggggagaagaacttccacatcttctactacatctatgccggcctggccgagaagaagaagctggcccactacaagctgcctgagaacaagccaccccgctacctgcagaatgaccacctgaggacagtgcaggacatcatgaacaacagcttctacaagagccagtatgagctgattgagcagtgcttcaaggtgattggcttcaccatggaggtgctgggcggcggggagccccgggagggcggcggggagcgggccagcagccagcccctgcggctgcaggaggccccagcccagaacctgcctgccccagcccccaggcctgctgtgctgactgtgcagaggggcagccacagaagaaggaaggccctggagcccgccggccagcagggccccagccgccacagcggggccggcaccagccgccactag

SEQ ID NO: 311741 - DNA, 727 bp, Artificial Sequence
  derived and/or modified sequence
aaacctttgagatgtttccattaattggaaaaacaatcatctttgataactttcctgatccttctgatacatgggaaatcactgagacaattggcaaaggaacttatgggaaagtttttaaagtattgaataagaaaaatggccaaaaagcagcagtcaaaattcttgatccaattcacgatattgacgaagagattgaagcagaatataacatcttaaaagcactttctgaccaccctaatgtggtcagattctatgggatatactttaagaaggataaagtaaatggagacaagctgtggttggttcttgagctctgcagtggaggatcagtgactgaccttgtgaaaggatttctgaagaggggtgaaagaatgagtgagcctctaattgcctatattttacatgaagcactaatgggacttcaacatttgcataacaacaaaactatccacagagatgtgaaaggcaataacattctattgaccacggaaggtggagtgaaactagtagattttggtgtgtctgcacagctcaccagtacccggcaccgtcggaacacatccgtaggaacaccgttttggatggctcctgaggtcagatagagttttgaggcagacaaacgtaatagctgatcctgtttgactttcctttttatgtgtactctatctctgtaagcattttggaatataacagaagaaactctcagttgtgttattttcatgtg

SEQ ID NO: 311742 - DNA, 2723 bp, Artificial Sequence
  derived and/or modified sequence
gcccgtagccagcgcccccgtaaagaaataaggaggcgcccggcttcccgcccaggcccagggccccagtgcagcctggacacagtattcaaagttttggcgtctgagcattgttatgcgttattttcaagctttgctaacggtttttaaacctttgagatgtttccattaattggaaaaacaatcatctttgataactttcctgatccttctgatacatgggaaatcactgagacaattggcaaaggaacttatgggaaagtttttaaagtattgaataagaaaaatggccaaaaagcagcagtcaaaattcttgatccaattcacgatattgacgaagagattgaagcagaatataacatcttaaaagcactttctgaccaccctaatgtggtcagattctatgggatatactttaagaaggataaagtaaatggagacaagctgtggttggttcttgagctctgcagtggaggatcagtgactgaccttgtgaaaggatttctgaagaggggtgaaagaatgagtgagcctctaattgcctatattttacatgaagcactaatgggacttcaacatttgcataacaacaaaactatccacagagatgtgaaaggcaataacattctattgaccacggaaggtggagtgaaactagtagattttggtgtgtctgcacagctcaccagtacccggcaccgtcggaacacatccgtaggaacaccgttttggatggctcctgaggtgattgcatgtgaacagcaattggataccacttatgacgccagatgtgacacttggtccctgggtatcacggccattgagctgggtgatggagatcctccactagctgaccttcatcccatgagagcactcttcaaaataccaaggtcagatgactaacattgggtccagtatctgcagcccgatttacttcctccagccaccaagtgttcatcatgctcttcatggagacgttcagatatattccaacaagttgggagcagaagatcctggaatattattctgcttcttctgagacattgtatttgttcagtagttgcatttccctggtctaagtaaaagagctttctcttgataatcagtgtgtctttctctcttttgctaggatttgatttcagaaaatagcagttcctcccaccctttatccattccccaatgagtcagtgaggcatcagagtccatagcctgtgcaagtgttttgctttgctttacctaccaatctagtaattttttactacttgctaagatttccctttgttcagaactttaaaataatattattaagaaaattatatataaaatttatccagaaaataatggttttaaacatgttagtattttgaatatgttaatataaaacaataaatttagaagaataacctcttttggtgccatgaaagcacttgactatttatgtggccccccactccttcatgtgtgtttcaacagattttcccctactatcctataaactaatttctttaaacactattttctatgagtggtggttagtcccttgatgtttcagataactaatgtgaaaagactgcctatatttattaaaggtgttatttttaaatatctttttaaggattttgccttaattataatgcagtgcacagccagagcctgtggtgacagggttccaaaacattagaatatttggcatctaactaaattattataagactaaaacatttgaattcatttttaattttgcctttgaatttcttgtcctatctagatgttccaaattataataccttggctatatatcatcctttacatactgcttattttgttaagtggagaaacaacattatggaaaagaatggaaaacctctatactaaatccaagacatttcattaattttgaagaaagcaggaaaaaaatctgtagtttctaattcctattgtcattcagtatgtaaggtgaagttctgtactgccttagctgttttaactgtggattaaaccatcatatttagtctgatgttattactcttgatgataatgccacatgaaggaaggatgacactgttgatagatattgtacctaggtaacaggcaatgtgcaaagtaattctagaaactgcatcatcttagttatttcttaattatgtctaccagcagtggaattccaagaatactgactatggtaatatggagaaaaagggaatctgaaaagctacccagttctgagtgttctgaaataatccaaactttgttattcaaagcaagccaataaatctcataaaaggaaattttcaggaggacaagaaacaaaacaacatttctggagaaaagaattacttcttttaatgtgcaaattagcaatcttcaaattgtcctaaggattgtgaaatgagcttagtcctgatctggggtagatgagtagctgcacttttctttaatgagcctgtacaaactgtacattaatttcattataagctatttaaggagtaatgcagaactgaagacaaagtatttccatttcactaatgaaaacaaagagctgttagaattaacataaagcagcacttcagcaaattcaactatcatggttgatcaatgttgcttgattacagagttagatcagcctcattttcaaatgatgttcctttgtattcaacgaatgtgccaaaaaatatatttgttcagcttaaactgaaaggaattaataaaattgttaaagttgt

SEQ ID NO: 311743 - DNA, 2203 bp, Artificial Sequence
  derived and/or modified sequence
gcgtctgagcattgttatgcgttattttcaagctttgctaacggtttttaaacctttgagatgtttccattaattggaaaaacaatcatctttgataactttcctgatccttctgatacatgggaaatcactgagacaattggcaaaggaacttatgggaaagtttttaaagtattgaataagaaaaatggccaaaaagcagcagtcaaaattcttgatccaattcacgatattgacgaagagattgaagcagaatataacatcttaaaagcactttctgaccaccctaatgtggtcagattctatgggatatactttaagaaggataaagtaaatggagacaagctgtggttggttcttgagctctgcagtggaggatcagtgactgaccttgtgaaaggatttctgaagaggggtgaaagaatgagtgagcctctaattgcctatattttacatgaagcactaatgggacttcaacatttgcataacaacaaaactatccacagagatgtgaaaggcaataacattctattgaccacggaaggtggagtgaaactagtagattttggtgtgtctgcacagctcaccagtacccggcaccgtcggaacacatccgtaggaacaccgttttggatggctcctgaggtgattgcatgtgaacagcaattggataccacttatgacgccagatgtgacacttggtccctgggtatcacggccattgagctgggtgatggagatcctccactagctgaccttcatcccatgagagcactcttcaaaataccaaggaatccacccccaaaactaaggcagcctgagctatggtcagcagaattcaatgacttcataagcaagtgcttgactaaagattatgaaaagcgtccaacagtgtcagaacttttacagcataaattcattactcaaattgagggcaaagatgtgatgctacaaaaacaactaacggaattcattggcatccatcaatgcatgggaggcacagaaaaggccagacgtgaacgtattcacacgaagaaagggaacttcaaccgacctctaatatccaatctgaaggatgtagatgatttagcaaccctagaaattttggatgagaatacagtctcagagcaacttgagaagtgttattccagagatcagatctacgtctatgtgggagacatactcattgctcttaacccttttcagagtctgggtctttactccacaaagcattccaaactatatattggatcaaagagaactgccagtcctcctcacatttttgcaatggctgacttaggatatcaatctatgataacatataattcagatcagtgcattgttatttctggagaaagtggtgctggaaagactgaaaatgctcatcttttagttcagcagctgacagtgcttggaaaggctaataacagaaccttgcaagagaagattttacaagtgaacaatttggtagaagcctttggcaatgcctgcactattataaatgacaattctagcagatttggaaaatacttagaaatgaaattcacctcttctggagcggtagtgggagcacagatttctgaatatctcctggaaaaatcccgagttatccaccaagctattggagaaaaaaattttcatattttttactacatttatgctggtttggctgaaaagaagaaactagcccattacaaactgcctgaaaataagcctcccaggtacctacaaaatgaccacctcagaacagtacaagacatcatgaataatagtttctataaatcccagtatgaattaattgagcaatgtttcaaagtcataggttttacaatggaggtgctgggcggcggagagccccgagaaggaggaggagagagagccagcagccaacccctacgacttcaggaggctcctgcgcaaaacctcccagcgccggcgcctcgtccagcagtcctaaccgttcaacgaggcagtcaccgccgtcggaaggcgctggagcctgcggggcagcaggggccaagcaggcactctggggctggcaccagcaggcactgaagctgcggccctgatctccgcagaggctgcctgctgcgctcggccctcaagtgcccgggccggccttcgtgctccgaaacaagagacctgggagccctcgggaaacctcccccgacgctctctctcggaactcccgcaccctcctttc

SEQ ID NO: 311744 - DNA, 594 bp, Artificial Sequence
  derived and/or modified sequence
atgttccccctgatcggcaagaccatcatcttcgacaacttccccgatcctagcgacacgtgggagataacagagacgattgggaaaggtacttacggcaaggtttttaaggttctgaacaaaaaaaatgggcagaaggccgctgtgaagattctcgatccaatacatgacattgacgaagaaatcgaggccgagtacaatatactgaaagctttgagtgatcaccccaacgtcgtgagattttacggaatctacttcaaaaaggacaaggtgaatggtgacaaactttggcttgtccttgaactctgctcaggtggctcagtgacagatctcgtgaagggttttctgaagaggggcgagagaatgagtgagcctcttatcgcatatatcctgcacgaagccttgatgggcttgcaacatctgcataacaacaagactatacaccgcgatgtcaagggcaacaatatcttactaaccacagaaggaggcgtcaagctagtggacttcggagtcagcgctcagctgacctccacaagacatagacgtaacacttctgtggggacacctttctggatggctcctgaggttaggtag

SEQ ID NO: 311745 - DNA, 744 bp, Artificial Sequence
  derived and/or modified sequence
atgttccccctgatcggcaagaccatcatcttcgacaacttccccgacccatcagatacctgggaaatcaccgagacaattggcaagggcacctatggaaaagtcttcaaagtgctcaataagaaaaacggccagaaggctgcagtgaaaattctggaccccatccatgatatcgacgaggagattgaagctgaatataacattctgaaagcacttagcgatcaccctaatgttgtgcggttctatggaatatattttaaaaaagataaggtgaatggtgataaactttggctggttctggaactgtgctctgggggcagcgtgacagaccttgtgaaggggttcttgaagcggggagaacgaatgtcagagccacttatcgcatatatactgcatgaggcacttatgggtttacagcacctacacaataacaagaccattcacagagacgtcaagggcaacaacattctattgacgacagagggaggtgtaaaattagtggattttggtgtatctgctcagctgactagtacacgacaccgccgtaacacatctgtaggcactccattttggatggccccagaggttatagcttgtgaacagcagttagatacaacatacgacgccagatgcgatacttggtcacttggcatcacggcaattgaattaggtgatggagacccaccactggcagaccttcaccctatgcgcgctttgttcaaaattccacgctctgacgattag

SEQ ID NO: 311746 - DNA, 1995 bp, Artificial Sequence
  derived and/or modified sequence
atgttccccctgatcggcaagaccatcatcttcgacaacttccccgatccgtctgacacctgggaaatcactgagaccataggcaaagggacttatgggaaggtgtttaaagtcctgaacaagaaaaatggacaaaaggccgcagtcaaaattctggatcccatccatgatatcgatgaggaaatcgaagctgagtataatattctgaaagcgctatctgatcacccgaatgtggtccgattctacgggatctacttcaagaaagataaggtgaatggagacaagctgtggctcgtgttagagctttgttcaggaggcagtgtaaccgacctggttaagggttttttgaagagaggggagcgcatgtctgaaccccttatagcatacattttgcacgaggccttgatggggctgcagcatctgcacaacaacaagacaattcaccgtgacgttaagggaaacaacatcttgcttacaacagaggggggagttaagctggtggacttcggcgttagcgctcagctgacgagtactcgccaccgacgcaacacatccgtgggtacccctttctggatggcaccagaagtcatcgcgtgcgagcagcagttggataccacatatgacgccaggtgcgatacatggtcccttggtattacggctatagaactgggagatggagatccaccgctggcggacctgcaccccatgagagcactttttaaaatccctcggaatccgcctcctaagctcaggcagcctgagctgtggtctgccgaattcaatgacttcatctcaaagtgcttaaccaaagactacgaaaagcgcccaaccgtttcggaactactgcagcataagtttatcacacaaattgaaggtaaggatgtcatgctgcagaaacagctcacagaattcattggaattcaccagtgcatgggaggaacagagaaagcaaggagggagcggatccatacaaagaagggaaacttcaatcggccattgatctcaaatctcaaggatgtggatgacctggccacacttgaaattctggatgaaaacacagtcagtgagcagcttgaaaagtgctactctcgggatcagatatacgtgtatgtgggcgacatcctcattgctctgaacccctttcagtccctaggcttatactcaaccaagcactctaagctttacattggctccaagaggactgcgagccccccacacatttttgccatggccgatctaggataccagagcatgattacctacaatagcgatcaatgtattgtcattagtggcgaaagtggcgccggaaagacagagaatgcacatttattagtgcaacaacttacagttcttggaaaggcaaacaaccggacgcttcaggaaaagatattgcaagtcaacaatctggtggaagcctttgggaacgcatgcactatcataaacgataattcttctcgctttggaaagtaccttgagatgaagtttactagctcaggagccgttgtgggtgcgcagatatctgagtatctgctcgagaaaagtagggtgatacaccaggcaataggggagaaaaactttcacattttttattatatatacgcaggactggcagaaaagaagaaactggcccactataagctgccagaaaacaagcctccaaggtacttgcagaacgatcatctgcgaaccgtgcaggatatcatgaataacagcttttacaagtcccaatatgaactcattgagcaatgtttcaaagtcatcggcttcaccatggaagtcctcggcggaggggagcctagggagggaggaggagaacgggctagctcccagcctctgcggctccaggaggcccctgctcagaacctgccggctccagcacccaggcccgccgtgctcacggtgcagcggggttcacataggcgtcgcaaagcacttgagccagcaggccagcagggcccgtctagacatagcggcgcaggaaccagccggcactag

SEQ ID NO: 311747 - DNA, 594 bp, Artificial Sequence
  derived and/or modified sequence
atgtttcctctgatcgggaagaccattattttcgacaattttcctgaccccagtgatacgtgggagattacggagacaatcgggaagggtacatacggaaaagtgtttaaggttctgaacaagaagaatgggcagaaagctgcggtaaagatacttgatcccattcatgatatagacgaagagatagaggcagaatataatattttaaaggctctgagtgatcacccgaatgtggtgcgattttatggtatctattttaaaaaggataaggttaacggagacaaattatggctcgtgctcgaactgtgtagcgggggaagtgtgaccgacctcgtcaagggtttcctgaagcgcggagagaggatgtctgaaccactcatcgcctacattctccatgaagctctgatgggcctgcagcacctccacaataacaaaaccattcaccgcgacgtcaaaggtaataacattctccttacaacagaagggggtgtcaaactcgtggatttcggcgtaagtgcccagctgacctcgactaggcacaggagaaacacatccgttggaacccctttttggatggcccctgaggtccggtag

SEQ ID NO: 311748 - DNA, 744 bp, Artificial Sequence
  derived and/or modified sequence
atgttcccattaattggcaagaccattatcttcgataatttcccagacccgtctgatacttgggaaattaccgaaaccatcggcaaagggacttacgggaaagtgtttaaggtcctgaacaagaaaaacgggcaaaaggccgctgtcaagattctcgacccaatacatgacatcgacgaagagattgaggcagagtataatatcctgaaggcattgagtgaccaccccaatgtggtgcgattctatgggatttactttaaaaaggacaaagtgaatggagataaactgtggctagttttagaactttgttccggagggagcgtcaccgatctggttaagggctttctcaagcggggagagcgcatgtctgagccactcattgcctacatcctacatgaggcattgatgggacttcagcacctgcataacaataaaacaattcacagagatgtcaaagggaacaatatacttctgactaccgaaggcggtgttaaactggtagactttggagtgagcgcacaacttaccagtacaaggcacagacggaacacgagcgttggcacccccttctggatggcaccggaggtcatcgcatgcgagcagcaactagacactacctatgatgcccgttgcgacacatggtctctgggcattactgctattgagctgggagacggggatcctcccctggctgacttgcaccccatgcgagctctctttaagattccccgtagcgacgactag

SEQ ID NO: 311749 - DNA, 1995 bp, Artificial Sequence
  derived and/or modified sequence
atgtttccccttataggtaaaacaattatttttgacaactttccggatccaagtgatacatgggagattacagagaccataggcaaaggaacgtacggaaaggtcttcaaggtactgaataagaagaatggacagaaagcggctgtgaaaatactggatcccatccacgacatcgatgaagagatcgaagccgagtacaacatactcaaggcacttagcgaccatccaaacgtcgtcaggttttacgggatatattttaagaaggacaaggttaatggcgataaactctggctggtgctggagctgtgttcgggtggctcagtgacagatcttgtgaaagggttcctgaagcggggagaaaggatgtctgagccattaatcgcctatattctgcatgaagctctgatggggctccaacatcttcataataataaaaccattcatcgcgacgtgaaaggaaacaatattctactcaccaccgaagggggagtgaagcttgtggactttggcgtttccgcacaactgacttctactagacataggaggaatacgagtgtgggaactccattttggatggccccagaggtcattgcctgtgaacagcagctcgacacgacttatgatgcaaggtgtgatacctggtcgttaggcatcacggctatcgagctgggtgacggggatccacctctggcagatctgcacccaatgcgcgcactctttaaaattccccgaaacccaccgccaaagcttaggcagcctgaactgtggtctgctgagttcaacgactttatttctaaatgtcttactaaagactacgagaagcggcctactgtgtccgagctgttgcaacataagtttatcacccaaatcgaagggaaggatgtcatgctgcagaaacaactgactgagttcatcggaatacaccagtgcatgggcggaacagagaaagccagacgcgagagaattcacactaaaaaaggtaactttaataggccactgatcagcaacctgaaagatgtggacgacctagcgacactagagatccttgacgaaaacaccgttagcgagcagttggaaaagtgctattctcgggatcagatctatgtctacgtgggagacattctgattgcattaaacccttttcaatctctgggcttgtattccaccaagcacagtaaactttatatcggaagcaaaaggaccgcgagtcccccacacatcttcgccatggccgatctaggctatcaaagcatgatcacgtacaacagcgatcagtgcatcgtaataagtggtgagtctggggctggaaagaccgagaacgctcatctgttagtgcagcagttgacagtactcggcaaagccaacaaccggactcttcaggagaagatcctgcaggtgaataacctggttgaagctttcgggaatgcctgtacgattataaacgataacagctccagattcggcaaatatctggagatgaaattcaccagcagcggggctgtcgttggggcacaaattagtgagtatcttctggaaaagtctagggtcatccaccaggcgatcggtgaaaaaaactttcatatcttttactacatttacgctgggttggccgagaaaaagaagcttgcccattataagctgcctgaaaataagcctcccaggtacctgcagaatgatcacttacgtactgtgcaggacattatgaataacagtttctacaaaagccagtatgaactgatagagcagtgtttcaaggtgattggtttcaccatggaggtgctcggtggaggagaaccccgagaggggggaggtgagagggcgtcatcacagccattacgtcttcaagaagctccagctcagaatcttccagccccagctcctaggcccgcagtgctgactgttcaacgtgggtcacaccggcgacggaaagcattggagccagcgggacagcagggtccctcaagacatagcggggcaggcaccagccgacattag

SEQ ID NO: 311750 - DNA, 594 bp, Artificial Sequence
  derived and/or modified sequence
atgttccccctgatcggcaagaccatcatcttcgacaacttccccgaccccagcgacacctgggagatcaccgagaccatcggcaagggcacctacggcaaggtgttcaaggtgctgaacaagaagaacggccagaaggccgccgtgaagatcctggaccccatccacgacatcgacgaggagatcgaggccgagtacaacatcctgaaggccctgagcgaccaccccaacgtggtgagattctacggcatctacttcaagaaggacaaggtgaacggcgacaagctgtggctggtgctggagctgtgcagcggcggcagcgtgaccgacctggtgaagggcttcctgaagagaggcgagagaatgagcgagcccctgatcgcctacatcctgcacgaggccctgatgggcctgcagcacctgcacaacaacaagaccatccacagagacgtgaagggcaacaacatcctgctgaccaccgagggcggcgtgaagctggtggacttcggcgtgagcgcccagctgaccagcaccagacacagaagaaacaccagcgtgggcacccccttctggatggcccccgaggtgagatag

SEQ ID NO: 311751 - DNA, 744 bp, Artificial Sequence
  derived and/or modified sequence
atgttccccctgatcggcaagaccatcatcttcgacaacttccccgaccccagcgacacctgggagatcaccgagaccatcggcaagggcacctacggcaaggtgttcaaggtgctgaacaagaagaacggccagaaggccgccgtgaagatcctggaccccatccacgacatcgacgaggagatcgaggccgagtacaacatcctgaaggccctgagcgaccaccccaacgtggtgagattctacggcatctacttcaagaaggacaaggtgaacggcgacaagctgtggctggtgctggagctgtgcagcggcggcagcgtgaccgacctggtgaagggcttcctgaagagaggcgagagaatgagcgagcccctgatcgcctacatcctgcacgaggccctgatgggcctgcagcacctgcacaacaacaagaccatccacagagacgtgaagggcaacaacatcctgctgaccaccgagggcggcgtgaagctggtggacttcggcgtgagcgcccagctgaccagcaccagacacagaagaaacaccagcgtgggcacccccttctggatggcccccgaggtgatcgcctgcgagcagcagctggacaccacctacgacgccagatgcgacacctggagcctgggcatcaccgccatcgagctgggcgacggcgacccccccctggccgacctgcaccccatgagagccctgttcaagatccccagaagcgacgactag

SEQ ID NO: 311752 - DNA, 1995 bp, Artificial Sequence
  derived and/or modified sequence
atgttccccctgatcggcaagaccatcatcttcgacaacttccccgaccccagcgacacctgggagatcaccgagaccatcggcaagggcacctacggcaaggtgttcaaggtgctgaacaagaagaacggccagaaggccgccgtgaagatcctggaccccatccacgacatcgacgaggagatcgaggccgagtacaacatcctgaaggccctgagcgaccaccccaacgtggtgagattctacggcatctacttcaagaaggacaaggtgaacggcgacaagctgtggctggtgctggagctgtgcagcggcggcagcgtgaccgacctggtgaagggcttcctgaagagaggcgagagaatgagcgagcccctgatcgcctacatcctgcacgaggccctgatgggcctgcagcacctgcacaacaacaagaccatccacagagacgtgaagggcaacaacatcctgctgaccaccgagggcggcgtgaagctggtggacttcggcgtgagcgcccagctgaccagcaccagacacagaagaaacaccagcgtgggcacccccttctggatggcccccgaggtgatcgcctgcgagcagcagctggacaccacctacgacgccagatgcgacacctggagcctgggcatcaccgccatcgagctgggcgacggcgacccccccctggccgacctgcaccccatgagagccctgttcaagatccccagaaaccccccccccaagctgagacagcccgagctgtggagcgccgagttcaacgacttcatcagcaagtgcctgaccaaggactacgagaagagacccaccgtgagcgagctgctgcagcacaagttcatcacccagatcgagggcaaggacgtgatgctgcagaagcagctgaccgagttcatcggcatccaccagtgcatgggcggcaccgagaaggccagaagagagagaatccacaccaagaagggcaacttcaacagacccctgatcagcaacctgaaggacgtggacgacctggccaccctggagatcctggacgagaacaccgtgagcgagcagctggagaagtgctacagcagagaccagatctacgtgtacgtgggcgacatcctgatcgccctgaaccccttccagagcctgggcctgtacagcaccaagcacagcaagctgtacatcggcagcaagagaaccgccagccccccccacatcttcgccatggccgacctgggctaccagagcatgatcacctacaacagcgaccagtgcatcgtgatcagcggcgagagcggcgccggcaagaccgagaacgcccacctgctggtgcagcagctgaccgtgctgggcaaggccaacaacagaaccctgcaggagaagatcctgcaggtgaacaacctggtggaggccttcggcaacgcctgcaccatcatcaacgacaacagcagcagattcggcaagtacctggagatgaagttcaccagcagcggcgccgtggtgggcgcccagatcagcgagtacctgctggagaagagcagagtgatccaccaggccatcggcgagaagaacttccacatcttctactacatctacgccggcctggccgagaagaagaagctggcccactacaagctgcccgagaacaagccccccagatacctgcagaacgaccacctgagaaccgtgcaggacatcatgaacaacagcttctacaagagccagtacgagctgatcgagcagtgcttcaaggtgatcggcttcaccatggaggtgctgggcggcggcgagcccagagagggcggcggcgagagagccagcagccagcccctgagactgcaggaggcccccgcccagaacctgcccgcccccgcccccagacccgccgtgctgaccgtgcagagaggcagccacagaagaagaaaggccctggagcccgccggccagcagggccccagcagacacagcggcgccggcaccagcagacactag

SEQ ID NO: 311753 - protein, 172 aa, Artificial Sequence
  derived and/or modified sequence
MGESSEDIDQMFSTLLGEMDLLTQSLGVDTLPPPDPNPPRAEFNYSVGFKDLNESLNALEDQDLDALMADLVADISEAEQRTIQAQKESLQNQHHSASLQASIFSGAASLGYGTNVAATGISQYEDDLPPPPADPVLDLPLPPPPPEPLSQVSMWDQRWQDHQPLLPITDVP

SEQ ID NO: 311754 - DNA, 519 bp, Artificial Sequence
  derived and/or modified sequence
atgggcgagagcagcgaggacatcgaccagatgttcagcaccctgctgggcgagatggacctgctgacccagagcctgggcgtggacaccctgcccccccccgaccccaacccccccagagccgagttcaactacagcgtgggcttcaaggacctgaacgagagcctgaacgccctggaggaccaggacctggacgccctgatggccgacctggtggccgacatcagcgaggccgagcagagaaccatccaggcccagaaggagagcctgcagaaccagcaccacagcgccagcctgcaggccagcatcttcagcggcgccgccagcctgggctacggcaccaacgtggccgccaccggcatcagccagtacgaggacgacctgccccccccccccgccgaccccgtgctggacctgcccctgcccccccccccccccgagcccctgagccaggtgagcatgtgggaccagagatggcaggaccaccagcccctgctgcccatcaccgacgtgccctag

SEQ ID NO: 311755 - DNA, 519 bp, Artificial Sequence
  derived and/or modified sequence
atgggagagtcttcggaagacatcgatcagatgttctccaccctgctgggagagatggatcttttaactcaaagtcttggggtcgataccttgccaccacctgatcctaaccctcccagggcagagtttaactactcagtgggatttaaggatttaaacgagtcccttaacgcactagaggaccaagatttagacgcactgatggctgatctcgtcgccgatatcagtgaagctgagcaaaggaccattcaagcccaaaaggagtctctgcagaaccagcaccactcggcatcattgcaagccagcattttttccggggccgccagccttggatatggcactaacgtggctgctacgggcatttctcagtacgaagacgatctgccccctcctccagccgacccggtgctggacctgcctctgccacccccaccaccggagcccttatcgcaggtctctatgtgggaccagaggtggcaggatcaccagccactcttaccaataacagacgtaccctag

SEQ ID NO: 311756 - DNA, 519 bp, Artificial Sequence
  derived and/or modified sequence
atgggagagagcagcgaggacatcgaccagatgttcagcaccctgctgggggagatggacctgctgacccagagcctgggcgtggacaccctgcccccaccagaccccaacccccccagggctgagttcaactacagcgtgggcttcaaggacctgaatgaaagcctgaatgccctggaggaccaggacctggatgccctgatggctgacctggtggccgacatcagcgaggccgagcagaggaccatccaggcccagaaggagagcctgcagaaccagcaccacagcgccagcctgcaggccagcatcttctctggagctgccagcctgggctacggcaccaacgtggccgccaccggcatcagccagtatgaagatgacctgcccccacctcctgctgaccctgtgctggacctgcccctgcccccacctcctcctgagcccctgagccaggtgtccatgtgggaccagcgctggcaggaccaccagcccctgctgcccatcacagatgtgccctag

SEQ ID NO: 311757 - DNA, 1513 bp, Artificial Sequence
  derived and/or modified sequence
cgctcctgagagaagggcgcgcgcggcacaggggccttccttgcacctcggagcaaagcagctcggatagcgccacacgtctgcgcgctgcgtgggaagggcagggctgacagcacttcctccccggggcagcgacctggagcccgggtgcggcagtctgcaccgcgcgtcgctttcccggccggagtctcgccgccttcccgcgccccgcagcgccccgcagagcagtcgagatgggtgagtcaagtgaagacatagaccaaatgttcagcactttgctgggagagatggatcttctgactcagagtttaggagttgacactctccctcctcctgaccctaatccacccagagctgaatttaactacagtgtggggtttaaagatttaaatgagtccttaaatgcactggaagaccaagatttagatgctctcatggcagatctggtagcagacataagtgaggctgagcagaggacaatccaggcacagaaagagtccttgcagaatcaacatcattcagcatctctacaagcatcaattttcagtggtgcagcctctcttggttatggaacaaatgttgctgccactggtatcagccaatatgaggatgacttaccacctccaccagccgatcctgtgttagaccttccactgccaccaccacctcctgaacctctctctcaggtaagtatgtgggaccagagatggcaggaccatcaacctctgctacctatcactgatgttccttgaagtgatcattacattcctaagttggtacatccaaagatctgagatactaaaaaacaaagatacagagcacgctcattgcaaagctagaaccctccgtaagcaagccacatgggtgtgtatcaagaatgtattagggccatattcaggatttactgtagtttgcttaaaaaatatttgtatgcaaaaactatttgataaaactcaatcttttgggggaaatgttttattaacatcatattgaaatgtggaactgattatatatttccatgtccctgttcttagctcagtacatagagaatagaaggcattcattatacattttctgagtagagtgaaattgaattttgttgaacttggcagccctgttcagtaggacaggtacatccaagtatcacttgtaatgtcatagttggggagggtgttacaaagcaggcagatgatgggtgcttgatattgataaatttctgaatattgaaaaacagacaactggaaagtttaaatgatcattatttgggatgttaactcatagtatgtctctcataaaagtaaaaagagcacttttaaggattttctttttagagtaagccaaatattttagaggagagtccagttcaatttcctgtggcttctacaatggtcacactgtgtcatgatgtttggtactcacaaataagaccctagggaccccgaaaggtcatacaatgccttttgaatgaacaaatattgaatataaatcaaatattaaattatactctatcaca

SEQ ID NO: 311758 - DNA, 519 bp, Artificial Sequence
  derived and/or modified sequence
atgggcgagagcagcgaggacatcgaccagatgttcagcaccctgttaggcgagatggacctgctcacgcagtccctgggagtcgatacgcttccaccaccagatcctaatcctccacgagcagagtttaattactccgtcgggtttaaagatctgaacgaatcattaaacgcactcgaggaccaggatctcgacgcactcatggccgacctggttgctgacatttccgaggccgaacagcgcaccatacaggcccagaaggaaagcctgcagaatcaacaccacagtgcctctctgcaggccagtatcttctccggagccgcatctctcggctacgggacaaacgtggccgccacagggatctctcaatatgaagatgatcttccccctccccccgctgatccggtgttggatttaccacttccaccacccccaccagaaccactgtcccaagtgtcaatgtgggaccaacggtggcaagatcatcagcctttgcttcccataaccgatgtgccatag

SEQ ID NO: 311759 - DNA, 519 bp, Artificial Sequence
  derived and/or modified sequence
atgggggaaagctccgaggatatcgatcaaatgttttctacgttgctaggtgagatggatttgctgacccagtctctgggtgtggatacactgcctccccctgatcctaatccaccaagagccgagttcaattatagcgtcggattcaaggacctgaacgaatccctgaacgccctagaagatcaggacttggacgccttgatggcagatctggtcgccgatatcagtgaggccgagcagcggacaatacaggcccagaaagagagtctgcagaatcagcaccactctgcaagcctccaggcctcaatatttagcggggctgcttctttgggatatggaacgaacgtcgccgctacgggtatttctcagtacgaagatgacctcccgcctcctccagctgacccagtgctggacctgcctctcccccctccccctccagagccgctgagtcaggtatccatgtgggaccagcgatggcaggatcaccaacctttattgccgatcactgatgtcccatag

SEQ ID NO: 311760 - protein, 705 aa, Artificial Sequence
  derived and/or modified sequence
MSKLGISFSEDQQKEKDQLGKAPKKEEAAALRKDISGSDKRSLEKNQINFWRNQMTKRWEPSLNWKTTVNYKGKGSAKEIQEDKHTGKLEKPRPSVSHGRAQLLRKSAEKIEETVSDSSSESEEDEEPPDHRQEASADLPSEYWQIQKLVKYLKGGNQTATVIALCSMRDFSLAQETCQLAIRDVGGLEVLINLLETDEVKCKIGSLKILKEISHNPQIRQNIVDLGGLPIMVNILDSPHKSLKCLAAETIANVAKFKRARRVVRQHGGITKLVALLDCAHDSTKPAQSSLYEARDVEVARCGALALWSCSKSHTNKEAIRKAGGIPLLARLLKTSHENMLIPVVGTLQECASEENYRAAIKAERIIENLVKNLNSENEQLQEHCAMAIYQCAEDKETRDLVRLHGGLKPLASLLNNTDNKERLAAVTGAIWKCSISKENVTKFREYKAIETLVGLLTDQPEEVLVNVVGALGECCQERENRVIVRKCGGIQPLVNLLVGINQALLVNVTKAVGACAVEPESMMIIDRLDGVRLLWSLLKNPHPDVKASAAWALCPCIKNAKDAGEMVRSFVGGLELIVNLLKSDNKEVLASVCAAITNIAKDQENLAVITDHGVVPLLSKLANTNNNKLRHHLAEAISRCCMWGRNRVAFGEHKAVAPLVRYLKSNDTNVHRATAQALYQLSEDADNCITMHENGAVKKNIFIS

SEQ ID NO: 311761 - DNA, 1081 bp, Artificial Sequence
  derived and/or modified sequence
ataatgcattttcagagtagaggagagcggagagaaggaagctctcacttctctgctgaacagcagagtgccttacatgcatataggagggcaaaacagatgatgaaggggacgttaattatgagagaaaaggttcaatttataaaaaccttgtcacatttttaagagaaaaatcaccaaaattttcagaaaatatgtctaaattgggaattagcttcagtgaagaccagcaaaaggaaaaggatcagcttggcaaagcccccaagaaggaagaagcagctgccctccgcaaagacatttctggttcagacaaaaggtcactggagaagaaccaaattaatttttggaggaatcaaatgaccaagagatgggaaccaagcttaaactggaagaccactgttaattacaaaggcaaaggctcagcaaaagaaatccaagaggacaaacacacaggaaaacttgaaaaaccaagaccatctgtttcacacggaagagcacaattacttcggaagagtgctgaaaagattgaggaaactgttagcgatagctcctcagaaagtgaggaagatgaagaaccacctgaccatcgtcaggaagcaagtgcagatttgccatcagaatattggcaaattcagaagctggtgaaatatttaaagggaggaaatcaaacagctacagtgattgcgttgtgttcaatgagggatttcagcttagctcaagaaacctgccagttggccatcagagatgttggaggcctggaagtgctgataatttgcttgaaaccgatgaagtcaaatgtaagattggttcattaaaaatactgaaggaaatcagtcataatcctcaaatcagacagaatattgttgaccttgggggcttaccaattatggtgaatatacttgattctccacacaagagtctaaaatgtttggcagccgagactatcgcgaatgttgccaagtttaaaagagcacggcgggtggtgaggcagcacgggggtatcaccaaactggttgctctactagactgtgcacatgattccacaaaacctgcccaatcgagtctgtatgaggccagagac

SEQ ID NO: 311762 - DNA, 2118 bp, Artificial Sequence
  derived and/or modified sequence
atgagcaagctgggcatcagcttcagcgaggaccagcagaaggagaaggaccagctgggcaaggcccccaagaaggaggaggccgccgccctgagaaaggacatcagcggcagcgacaagagaagcctggagaagaaccagatcaacttctggagaaaccagatgaccaagagatgggagcccagcctgaactggaagaccaccgtgaactacaagggcaagggcagcgccaaggagatccaggaggacaagcacaccggcaagctggagaagcccagacccagcgtgagccacggcagagcccagctgctgagaaagagcgccgagaagatcgaggagaccgtgagcgacagcagcagcgagagcgaggaggacgaggagccccccgaccacagacaggaggccagcgccgacctgcccagcgagtactggcagatccagaagctggtgaagtacctgaagggcggcaaccagaccgccaccgtgatcgccctgtgcagcatgagagacttcagcctggcccaggagacctgccagctggccatcagagacgtgggcggcctggaggtgctgatcaacctgctggagaccgacgaggtgaagtgcaagatcggcagcctgaagatcctgaaggagatcagccacaacccccagatcagacagaacatcgtggacctgggcggcctgcccatcatggtgaacatcctggacagcccccacaagagcctgaagtgcctggccgccgagaccatcgccaacgtggccaagttcaagagagccagaagagtggtgagacagcacggcggcatcaccaagctggtggccctgctggactgcgcccacgacagcaccaagcccgcccagagcagcctgtacgaggccagagacgtggaggtggccagatgcggcgccctggccctgtggagctgcagcaagagccacaccaacaaggaggccatcagaaaggccggcggcatccccctgctggccagactgctgaagaccagccacgagaacatgctgatccccgtggtgggcaccctgcaggagtgcgccagcgaggagaactacagagccgccatcaaggccgagagaatcatcgagaacctggtgaagaacctgaacagcgagaacgagcagctgcaggagcactgcgccatggccatctaccagtgcgccgaggacaaggagaccagagacctggtgagactgcacggcggcctgaagcccctggccagcctgctgaacaacaccgacaacaaggagagactggccgccgtgaccggcgccatctggaagtgcagcatcagcaaggagaacgtgaccaagttcagagagtacaaggccatcgagaccctggtgggcctgctgaccgaccagcccgaggaggtgctggtgaacgtggtgggcgccctgggcgagtgctgccaggagagagagaacagagtgatcgtgagaaagtgcggcggcatccagcccctggtgaacctgctggtgggcatcaaccaggccctgctggtgaacgtgaccaaggccgtgggcgcctgcgccgtggagcccgagagcatgatgatcatcgacagactggacggcgtgagactgctgtggagcctgctgaagaacccccaccccgacgtgaaggccagcgccgcctgggccctgtgcccctgcatcaagaacgccaaggacgccggcgagatggtgagaagcttcgtgggcggcctggagctgatcgtgaacctgctgaagagcgacaacaaggaggtgctggccagcgtgtgcgccgccatcaccaacatcgccaaggaccaggagaacctggccgtgatcaccgaccacggcgtggtgcccctgctgagcaagctggccaacaccaacaacaacaagctgagacaccacctggccgaggccatcagcagatgctgcatgtggggcagaaacagagtggccttcggcgagcacaaggccgtggcccccctggtgagatacctgaagagcaacgacaccaacgtgcacagagccaccgcccaggccctgtaccagctgagcgaggacgccgacaactgcatcaccatgcacgagaacggcgccgtgaagaagaacatcttcatcagctag

SEQ ID NO: 311763 - DNA, 2118 bp, Artificial Sequence
  derived and/or modified sequence
atgtcaaaactcggcattagttttagcgaggatcagcagaaggaaaaggatcagttaggaaaagccccgaaaaaggaggaagccgccgccctgaggaaagatattagtggaagcgataaacggagcctggagaagaatcagatcaacttctggcgtaaccagatgaccaaaagatgggaaccaagcttaaactggaagacaacagtgaactataagggcaagggatctgccaaagagattcaagaagataagcataccggcaagttggaaaagcctagaccctccgtaagtcatggcagggcacaactgctgcggaagagcgcagaaaaaatcgaggagactgtttccgattcaagcagcgaatctgaagaggacgaagagcctccggatcaccgccaggaggctagcgctgatctccctagtgaatactggcaaattcaaaagctggtgaagtatctgaaaggggggaatcagactgcaaccgtcatagctttatgttcgatgcgagatttctctttggctcaagaaacatgtcagctcgccattcgtgacgtgggtggtttggaggtgctcataaatctgctggaaactgatgaagtcaagtgcaagatcggatctctgaagatccttaaggagatcagtcacaacccccagatccgtcagaacatcgttgacctaggcggcttgcccatcatggtcaacatcctggatagcccccataagtccctcaagtgtctagccgccgagacaatcgccaacgtagcgaagtttaagcgagcaaggagggtggttagacagcatgggggcattactaagttagtggcccttctggactgcgcccacgattccaccaagccagctcagagctcactgtatgaggctagggacgtcgaggtggctcggtgtggggccctggctctgtggtcatgcagtaaatcccacaccaacaaggaggccattcgcaaagcaggcgggatcccactgcttgctcggctccttaaaactagtcatgaaaacatgcttatccctgtggtgggaaccttacaggagtgcgctagcgaggaaaactaccgcgccgcgatcaaagccgagcgaatcattgagaatctggtcaagaacctgaactctgaaaacgaacagctgcaagagcactgtgctatggccatttatcagtgtgctgaagacaaggagaccagggacctcgtcaggctgcacgggggacttaagcctcttgccagcctactgaataacactgataataaggaaaggctggcggccgtcacaggcgccatctggaagtgttccatcagtaaggagaatgtcactaagtttagggaatacaaggctattgagacattagtcggcctgttgacggatcagccagaggaagttctggtcaacgtcgtaggggctctcggggagtgctgtcaagaacgagagaatagggtcattgtgcgtaaatgtggtggcatccagcccttggtcaacctcctggtggggattaaccaagctctgctggtaaacgttacaaaggccgtgggtgcttgcgctgtggaacctgagagtatgatgatcattgatcggctggacggcgtgagactgttatggtccctactcaaaaaccctcatcctgatgtgaaggctagcgccgcctgggccttgtgtccatgtatcaaaaacgctaaagatgccggggaaatggtccggagtttcgttggcggactggagctcatcgtcaacttacttaaaagtgacaataaggaggtcctcgcatccgtgtgtgccgccatcactaatatcgctaaggatcaggaaaacctggctgttatcacagaccatggtgtggtacctctcctgagcaagcttgcaaacacaaataacaataagctaagacatcatctcgccgaggcaatttccaggtgttgtatgtggggccgaaatagggtggccttcggcgagcataaggcagtggccccattagtccgctacttgaaatctaacgataccaacgttcacagagcaacagctcaggctctgtaccaactgtcagaagatgccgacaactgcatcacaatgcatgagaacggcgcggtgaagaaaaatattttcatcagttag

SEQ ID NO: 311764 - DNA, 2118 bp, Artificial Sequence
  derived and/or modified sequence
atgagcaagctgggcatctccttcagcgaggaccagcagaaggagaaggaccagctgggcaaggcccccaagaaggaggaggccgccgccctgaggaaggacatcagcggcagtgacaagaggagcctggagaagaaccagatcaacttctggaggaaccagatgaccaagcgctgggagcccagcctgaactggaagaccaccgtgaactacaagggcaagggcagcgccaaggagatccaggaggacaagcacacaggcaagctggagaagccccggcccagcgtgagccacggccgggcccagctgctgaggaagtctgctgagaagattgaggagaccgtgtctgacagcagcagcgagagcgaggaggatgaggagcccccagaccaccggcaggaggccagcgctgacctgcccagcgagtactggcagatccagaagctggtgaagtacctgaagggcggcaaccagacagccaccgtgattgccctgtgcagcatgagggacttcagcctggcccaggagacctgccagctggccatcagagatgtgggcggcctggaggtgctgatcaacctgctggagacagatgaggtgaagtgcaagattggcagcctgaagatcctgaaggagatcagccacaacccccagatccggcagaacatcgtggacctgggcggcctgcccatcatggtgaacatcctggacagcccccacaagagcctgaagtgcctggccgctgagaccatcgccaacgtggccaagttcaagagggccaggagagtggtgcggcagcacggcggcatcaccaagctggtggccctgctggactgtgcccatgacagcaccaagccagcccagagcagcctgtatgaggccagagatgtggaggtggcccgctgtggggccctggccctgtggagctgcagcaagagccacaccaacaaggaggccatcaggaaggccggcggcatccccctgctggcccggctgctgaagaccagccatgagaacatgctgatccctgtggtgggcaccctgcaggagtgtgccagcgaggagaactacagagctgccatcaaggccgagcgcatcatcgagaacctggtgaagaacctgaacagtgaaaatgagcagctgcaggagcactgtgccatggccatctaccagtgtgccgaggacaaggagacccgggacctggtgcggctgcatggaggcctgaagcccctggccagcctgctgaacaacacagacaacaaggagcggctggccgctgtgactggagccatctggaagtgcagcatcagcaaagaaaatgtgaccaagttccgggagtacaaggccatcgagaccctggtgggcctgctgacagaccagcctgaggaggtgctggtgaatgtggtgggcgccctgggggagtgctgccaggagcgggagaacagagtcatcgtgaggaaatgtggcggcatccagcccctggtgaacctgctggtgggcatcaaccaggccctgctggtgaatgtgaccaaggctgtgggcgcctgtgctgtggagcctgagagcatgatgatcatcgaccggctggatggagtgcggctgctgtggagcctgctgaagaacccccacccagatgtgaaggccagcgctgcctgggccctgtgcccctgcatcaagaatgccaaggatgctggggagatggtgcgcagctttgtgggcggcctggagctgattgtgaacctgctgaagagtgacaacaaggaggtgctggcctctgtgtgtgccgccatcaccaacatcgccaaggaccaggagaacctggccgtcatcacagaccatggagtggtgcccctgctgagcaagctggccaacaccaacaacaacaagctgcggcaccacctggccgaggccatcagccgctgctgcatgtggggcaggaacagagtggcctttggagagcacaaggctgtggcccccctggtgcgctacctgaagagcaatgacaccaacgtgcaccgggccacagcccaggccctgtaccagctgtctgaagatgctgacaactgcatcaccatgcatgaaaatggagctgtgaagaagaacatcttcatctcctag

SEQ ID NO: 311765 - DNA, 2118 bp, Artificial Sequence
  derived and/or modified sequence
atgagcaagctgggcatcagcttcagcgaggaccagcagaaggagaaggaccagctgggaaaagctcctaagaaagaggaagcggctgcattgagaaaggacatttctggctcagataaacggtccctagagaaaaaccagattaacttctggagaaaccagatgaccaagcgctgggagccgagcctaaattggaaaactaccgtgaactataaaggaaagggtagcgccaaggagatccaagaggacaaacataccggtaaactcgagaagccccgccccagcgtgagccatgggcgtgctcagttactgaggaaatcagcagagaaaatcgaggaaacagtgagtgattccagttccgaatccgaagaagacgaggaaccaccagatcacaggcaggaggcaagcgccgatctgccatccgaatactggcagatacaaaaactggtgaaatatctcaaaggagggaatcagaccgcaacggtgatcgcactgtgctcgatgagggatttctctctagcccaggagacttgccagctggccattcgagatgtcggcgggctggaagttctcatcaatctgctggaaacagatgaggtgaagtgtaagatcgggtccctcaagattcttaaggaaatatcacataatcctcagatcagacaaaacatcgttgacctgggcggcctaccgattatggtgaatattttggactcgccgcacaagtctctcaaatgtttggctgcggagaccattgccaacgtggctaaatttaagagagccagacgggtagtccggcagcacggaggcatcacaaaactagtggccctacttgactgtgcccacgactctacaaaaccagctcagagctccttgtatgaggctagagacgtagaggtcgccagatgtggcgcgctggccctgtggtcttgctcaaaaagccacacaaataaagaagcaatccgaaaggccggaggcattcccctactggcaaggctgctaaaaacaagccacgaaaatatgttaatacccgtggtcggcacgttacaggagtgtgcttcagaggaaaattaccgggctgccattaaagccgagcggattattgaaaatttggtcaagaaccttaactcggagaatgagcagctacaggagcactgcgctatggctatataccaatgtgcagaggataaagagaccagggatctggtgcgcctacacggcggactgaagcccctggcctctctgctgaataacacagataacaaagaacgacttgccgctgtcacaggggcaatttggaaatgttccattagcaaagaaaatgtgacaaagtttcgtgagtacaaggccatcgaaactttagtcggcctcctgacagaccagcccgaggaggttctcgtgaacgtagtcggggctctgggcgagtgttgtcaggaacgagaaaatcgcgttattgtgcgtaagtgtggcgggatccagccccttgttaatctgttggtgggcatcaatcaggctctcctcgtgaacgtcactaaggcagtgggcgcctgtgcggttgagcccgaatctatgatgatcatcgacagactagatggcgttcggcttctttggtcactcctgaagaacccccacccagatgtcaaggcttctgccgcatgggccctgtgcccatgtattaagaatgctaaagatgccggggaaatggtgaggtcgtttgtgggaggactagagctgatcgtcaatctgctgaaatcagataataaggaggtgctggccagcgtgtgcgccgcaataaccaacattgcgaaggatcaggagaacctggcagtgatcactgaccacggggttgtacccctactgagcaagcttgccaataccaacaacaacaagctcagacatcaccttgctgaagccatctcgcggtgctgtatgtggggcagaaatagagtagccttcggcgaacacaaagccgtggcccctctagtacgatacctgaaatctaacgataccaacgtgcaccgcgctacagctcaggccctataccagctctctgaggatgctgacaactgcatcacaatgcatgaaaacggcgcggtcaaaaagaacatttttatttcctag

SEQ ID NO: 311766 - DNA, 2118 bp, Artificial Sequence
  derived and/or modified sequence
atgtccaaattagggatctccttttctgaagatcaacagaaggagaaagatcagctggggaaggcccctaaaaaagaagaggccgctgcgcttcgaaaggacatctccgggtcggataagcgaagtctggaaaaaaaccaaatcaatttctggcgaaatcaaatgactaaacgctgggagcctagcctgaattggaagacaactgtgaactacaaaggaaagggaagcgctaaggaaattcaggaggataagcatacggggaaactagaaaagccacggcctagcgtttcccacggcagagctcagcttctcaggaagtccgccgagaaaatcgaggagacagtaagtgactcctcctctgagtcagaggaggacgaagagcccccagatcaccgccaggaagcctctgccgatctcccttccgaatattggcaaatccagaaactggtcaagtatctaaaagggggaaatcagaccgccacggttatcgctctgtgtagcatgagggacttcagcctggctcaagagacttgccagctcgccatcagggatgtgggtggactggaggtgctcattaatctactcgagacagacgaagtcaagtgcaaaatcggatctcttaagatcctgaaagagatatctcataaccctcagattcggcagaacatagtggacttgggtggtctacccattatggtgaatatcctcgattctccgcacaagtctctgaagtgcctggccgcagagacaattgcgaatgtggccaaatttaaacgggcaaggagggtcgtgcgtcaacacggagggatcacaaagctcgtagccctgctggactgtgcccacgactcaacaaagcctgcacagagctcattatacgaagccagagatgttgaagtggctagatgcggcgcactggcgttgtggagctgcagcaaatcccataccaacaaagaggccatcagaaaagctggaggtatacccctgctagctcgcctactgaaaacttcgcatgaaaacatgttaatacccgtagtggggaccctgcaagaatgcgcatccgaagagaattatagagctgccatcaaagccgagcggatcattgaaaatcttgttaaaaacttaaattctgaaaacgaacaactgcaagagcactgtgctatggctatttaccagtgtgctgaggacaaagagactagggatttagtgcggcttcacggcggactcaagcccttggcaagtctactgaacaatactgataacaaggaaaggctggccgcagtcacaggtgccatctggaagtgcagcatttcgaaggaaaacgtaactaagttccgggagtataaggctatcgaaaccctggtaggcctgttgaccgaccagcctgaagaggtgctggtgaatgttgtaggagcacttggcgaatgttgccaggagcgggagaatcgggtcattgtgagaaagtgtggcggaattcagccacttgtgaatctcctggtgggtattaatcaggcacttctcgtgaacgtaaccaaagcggtgggagcttgcgctgtggagccagagagcatgatgattatagaccgattggacggagtgcgtctcttatggagtctactgaagaacccccaccctgacgttaaagctagtgcagcctgggcactctgtccctgtatcaaaaacgcgaaagatgccggtgagatggtcagaagtttcgtaggagggcttgagctgattgttaatcttctgaagagtgacaataaagaagtgcttgcgagtgtgtgtgcagctataacaaacatagccaaggatcaagagaatctcgctgttatcacggaccacggagtcgtgcctctcctgagtaagctggccaacaccaacaataacaaactgagacaccatctggccgaggccatatctaggtgttgcatgtggggaaggaatcgggtggcttttggagagcacaaagctgtggcacccctggtgagataccttaaatctaatgatactaatgtgcaccgagctactgctcaggccctctatcagctgtcagaggacgccgacaactgcatcaccatgcatgagaatggggctgtcaaaaagaacatcttcatttcatag

SEQ ID NO: 311767 - DNA, 3004 bp, Artificial Sequence
  derived and/or modified sequence
gtagaaggtaggagacagtgccctatgaagctgggacccagacctcttgggagggtccacttccaggctgtgctggtccccacagagttcagaccatctccatgaggcagggctccagatctctgaagagtgggcactgcccagttaatgctcatacctcgggaagaggatccttgtagagatggcagagctgggacctggacctttgaaaatggagcactggatgactgatagtgatatttcccagggggtgaggtgagcctgtttctgggaccgtgaaaaatcaacaaacctggaaactggaaccaactgttgctactggaagcaactgccactgtgtggaaagaagggccgttgctggggtgactctaacagggacagtgggccagcaggaagcagcaggtccctcctccctctgccagcctttcagtcttcctttagctgattctaatgacggagcctaataacctagcctggtgaaaggagaaatacgacattgcagattcctgcggcaaaacagatgatgaaggggacgttaattatgagagaaaaggttcaatttataaaaaccttgtcacatttttaagagaaaaatcaccaaaattttcagaaaatatgtctaaattgggaattagcttcagtgaagaccagcaaaaggaaaaggatcagcttggcaaagcccccaagaaggaagaagcagctgccctccgcaaagacatttctggttcagacaaaaggtcactggagaagaaccaaattaatttttggaggaatcaaatgaccaagagatgggaaccaagcttaaactggaagaccactgttaattacaaaggcaaaggctcagcaaaagaaatccaagaggacaaacacacaggaaaacttgaaaaaccaagaccatctgtttcacacggaagagcacaattacttcggaagagtgctgaaaagattgaggaaactgttagcgatagctcctcagaaagtgaggaagatgaagaaccacctgaccatcgtcaggaagcaagtgcagatttgccatcagaatattggcaaattcagaagctggtgaaatatttaaagggaggaaatcaaacagctacagtgattgcgttgtgttcaatgagggatttcagcttagctcaagaaacctgccagttggccatcagagatgttggaggcctggaagtgctgataaatttgcttgaaaccgatgaagtcaaatgtaagattggttcattaaaaatactgaaggaaatcagtcataatcctcaaatcagacagaatattgttgaccttgggggcttaccaattatggtgaatatacttgattctccacacaagagtctaaaatgtttggcagccgagactatcgcgaatgttgccaagtttaaaagagcacggcgggtggtgaggcagcacgggggtatcaccaaactggttgctctactagactgtgcacatgattccacaaaacctgcccaatcgagtctgtatgaggccagagacgtggaagtggctcgctgtggggcactggccctgtggagctgcagtaagagtcatacgaataaagaagccatccgcaaagctgggggcattcctctgttggctcggctgctgaagacttctcatgaaaacatgctaattccagtggtggggacattgcaagagtgtgcatcagaggaaaactaccgggctgcaatcaaagcagaaaggatcattgaaaaccttgtcaagaacctaaatagtgagaatgagcagctgcaggagcactgcgccatggccatttaccagtgtgctgaagataaggaaacccgggacctcgttaggctgcacggaggacttaagcccttggccagtctactcaataacactgacaataaagagcggttagctgctgtcacaggggctatatggaaatgttccatcagcaaagagaatgttaccaagtttcgggaatacaaagccattgaaaccttggtgggacttctaacagatcagcctgaagaagtacttgtgaatgtggttggggccttgggagaatgctgccaagaacgtgaaaaccgagtcattgtccggaaatgtggtggcattcaaccacttgtgaacctccttgttggaataaaccaagctcttcttgtgaatgttacaaaagcagttggtgcttgtgcagtagaacctgaaagtatgatgataattgatcgcttagatggagttcgtttgttgtggtccctgctgaaaaatcctcacccagacgtgaaggccagcgcagcatgggcactctgtccatgcatcaaaaatgcaaaggatgctggggaaatggttcgttcctttgttggtggtttggaacttattgtcaatttactgaaatcagataacaaagaagttctggcaagtgtatgtgctgccattaccaacatagcaaaagatcaagaaaatttagctgttatcacagatcatggagttgttcctttattgtccaaactggcaaatacaaataacaataaattgagacatcatctagcagaagctatttcacgttgctgtatgtggggcaggaatagagtggccttcggtgagcacaaagcagtggctccactagtgcgttatctgaaatcaaatgacaccaacgtgcatcgggcgacagctcaggccttgtaccaactctcagaagacgccgataactgcatcaccatgcatgagaatggtgcagtaaagaaaaacatttttatctcttagaagaaatgactagagtgaacctcaaaacctcatctgcaaattgactcatggatccataaattcactcctggaccccagttgagaaccctgaccctaaggattctgagcctgcaaaccctggagaaaagtggggtttggctgatctcagctgggccaggtgaggattagcaccaggttgcaagtagattcaattctgcttcctctgtcttcattgcaggatcagaggctacgtgagattagagtttcatagtccactgtgagcattaatttg

SEQ ID NO: 311768 - DNA, 1059 bp, Artificial Sequence
  derived and/or modified sequence
atgaaggagaacagcatcgccctgaacatcctgggcaagatcaccagagacgacgaccccgagagcgagatcaagatgaagatcgccatgctgctgaagcagctggacctgcacctgctgaaccacagcctgaagcacatcagcctggagatcagcctgagccccatgaccgtgaagaaggacatcgagctgctgaagagattcagcggcaagggcaaccagaccgtgctggagagcatcgagtacaccagcgactacgagttcagcaacggctgcagagcccccccctggagacagatcagaggcgagatctgctacgtgctggtgaagccccacgacggcgagaccctgtgcatcacctgcagcgccggcggcgtgttcctgaacggcggcaagaccgacgacgagggcgacgtgaactacgagagaaagggcagcatctacaagaacctggtgaccttcctgagagagaagagccccaagttcagcgagaacatgagcaagctgggcatcagcttcagcgaggaccagcagaaggagaaggaccagctgggcaaggcccccaagaaggaggaggccgccgccctgagaaaggacatcagcggcagcgacaagagaagcctggagaagaaccagatcaacttctggagaaaccagatgaccaagagatgggagcccagcctgaactggaagaccaccgtgaactacaagggcaagggcagcgccaaggagatccaggaggacaagcacaccggcaagctggagaagcccagacccagcgtgagccacggcagagcccagctgctgagaaagagcgccgagaagatcgaggagaccgtgagcgacagcagcagcgagagcgaggaggacgaggagccccccgaccacagacaggaggccagcgccgacctgcccagcgagtactggcagatccagaagctggtgaagtacctgaagcagaaggagaccagccagaacggcagaaacaagagatggatcagaaagcagaacaccagagtgatcagaagcatgatcttcgacgtgggcaagaccagctag

SEQ ID NO: 311769 - DNA, 1170 bp, Artificial Sequence
  derived and/or modified sequence
ctgagcagactgctgctgatcgccaagaccggcaagctgaaggaggcccaggcctgcgtggaggccaacagagaccccatcgtgaagatcctgggcagcgactacaacaccatgaaggagaacagcatcgccctgaacatcctgggcaagatcaccagagacgacgaccccgagagcgagatcaagatgaagatcgccatgctgctgaagcagctggacctgcacctgctgaaccacagcctgaagcacatcagcctggagatcagcctgagccccatgaccgtgaagaaggacatcgagctgctgaagagattcagcggcaagggcaaccagaccgtgctggagagcatcgagtacaccagcgactacgagttcagcaacggctgcagagcccccccctggagacagatcagaggcgagatctgctacgtgctggtgaagccccacgacggcgagaccctgtgcatcacctgcagcgccggcggcgtgttcctgaacggcggcaagaccgacgacgagggcgacgtgaactacgagagaaagggcagcatctacaagaacctggtgaccttcctgagagagaagagccccaagttcagcgagaacatgagcaagctgggcatcagcttcagcgaggaccagcagaaggagaaggaccagctgggcaaggcccccaagaaggaggaggccgccgccctgagaaaggacatcagcggcagcgacaagagaagcctggagaagaaccagatcaacttctggagaaaccagatgaccaagagatgggagcccagcctgaactggaagaccaccgtgaactacaagggcaagggcagcgccaaggagatccaggaggacaagcacaccggcaagctggagaagcccagacccagcgtgagccacggcagagcccagctgctgagaaagagcgccgagaagatcgaggagaccgtgagcgacagcagcagcgagagcgaggaggacgaggagccccccgaccacagacaggaggccagcgccgacctgcccagcgagtactggcagatccagaagctggtgaagtacctgaagcagaaggagaccagccagaacggcagaaacaagagatggatcagaaagcagaacaccagagtgatcagaagcatgatcttcgacgtgggcaagaccagctag

SEQ ID NO: 311770 - DNA, 621 bp, Artificial Sequence
  derived and/or modified sequence
atgagcaagctgggcatcagcttcagcgaggaccagcagaaggagaaggaccagctgggcaaggcccccaagaaggaggaggccgccgccctgagaaaggacatcagcggcagcgacaagagaagcctggagaagaaccagatcaacttctggagaaaccagatgaccaagagatgggagcccagcctgaactggaagaccaccgtgaactacaagggcaagggcagcgccaaggagatccaggaggacaagcacaccggcaagctggagaagcccagacccagcgtgagccacggcagagcccagctgctgagaaagagcgccgagaagatcgaggagaccgtgagcgacagcagcagcgagagcgaggaggacgaggagccccccgaccacagacaggaggccagcgccgacctgcccagcgagtactggcagatccagaagctggtgaagtacctgaagggcggcaaccagaccgccaccgtgatcgccctgtgcagcatgagagacttcagcctggcccaggagacctgccagctggccatcagagacgtgggcggcctggaggtgctgatcatctgcctgaagcccatgaagagcaacgtgagactggtgcactag

SEQ ID NO: 311771 - DNA, 1059 bp, Artificial Sequence
  derived and/or modified sequence
atgaaggagaactccattgctctgaacatacttggtaaaatcactcgggacgacgacccagaatctgaaatcaaaatgaagatcgctatgctgctcaagcagcttgacctgcacctgctcaaccacagtctgaaacatattagcctggagatttctctctcaccaatgacagtgaagaaggacatcgagctcttaaagcgcttttcaggtaagggcaaccagacagtcttagagtcaattgagtacaccagcgattacgaattctccaacggttgtagggctccgccatggcgacagataagaggcgaaatctgctacgtgctggttaagccgcacgacggggaaacactctgcatcacctgcagcgctggcggggttttcttaaacgggggcaagaccgatgatgaaggagacgtgaactacgagcgcaaaggatctatttataaaaatcttgtgacattcctgcgcgagaaaagtcccaagttctccgagaacatgtctaagctcggaatctcatttagcgaagaccagcagaaagaaaaagaccaactaggaaaggccccaaagaaagaagaagcagccgctctgagaaaagacatatctggatcagacaaaagaagtcttgagaaaaaccagatcaacttctggcgaaatcaaatgaccaaacggtgggagccgagtctcaattggaagactaccgtcaattataaaggaaaaggctctgctaaagagattcaggaagacaagcatactggcaaattggagaagccaaggcctagcgtatcacacggccgtgcccagcttctgagaaagtctgccgaaaaaatcgaggaaacggtaagtgacagctcctcagagtcagaagaggacgaagagcctccagaccacaggcaggaagcgtcagccgacctgcccagtgaatattggcaaatccagaagctagtcaagtacttgaagcagaaggaaacatcccaaaacggtagaaacaagaggtggattcgcaagcagaacactcgcgtgatcaggtcaatgattttcgatgtcggaaagacgtcatag

SEQ ID NO: 311772 - DNA, 1170 bp, Artificial Sequence
  derived and/or modified sequence
cttagcagactactgctcatcgccaaaacaggcaaattgaaagaagcccaggcttgtgtggaggccaatagagaccccattgttaagatacttggatccgactacaatactatgaaagaaaatagcatagcactgaacattttaggaaaaataactcgtgatgacgaccccgagtctgagattaagatgaagatagcaatgctgcttaaacagctcgatctacatctgcttaaccattctcttaagcacatctccctggagatttctctatcccccatgactgttaagaaggacatagaacttttgaaacgcttctcagggaaggggaaccaaaccgtgctggagagtatcgagtatacctccgattatgagttttctaatggttgtcgcgcgcctccctggagacagatccgcggtgaaatatgttatgtgctggttaaacctcatgacggggaaacactgtgcatcacctgctcagctggtggcgtattccttaatggcggcaagacagacgatgagggcgacgtaaattacgagagaaaaggaagcatttacaaaaatctggtgacattcctgagagaaaagtccccaaaattctctgagaatatgagcaagctgggcatttcatttagtgaggatcaacagaaagaaaaagatcaactgggcaaggcaccgaagaaagaggaagccgccgccctgcggaaggacatctccgggagcgataagcgctcacttgagaagaaccaaatcaacttttggagaaaccagatgacaaagcgatgggagccaagtctgaattggaaaactaccgtcaattacaaaggaaagggtagcgcaaaggaaatccaggaggacaaacacacgggaaagttagagaaacctaggccctctgtctctcacgggcgtgcacaactgctacgcaagagtgcggaaaaaatagaagagacagtgagcgattcttcgtcggaatccgaagaagacgaggagcctccggaccatagacaggaagcctcggctgacttaccatctgagtactggcaaatccagaagctggtgaaatacctgaaacagaaagagactagccagaatgggagaaacaaacggtggataagaaagcagaatactagggtgattaggagtatgattttcgacgtgggaaagacctcatag

SEQ ID NO: 311773 - DNA, 621 bp, Artificial Sequence
  derived and/or modified sequence
atgtctaagctcgggatatcatttagtgaagaccagcagaaagagaaggatcaactggggaaagcccctaaaaaggaagaagctgccgcactgagaaaagatatttccggcagtgataaaaggagcctggagaagaatcagatcaacttttggcggaaccagatgactaaaagatgggaaccttcgttaaactggaagaccacagtgaactataaggggaaggggagcgctaaagaaattcaggaggacaagcacactggcaaactcgagaagccaagaccatccgtgtcccacggaagggcacagctcctccgtaagagtgctgagaagattgaggagactgtgagcgactcctcctccgagtccgaggaagatgaggagccccctgatcataggcaggaagcttcagcggatctgccctctgagtactggcagatccagaagctcgtgaaatacctgaagggtggaaaccagacagctacagtgattgccttatgcagtatgagagatttcagcctggcacaagagacttgccaactggctatcagagacgtgggaggcctggaagtgctcattatttgtcttaaacctatgaagtctaacgtccggctagtgcactag

SEQ ID NO: 311774 - DNA, 1059 bp, Artificial Sequence
  derived and/or modified sequence
atgaaggaaaattccatcgccctgaacatcctgggcaagatcaccagagatgatgatcctgagagcgagatcaagatgaagatcgccatgctgctgaagcagctggacctgcacctgctgaaccacagcctgaagcacatcagcctggagatcagcctgagccccatgacagtgaagaaggacatcgagctgctgaagcgcttctctggaaaaggaaaccagacagtgctggagagcattgagtacaccagtgactatgagttcagcaatggctgccgggccccaccctggaggcagatccggggggagatctgctacgtgctggtgaagccccatgatggagagaccctgtgcatcacctgcagcgctggaggagtcttcctgaatggaggcaagacagatgatgaaggagatgtgaactatgaaaggaagggcagcatctacaagaacctggtgaccttcctgcgggagaagagccccaagttcagcgagaacatgagcaagctgggcatctccttcagcgaggaccagcagaaggagaaggaccagctgggcaaggcccccaagaaggaggaggccgccgccctgaggaaggacatcagcggcagtgacaagaggagcctggagaagaaccagatcaacttctggaggaaccagatgaccaagcgctgggagcccagcctgaactggaagaccaccgtgaactacaagggcaaaggaagtgccaaggagatccaggaggacaagcacacaggcaagctggagaagccccggcccagcgtgagccacggccgggcccagctgctgaggaagtctgctgagaagattgaggagaccgtgtctgacagcagcagcgagagtgaagaagatgaggagcccccagaccaccggcaggaggccagcgctgacctgcccagcgagtactggcagatccagaagctggtgaagtacctgaagcagaaggagaccagccagaatggaagaaacaagcgctggatcaggaagcagaacaccagggtcatccgctccatgatctttgatgtgggcaagaccagctag

SEQ ID NO: 311775 - DNA, 1170 bp, Artificial Sequence
  derived and/or modified sequence
ctgagccggctgctgctgattgccaagacaggcaagctgaaggaggcccaggcctgtgtggaggccaacagagaccccatcgtgaagatcctgggcagtgactacaacaccatgaaggagaacagcatcgccctgaacatcctgggcaagatcaccagagatgatgatcctgagagcgagatcaagatgaagatcgccatgctgctgaagcagctggacctgcacctgctgaaccacagcctgaagcacatcagcctggagatcagcctgagccccatgacagtgaagaaggacatcgagctgctgaagcgcttcagcggcaagggcaaccagacagtgctggagagcattgagtacaccagtgactatgagttcagcaatggctgccgggccccaccctggaggcagatccggggggagatctgctacgtgctggtgaagccccatgatggagagaccctgtgcatcacctgcagcgctgggggcgtcttcctgaatggaggcaagacagatgatgaaggagatgtgaactatgaaaggaagggcagcatctacaagaacctggtgaccttcctgcgggagaagagccccaagttcagcgagaacatgagcaagctgggcatctccttcagcgaggaccagcagaaggagaaggaccagctgggcaaggcccccaagaaggaggaggccgccgccctgaggaaggacatcagcggcagtgacaagaggagcctggagaagaaccagatcaacttctggaggaaccagatgaccaagcgctgggagcccagcctgaactggaagaccaccgtgaactacaagggcaagggcagcgccaaggagatccaggaggacaagcacacaggcaagctggagaagccccggcccagcgtgagccacggccgggcccagctgctgaggaagtctgctgagaagattgaggagaccgtgtctgacagcagcagcgagagcgaggaggatgaggagcccccagaccaccggcaggaggccagcgctgacctgcccagcgagtactggcagatccagaagctggtgaagtacctgaagcagaaggagaccagccagaatggaagaaacaagcgctggatcaggaagcagaacaccagggtcatccgctccatgatctttgatgtgggcaagaccagctag

SEQ ID NO: 311776 - DNA, 621 bp, Artificial Sequence
  derived and/or modified sequence
atgagcaagctgggcatctccttcagcgaggaccagcagaaggagaaggaccagctgggcaaggcccccaagaaggaggaggccgccgccctgaggaaggacatcagcggcagtgacaagaggagcctggagaagaaccagatcaacttctggaggaaccagatgaccaagcgctgggagcccagcctgaactggaagaccaccgtgaactacaagggcaagggcagcgccaaggagatccaggaggacaagcacacaggcaagctggagaagccccggcccagcgtgagccacggccgggcccagctgctgaggaagtctgctgagaagattgaggagaccgtgtctgacagcagcagcgagagcgaggaggatgaggagcccccagaccaccggcaggaggccagcgctgacctgcccagcgagtactggcagatccagaagctggtgaagtacctgaagggcggcaaccagacagccaccgtgattgccctgtgcagcatgagggacttcagcctggcccaggagacctgccagctggccatcagagatgtgggcggcctggaggtgctgatcatctgcctgaagcccatgaagagcaatgtgcggctggtgcactag

SEQ ID NO: 311777 - DNA, 1059 bp, Artificial Sequence
  derived and/or modified sequence
atgaaggagaacagcatcgccctgaacatcctgggcaagatcacccgcgacgatgatcctgaatcagagataaaaatgaaaattgctatgttactcaagcagctggacctgcatcttctgaatcacagcttgaagcacatttccctcgaaatttccctttctcctatgacggtgaagaaagacatagagttgctgaaaaggttctcaggtaagggtaatcagacggtcctggagagcatagaatacacttcagactatgagttctccaacggatgcagagctcccccctggcgccaaattagaggggagatctgctacgtgctcgtgaaaccacacgacggagagactctgtgcatcacttgctcagcagggggggttttcctgaacggggggaaaaccgacgacgaaggcgacgtgaattatgaacgaaaaggtagcatctacaaaaatctggtgacttttttgagagaaaaatctcccaagttctcagaaaatatgagcaagctgggaataagtttttcagaggaccagcaaaaggagaaagatcaactcggcaaagctcctaagaaggaggaagcggcggcattgcggaaggatatcagtggttctgacaagcgcagcctggagaaaaatcagatcaacttctggagaaatcaaatgactaagagatgggagccctcactgaattggaagacgacagtgaactacaagggaaaaggttctgccaaagaaattcaggaagacaagcataccgggaaactggagaagccccggccttccgtttctcatggccgggctcagcttctgcggaaatcagctgaaaagattgaagaaacagtgagtgatagctcttctgagtctgaggaagacgaagagccccctgaccatagacaggaggcgtccgctgacctgccaagcgagtattggcaaatacagaaactggtgaaatatttaaagcaaaaagaaacatcccagaacggacgtaacaagcgctggatccgtaagcagaacactagggtcattagatcgatgatcttcgacgtcggcaagacgtcctag

SEQ ID NO: 311778 - DNA, 1170 bp, Artificial Sequence
  derived and/or modified sequence
ctgagccggctgctgctgatcgccaagaccggcaagctgaaggaggcacaggcttgtgtggaggccaatcgtgaccctattgtgaagatcctaggctccgattataatacgatgaaggagaatagtatagccctgaatatcctgggaaagatcacaagagacgacgatccagagagtgagatcaaaatgaagatcgccatgctgctgaaacagttggacctacatttgctgaatcatagcctcaaacacattagtttggagatttccttatctcctatgacggtcaaaaaggacatcgaattgttaaaaaggttctctggtaaaggcaatcaaactgtactggagtccatcgaatatacttccgactacgagttcagcaacggctgccgcgcgcctccctggcggcagatccgaggggagatctgctatgtcttggttaagccacacgacggagagactttgtgcataacgtgcagtgccgggggggtgtttttgaacggtgggaagaccgatgacgaaggcgacgtgaactacgagcgaaaggggagtatctataagaacctcgtgacatttctgagggaaaaatcacccaagttctctgagaacatgagcaagctcggaatctcctttagcgaggaccagcaaaaggaaaaggaccagctaggaaaagcccctaaaaaagaagaagcagcggctctcaggaaggatatttcaggctcagacaagcgcagtctggagaaaaaccagataaatttctggcgcaatcagatgacaaagcgctgggaaccttctctgaattggaaaaccacggtgaattacaagggcaagggttccgcaaaggaaatccaggaggacaaacacaccgggaagcttgaaaaaccccggccaagcgtgagccatggaagggcccagctgctgaggaagagtgcggaaaagatagaagaaacagtgtcagactccagctccgagtctgaagaagatgaagaacctcccgatcaccgtcaagaagcgtccgccgacctgccttccgagtactggcaaattcagaaactagtcaaatacctcaagcagaaagagacatcccaaaatgggcgcaacaagcggtggatcagaaaacagaacactcgtgtgattaggagcatgattttcgacgtcggcaaaacatcatag

SEQ ID NO: 311779 - DNA, 621 bp, Artificial Sequence
  derived and/or modified sequence
atgagcaagctgggcatcagcttcagcgaggaccagcagaaggagaaggatcaattgggcaaggcaccaaagaaagaggaagctgccgcgcttcgaaaggacattagcggtagtgacaagcgctcgctggagaagaaccagatcaacttctggaggaaccagatgacaaaacgatgggagccatccttgaattggaagaccacagtcaattataaaggcaagggtagtgcgaaagagatccaagaggataaacacactggaaagctcgagaagcctaggccgagcgtgtcacatgggcgggcccagctcttgcggaagtctgccgaaaaaattgaggagacagtgagcgactctagttctgaatctgaggaggatgaggaaccacctgatcacagacaggaagcatctgcagacctcccgagcgagtactggcagattcaaaagctggtcaagtatctgaaaggtggaaatcagaccgccaccgtgatagccttgtgcagtatgcgcgatttctccctcgcccaggagacctgtcagctggctataagagacgtgggcgggctggaagttctgatcatctgtctgaagcctatgaaaagtaatgtgagattagtacactag

SEQ ID NO: 311780 - DNA, 1059 bp, Artificial Sequence
  derived and/or modified sequence
atgaaggaaaatagcattgcccttaacatcctcggcaagattacccgggatgacgacccagagagtgagatcaaaatgaagatcgctatgctcctgaaacagttagacctgcacctcctgaatcattctttgaaacacatttctctggaaatcagtctgtcacctatgacagtgaagaaggatattgagctcctaaaacggttttccgggaaagggaaccagaccgtgttagaatctatagagtatacttccgattatgagttctccaatgggtgcagggcacccccttggaggcagattcggggtgaaatatgttacgtcctcgtaaagccacacgatggcgaaactctttgtatcacatgtagtgccggaggtgtgttcctcaacggaggaaagactgacgatgagggcgatgtcaactatgagcgcaaaggctctatttacaaaaacctggtaacctttctaagggagaagtccccgaagttttcagaaaatatgagtaagcttggcatatcttttagtgaggatcagcagaaagagaaggaccaactaggtaaagctcctaagaaagaagaggcagctgccctcaggaaagatattagcggaagcgacaaaaggtcactggaaaaaaatcagattaacttctggcggaatcagatgacgaagcgctgggagcccagcctgaattggaaaactactgtcaactataagggtaaggggtccgctaaagagattcaggaggataagcatactggaaaactcgagaagccgagacctagtgtgtcacacgggcgtgctcagctgcttcgtaagtctgccgagaaaatcgaggagacagtctcggatagctcttctgaatctgaagaggacgaggagccgcctgatcatagacaggaagcatccgctgatctccctagcgaatactggcagatccagaaactggtcaagtacctgaagcagaaagagacaagccaaaacgggagaaataaacgctggatacggaagcaaaatactcgggtaatccgctccatgatctttgacgtcggcaaaacttcatag

SEQ ID NO: 311781 - DNA, 1170 bp, Artificial Sequence
  derived and/or modified sequence
ctgagccgcctgctgcttatcgctaaaacaggtaaattaaaggaagcacaggcgtgcgtggaggccaaccgggatcccatagtgaaaatcttgggcagcgactataacactatgaaggagaacagtattgctctgaatatcctcgggaaaattactagagatgacgatcccgaaagtgagatcaagatgaagatcgcaatgttattgaagcagctggacctgcacctcctgaatcacagcctcaagcatatcagtctcgagatcagtctgagccccatgacagtgaaaaaagatattgagctgttgaaaaggttttcaggcaaaggtaatcagactgttctggaatcaatcgagtatacaagtgactatgaattctccaatggatgcagagcgcctccttggaggcaaatcagaggcgaaatctgctatgtgctggttaagcctcatgacggagaaacactgtgtataacatgctcagccggtggcgtttttcttaatggtgggaagactgacgatgagggcgatgtcaactatgaacgcaagggtagtatctacaagaacctcgtcaccttcctgcgcgaaaaatcccccaagtttagtgagaacatgtccaagctaggaatctcattctctgaggatcagcaaaaagaaaaggaccaactggggaaggcaccgaaaaaggaggaggctgctgcgctgcgaaaagacatttcgggtagcgacaagagaagcctcgaaaagaaccagatcaacttttggcgaaaccaaatgactaagaggtgggagcctagcttaaactggaagacaacagttaactacaaaggcaagggatcagctaaagaaatccaagaagataaacatacaggcaagctggagaaacctcggcctagcgtgagccacggcagggctcagctgttgagaaagtccgctgaaaagatagaggagaccgtgtctgactcctcctccgaatctgaagaggatgaagaacctccagatcataggcaagaggcttccgcagacctgccaagcgaatattggcagatccagaaactagttaaatatttgaagcagaaggagacaagtcaaaacggccgaaacaagcgttggattcggaaacaaaacactagagttatccgttctatgatcttcgacgttgggaaaacctcttag

SEQ ID NO: 311782 - DNA, 621 bp, Artificial Sequence
  derived and/or modified sequence
atgtcaaagttgggaatttcgttctcggaagatcaacaaaaagaaaaggaccagctcggcaaagcccctaaaaaagaggaggccgcagcactgagaaaggacatttccgggtccgataagaggagtttagagaagaatcagattaacttctggaggaatcagatgacaaaaagatgggagccgagcctgaattggaagacaacagtcaattataagggtaaaggctcggccaaagagatccaggaggataaacatactggcaaactagaaaagccgagaccatcagtgtctcacggacgagcacagctcctgcgaaagtcagccgaaaaaatagaggagacagtctccgacagctcctctgaatccgaagaagatgaggagcctccagaccatcggcaggaagcatcagcggacttaccgagtgagtactggcagatccagaagctggttaagtacctcaaggggggtaatcagaccgccaccgtgatcgctttatgctccatgagagacttcagtttagcacaggaaacttgtcagctggccatcagagacgtgggcggactcgaagtgttgatcatttgtctaaagcccatgaagtccaacgtgcggttggtacattag

SEQ ID NO: 311783 - DNA, 1737 bp, Artificial Sequence
  derived and/or modified sequence
ctgtcacgcttgttacttattgccaaaactgggaagttgaaggaagcccaagcatgtgttgaagctaacagagaccccatagtaaaaatcctgggctctgattataatacaatgaaagaaaactcaattgcattaaatattcttggcaaaattaccagagatgatgatcctgaaagtgaaattaagatgaagattgctatgctgcttaagcaattggatctgcacctcctcaatcattctctaaaacatatttcattagaaataagtttaagtcccatgacggtgaagaaggatatagaactgctcaaacgtttctcaggaaaaggaaaccaaacagtcttggaatctattgaatatacctcagattatgaattttcaaatggatgtcgagccccaccgtggagacaaattcgtggggaaatttgttatgtgctggtgaaacctcacgatggtgagactctgtgcattacttgcagtgcaggaggagtatttttaaatggtggcaaaacagatgatgaaggggacgttaattatgagagaaaaggttcaatttataaaaaccttgtcacatttttaagagaaaaatcaccaaaattttcagaaaatatgtctaaattgggaattagcttcagtgaagaccagcaaaaggaaaaggatcagcttggcaaagcccccaagaaggaagaagcagctgccctccgcaaagacatttctggttcagacaaaaggtcactggagaagaaccaaattaatttttggaggaatcaaatgaccaagagatgggaaccaagcttaaactggaagaccactgttaattacaaaggcaaaggctcagcaaaagaaatccaagaggacaaacacacaggaaaacttgaaaaaccaagaccatctgtttcacacggaagagcacaattacttcggaagagtgctgaaaagattgaggaaactgttagcgatagctcctcagaaagtgaggaagatgaagaaccacctgaccatcgtcaggaagcaagtgcagatttgccatcagaatattggcaaattcagaagctggtgaaatatttaaagcaaaaggaaacaagtcaaaatggcagaaacaaaagatggatcaggaagcagaataccagagtaattagaagcatgatctttgacgttggaaagaccagttgagttgaaattctgccgcttactcaatggccttgggtgatgatgctgtaccctaattctaaaggaagcaatgaacccccttttcagctaccttactgataagcacttatgttctgccttctgctatcctgatggttcaggttgtctgtcttactatctacttcttgagtagagagaccacattaaatttattgctgtatctcgcagggcatcttgctagtgtgcacaggctcgcctccctacctctgccccgatggtgtgaaggggagagggcgaggttccttagtggcagggctttgctgttcttcactctcagccccctgaaagcagttcttcctgcctctgagcctgtctttccttctgctgttaacttctttcctacttttcttgcatccctctctcttccttttcctgccgtctttcttgtagacatactagttgattgctgtatttgctgactttatatggatattattttttcctctggccaaaattgttttaaaatcttgcaaggaaaatgtcttgcttttgatcacttccagagattaaaggagatggtttgttaatgtc

SEQ ID NO: 311784 - DNA, 6815 bp, Artificial Sequence
  derived and/or modified sequence
gaacgctcacagaacaggcagtgcaattccatgttcctcttaagtatgttagccctaccgggagctgagctggccagtctacttggagaggaaaagtagatctggggaaggtggaagggtcagttcctaagtgacttcctcctcggggatggtaagggcatttgctgatctccagtgactgcctggtgcctcatggtcagactcggctgtctcactcccagatatctgattttgcaaaaagggacacacctatctgcagcaaagaagacactgaccagattgcgagcggtgcttttggatgctctgtagccacccggggcccaggaggactgactcggcagcaggattcgtgcatgggaatcggagaccatggcagtgcagctggtgcccgactcagctctcggcctgctgatgatgacggagggccgccgatgtcaagtacatcttcttgatgacaggaagctggaactcctagtacagcccaagctgttggccaaggagcttcttgaccttgtggcttctcacttcaatctgaaggaaaaggagtactttggaatagcattcacagatgaaacgggacacttaaactggcttcagctagatcgaagagtattggaacatgacttccctaaaaagtcaggacccgtggttttatacttttgtgtcaggttctatatagaaagcatttcatacctgaaggataatgctaccattgagcttttctttctgaacgcgaagtcctgcatctacaaggagcttattgacgttgacagcgaagtggtgtttgaattagcttcctatattttacaggaggcaaagggagatttttctagcaatgaagttgtgaggagtgacttgaagaagctgccagcccttcccacccaagccctgaaggagcacccttccctggcctactgtgaagacagagtcattgagcactacaagaaactgaacggtcagacaagaggtcaagcaatcgtaaactacatgagcatcgtggagtctctcccaacctacggggttcactattatgcagtgaaggacaagcagggcataccatggtggctgggcctgagctacaaagggatcttccagtatgactaccatgataaagtgaagccaagaaagatattccaatggagacagttggaaaacctgtacttcagagaaaagaagttttccgtggaagttcatgacccacgcagggcttcagtgacaaggaggacgtttgggcacagcggcattgcagtgcacacgtggtatgcatgtccggcattgatcaagtccatctgggctatggccataagccaacaccagttctatctggacagaaagcagagtaagtccaaaatccatgcagcacgcagcctgagtgagatcgccatcgacctgaccgagacggggacgctgaagacctcgaagctggccaacatgggtagcaaggggaagatcatcagcggcagcagcggcagcctgctgtcttcaggttctcaggaatcagatagctcgcagtcggccaagaaggacatgctggctgccttgaagtccaggcaggaagctctggaggaaaccctgcgtcagaggctggaggaactgaagaagctgtgtctccgagaagctgagctcacgggcaagctgccagtagaatatcccctggatccaggggaggaaccacccattgttcggagaagaataggaacagccttcaaactggatgaacagaaaatcctgcccaaaggagaggaagctgagctggaacgcctggaacgagagtttgccattcagtcccagattacggaggccgcccgccgcctagccagtgaccccaacgtcagcaaaaaactgaagaaacaaaggaaaacctcgtatctgaatgcactgaagaaactgcaggagattgaaaatgcaatcaatgagaaccgcatcaagtctgggaagaaacccacccagagggcttcgctgatcatagacgatggaaacattgccagtgaagacagctccctctcagatgcccttgttcttgaggatgaagactctcaggttaccagcacaatatcccccctacattctcctcacaagggactccctcctcggccaccgtcgcacaacaggcctcctcctccccagtccctggagggactccgacagatgcactatcaccgcaacgactatgacaagtcacccatcaagcccaaaatgtggagtgagtcctctttagatgaaccctatgagaaggtcaagaagcgctcctctcacagccattccagcagccacaagcgcttccccagcacaggaagctgtgcggaagccggcggaggaagcaactccttgcagaacagccccatccgcggcctcccgcactggaactcccagtccagcatgccgtccacgccagacctgcgggtccggagtccccactacgtccattccacgaggtcggtggacatcagccccacccgactgcacagcctcgcactgcactttaggcaccggagctccagcctggagtcccagggcaagctcctgggctcggaaaacgacaccgggagccccgacttctacaccccgcggactcgtagcagcaacggctcagaccccatggacgactgctcgtcgtgcaccagccactcgagctcggagcactactacccggcgcagatgaacgccaactactccacgctggccgaggactcgccgtccaaggcgcgccagaggcagaggcagcggcagcgggcggcgggcgcactgggctcagccagctcgggcagcatgcccaacctggcggcgcgcgggggtgcggggggcgcggggggcgcggggggcggtgtgtacctgcacagccagagccagcccagctcgcagtaccgcatcaaggagtacccgctgtacatcgagggcggcgccacgcccgtggtggtgcgcagcctggagagcgaccaggagggccactacagcgtcaaggctcagttcaagacgtccaactcctacacggcgggcggcctgttcaaggagagctggcgcggcggcggcggcgacgagggcgacacgggccgcctgacgccgtcgcgatcgcagatcctgcggactccgtcgctgggccgcgagggcgcccacgacaagggcgcgggccgtgccgccgtctcagacgagctgcgccagtggtaccagcgttccaccgcctcgcacaaggagcacagccgcctgtcgcacaccagctccacctcctcggacagcggctcgcagtacagcacctcctcccagagcaccttcgtggcgcacagcagggtcaccaggatgccccagatgtgcaaggccacgtcagctgccttacctcaaagccagagaagctcgacaccgtcaagtgaaattggagccacccccccaagcagcccccaccacatcctaacctggcagactggagaagcaacagaaaactcacccattctggatgggtctgagtctccacctcaccaaagtactgatgaatagaggagctacaatgatagctgtttcctggattcctccctctatccagaactagctgatgtccagtggtacgggcaggaaaaagccaagcccgggaccctcgtgtgagccagcccggcctaatctgaccgcctcaacgccattctgagatcacctcactgcctctcatttgccttacccagacgcaccgtcaccctgcaccagctttggccctcagcactttttttctcctgtctccgcattccctcccccttgaaaacctgactgaggagacattctggaaggttccggtcccactgtgtgtcccctggcgctcttgcccatagagagccagacaccaatcctcaatggcaccttggtggcttccctctgccatgacagcccctaggccaggaaccatcaggggggccagccggcatccaattcctgcggataagtagcgttgggagagaacgggaaaggggacttgagttacagggtgacccagaaagacgattcagctgtgtccagcctgccacccatacgtaggccaaccaagcacttcatgaagaggaggcctcgtggcatattcagtttacacctgaaatattccttgatgggacagcttgtggggatggctatgggggaaggggaggttgagaaaggaagttctcgacaccagaaatgcatcggaggaccacaatcagttctatgctgccaaagattaaaaataaataaaaacataaaaaattaagaggggccaagaggaagacattctttctgcaaggaaatttcttttaaattctgaactgctactacacacaagtgaaagtcaaccctatgtaaactggtgtcctctctctagccctctcccttactggcccacttctctctccgtagagagcctgaaaaactgccccaatgccacggtaaaggcgaggaagtcttggctggcgttgctgactcacagtcgccatccatctggacacaaagagagacctgtgggagtcgtagagggtactgttagccccggtccatgcagggggttcagccgagcccaagactcaaagctgctttcctttcaggatttgtagtaacgtaaggtgataatggccaaaagtggttctctctcattaaaccaaccagtaaaagcgtatcctatttttttgcacaaggtgtttcattttcgtttttatgggaaaccaagggaaaagcacattgcgatccattcagtgtttaactgtcgtggctcattttctgttcgttagcacttgtgtgacaaaagagctcagatccgacttctcctatgtgtcacttattccaagaacccaactatgcccttaggtagaaagatttgactcgtgtgtctactagccaacaggcagagcagggttgaaaaaaatatcagctcccaaagggcccatgtgtctacatcatcagttactgtcatgcaccacatttgtgtgcagataccaaaagaggaggaaagaagaaaaaaattaatgtgtgggagctgcacgtttacatgttttgagctatgcttcaaacacaactggaaagccatcaatcttcaaaggcctcaaaaatacttttatagtaacaagtgcacgactttagttgggttattcaagatggcacaaaaaggtttccgcagaggtggtatgctgtgcttttggcgcaagtggtggggggatggggtgggggtggaatttttttctcactctaatgacttcctattggaaaggcattgacagccagggacaggagccagggtgggggtagttttgtgggaaagcagaactgaagttagcttaagcataaaaacaaagaaaaatcttcgcttttcatgtatgtggaatccaagaataaccataggctctaccagaccagaagggtaaggatggacactaaaatgaaacaaataccaaggtattccttctgctgcagcctggagaccaccgagagtcgagctggggcacacacacacctggccgggacccggcagggacaaggcgggccgtggcctcctccaccaagtctctctagacaattcagggcctgctttccccagctccatgcatggctggactggtgattccagggtgcagaagggattcatattcccagaacgctttaagtgtacacctgcaggataaagagataccggttacattattaaatgattctagggattcactgggggatatttttgttgcttttactttcatggttagagctacaaagaacagtgattttttttttttctcccttccccattcagaaacattatacattgggccatttttctttctcccaaagaagattcatggatagtcagactgaactgtgtgcaacaggaaaagtcaaaagggaaaaggtagctgatgaggttacatggttacatgttctacatcatgcatagtagcttgaaatctagtctggagaaaactggatcaagattctagcccactggagttgcaaggaatgagaggcaaaaattctaaagatttgggttatattttcaacttgggggacagagagaaatggagagcaggaattacagttccaacaaacatcatgatagtctggtagtcaagacagagattaagtaaaacaggttttactgtttagctgagttcagttaatacaaaatgtacataaaacgttagtcctttgagactgacatgattaatgatcagtgtggtgggaaatgatgtagttattgtacacaagcacttgcaaactctttatccctatttctttaaaacaaaataaggtgaaatacgaagtccttggtctgatataaagcccctattggattcttcggatgcgtaaaagaaattgcctgtttcagccagaagactggtgaaaacacatacatcagactatgttgtgagccaggttgattttttattttattatatgcaggtgagtgttgaaactgttaaaattccaatttgttttcattcagtattagtttagttctaaatatagcaaaccccatccaggtgctatcagatgaccagttactgcttagttaactaggtgtaaagttttacatatacattaatgtcaatagtttattacaagttgtgtaaaatggactctagtttaataatgggggaaaaaagattaggttgctcctgaaactgactgtagagcatgtaaaatgattttactggattctgttcaactgtaatcaatgaaaaagatgtacgttgtagacaaagttgcagaattaaaaaaagaaatctgcttttaatttattctttttgtattaagaatttgtatagtacctttacattttgcaaaacagtgttgtcaacacttattaaagcattttcaaaatg

SEQ ID NO: 311785 - protein, 1461 aa, Artificial Sequence
  derived and/or modified sequence
MQRELVYARGDGPGAPRPGSTAHPPHAIPNSPPSTPVPHSMPPSPSRIPYGGTRSMVVPGNATIPRDRISSLPVSRPISPSPSAILERRDVKPDEDMSGKNIAMYRNEGFYADPYLYHEGRMSIASSHGGHPLDVPDHIIAYHRTAIRSASAYCNPSMQAEMHMEQSLYRQKSRKYPDSHLPTLGSKTPPASPHRVSDLRMIDMHAHYNAHGPPHTMQPDRASPSRQAFKKEPGTLVYIEKPRSAAGLSSLVDLGPPLMEKQVFAYSTATIPKDRETSEKMMKTTANRNHTDSAGTPHVSGGKMLSALESTVPPSQPPPVGTSAIHMSLLEMRRSVAELRLQLQQMRQLQLQNQELLRAMMKKAELEISGKVMETMKRLEDPVQRQRVLVEQERQKYLHEEEKIVKKLCELEDFVEDLKKDSTAASRLVTLKDVEDGAFLLRQVGEAVATLKGEFPTLQNKMRAILRIEVEAVRFLKEEPHKLDSLLKRVRSMTDVLTMLRRHVTDGLLKGTDAAQAAQYMAMEKATAAEVLKSQEEAAHTSGQPFHSTGAPGDAKSEVVPLSGMMVRHAQSSPVVIQPSQHSVALLNPAQNLPHVASSPAVPQEATSTLQMSQAPQSPQIPMNGSAMQSLFIEEIHSVSAKNRAVSIEKAEKKWEEKRQNLDHYNGKEFEKLLEEAQANIMKSIPNLEMPPATGPLPRGDAPVDKVELSEDSPNSEQDLEKLGGKSPPPPPPPPRRSYLPGSGLTTTRSGDVVYTGRKENITAKASSEDAGPSPQTRATKYPAEEPASAWTPSPPPVTTSSSKDEEEEEEEGDKIMAELQAFQKCSFMDVNSNSHAEPSRADSHVKDTRSGATVPPKEKKNLEFFHEDVRKSDVEYENGPQMEFQKVTTGAVRPSDPPKWERGMENSISDASRTSEYKTEIIMKENSISNMSLLRDSRNYSQETVPKASFGFSGISPLEDEINKGSKISGLQYSIPDTENQTLNYGKTKEMEKQNTDKCHVSSHTRLTESSVHDFKTEDQEVITTDFGQVVLRPKEARHANVNPNEDGESSSSSPTEENAATDNIAFMITETTVQVLSSGEVHDIVSQKGEDIQTVNIDARKEMTPRQEGTDNEDPVVCLDKKPVIIIFDEPMDIRSAYKRLSTIFEECDEELERMMMEEKIEEEEEEENGDSVVQNNNTSQMSHKKVAPGNLRTGQQVETKSQPHSLATETRNPGGQEMNRTELNKFSHVDSPNSECKGEDATDDQFESPKKKFKFKFPKKQLAALTQAIRTGTKTGKKTLQVVVYEEEEEDGTLKQHKEAKRFEIARSQPEDTPENTVRRQEQPSIESTSPISRTDEIRKNTYRTLDSLEQTIKQLENTISEMSPKALVDTSCSSNRDSVASSSHIAQEASPRPLLVPDEGPTALEPPTSIPSASRKGSSGAPQTSRMPVPMSAKNRPGTLDKPGKQSKLQDPRQYRQ

SEQ ID NO: 311786 - protein, 1532 aa, Artificial Sequence
  derived and/or modified sequence
MQRELVYARGDGPGAPRPGSTAHPPHAIPNSPPSTPVPHSMPPSPSRIPYGGTRSMVVPGNATIPRDRISSLPVSRPISPSPSAILERRDVKPDEDMSGKNIAMYRNEGFYADPYLYHEGRMSIASSHGGHPLDVPDHIIAYHRTAIRSASAYCNPSMQAEMHMEQSLYRQKSRKYPDSHLPTLGSKTPPASPHRVSDLRMIDMHAHYNAHGPPHTMQPDRASPSRQAFKKEPGTLVYIEKPRSAAGLSSLVDLGPPLMEKQVFAYSTATIPKDRETSEKMMKTTANRNHTDSAGTPHVSGGKMLSALESTVPPSQPPPVGTSAIHMSLLEMRRSVAELRLQLQQMRQLQLQNQELLRAMMKKAELEISGKVMETMKRLEDPVQRQRVLVEQERQKYLHEEEKIVKKLCELEDFVEDLKKDSTAASRLVTLKDVEDGAFLLRQVGEAVATLKGEFPTLQNKMRAILRIEVEAVRFLKEEPHKLDSLLKRVRSMTDVLTMLRRHVTDGLLKGTDAAQAAQYMAMEKATAAEVLKSQEEAAHTSGQPFHSTGAPGDAKSEVVPLSGMMVRHAQSSPVVIQPSQHSVALLNPAQNLPHVASSPAVPQEATSTLQMSQAPQSPQIPMNGSAMQSLFIEEIHSVSAKNRAVSIEKAEKKWEEKRQNLDHYNGKEFEKLLEEAQANIMKSIPNLEMPPATGPLPRGDAPVDKVELSEDSPNSEQDLEKLGGKSPPPPPPPPRRSYLPGSGLTTTRSGDVVYTGRKENITAKASSEDAGPSPQTRATKYPAEEPASAWTPSPPPVTTSSSKDEEEEEEEGDKIMAELQAFQKCSFMDVNSNSHAEPSRADSHVKDTRSGATVPPKEKKNLEFFHEDVRKSDVEYENGPQMEFQKVTTGAVRPSDPPKWERGMENSISDASRTSEYKTEIIMKENSISNMSLLRDSRNYSQETVPKASFGFSGISPLEDEINKGSKISGLQYSIPDTENQTLNYGKTKEMEKQNTDKCHVSSHTRLTESSVHDFKTEDQEVITTDFGQVVLRPKEARHANVNPNEDGESSSSSPTEENAATDNIAFMITETTVQVLSSGEVHDIVSQKGEDIQTVNIDARKEMTPRQEGTDNEDPVVCLDKKPVIIIFDEPMDIRSAYKRLSTIFEECDEELERMMMEEKIEEEEEEENGDSVVQNNNTSQMSHKKVAPGNLRTGQQVETKSQPHSLATETRNPGGQEMNRTELNKFSHVDSPNSECKGEDATDDQFESPKKKFKFKFPKKQLAALTQAIRTGTKTGKKTLQVVVYEEEEEDGTLKQHKEAKRFEIARSQPEDTPTSIPSASRKGSSGAPQTSRMPVPMSAKNRPGTLDKPGKQSKLQDPRQYRQANGSAKKSGGDFKPTSPSLPASKIPALSPSSGKSSSLPSSSGDSSNLPNPPATKPSIASNPLSPQTGPPAHSASLIPSVSNGSLKFQSLTHTGKGHHLSFSPQSQNGRAPPPLSFSSSPPSPASSVSLNQGAKGTRTIHTPSLTSYKAQNGSSSKATPSTAKETS

SEQ ID NO: 311787 - protein, 611 aa, Artificial Sequence
  derived and/or modified sequence
MPHLDMKTHVCPSVEGPKKKGGITCFCCGGPFRAADRSKTRSPKLSHSPQPPSLGDPVEHLSETSADSLEAMSEGDAPTPFSRGSRTRASLPVVRSTNQTKERSLGVLYLQYGDETKQLRMPNEITSADTIRALFVSAFPQQLTMKMLESPSVAIYIKDESRNVYYELNDVRNIQDRSLLKVYNKDPAHAFNHTPKTMNGDMRMQRELVYARGDGPGAPRPGSTAHPPHAIPNSPPSTPVPHSMPPSPSRIPYGGTRSMVVPGNATIPRDRISSLPVSRPISPSPSAILERRDVKPDEDMSGKNIAMYRNEGFYADPYLYHEGRMSIASSHGGHPLDVPDHIIAYHRTAIRSASAYCNPSMQAEMHMEQSLYRQKSRKYPDSHLPTLGSKTPPASPHRVSDLRMIDMHAHYNAHGPPHTMQPDRASPSRQAFKKEPGTLVYIEKPRSAAGLSSLVDLGPPLMEKQVFAYSTATIPKDRETSEKMMKTTANRNHTDSAGTPHVSGGKMLSALESTVPPSQPPPVGTSAIHMSLLEMRRSVAELRLQLQQMRQLQLQNQELLRAMMKKAELEISGKVMETMKRLEDPVQRQRVLVEQERQKYLHEEEKIVKKL

SEQ ID NO: 311788 - DNA, 5029 bp, Artificial Sequence
  derived and/or modified sequence
actttttatccatgccagtgtcagcttctctccgaaaactgggtaatacgaaatggtctttattggttgtgaacactcgagctgagaaacattttaggatctttgtgtcttttgtgatgattttgtttctgaagaggaagctgtctaaaatattcaagtgtgcaaccaaggatttagatgaagccagcaaacaaaggaatcatgtaatcaggacctgagcgaatgtgcttactcacggcgttagttacacaggtgatttccttaagaaaaaatgcagagagaacttgtttatgcaagaggagatggccctggggcccctcgccccggatctactgctcatccaccccatgcgattccaaattccccaccgtctactccagtgccccattccatgcccccctccccgtccagaattccttatgggggcacccgctccatggttgttcctggcaatgccaccatccccagggacagaatctccagcctgccagtctccagacccatctctccaagcccaagcgccattttagaaagaagagatgtcaagcctgatgaagacatgagtggcaaaaacattgcaatgtacagaaatgagggtttctatgctgatccttacctttatcacgagggacggatgagcatagcctcatcccatggtggacacccactggatgtccccgaccacatcattgcatatcaccgcaccgccatccggtcagcgagtgcttattgtaacccctcaatgcaagcggaaatgcatatggaacaatcactgtacagacagaaatcaaggaaatatccggatagccatttgcctacactgggctccaaaacaccccctgcctctcctcacagagtcagtgacctgaggatgatagacatgcacgctcactataatgcccacggcccccctcacaccatgcagccagaccgggcctctccgagccgccaggcctttaaaaaggagccaggcaccttggtgtatatagaaaagccacggagcgctgcaggattatccagccttgtagacctcggccctcctctaatggagaagcaagtttttgcctacagcacggcgacaatacccaaagacagagagaccagcgagaaaatgatgaaaaccacagccaacaggaaccacacagatagtgcaggaacgccccatgtgtctggtgggaagatgctcagtgctctggagtccacggtgcctcccagccagcctccacctgtgggcacctcagccatccacatgagcctgcttgagatgaggcggagcgtggcggaactcaggctccagctccagcagatgcggcagctccagctgcagaaccaggagttgctgagggcaatgatgaagaaggccgagctggaaatcagtggcaaagtgatggaaacaatgaagagactggaggatcccgtgcagcgacagcgcgtcctagtggagcaagagagacaaaaatatcttcatgaggaagagaagatcgtcaagaagttgtgcgagttggaagactttgttgaagacttgaagaaggactccacggcagccagccgattggttactctgaaagacgtggaagacggggctttcctcctgcgtcaagtgggagaggctgtagctaccctgaaaggagaatttccaaccttacaaaacaagatgcgagccatcctgcgcatagaagtggaggccgtgcggtttctgaaggaggagccacacaagctggacagtctcctgaagcgtgtgcgcagcatgacagacgtcctgaccatgctgcggagacatgtcactgatgggctcctgaaaggcacggacgcagcccaagccgcacagtacatggctatggaaaaggccacagccgcagaagtcctgaagagtcaggaggaggcagcccacacctccggccagcccttccacagcacaggtgcccctggcgatgcgaagtcggaagtggtgcctttgtccggcatgatggttcgccacgcgcagagctcccctgtggtcatccagccctcccagcactccgtggccctgctgaaccctgctcagaacttgcctcacgtggccagctccccagccgtcccccaggaagcaacctccactctgcagatgtcgcaggctccgcagtccccacagatacccatgaatgggtctgccatgcagagcttgttcattgaagaaatccacagtgtgagtgccaagaacagggcagtgtctatcgagaaagcagaaaagaaatgggaggaaaaaaggcaaaatctggatcactataatgggaaagagtttgagaagctcctagaagaagctcaggccaatatcatgaagtcaataccaaatctggagatgccgccagccacaggcccactgccaaggggagatgccccagtggacaaggtggaactttcagaagattctccaaattcggaacaggacttggaaaagctggggggaaagtcgccccctcctcctccgccacctcctcgtcgaagctacctgccaggatcgggactcaccaccacgaggtcaggcgatgtggtctacaccggcagaaaggagaacatcaccgctaaggcaagcagtgaagatgctggaccaagcccacagaccagagctacaaaatatccagcagaggagcctgcttcagcctggaccccatccccaccgcctgtcaccacctcctcctcaaaggatgaggaggaagaagaagaagaaggagacaaaataatggcagaactccaggcattccagaagtgttcctttatggatgtaaattcaaacagtcatgctgagccatcccgggctgacagtcacgttaaagacactaggtcgggcgccacagtgccacccaaggagaagaagaatttggaatttttccatgaagatgtacggaaatctgatgttgaatatgaaaatggcccccaaatggaattccaaaaggttaccacaggggctgtaagacctagtgaccctcctaagtgggaaagaggaatggagaatagtatttctgatgcatcaagaacatcagaatataaaactgagatcataatgaaggaaaattccatatccaatatgagtttactcagagacagtagaaactattcccaggaaactgtgcctaaggccagtttcggtttctctggcattagtccattagaagatgaaataaacaaagggtctaaaatctcaggcctgcaatactctatacctgacaccgagaaccagacgctgaattacggaaagacaaaggagatggaaaagcaaaatacggataagtgtcacgtttcctctcacactagactaacagaatcaagcgtgcatgattttaaaacagaagatcaagaggttatcacgacagattttggccaagttgttctaagacccaaggaggcaaggcatgctaacgtgaaccctaatgaggatggagaatcaagttcaagttctcccactgaagaaaatgcagccactgacaatattgccttcatgattaccgaaaccactgtccaggttctttccagtggggaggtgcatgatattgttagccaaaagggagaagacatacagacggttaatatcgatgccagaaaagagatgaccccccgacaagaagggactgacaatgaggatccagtcgtgtgcctggacaagaaaccagtgatcatcattttcgatgagcccatggacatccggtctgcctataagagactttcaactatctttgaggaatgtgatgaggaattagagagaatgatgatggaggaaaagatagaggaggaggaagaggaggaaaatggggattctgtagtccagaataataacacttcccagatgtctcataagaaggtggccccaggcaatcttagaaccggacaacaggtggaaacaaagtcacagccacactccctggccacagagaccagaaacccaggaggacaggaaatgaacagaacggagctgaacaagttcagccacgtggattctccaaattcggaatgcaagggtgaggacgcgaccgatgaccagtttgaaagccccaagaaaaagtttaaattcaaattccctaagaagcaactcgccgctctcactcaagccattcgcaccggaactaaaacagggaagaagactttgcaagtggtagtctatgaagaagaggaagaggatggcaccctgaaacagcacaaagaagccaagcgcttcgaaatcgctaggtctcaacctgaagacacccctacgtcgataccttcagcttcacgtaagggctccagcggggccccacagacgagcaggatgcctgtccccatgagtgccaagaacagacccggaaccctggacaaacccggcaagcagtccaaactgcaggatccccgccaatatcgtcaggctaatggaagtgctaagaaatctggtggggactttaagcctacttccccctccttacctgcttctaagattccagccctttctcccagctctgggaaaagcagttctctgccctcttctagtggtgacagctctaacctccctaatccacctgctactaaaccatcgattgcttctaaccctctcagcccccaaacaggaccacctgctcactctgcctccctcatcccttctgtctctaatggctctttgaagtttcagagcctcactcatacaggtaaaggtcaccatctttcattctcaccgcagagtcaaaatggccgagcaccccctcctttgtcattttcctcctcccctccttctcctgcctcctccgtctcactgaatcaaggtgccaagggcaccaggaccatccatactcccagcctcaccagctacaaggcacagaatggaagttcaagcaaagccaccccatccacagcaaaagaaacctcttaaaggtcaaatcctattaggcacaagtcggagttacatttaaaaaaaattaacagtctacaacaactgttttcacaagagaatgtaacatattgctgtatcgtttgaggcttaatgctaaatatgtgctaaatactggattaatagatttcagtaaagctc

SEQ ID NO: 311789 - protein, 179 aa, Artificial Sequence
  derived and/or modified sequence
MQIPKETKAEDEDIVLTPDGTREFLTFEVPLNDSGSAGLGVSVKGNRSKENHADLGIFVKSIINGGAASKDGRLRVNDQLIAVNGESLLGKTNQDAMETLRRSMSTEGNKRGMIQLIVARRISKCNELKSPGSPPGPELPIETALDDRERRISHSLYSGIEGLDESPSRNAALSRIMGT

SEQ ID NO: 311790 - protein, 173 aa, Artificial Sequence
  derived and/or modified sequence
MAGSSEEAPDYGRGVVIMDDWPGYDLNLFTYPQHYYGDLEYVLIPHGIIVDRIERLAKDIMKDIGYSDIMVLCVLKGGYKFCADLVEHLKNISRNSDRFVSMKVDFIRLKSYRLRARLKRTTICDRGGLAFSQGYMSSCAPLQESPNTLWRGYLQVLIPCFHIRFQLPRSEQN

SEQ ID NO: 311791 - DNA, 522 bp, Artificial Sequence
  derived and/or modified sequence
atggccggctcgagcgaagaggccccagactatggacggggggtagtcattatggacgattggccggggtatgacctgaatttgttcacatacccccagcactattacggtgacctggaatacgtgctgattcctcacgggattatcgtggacaggattgagagattggccaaagatattatgaaggacattggatattctgacataatggtactgtgcgtgctgaagggaggatacaaattctgcgcagacctggtggaacatctgaaaaacattagccgcaatagtgataggtttgtcagcatgaaggttgacttcatcagacttaagagctaccggctcagagcacggctcaaacgcacaacaatatgcgatcgcggggggctcgctttcagccaaggatacatgtcctcatgcgcccccctgcaggagagtccaaacaccctgtggcgcggttacctccaggtgctcattccttgtttccacatcaggttccagctaccacgtagtgagcagaactag

SEQ ID NO: 311792 - DNA, 522 bp, Artificial Sequence
  derived and/or modified sequence
atggccggcagcagcgaggaggccccagactatggccggggcgtggtgatcatggatgactggccaggctatgacctgaacctcttcacctacccccagcactactacggggacctggagtatgtgctgatcccccacggcatcatcgtggacagaattgagcggctggccaaggacatcatgaaggacatcggctacagcgacatcatggtgctgtgtgtgctgaagggcggctacaagttctgtgccgacctggtggagcacctgaagaacatcagcaggaacagcgacagatttgtgtccatgaaggtggacttcatccggctgaagagctaccgcctgcgggcccggctgaagaggaccaccatctgtgacagaggaggcctggccttcagccagggctacatgagcagctgtgcccccctgcaggagagccccaacaccctgtggaggggctacctgcaggtgctgatcccctgcttccacatccgcttccagctgcccaggtctgagcagaactag

SEQ ID NO: 311793 - DNA, 522 bp, Artificial Sequence
  derived and/or modified sequence
atggccggcagcagcgaggaggcccccgactacggccggggcgtggtgattatggatgactggcccggctacgatcttaacctttttacataccctcagcattactatggggacctcgagtatgtcttgatcccacacggtattattgttgacaggattgagaggttggctaaggacataatgaaggacatcggctatagcgatatcatggtgctgtgcgtgctgaaggggggctataaattttgcgctgacctcgtagagcaccttaagaacatttcaaggaatagtgaccggttcgtctcaatgaaggtggatttcatcagactgaaatcatatagattgcgcgcacggctcaagcggaccaccatatgtgataggggcgggctggcgtttagtcagggatacatgagcagttgcgccccgctgcaggaatcccccaacacgctctggcgcggatacctgcaagtacttatcccctgcttccatatacggtttcagcttcctcgatctgaacagaattag

SEQ ID NO: 311794 - DNA, 741 bp, Artificial Sequence
  derived and/or modified sequence
cgttccccgggagaaacatggccgggagcagcgaggaggcgccagactacgggcgaggcgtcgtgattatggatgattggccagggtatgacttgaatttattcacgtacccacagcactattatggagacttggagtatgtcctcatccctcatggtatcattgtggacagaattgagcggctggccaaggatattatgaaagacataggatatagtgacatcatggtcctgtgtgtgcttaaaggaggttacaaattctgtgctgatctcgtagaacaccttaagaacatcagccgaaattcagatcgatttgtctcaatgaaggttgatttcatcagactaaaaagttacaggctgcgtgctcggttgaagaggacaaccatctgtgatagaggaggactggccttcagtcaagggtatatgagtagctgtgctcccctgcaagaatctccaaataccctctggagaggttacctccaagtgctcattccctgtttccacatccggtttcagttaccaagatcagagcagaattaggtctgagatccagtgaggtgtacagtagcacctggaccattctagggctcactgtcttcaagccctggctgtgcccacagtcttcatgaagaaactggacactgtgtctgctggatgatgtatttcttcttgcttgaggttatgaaaaatatcaaaatatgtaaagaaacatgctggataaaaatattgccttgaaatacaa

SEQ ID NO: 311795 - DNA, 522 bp, Artificial Sequence
  derived and/or modified sequence
atggctggatcttctgaggaggcacccgattacggccgaggggtcgtaattatggatgattggcccggttacgacctgaatcttttcacatacccacagcactactatggcgatctcgagtacgtgctgatcccccatggaataatcgtcgatcggattgaaagactcgcaaaagatattatgaaggatataggctatagcgatatcatggtcctgtgtgtacttaaaggcggatataagttttgcgccgatcttgtggagcacctcaagaatatctctcgtaattctgaccggttcgtcagcatgaaagtagactttatccggctgaagagctaccgattgagagcccgacttaaacgcaccacgatctgcgaccgcggaggcctggcgttcagccagggctacatgagctcttgtgcgccactgcaggaaagccctaacacgctttggaggggctacctgcaggtgctgatcccatgtttccacatcaggttccagctgcctaggtcagaacagaactag

SEQ ID NO: 311796 - DNA, 522 bp, Artificial Sequence
  derived and/or modified sequence
atggccggcagcagcgaggaggcccccgactacggcagaggcgtggtgatcatggacgactggcccggctacgacctgaacctgttcacctacccccagcactactacggcgacctggagtacgtgctgatcccccacggcatcatcgtggacagaatcgagagactggccaaggacatcatgaaggacatcggctacagcgacatcatggtgctgtgcgtgctgaagggcggctacaagttctgcgccgacctggtggagcacctgaagaacatcagcagaaacagcgacagattcgtgagcatgaaggtggacttcatcagactgaagagctacagactgagagccagactgaagagaaccaccatctgcgacagaggcggcctggccttcagccagggctacatgagcagctgcgcccccctgcaggagagccccaacaccctgtggagaggctacctgcaggtgctgatcccctgcttccacatcagattccagctgcccagaagcgagcagaactag

SEQ ID NO: 311797 - protein, 579 aa, Artificial Sequence
  derived and/or modified sequence
MNKSQEQVSFKDVCVDFTQEEWYLLDPAQKILYRDVILENYSNLVSVGYCITKPEVIFKIEQGEEPWILEKGFPSQCHPERKWKVDDVLESSQENEDDHFWELLFHNNKTVSVENGDRGSKTFNLGTDPVSLRNYPYKICDSCEMNLKNISGLIISKKNCSRKKPDEFNVCEKLLLDIRHEKIPIGEKSYKYDQKRNAINYHQDLSQPSFGQSFEYSKNGQGFHDEAAFFTNKRSQIGETVCKYNECGRTFIESLKLNISQRPHLEMEPYGCSICGKSFCMNLRFGHQRALTKDNPYEYNEYGEIFCDNSAFIIHQGAYTRKILREYKVSDKTWEKSALLKHQIVHMGGKSYDYNENGSNFSKKSHLTQLRRAHTGEKTFECGECGKTFWEKSNLTQHQRTHTGEKPYECTECGKAFCQKPHLTNHQRTHTGEKPYECKQCGKTFCVKSNLTEHQRTHTGEKPYECNACGKSFCHRSALTVHQRTHTGEKPFICNECGKSFCVKSNLIVHQRTHTGEKPYKCNECGKTFCEKSALTKHQRTHTGEKPYECNACGKTFSQRSVLTKHQRIHTRVKALSTS

SEQ ID NO: 311798 - protein, 100 aa, Artificial Sequence
  derived and/or modified sequence
MNKSQEQVSFKDVCVDFTQEEWYLLDPAQKILYRDVILENYSNLVSVGYCITKPEVIFKIEQGEEPWILEKGFPSQCHPERKWKVDDVLESSQENEDDHF

SEQ ID NO: 311799 - protein, 69 aa, Artificial Sequence
  derived and/or modified sequence
MNKSQEQVSFKDVCVDFTQEEWYLLDPAQKILYRDVILENYSNLVSVGYCITKPEVIFKIEQGEEPWIL

SEQ ID NO: 311800 - DNA, 2871 bp, Artificial Sequence
  derived and/or modified sequence
gatctcagataggagagacagtctgtaaatataacgaatgtggaagaaccttcattgaaagtttaaagctgaatatatctcaaagacctcatttggaaatggagccgtatggatgcagtatttgcgggaagtccttctgcatgaatttaaggtttggacatcagagagctcttacaaaggacaatccttatgaatataatgaatatggggaaatcttctgtgacaattcagctttcattatccatcagggagcttacacaagaaagattctccgtgaatataaagtgagtgacaaaacctgggaaaagtcagctctcttaaaacatcaaatagtacacatggggggaaagtcttatgattacaatgaaaatgggagtaatttcagcaagaagtcacatcttacccagcttcggagagctcacacaggagaaaaaacctttgaatgtggtgaatgtgggaaaaccttctgggagaagtcaaacctcactcaacatcagagaacacacacaggagagaagccctatgaatgtactgaatgtgggaaagccttttgccagaaaccacacctgaccaaccatcagcgaacacatacaggagaaaaaccctatgaatgtaagcaatgtggaaaaacattctgtgtgaagtcaaacctcactgaacatcagagaacacacacaggggagaagccctatgaatgtaatgcatgtgggaaatccttctgccacagatcagccctcactgtgcatcagagaacacacacaggggagaaaccgtttatatgtaatgaatgtggaaaatccttctgtgtgaagtcaaacctcattgtacatcaaagaactcacactggggagaaaccatataagtgtaatgaatgtgggaaaaccttctgtgaaaaatcagctctcactaaacatcagaggactcacacaggggagaagccgtatgagtgtaatgcatgtgggaagacctttagtcagaggtcagtgctcaccaaacatcagagaattcacacaagggtgaaagctctttcaacatcctgaatgttagaagccttcatacacttgtgaaattggttatacagtttcaaaaaaggagatcagagaaagccaaagaatgtcagaaatttgtagaaaatgacttcttgtttgaatatgtaaaagctttcaagaaaaattaaaacttttcattagaaaatttgtactgaggggaattctattcatctaagtaatatggtgaaaatatttatctggaatttatgttgtttagtgttatattccagacgtgataccaaaattttgttgcaaatataatggacaatatttatttatacccatattcacagtggaatctgaagcttataaaagttgaatgacagcagcattaaacatatatgtgaagagtccccgatgtttgtagaccttatgtgagtatgcaaatatataaatttgagtatgcttgatttgtatattggaactcaacatgatcataaggagaagatacgtacccttaattgagtaactactatggtatttgttaatattttctacactaaataccattggtgtctttataggttgacataattatatatgtgtatgtacatatgtttgtgtgtatatgtaaatatatttctacacacatacttaaatatagtgatgtgctagtataacctcatactgacttaaaagttctgattgttaaattttaaggaattttgtgagccagttattaaaagcagtcattatttaaaatatgtaaacttacagttaaaaacaaaggtaataaatactcagcactcatcacttcctaattattttgctacatttcactattacctttgctgttttacttatttaatctgtatgatgaaaatactgtataatagtgtgcactgcacatctgtctcttcccagctccacattcagtgctgtcttggtagcttggacttagtgggagtgtttacaccatggaaattgacaaactataaatcagggttttaattttctcagagaacctgctgtcaaatatttacagcacatcactgtgtatatatgaaaacgtatttggcaatacaaaccacataccccttctatttcctgacataaataaatggctatggccatttacagctgaaccacgtcttcaagaaagaagccaaaaatatttccgtgaggtttttaactacctctgaatctgtcctactctaaatactaccggagtctctttgtaggttggccagtatatgtttttagtgaaatattatttcacaaagaactatatcacgtacctttcctctgactgtttcctggcatatatgcatgaatatggccattattgaactatcacttcagtaaagaagttaaacagtacttttctgaggtttttcagctacctctgggtcattctgtaatgtaaatgttgttaataagaatggtttttacataaattatgcaaaggttaacaagcagtaacactgcactcctcaaaaagtggcggtatgtaatgaaaggcccttttgatatccttgatttttcattgtgtatctgtttgggcacggtctatgtaacactagttctgcgtattagtattttagagtatctctgcctcccttgtcctgttgtttcttttgcccccttggaacacattggtcagcagttctaagagacactgcccacatgatggccattccctacttcatccttgctgagctaaattttatatttttgtgcatccttctcccagatgacttaggtggtaagtccagattagtcaaagctaatcatggaagttccattttaatgattctgttggggtgaacttgggagcaatgagatgtttgggaagtattgtgtagtacttctgggaaagatc

SEQ ID NO: 311801 - DNA, 1740 bp, Artificial Sequence
  derived and/or modified sequence
atgaacaagagccaggagcaggtgagcttcaaggacgtgtgcgtggacttcacccaggaggagtggtacctgctggaccccgcccagaagatcctgtacagagacgtgatcctggagaactacagcaacctggtgagcgtgggctactgcatcaccaagcccgaggtgatcttcaagatcgagcagggcgaggagccctggatcctggagaagggcttccccagccagtgccaccccgagagaaagtggaaggtggacgacgtgctggagagcagccaggagaacgaggacgaccacttctgggagctgctgttccacaacaacaagaccgtgagcgtggagaacggcgacagaggcagcaagaccttcaacctgggcaccgaccccgtgagcctgagaaactacccctacaagatctgcgacagctgcgagatgaacctgaagaacatcagcggcctgatcatcagcaagaagaactgcagcagaaagaagcccgacgagttcaacgtgtgcgagaagctgctgctggacatcagacacgagaagatccccatcggcgagaagagctacaagtacgaccagaagagaaacgccatcaactaccaccaggacctgagccagcccagcttcggccagagcttcgagtacagcaagaacggccagggcttccacgacgaggccgccttcttcaccaacaagagaagccagatcggcgagaccgtgtgcaagtacaacgagtgcggcagaaccttcatcgagagcctgaagctgaacatcagccagagaccccacctggagatggagccctacggctgcagcatctgcggcaagagcttctgcatgaacctgagattcggccaccagagagccctgaccaaggacaacccctacgagtacaacgagtacggcgagatcttctgcgacaacagcgccttcatcatccaccagggcgcctacaccagaaagatcctgagagagtacaaggtgagcgacaagacctgggagaagagcgccctgctgaagcaccagatcgtgcacatgggcggcaagagctacgactacaacgagaacggcagcaacttcagcaagaagagccacctgacccagctgagaagagcccacaccggcgagaagaccttcgagtgcggcgagtgcggcaagaccttctgggagaagagcaacctgacccagcaccagagaacccacaccggcgagaagccctacgagtgcaccgagtgcggcaaggccttctgccagaagccccacctgaccaaccaccagagaacccacaccggcgagaagccctacgagtgcaagcagtgcggcaagaccttctgcgtgaagagcaacctgaccgagcaccagagaacccacaccggcgagaagccctacgagtgcaacgcctgcggcaagagcttctgccacagaagcgccctgaccgtgcaccagagaacccacaccggcgagaagcccttcatctgcaacgagtgcggcaagagcttctgcgtgaagagcaacctgatcgtgcaccagagaacccacaccggcgagaagccctacaagtgcaacgagtgcggcaagaccttctgcgagaagagcgccctgaccaagcaccagagaacccacaccggcgagaagccctacgagtgcaacgcctgcggcaagaccttcagccagagaagcgtgctgaccaagcaccagagaatccacaccagagtgaaggccctgagcaccagctag

SEQ ID NO: 311802 - DNA, 1740 bp, Artificial Sequence
  derived and/or modified sequence
atgaataagagtcaggagcaggtctcttttaaggatgtttgcgtggactttacccaggaggagtggtatctcttggacccagcccaaaaaatcttgtatcgggacgtaatactggagaactacagcaacctggtgagtgtgggatattgcatcacgaagcccgaagtgatctttaaaatcgagcagggcgaggagccttggatactggagaagggcttcccttctcagtgtcaccccgaacggaaatggaaggttgacgatgttctggaaagctctcaagaaaacgaggacgatcatttttgggagcttctgttccataataataagaccgtgtctgttgaaaatggcgacagaggtagtaagacatttaacctcggcaccgacccagttagcctgagaaactacccatacaaaatatgcgattcttgtgagatgaatttgaaaaacatctctgggctaatcatcagcaagaaaaactgtagcagaaaaaagccagacgagttcaacgtttgcgagaaactgcttctggatatccgccacgaaaagataccgatcggggagaagagttataaatacgaccaaaagagaaatgcaattaactaccaccaggacctctcccaaccatcttttggacagtcattcgaatacagtaagaacggtcagggctttcatgacgaagccgctttttttacaaataagcggagtcagatcggagagactgtgtgcaagtacaatgaatgtggaaggacctttatcgagtcccttaagctgaatatttcgcagagaccccaccttgaaatggagccctatggatgcagcatttgcggcaagagcttctgtatgaatcttcggttcggccaccagcgggcactaactaaggataacccctatgaatacaacgaatatggcgaaatcttctgcgataactcagccttcatcattcatcagggggcctacacaaggaagatcctgcgtgagtacaaagtgtctgacaaaacctgggagaaaagcgcccttctgaagcatcagatcgtacacatgggcggaaagtcctatgattacaacgagaatggcagtaatttcagtaaaaaatcccacctgacgcaattgaggcgagcccacacgggggagaaaacctttgaatgcggcgaatgtggcaaaaccttttgggaaaagagtaatcttacacaacatcaacgcacacataccggcgaaaaaccctatgaatgcacggaatgtggcaaagctttttgtcagaaacctcatttgacaaaccaccaacggacccacactggtgagaaaccttacgagtgtaagcagtgtgggaagacattctgcgtgaagagcaacctgacagagcaccagcgcacacatactggcgaaaagccttacgaatgcaacgcttgtggcaaatcattctgccacaggagcgcccttactgtccaccaacgtacccacacgggtgagaagccctttatttgtaacgagtgtggtaaatcattctgcgtgaagagtaacctcattgttcatcagcgcacacacaccggtgagaaaccttataagtgcaacgagtgtggtaagaccttttgcgagaagtcggcgctaacaaaacaccaacggactcacaccggcgagaagccatatgaatgtaatgcttgcggcaagactttttcccaaaggtctgttctcactaagcaccagcgcatacacactcgtgtaaaggcgttgtccaccagttag

SEQ ID NO: 311803 - DNA, 1740 bp, Artificial Sequence
  derived and/or modified sequence
atgaataagtcccaagagcaagtgagctttaaggatgtgtgcgtggactttacacaggaggaatggtacttattagatcccgctcagaagattctctaccgggacgtgattctagagaactactctaatctcgtttctgtgggctattgcatcactaagcccgaggtgatcttcaaaattgagcagggggaggaaccttggatactggagaagggctttccctcccaatgtcatccagagcggaaatggaaggtcgacgatgtcctcgaatcaagtcaggagaatgaggatgatcatttttgggagctcttgtttcacaacaataaaaccgtctcggtcgagaacggagatagaggaagtaagacctttaatttgggtaccgatccagtgagtcttagaaattacccatacaaaatatgcgattcctgcgaaatgaacctgaaaaacattagtggtctaatcataagtaagaagaactgttctcggaagaagccagacgagttcaacgtgtgcgaaaagttgctcctcgatattcggcacgaaaaaatccctattggggaaaagagttataaatacgaccaaaagagaaacgccataaactaccaccaggatctgagccagccgtctttcggacagtccttcgagtacagcaaaaacgggcaaggttttcatgacgaggccgctttcttcacaaacaagcgttctcagatcggcgaaactgtttgcaagtataatgagtgcggccgtacttttatcgaaagtctcaagcttaacatatctcagcggcctcacctcgagatggaaccctacgggtgcagcatttgcggaaagagtttctgtatgaacctgcgattcggccaccaacgggcacttaccaaagataacccttacgagtataatgaatacggcgagatcttctgcgacaattctgcatttatcattcaccaaggtgcctatactaggaagatcctgagggagtacaaagtgtccgacaaaacctgggagaagtcagcgctcctgaagcaccagatagtgcacatgggcggaaagtcttatgactacaatgaaaatggctctaatttctccaagaagagccatctgacacaacttaggagagcccacactggagagaaaacttttgagtgcggtgagtgcggaaaaacgttctgggaaaaaagcaacctcacacagcaccagaggacccacacaggggaaaagccctacgagtgcactgagtgcggcaaggcattttgtcagaagccccaccttactaaccatcagagaacacacactggggaaaaaccctacgaatgtaagcagtgcggaaagaccttttgtgtcaaaagcaacttaacagagcaccaaaggacacacactggcgagaaaccttacgagtgcaatgcatgcgggaaatccttttgccatcggtccgcattaacagttcaccaaagaacacataccggcgagaagcccttcatatgcaacgagtgcggaaagtctttttgcgtgaaaagcaatttaatagtgcaccagagaactcatacaggagagaaaccttacaaatgcaatgaatgcggaaaaacattctgcgagaaaagtgccctcactaaacatcagaggacacatacaggtgagaaaccctacgaatgcaacgcctgtgggaagaccttctctcagagaagcgtgttaaccaagcaccagaggatccacacgcgggttaaggccctgtctacaagttag

SEQ ID NO: 311804 - DNA, 1740 bp, Artificial Sequence
  derived and/or modified sequence
atgaacaagagccaggagcaggtgtccttcaaggatgtgtgtgtggacttcacccaggaggagtggtacctgctggaccctgcccagaagatcctgtacagagatgtgatcctggagaactacagcaacctggtgtctgtgggctactgcatcaccaagccagaggtgatcttcaagattgagcagggcgaggagccctggatcctggagaagggcttccccagccagtgccaccctgagaggaagtggaaggtggatgatgtgctggagagcagccaggagaatgaagatgaccacttctgggagctgctcttccacaacaacaagacagtgtctgtggagaatggagaccggggcagcaagaccttcaacctgggcacagatcctgtgtccctgaggaactacccctacaagatctgtgacagctgtgagatgaacctgaagaacatcagcggcctcatcatcagcaagaagaactgcagcaggaagaagccagatgagttcaacgtgtgtgagaagctgctgctggacatcagacatgagaagatccccatcggggagaagagctacaagtatgaccagaagagaaatgccatcaactaccaccaggacctgagccagcccagctttggccagagctttgagtacagcaagaatggccagggcttccatgatgaagctgccttcttcaccaacaagaggagccagattggagagaccgtgtgcaagtacaatgaatgtggccgcaccttcatcgagagcctgaagctgaacatcagccagaggccccacctggagatggagccctacggctgcagcatctgtgggaagagcttctgcatgaacctgcgcttcggccaccagagggccctgaccaaggacaacccctatgagtacaatgaatatggagagatcttctgtgacaacagcgccttcatcatccaccagggcgcctacaccaggaagatcctgcgggagtacaaggtgtctgacaagacctgggagaagagcgccctgctgaagcaccagatcgtgcacatgggcggcaagagctatgactacaatgaaaatggcagcaacttcagcaagaagagccacctgacccagctgcggcgggcccacactggagagaagacctttgaatgtggggagtgtgggaagaccttctgggagaagagcaacctgacccagcaccagaggacccacactggagagaagccctatgaatgtacagaatgtgggaaggccttctgccagaagccccacctgaccaaccaccagaggacccacactggagagaagccctatgagtgcaagcagtgtgggaagaccttctgtgtgaagagcaacctgacagagcaccagaggacccacactggagagaagccctatgaatgtaatgcctgtgggaagagcttctgccacaggtctgccctgactgtgcaccagaggacccacactggagagaagcccttcatctgcaatgaatgtgggaagagcttctgtgtgaagagcaacctgattgtgcaccagaggacccacactggagagaagccctacaagtgcaatgaatgtgggaagaccttctgtgagaagagcgccctgaccaagcaccagaggacccacactggagagaagccctatgaatgtaatgcctgtgggaagaccttcagccagaggtctgtgctgaccaagcaccagaggatccacaccagggtgaaggccctgagcaccagctag

SEQ ID NO: 311805 - DNA, 1740 bp, Artificial Sequence
  derived and/or modified sequence
atgaacaagagccaggagcaggtgagcttcaaggacgtgtgcgtggactttacacaggaggaatggtaccttctggacccagcccagaagattctgtatcgtgacgtcatattagaaaactattccaacctggtctcggtgggctattgtattacaaagccagaggtgatattcaagatcgaacaaggagaagagccttggattttggaaaagggtttcccaagccaatgtcaccccgagcggaaatggaaggtggatgatgttttggaatcgagtcaggaaaatgaagatgatcatttttgggagctgctgttccacaacaataagacagtgtccgtcgaaaacggcgatcggggatccaaaacattcaatctaggaaccgatccagtctcgctccggaactatccgtacaagatctgcgactcttgtgaaatgaatctaaaaaatatctccggattgatcatcagtaagaagaattgttcaagaaagaagcccgacgagttcaatgtctgtgaaaagcttttgctggacataagacatgagaaaattcctataggagaaaagtcatacaaatatgatcaaaagcgcaacgcaattaactaccatcaggatttgtctcagcccagctttggccagtcctttgaatattccaagaatggccagggctttcatgatgaagctgctttttttacaaataagcgctctcaaatcggtgagacagtgtgtaagtataacgaatgcggacgtactttcatagagtccctgaaactgaacataagccagaggcctcacctcgaaatggaaccctatggctgctctatctgcggcaagtccttttgtatgaacctccgcttcggccatcagagagctctaaccaaggacaacccctacgaatacaacgagtacggagaaattttttgcgataactctgcattcatcattcatcagggtgcctacaccaggaagatccttcgggagtataaagtgagcgataaaacctgggagaagtccgcattacttaagcatcagatcgtgcacatgggcgggaagtcctatgattacaacgagaatggctccaatttcagtaaaaaatcccaccttactcaactccggcgcgcacacaccggagaaaagactttcgaatgtggagaatgcggaaagaccttctgggagaaaagtaacttaacccagcaccagcgaactcacaccggcgagaagccttatgagtgtactgaatgcggaaaagccttctgtcagaagccacatctgactaatcatcagagaacccataccggtgaaaaaccatacgagtgcaaacagtgcggaaaaactttctgcgtcaaatctaatctgacagaacaccaacgcacacatacgggagaaaagccttacgagtgcaatgcttgcggtaaaagtttctgccaccgctccgccctgacagtgcaccagcgtacccacacgggcgagaaacccttcatttgtaacgaatgtggaaagagtttttgcgtaaagagcaacctcatcgtccatcaaagaacccacacaggcgagaagccgtataagtgtaacgaatgtggcaaaacattctgtgagaaatccgcattgacaaagcaccagcggacgcacaccggcgaaaaaccttacgagtgcaacgcctgtggcaaaacctttagtcagaggagcgtcttaaccaagcaccaacgcattcatacgagggttaaggctctgagcacctcctag

SEQ ID NO: 311806 - DNA, 1740 bp, Artificial Sequence
  derived and/or modified sequence
atgaacaagagccaggagcaggtgagcttcaaggacgtgtgcgtggactttacacaggaggaatggtatctgttagatcctgctcagaagatcctgtacagggacgtgatccttgaaaattactcaaacctggtcagtgtgggctactgtataacaaagcctgaggttatctttaagatcgagcagggggaggaaccatggatcttggaaaaaggcttcccctcccagtgtcatcctgagagaaaatggaaagtcgacgacgttctggaaagctcacaggaaaatgaagacgaccacttctgggaactcctgttccataacaataaaactgtgagcgttgaaaatggtgacagaggctccaagacctttaatttggggaccgatcccgtgtccttgaggaactatccctacaagatttgcgatagctgtgagatgaacttgaaaaatatctccggtctgatcattagcaagaagaactgctcacggaaaaagccagatgagttcaatgtgtgcgagaaactgttgttagacatacgccatgaaaagattcctatcggagaaaaaagctacaaatacgaccaaaagcgaaatgccatcaactaccaccaggatctcagtcaaccttccttcgggcagtcttttgagtattcaaaaaacggacagggttttcacgatgaagctgctttcttcaccaataagcgctcccaaattggtgaaactgtgtgcaagtataacgaatgtggcaggaccttcattgagtcattaaaattgaatatctctcagcggccccacctagagatggaaccttacggttgctccatttgcggcaaatctttttgcatgaacttgcggttcggccaccagcgcgccctgacaaaagataatccctatgaatacaatgagtacggggagatattctgcgataatagcgcatttatcattcaccagggggcatatactcgcaagatactgagagagtataaggtttccgacaagacatgggaaaagagcgcactgcttaaacatcagattgtacacatgggcggtaaatcctacgactataatgaaaacggttccaatttctcaaaaaagagtcacctgactcaactcagacgagcccatacgggagaaaagacctttgagtgcggagagtgtgggaagacattctgggagaaaagcaacctgacccaacatcaacgcacacatactggcgagaaaccttatgagtgcacagaatgcggaaaggccttttgtcagaaacctcacctgaccaaccatcagaggacccacacaggagagaaaccctacgagtgcaaacagtgcgggaagacgttctgcgtgaaatctaatctgaccgaacaccagaggactcacacaggagagaagccctacgaatgtaatgcttgtggaaagagtttttgccatagatccgcactgaccgtgcatcaacgcacgcacacaggcgagaagccttttatttgtaatgaatgcggtaaatcattctgtgtgaagagtaatctcattgtgcaccaaagaactcacaccggagagaaaccttacaagtgcaacgagtgtggcaaaaccttttgcgaaaagtcagctctgaccaaacaccaaaggacgcacaccggggaaaagccatacgaatgtaacgcctgtggtaagacgttttctcagaggtccgttctcaccaagcatcagcgtattcatactagggtaaaagccctgagcacgtcctag

SEQ ID NO: 311807 - DNA, 1740 bp, Artificial Sequence
  derived and/or modified sequence
atgaataaaagccaggaacaagtaagtttcaaggatgtatgcgtggattttactcaagaggaatggtatctgctcgaccctgcccaaaaaattttgtacagagacgtgatcttggaaaactatagtaatctggtaagcgtcgggtattgtattaccaagccggaagtaatttttaagatagaacagggcgaggagccctggattttggagaaaggatttccctctcagtgtcatcctgaacggaaatggaaggtggatgatgtgcttgagagttcccaagagaacgaggacgaccacttttgggaattgctctttcataataacaagaccgtctctgttgaaaacggcgatagagggtctaaaacattcaatctagggacagatccagtatcactccggaattacccctataagatatgcgatagctgtgaaatgaatctcaagaatatcagtggcctcatcatcagtaaaaagaattgcagtaggaaaaaaccagacgaatttaacgtgtgtgaaaagctcctgctggacatacgccacgaaaagatacctatcggcgaaaagtcctacaagtacgatcagaagcggaatgctattaactatcaccaggacctcagccagccttcgtttggtcaatcctttgagtactccaagaacggccaagggttccatgatgaggcggcattctttactaacaagcgttcccagatcggcgagacagtctgtaagtataacgagtgtggtagaacctttattgagtctcttaagcttaacattagtcaaaggcctcatctggaaatggaaccgtacgggtgcagcatttgtgggaagtccttctgcatgaacctccggttcggtcatcagcgggctctgaccaaggacaacccctatgagtataacgaatacggcgagatcttttgcgacaactccgcctttattatccatcagggcgcttacacaaggaaaattctaagggaatacaaagtgtccgacaaaacctgggagaaaagtgccctcttgaaacatcagattgttcacatgggcggtaagagttatgattacaacgaaaatgggtccaatttctctaagaagtcccacctaacacagctgcgcagagcccacacaggggaaaaaaccttcgagtgtggggaatgcgggaagaccttttgggagaagagcaatcttacccagcaccagcggacccacacgggcgagaaaccctacgaatgtactgagtgcggaaaggcattttgtcagaagccccacctgacgaaccatcagaggacacacaccggggaaaagccatatgagtgcaagcagtgtggcaaaaccttctgcgtcaagagtaaccttacagaacaccaacggacgcatactggtgaaaaaccatacgagtgtaacgcttgcgggaaatcgttctgtcaccgatctgccctgaccgtacaccagaggacacacacgggcgaaaaacctttcatctgtaacgagtgcggaaaatcattctgtgttaaatcaaatctgattgtgcaccaacgcacacacacgggcgagaaaccatataaatgcaatgaatgtgggaagaccttctgtgaaaagtcggcccttactaaacaccagcgaacacacacaggggagaaaccttatgagtgcaacgcatgtgggaagacgttctcccagcgatccgtcctaactaagcaccagcgcatccacacgagagtgaaggctctgtccacatcctag

SEQ ID NO: 311808 - DNA, 1740 bp, Artificial Sequence
  derived and/or modified sequence
atgaataagagtcaggagcaagtgtcttttaaggacgtctgtgttgattttactcaggaagaatggtacctgctggatcctgcacagaagattctctaccgagacgtgatattggaaaactactcgaatctggtctcggtgggttattgcattactaagcccgaggtgatctttaaaatcgaacagggagaggaaccctggattctcgaaaaaggcttccctagtcagtgccatcccgaacgcaagtggaaggtggacgatgtactggagagcagccaggaaaacgaggacgatcacttttgggagctcttattccacaacaacaaaaccgtctcagtcgagaacggcgatcgtggctcaaagacatttaacttgggcactgatccagtctctcttcggaactatccctacaagatttgcgacagttgtgaaatgaacctgaagaatatctctggcctgatcattagtaagaagaattgttccagaaaaaaacccgatgaatttaatgtttgcgagaaacttctgttagacatccgacatgagaagatcccaatcggcgagaaatcctataagtacgatcaaaagcgaaacgcgatcaattaccaccaagatctctcccagcccagttttgggcagtcatttgagtatagcaaaaatggccaaggctttcacgacgaggccgctttctttacaaacaaacgatctcaaatcggggaaactgtctgtaagtataacgaatgtggtagaacattcattgaatccttgaaactaaatatctctcaaagacctcacttggagatggagccatatggctgcagtatctgcggtaaaagcttctgcatgaacctgcgttttggacaccagcgagctctaaccaaggataatccttatgagtataacgaatacggagagatcttctgtgataactctgcattcattattcaccagggagcatatacgaggaaaatactgcgagagtataaggtctctgacaagacctgggaaaagagtgcactcttaaaacaccagatcgttcatatggggggaaaatcctatgattataacgagaatggatcgaacttctccaaaaagagtcatttgactcagctgcggagagcccacaccggggagaaaacctttgagtgcggcgagtgcgggaagaccttttgggagaaaagcaacctgacgcagcaccagagaacccataccggcgaaaagccttacgagtgtaccgagtgtgggaaagctttctgccagaaaccccatctgacaaaccaccaaagaacccatactggtgagaagccatacgagtgcaagcagtgtggaaaaacgttttgtgtgaaaagtaacttgacagaacaccaacggacacataccggtgaaaaaccttacgagtgtaatgcatgtgggaagagtttctgccacagatcggccctaaccgtgcaccagaggactcatacaggggagaagccctttatctgtaacgagtgtggaaaaagcttctgcgtcaagtcaaacctgatcgtccatcaaagaacccacaccggcgagaagccttacaagtgtaacgaatgcggcaaaacgttttgcgaaaaatccgccttgactaaacaccaacgtactcataccggcgaaaagccatacgaatgcaatgcctgtggaaagacctttagccagcggtcggtgctgacaaaacatcaacggattcacactcgggtaaaagctctatccacatcgtag

SEQ ID NO: 311809 - DNA, 2025 bp, Artificial Sequence
  derived and/or modified sequence
gctccaggcgagtccttccctggactccagtcccttgtgggaaacaatccctcgcctccggaggcggcgaggagcggcggaacctaaattggtaataaatcaataagaaatatttacattcactcagtgaaaagtgtcatgtctgagctcagcatatatcggagccacacatggacacctctccttcctccactaagagcggaaaatgaacaaatcccaggaacaagtgtcattcaaggatgtatgtgtggacttcactcaggaagagtggtatctgctggaccctgctcagaagattctatacagagatgtgatcctggaaaattatagcaatcttgtctcagtagggtattgcattactaaaccagaagtgatctttaagatcgagcaaggagaagagccctggatattagaaaaaggattcccaagccagtgccacccagaaaggaaatggaaagttgatgacgtgttagagagcagccaggaaaatgaagatgaccatttttgggagcttctattccacaacaacaaaacagtaagtgtagaaaatggagatagaggaagcaaaactttcaatttgggcacagaccctgtttctttaagaaattatccctataaaatatgtgactcatgtgaaatgaatttgaaaaatatttcgggcttaattattagtaaaaagaactgttccagaaagaagcctgatgagtttaatgtatgtgagaaattgctccttgatattaggcatgagaaaatccctattggagagaagtcttataaatatgatcaaaaaaggaatgccattaattatcaccaggatctcagtcagccaagttttggccaatcttttgagtatagtaaaaatggacaaggcttccatgatgaggcagcattttttacaaataagagatctcagataggagagacagtctgtaaatataacgaatgtggaagaaccttcattgaaagtttaaagctgaatatatctcaaagacctcatttggaaatggagccgtatggatgcagtatttgcgggaagtccttctgcatgaatttaaggtttggacatcagagagctcttacaaaggacaatccttatgaatataatgaatatggggaaatcttctgtgacaattcagctttcattatccatcagggagcttacacaagaaagattctccgtgaatataaagtgagtgacaaaacctgggaaaagtcagctctcttaaaacatcaaatagtacacatggggggaaagtcttatgattacaatgaaaatgggagtaatttcagcaagaagtcacatcttacccagcttcggagagctcacacaggagaaaaaacctttgaatgtggtgaatgtgggaaaaccttctgggagaagtcaaacctcactcaacatcagagaacacacacaggagagaagccctatgaatgtactgaatgtgggaaagccttttgccagaaaccacacctgaccaaccatcagcgaacacatacaggagaaaaaccctatgaatgtaagcaatgtggaaaaacattctgtgtgaagtcaaacctcactgaacatcagagaacacacacaggggagaagccctatgaatgtaatgcatgtgggaaatccttctgccacagatcagccctcactgtgcatcagagaacacacacaggggagaaaccgtttatatgtaatgaatgtggaaaatccttctgtgtgaagtcaaacctcattgtacatcaaagaactcacactggggagaaaccatataagtgtaatgaatgtgggaaaaccttctgtgaaaaatcagctctcactaaacatcagaggactcacacaggggagaagccgtatgagtgtaatgcatgtgggaagacctttagtcagaggtcagtgctcaccaaacatcagagaattcacacaagggtgaaagctctttcaacatcctgaatgttagaagccttcatacacttgtgaaattggttatacagtttcaaaaaaggagatcagagaaagccaaagaatgtcag

SEQ ID NO: 311810 - DNA, 5141 bp, Artificial Sequence
  derived and/or modified sequence
ggggctgcgggggagagcgactgcgccaggtccgcgacaaatgaattagacacaattatccacgggagactcggttttcctctctgtaaattacggatattaggaatacttgccgcctggggttgttttgagcactttcattgtttaggtgctgtatttattgggtgtgcgttccctgggagagcccgagggagacggctcctgcaccggccccaagggcctctctgcccgtggagtgcaggagcgaaggggctggcctagctgaccaccagggcccctgctggctctgaccgccctcctatcccaagtaattatttacacgtttcgcgttcgcttatgtattatgtgtaatcatggcacagtatcctgaagccgtcggagtctgtgtgctggtgcaaggtctgggacaaatttaagaagagagagaacctaaattggtaataaatcaataagaaatatttacattcactcagtgaaaagtgtcatgtctgagctcagcatatatcggagccacacatggacacctctccttcctccactaagagcggaaaatgaacaaatcccaggaacaagtgtcattcaaggatgtatgtgtggacttcactcaggaagagtggtatctgctggaccctgctcagaagattctatacagagatgtgatcctggaaaattatagcaatcttgtctcagtagggtattgcattactaaaccagaagtgatctttaagatcgagcaaggagaagagccctggatattagaaaaaggattcccaagccagtgccacccagaaaggaaatggaaagttgatgacgtgttagagagcagccaggaaaatgaagatgaccatttttgggagcttctattccacaacaacaaaacagtaagtgtagaaaatggagatagaggaagcaaaactttcaatttgggcacagaccctgtttctttaagaaattatccctataaaatatgtgactcatgtgaaatgaatttgaaaaatatttcgggcttaattattagtaaaaagaactgttccagaaagaagcctgatgagtttaatgtatgtgagaaattgctccttgatattaggcatgagaaaatccctattggagagaagtcttataaatatgatcaaaaaaggaatgccattaattatcaccaggatctcagtcagccaagttttggccaatcttttgagtatagtaaaaatggacaaggcttccatgatgaggcagcattttttacaaataagagatctcagataggagagacagtctgtaaatataacgaatgtggaagaaccttcattgaaagtttaaagctgaatatatctcaaagacctcatttggaaatggagccgtatggatgcagtatttgcgggaagtccttctgcatgaatttaaggtttggacatcagagagctcttacaaaggacaatccttatgaatataatgaatatggggaaatcttctgtgacaattcagctttcattatccatcagggagcttacacaagaaagattctccgtgaatataaagtgagtgacaaaacctgggaaaagtcagctctcttaaaacatcaaatagtacacatggggggaaagtcttatgattacaatgaaaatgggagtaatttcagcaagaagtcacatcttacccagcttcggagagctcacacaggagaaaaaacctttgaatgtggtgaatgtgggaaaaccttctgggagaagtcaaacctcactcaacatcagagaacacacacaggagagaagccctatgaatgtactgaatgtgggaaagccttttgccagaaaccacacctgaccaaccatcagcgaacacatacaggagaaaaaccctatgaatgtaagcaatgtggaaaaacattctgtgtgaagtcaaacctcactgaacatcagagaacacacacaggggagaagccctatgaatgtaatgcatgtgggaaatccttctgccacagatcagccctcactgtgcatcagagaacacacacaggggagaaaccgtttatatgtaatgaatgtggaaaatccttctgtgtgaagtcaaacctcattgtacatcaaagaactcacactggggagaaaccatataagtgtaatgaatgtgggaaaaccttctgtgaaaaatcagctctcactaaacatcagaggactcacacaggggagaagccgtatgagtgtaatgcatgtgggaagacctttagtcagaggtcagtgctcaccaaacatcagagaattcacacaagggtgaaagctctttcaacatcctgaatgttagaagccttcatacacttgtgaaattggttatacagtttcaaaaaaggagatcagagaaagccaaagaatgtcagaaatttgtagaaaatgacttcttgtttgaatatgtaaaagctttcaagaaaaattaaaacttttcattagaaaatttgtactgaggggaattctattcatctaagtaatatggtgaaaatatttatctggaatttatgttgtttagtgttatattccagacgtgataccaaaattttgttgcaaatataatggacaatatttatttatacccatattcacagtggaatctgaagcttataaaagttgaatgacagcagcattaaacatatatgtgaagagtccccgatgtttgtagaccttatgtgagtatgcaaatatataaatttgagtatgcttgatttgtatattggaactcaacatgatcataaggagaagatacgtacccttaattgagtaactactatggtatttgttaatattttctacactaaataccattggtgtctttataggttgacataattatatatgtgtatgtacatatgtttgtgtgtatatgtaaatatatttctacacacatacttaaatatagtgatgtgctagtataacctcatactgacttaaaagttctgattgttaaattttaaggaattttgtgagccagttattaaaagcagtcattatttaaaatatgtaaacttacagttaaaaacaaaggtaataaatactcagcactcatcacttcctaattattttgctacatttcactattacctttgctgttttacttatttaatctgtatgatgaaaatactgtataatagtgtgcactgcacatctgtctcttcccagctccacattcagtgctgtcttggtagcttggacttagtgggagtgtttacaccatggaaattgacaaactataaatcagggttttaattttctcagagaacctgctgtcaaatatttacagcacatcactgtgtatatatgaaaacgtatttggcaatacaaaccacataccccttctatttcctgacataaataaatggctatggccatttacagctgaaccacgtcttcaagaaagaagccaaaaatatttccgtgaggtttttaactacctctgaatctgtcctactctaaatactaccggagtctctttgtaggttggccagtatatgtttttagtgaaatattatttcacaaagaactatatcacgtacctttcctctgactgtttcctggcatatatgcatgaatatggccattattgaactatcacttcagtaaagaagttaaacagtacttttctgaggtttttcagctacctctgggtcattctgtaatgtaaatgttgttaataagaatggtttttacataaattatgcaaaggttaacaagcagtaacactgcactcctcaaaaagtggcggtatgtaatgaaaggcccttttgatatccttgatttttcattgtgtatctgtttgggcacggtctatgtaacactagttctgcgtattagtattttagagtatctctgcctcccttgtcctgttgtttcttttgcccccttggaacacattggtcagcagttctaagagacactgcccacatgatggccattccctacttcatccttgctgagctaaattttatatttttgtgcatccttctcccagatgacttaggtggtaagtccagattagtcaaagctaatcatggaagttccattttaatgattctgttggggtgaacttgggagcaatgagatgtttgggaagtattgtgtagtacttctgggaaagatctccttgatacaacattgtcatgacatgagaagagactctgctgggctttttcatgtctgtaacatggtattggcttatcgtttttatctctgaagggcagtagcctgaagataacagtgcacaaggtgggaaaagccagctcagaggtgacgttgccgagctactctgctctctatacctgttctctactgggactttttataaccctcaataactgttttttatttggtcttagggctgtctgatacttagagctgaaggcattccagctgacacagaggaatatttttctaagtgttaatgttctatatggtaattagggggaagaattatttcttttcacaagttaatatagggatggctgtttgtatcagccatggttctttctggtggaaaacagaattctccaactaaaaatattttaatggcagactgattacagtggtgtgggccagaaacaagggacagtgaaacacccagagacttgtatcagcaggaagccattgccattctgagccttgaagggcaaggagggaaacagtgttaccagagcccagtaagaactgctgtcatgaaggaggggccaccttgtaagagacatcattactaccagaactgtggtgccaaattgctggtgtctctctttggagaaaccaaccagatacatctgctggagagcccaggtgggcacagagaagggtggagagagaatctgggaagagaaatggagaataagcagcacagtgttattcatttctgtaaattcctatgtagaaggctcagtgttagaaataaagttattctactagttgcaagttaagtgtttctgtttgttctgctttcctgttagcataagtaaactccctttggaactacacaggtatgtctctccttcaacatgtgtgaagcagacattatattaaattacattattcatacctccctgtggtgtttcttattgtatgtggtgtaaggtaagcagctctgtattcttccaaataaatagccagttgtccctg

SEQ ID NO: 311811 - protein, 119 aa, Artificial Sequence
  derived and/or modified sequence
MNKSQEQVSFKDVCVDFTQEEWYLLDPAQKILYRDVILENYSNLVSVGYCITKPEVIFKIEQGEEPWILEKGFPSQCHPERKWKVDDVLESSQENEDDHFWELLFHNNKTWNLKLIKVE

SEQ ID NO: 311812 - DNA, 360 bp, Artificial Sequence
  derived and/or modified sequence
atgaacaagagccaggagcaggtgagcttcaaggacgtgtgcgtggacttcacccaggaggagtggtacctgctggaccccgcccagaagatcctgtacagagacgtgatcctggagaactacagcaacctggtgagcgtgggctactgcatcaccaagcccgaggtgatcttcaagatcgagcagggcgaggagccctggatcctggagaagggcttccccagccagtgccaccccgagagaaagtggaaggtggacgacgtgctggagagcagccaggagaacgaggacgaccacttctgggagctgctgttccacaacaacaagacctggaacctgaagctgatcaaggtggagtag

SEQ ID NO: 311813 - DNA, 303 bp, Artificial Sequence
  derived and/or modified sequence
atgaacaagagccaggagcaggtgagcttcaaggacgtgtgcgtggacttcacccaggaggagtggtacctgctggaccccgcccagaagatcctgtacagagacgtgatcctggagaactacagcaacctggtgagcgtgggctactgcatcaccaagcccgaggtgatcttcaagatcgagcagggcgaggagccctggatcctggagaagggcttccccagccagtgccaccccgagagaaagtggaaggtggacgacgtgctggagagcagccaggagaacgaggacgaccacttctag

SEQ ID NO: 311814 - DNA, 210 bp, Artificial Sequence
  derived and/or modified sequence
atgaacaagagccaggagcaggtgagcttcaaggacgtgtgcgtggacttcacccaggaggagtggtacctgctggaccccgcccagaagatcctgtacagagacgtgatcctggagaactacagcaacctggtgagcgtgggctactgcatcaccaagcccgaggtgatcttcaagatcgagcagggcgaggagccctggatcctgtag

SEQ ID NO: 311815 - DNA, 360 bp, Artificial Sequence
  derived and/or modified sequence
atgaataagagtcaggagcaggtcagcttcaaggacgtgtgcgttgactttacccaagaggagtggtaccttttggatcccgctcagaaaatcctgtaccgggacgtcatcctggaaaactactcgaatctcgtttctgtgggctactgcattacaaaaccggaggtgattttcaagattgaacagggtgaggaaccgtggatcttagaaaaggggttccccagccaatgccaccccgaacggaaatggaaagtcgacgacgttttagagagctcacaggagaatgaggatgaccatttctgggagctgctgtttcacaataataaaacgtggaacctgaagttaatcaaggtggaatag

SEQ ID NO: 311816 - DNA, 303 bp, Artificial Sequence
  derived and/or modified sequence
atgaataaatctcaggaacaggtgagtttcaaggacgtgtgtgtcgacttcacacaggaagagtggtatctgctggatccagcccagaaaatcctgtacagggatgtgattttagagaactattcaaatttggtttccgtcgggtattgcatcaccaagcctgaggttattttcaagatcgagcaaggtgaggagccttggatcttagagaaggggttcccatcgcagtgtcatcccgagcgcaagtggaaagtagatgatgtcttagaatcgtcacaagagaatgaggatgaccacttttag

SEQ ID NO: 311817 - DNA, 210 bp, Artificial Sequence
  derived and/or modified sequence
atgaacaaatcgcaggaacaggtgtcttttaaagatgtgtgtgtagatttcactcaggaggaatggtacctgctggaccccgcccagaaaattctgtaccgggatgtgatcctggagaactacagcaacctggtgtccgtgggctattgcatcacaaaaccagaggtgattttcaaaatcgaacagggcgaggagccatggatcctctag

SEQ ID NO: 311818 - DNA, 360 bp, Artificial Sequence
  derived and/or modified sequence
atgaacaagagccaggagcaggtgtccttcaaggatgtgtgtgtggacttcacccaggaggagtggtacctgctggaccctgcccagaagatcctgtacagagatgtgatcctggagaactacagcaacctggtgtctgtgggctactgcatcaccaagccagaggtgatcttcaagattgagcagggcgaggagccctggatcctggagaagggcttccccagccagtgccaccctgagaggaagtggaaggtggatgatgtgctggagagcagccaggagaatgaagatgaccacttctgggagctgctcttccacaacaacaagacctggaacctgaagctgatcaaggtggagtag

SEQ ID NO: 311819 - DNA, 303 bp, Artificial Sequence
  derived and/or modified sequence
atgaacaagagccaggagcaggtgtccttcaaggatgtgtgtgtggacttcacccaggaggagtggtacctgctggaccctgcccagaagatcctgtacagagatgtgatcctggagaactacagcaacctggtgtctgtgggctactgcatcaccaagccagaggtgatcttcaagattgagcagggcgaggagccctggatcctggagaagggcttccccagccagtgccaccctgagaggaagtggaaggtggatgatgtgctggagagcagccaggagaatgaagatgaccacttctag

SEQ ID NO: 311820 - DNA, 210 bp, Artificial Sequence
  derived and/or modified sequence
atgaacaagagccaggagcaggtgtccttcaaggatgtgtgtgtggacttcacccaggaggagtggtacctgctggaccctgcccagaagatcctgtacagagatgtgatcctggagaactacagcaacctggtgtctgtgggctactgcatcaccaagccagaggtgatcttcaagattgagcagggcgaggagccctggatcctgtag

SEQ ID NO: 311821 - DNA, 360 bp, Artificial Sequence
  derived and/or modified sequence
atgaacaagagccaggagcaggtgagcttcaaggacgtgtgcgtggacttcacccaggaggagtggtacctccttgatccagcacagaaaatactgtaccgcgacgttatcctagagaattacagcaatctggtaagcgttggctactgcatcacaaagcccgaggtcatttttaagatcgaacagggcgaagagccctggatcctagagaagggttttccctcgcagtgccaccccgaaaggaaatggaaggtcgatgatgtgttggaatcatcacaggagaacgaagacgatcacttttgggaactgctatttcacaacaataagacgtggaatctgaagctgattaaggtggagtag

SEQ ID NO: 311822 - DNA, 303 bp, Artificial Sequence
  derived and/or modified sequence
atgaacaagagccaggagcaggtgagcttcaaggacgtgtgcgtggatttcacccaagaggagtggtacttgttggaccctgcacagaaaatattatatcgcgacgtaatcctcgagaactactcaaacttagttagtgtggggtattgtattaccaaacccgaggtaatcttcaagattgagcagggcgaggagccatggatactggaaaagggttttccttcccagtgccatcccgagcggaaatggaaagtcgacgatgtcttagagtcatcccaggagaatgaagacgaccatttttag

SEQ ID NO: 311823 - DNA, 210 bp, Artificial Sequence
  derived and/or modified sequence
atgaacaagagccaggagcaggtgagcttcaaggacgtgtgcgtggattttacacaggaagagtggtacctactcgatccagcccagaaaatcctttacagagacgtgatcctcgagaattacagcaatttggtcagcgtgggatactgtattactaagcctgaagtgatttttaaaattgaacagggtgaggagccgtggatactatag

SEQ ID NO: 311824 - DNA, 360 bp, Artificial Sequence
  derived and/or modified sequence
atgaacaagagccaggagcaggtctcctttaaggatgtatgtgtcgatttcactcaagaagaatggtatctgctagaccctgcacaaaaaattctttaccgcgacgtgatcctcgaaaattacagtaacctggtttcagtgggctactgtataacaaaacctgaagtcatttttaagattgaacagggtgaagaaccctggattctggaaaagggctttcccagccagtgccatcccgaaaggaagtggaaggtggacgacgtcttggaaagttcccaggagaatgaggatgaccacttttgggaactgctgtttcataataataaaacgtggaatttgaagctgatcaaggtggaatag

SEQ ID NO: 311825 - DNA, 303 bp, Artificial Sequence
  derived and/or modified sequence
atgaacaagtcccaggagcaggtgagcttcaaggatgtgtgcgtagacttcacacaggaggagtggtatcttctggaccccgctcagaagatcctgtatcgggacgtcattttggaaaattattccaacctcgtgagcgttgggtactgtattacaaaaccagaggtgattttcaagatcgagcagggcgaggagccatggatcttagagaaaggtttcccctcccagtgccatccagagagaaaatggaaggtcgacgatgtcttagagtcaagtcaagaaaacgaggacgatcacttctag

SEQ ID NO: 311826 - DNA, 210 bp, Artificial Sequence
  derived and/or modified sequence
atgaataaatcgcaggagcaggtgtccttcaaagacgtgtgtgtcgactttacccaggaagagtggtacctcttggacccagcacagaagatattataccgtgacgtaatactcgaaaattactctaaccttgtaagcgtaggttactgcatcacaaaaccagaagttatcttcaagatcgaacaaggcgaggagccatggattctctag

SEQ ID NO: 311827 - DNA, 1286 bp, Artificial Sequence
  derived and/or modified sequence
caattatccacgggagactcggttttcctctctgtaaattacggatattaggaatacttgccgcctggggttgttttgagcactttcattgtttaggtgctgtatttattgggtgtgcgttccctgggagagcccgagggagacggctcctgcaccggccccaagggcctctctgcccgtggagtgcaggagcgaaggggctggcctagctgaccaccagggcccctgctggctctgaccgccctcctatcccaagtaattatttacacgtttcgcgttcgcttatgtattatgtgtaatcatggcacagtatcctgaagccgtcggagtctgtgtgctggtgcaaggtctgggacaaatttaagaagagagagaacctaaattggtaataaatcaataagaaatatttacattcactcagtgaaaagtgtcatgtctgagctcagcatatatcggagccacacatggacacctctccttcctccactaagagcggaaaatgaacaaatcccaggaacaagtgtcattcaaggatgtatgtgtggacttcactcaggaagagtggtatctgctggaccctgctcagaagattctatacagagatgtgatcctggaaaattatagcaatcttgtctcagtagggtattgcattactaaaccagaagtgatctttaagatcgagcaaggagaagagccctggatattagaaaaaggattcccaagccagtgccacccagaaaggaaatggaaagttgatgacgtgttagagagcagccaggaaaatgaagatgaccatttttgggagcttctattccacaacaacaaaacatggaatctgaagcttataaaagttgaatgacagcagcattaaacatatatgtgaagagtccccgatgtttgtagaccttatgtgagtatgcaaatatataaatttgagtatgcttgatttgtatattggaactcaacatgatcataaggagaagatacgtacccttaattgagtaactactatggtatttgttaatattttctacactaaataccattggtgtctttataggttgacataattatatatgtgtatgtacatatgtttgtgtgtatatgtaaatatatttctacacacatacttaaatatagtgatgtgctagtataacctcatactgacttaaaagttctgattgttaaattttaaggaattttgtgagccagttattaaaagcagtcattatttaaaatatgtaaacttacagttaaaaacaaaggtaataaatactcagcactca

SEQ ID NO: 311828 - DNA, 698 bp, Artificial Sequence
  derived and/or modified sequence
tccctcgcctccggaggcggcgaggagcggcgggtgagccccggagcactgggcgagggccagggggtccccgcgctgccctgaaggcgggcgggcggcggctagacctcggcggtggggagggacccctggcgcctgcggcgacggtgggacgagggcgtctctgtcagaaggggatgaggtctggcgtgggaacgcgagttccggggctcccgggggtccgtatgcgtccagtccctgcgcctggcgctcagcgaagtcctgtagcacgggaacctaaattggtaataaatcaataagaaatatttacattcactcagtgaaaagtgtcatgtctgagctcagcatatatcggagccacacatggacacctctccttcctccactaagagcggaaaatgaacaaatcccaggaacaagtgtcattcaaggatgtatgtgtggacttcactcaggaagagtggtatctgctggaccctgctcagaagattctatacagagatgtgatcctggaaaattatagcaatcttgtctcagtagggtattgcattactaaaccagaagtgatctttaagatcgagcaaggagaagagccctggatattagaaaaaggattcccaagccagtgccacccagaaaggaaatggaaagttgatgacgtgttagagagcagccaggaaaatgaagatgaccatttt

SEQ ID NO: 311829 - DNA, 436 bp, Artificial Sequence
  derived and/or modified sequence
cgcatgtgcatccccgcctcccgctccaggcgagtccttccctggactccagtcccttgtgggaaacaatccctcgcctccggaggcggcgaggagcggcggaacctaaattggtaataaatcaataagaaatatttacattcactcagtgaaaagtgtcatgtctgagctcagcatatatcggagccacacatggacacctctccttcctccactaagagcggaaaatgaacaaatcccaggaacaagtgtcattcaaggatgtatgtgtggacttcactcaggaagagtggtatctgctggaccctgctcagaagattctatacagagatgtgatcctggaaaattatagcaatcttgtctcagtagggtattgcattactaaaccagaagtgatctttaagatcgagcaaggagaagagccctggatattaga

SEQ ID NO: 311830 - DNA, 342 bp, Artificial Sequence
  derived and/or modified sequence
tacatcccacttatcgtcgacatctgttgcaaactagtggaagagaggggactggaatacaccggcatctatcgtgtccctggaaacaacgctgccatctctagcatgcaggaggagttgaataaaggaatggccgacatcgacatccaagatgacaaatggagggatttgaatgttatcagttccctcctaaaatccttcttccgcaagctccccgagcccttattcacaaatgacaaatacgcagactttattgaggcgaataggaaggaggatccattagaccgcttgaaaacccttaagcgtctcttcctgagcgcccacctcaaaactgtcgcttag

SEQ ID NO: 311831 - DNA, 342 bp, Artificial Sequence
  derived and/or modified sequence
tacatccccctgattgtggacatctgctgcaagctggtggaggagcggggcctggagtacacaggcatctacagagtgcccggcaacaatgctgccatcagctccatgcaggaggagctgaacaagggcatggctgacatcgacatccaggatgacaagtggagggacctgaatgtcatcagcagcctgctgaagagcttcttcaggaagctgcctgagcccctcttcaccaatgacaagtatgctgacttcatcgaggccaacagaaaagaagaccccctggaccggctgaagaccctgaagaggctcttcctgagcgcccacctgaagacagtggcctag

SEQ ID NO: 311832 - DNA, 342 bp, Artificial Sequence
  derived and/or modified sequence
tacatccccctgatcgtggacatctgctgcaagctggtggaggagagaggcctggaatacaccggcatttaccgcgttcccggcaataatgcagcaatttcttctatgcaagaggaactgaacaagggcatggctgacattgatatccaagatgacaagtggagagacctcaatgtgatttcatctcttttaaagtccttcttccgcaagttgccagagccgctgttcaccaacgacaagtatgcagacttcatcgaagccaacaggaaagaggacccacttgatcgtttgaaaaccttgaagcggctgtttctctctgcccatctaaaaaccgtcgcatag

SEQ ID NO: 311833 - DNA, 342 bp, Artificial Sequence
  derived and/or modified sequence
tatattcccctgatcgtggacatttgttgcaagttagtggaggagagaggcttagaatacaccgggatttatcgcgtgcccggtaacaacgcagctattagttctatgcaagaagagctgaacaagggcatggcggacattgacatccaggatgataagtggagggacctgaatgtgatctcctcactgctgaagtcttttttcaggaagctcccagaaccactgtttactaacgataagtacgcagattttattgaagctaaccgaaaggaagatcctctcgatcgactgaagactctaaaacgtctgtttctatcagctcacctgaagacagtggcctag

SEQ ID NO: 311834 - DNA, 340 bp, Artificial Sequence
  derived and/or modified sequence
tatattccattaatagttgacatatgttgcaaattagttgaagaaagaggtcttgaatatacaggtatttatagagttcctggaaataatgcagccatctcaagtatgcaagaagaactcaacaagggaatggctgatattgatatacaagatgataaatggcgagatttgaatgtgataagcagtttactaaaatccttcttcagaaaactccctgagcctctcttcacaaatgataaatatgctgattttattgaagccaatcgtaaagaagatcctctagatcgtctgaaaacattaaaaagactattcctttcagctcatctgaagacagtggcag

SEQ ID NO: 311835 - DNA, 342 bp, Artificial Sequence
  derived and/or modified sequence
tacatccccctgatcgtggacatctgctgcaagctggtggaggagagaggcctggagtacaccggcatctacagagtgcccggcaacaacgccgccatcagcagcatgcaggaggagctgaacaagggcatggccgacatcgacatccaggacgacaagtggagagacctgaacgtgatcagcagcctgctgaagagcttcttcagaaagctgcccgagcccctgttcaccaacgacaagtacgccgacttcatcgaggccaacagaaaggaggaccccctggacagactgaagaccctgaagagactgttcctgagcgcccacctgaagaccgtggcctag

SEQ ID NO: 311836 - protein, 1407 aa, Artificial Sequence
  derived and/or modified sequence
MATRRTGLSEGDGDKLKACEVSKNKDGKEQSETVSLSEDETFSWPGPKTVTLKRTSQGFGFTLRHFIVYPPESAIQFSYKDEENGNRGGKQRNRLEPMDTIFVKQVKEGGPAFEAGLCTGDRIIKVNGESVIGKTYSQVIALIQNSDTTLELSVMPKDEDILQVAYSQDAYLKGNEAYSGNARNIPEPPPICYPWLPSAPSAMAQPVEISPPDSSLSKQQTSTPVLTQPGRAYRMEIQVPPSPTDVAKSNTAVCVCNESVRTVIVPSEKVVDLLSNRNNHTGPSHRTEEVRYGVSEQTSLKTVSRTTSPPLSIPTTHLIHQPAGSRSLEPSGILLKSGNYSGHSDGISSSRSQAVEAPSVSVNHYSPNSHQHIDWKNYKTYKEYIDNRRLHIGCRTIQERLDSLRAASQSTTDYNQVVPNRTTLQGRRRSTSHDRVPQSVQIRQRSVSQERLEDSVLMKYCPRSASQGALTSPSVSFSNHRTRSWDYIEGQDETLENVNSGTPIPDSNGEKKQTYKWSGFTEQDDRRGICERPRQQEIHKSFRGSNFTVAPSVVNSDNRRMSGRGVGSVSHWRKGIPSIMRKTFEKKPTATGTFGVRLDDCPPAHTNRYIPLIVDICCKLVEERGLEYTGIYRVPGNNAAISSMQEELNKGMADIDIQDDKWRDLNVISSLLKSFFRKLPEPLFTNDKYADFIEANRKEDPLDRLKTLKRLIHDLPEHHYETLKFLSAHLKTVAENSEKNKMEPRNLAIVFGPTLVRTSEDNMTHMVTHMPDQYKIVETLIQHHDWFFTEEGAEEPLTTVQEESTVDSQPVPNIDHLLTNIGRTGVSPGDVSDSATSDSTKSKGSWGSGKDQYSRELLVSSIFAAASRKRKKPKEKAQPSSSEDELDNVFFKKENVEQCHNDTKEESKKESETLGRKQKIIIAKENSTRKDPSTTKDEKISLGKESTPSEEPSPPHNSKHNKSPTLSCRFAILKESPRSLLAQKSSHLEETGSDSGTLLSTSSQASLARFSMKKSTSPETKHSEFLANVSTITSDYSTTSSATYLTSLDSSRLSPEVQSVAESKGDEADDERSELISEGRPVETDSESEFPVFPTALTSERLFRGKLQEVTKSSRRNSEGSELSCTEGSLTSSLDSRRQLFSSHKLIECDTLSRKKSARFKSDSGSLGDAKNEKEAPSLTKVFDVMKKGKSTGSLLTPTRGESEKQEPTWKTKIADRLKLRPRAPADDMFGVGNHKVNAETAKRKSIRRRHTLGGHRDATEISVLNFWKVHEQSGERESELSAVNRLKPKCSAQDLSISDWLARERLRTSTSDLSRGEIGDPQTENPSTREIATTDTPLSLHCNTGSSSSTLASTNRPLLSIPPQSPDQINGESFQNVSKNASSAANAQPHKLSETPGSKAEFHPCL

SEQ ID NO: 311837 - DNA, 4224 bp, Artificial Sequence
  derived and/or modified sequence
atggccaccagacgcacaggactatcagagggggacggcgacaaactgaaggcttgtgaggtttccaaaaataaggacggcaaagagcagtccgagaccgtcagcctgtctgaagacgagaccttcagctggcccggcccaaaaacagtgaccctcaagcgaacttcgcagggcttcggctttacgttgcgacatttcattgtgtatccaccggaatccgctatacagttctcatacaaggatgaggagaacggcaatcgcggcggaaagcagcgaaaccggttggagcctatggatacgattttcgtgaaacaggtcaaagaaggcggccccgccttcgaagctggattatgcacaggggatcggatcatcaaagttaacggagaaagcgtgattggtaagacttactcccaggtgattgcgctcatccagaactcagacacaaccttggaactgtcggttatgccaaaggatgaggatattctccaggtggcctattctcaagatgcctatttaaaaggtaatgaggcatattctggcaatgcccggaatataccagagcccccgcctatttgttacccatggcttcctagtgctccttccgccatggcgcaaccggtggagatatccccaccggatagcagcttgagcaaacagcaaacttcgacaccagtgctgacccagccaggtagggcgtacagaatggagatccaggtacctcctagccctacagacgtggcgaaatctaatacggccgtctgcgtgtgtaatgagagcgtgagaaccgtcatcgtgccctctgagaaggtcgtagatctgctttccaaccgcaacaaccatacaggtccaagtcacaggaccgaggaggtccggtacggagtgagcgaacagacctccctgaagaccgtgagcaggaccacatctcctccactgtcaattccaaccacccatcttatacatcagcctgcaggcagccgctccctggaaccttctggcattctgcttaagagcggtaattattctggccacagtgacggcattagcagttcacggtcacaggccgtggaggcgccaagtgtgagcgtgaaccactactccccaaacagccaccagcacatagactggaaaaactataaaacctataaagagtacatcgataaccgcaggctccacatcggttgccgcaccattcaagaacgcctggacagccttagagcagcatcccagagcactacggactataaccaggtcgtgccgaaccgcactaccctgcaaggcagacggagatctacatcccacgacagggtaccccaaagcgtgcagatccgccagcgctctgtgtcacaggagcgcctcgaagacagcgtgctcatgaaatactgcccccgatctgcgtctcaaggtgccctgacttcccctagcgtctccttctctaaccatcggacccggtcgtgggattacattgaagggcaggatgaaaccctggaaaatgtcaattctgggaccccaatccctgattcgaacggagagaagaagcagacatacaagtggagcggattcaccgagcaggacgacagaagagggatctgcgagcggccgagacaacaggagatccataagtcctttcgtggctctaactttacggtcgccccctccgtggtgaactcagacaatcggcgcatgtccggcaggggcgtggggagcgtgtctcattggcgaaagggcatcccgtctattatgcgaaagaccttcgagaaaaagccaaccgctaccgggacattcggagttaggcttgacgactgccccccagcccatacaaaccgctatatcccactgatcgtcgatatctgttgtaagttggtagaggagagaggcctagagtacaccggaatctatcgtgtgcccggcaataacgcagcaatatctagtatgcaagaggagcttaacaagggcatggccgatattgacatccaggacgacaagtggcgcgacctgaatgttattagtagcctcctgaaatctttctttagaaaactgcccgaaccactctttactaatgataagtatgccgatttcatcgaagctaatagaaaagaggacccacttgacaggctgaaaaccctgaaaaggctgatccacgacctccctgagcatcattacgaaacattgaaattccttagcgcgcacttaaagaccgtcgctgaaaattccgagaaaaataaaatggagcctagaaatctggctatcgtgtttggcccaaccctagtgcgcaccagcgaagacaatatgacacatatggtaacccacatgcctgatcaatataagattgtcgagaccttaatacagcatcatgattggtttttcacagaggagggggccgaggagccccttactaccgtgcaggaggagagcactgtcgactcccagccagtacctaacatcgaccacctcttaactaatatcggaagaaccggggtatcacctggcgatgtgtccgacagcgctacctcagacagcaccaagagcaaaggttcctggggttcagggaaggatcaatattcaagagaactgttggtctccagcattttcgccgcagcctctcgcaaacgaaagaagcccaaagagaaggcacaaccttcgtcctcagaggatgagctcgataacgtatttttcaaaaaggagaacgtcgaacagtgtcacaacgacaccaaagaagaatcaaagaaagaatccgagacattgggaaggaaacagaagatcattattgccaaggagaacagtacacgtaaggacccaagcactacaaaagacgagaaaatctccctgggaaaagagtccaccccatcagaagagccttcccccccccacaattctaagcacaacaaatctcctactttatcttgccgctttgccatacttaaagaatccccccgcagtctgctggcgcagaaatcttctcacctggaggagacaggtagtgacagcgggaccctcctcagtacaagcagccaggccagccttgccaggttctcaatgaaaaaatctacgtcccccgagaccaagcatagcgaattcctggccaacgttagtacaatcacgtcagattattctactacctccagcgcaacctatctaacatcactggactcctctaggctgtcacccgaagtgcaaagcgtggccgaaagcaagggagatgaagcagacgacgagcggtccgaattgatctcggagggcagacctgtggagaccgacagtgaaagcgagttccccgtgttccccactgccctcacaagcgaacggttgttccgcggaaagctacaggaagttacaaagtcctctaggcggaatagtgagggctccgaactgagctgtactgagggcagtctaacatcctccctggacagcaggagacagctcttctcctcccataagctgatagagtgcgacactctaagtaggaagaaaagcgcacggttcaagtctgactccggatcactaggagacgctaagaatgagaaagaggccccaagtctgacaaaagtgtttgacgtaatgaaaaagggcaagtcaacgggctccctcctgacacctacacggggtgagagtgagaagcaggagccaacctggaagacaaagattgctgataggctgaaactgcgccccagggctcccgcggatgacatgttcggtgtcgggaaccataaggtgaatgcagaaaccgccaagcggaagtccatacggagaaggcataccttgggtgggcacagagatgccacagaaatctccgtactgaacttctggaaagtccatgaacaaagcggcgagagggaatccgagctgtcagctgtgaacaggctgaagccaaagtgttccgcccaggacctttcaatcagcgactggcttgccagggagcgcttaagaacctcaacaagtgacttgagcaggggagaaatcggggatccccaaactgagaatcctagcacgagagaaatcgcaactacagatacaccactttccttgcattgtaatacaggctccagcagttcgaccctcgcgtcaacaaatcggcctctactgagcattcccccccaatctcccgatcagatcaacggcgagagctttcagaacgtgtctaagaatgcatcttctgctgccaatgctcagccccacaaactctccgagacaccaggaagcaaagccgaattccacccttgtttgtag

SEQ ID NO: 311838 - DNA, 4224 bp, Artificial Sequence
  derived and/or modified sequence
atggccaccaggagaacaggcctgtctgaaggagatggagacaagctgaaggcctgtgaggtgtccaagaacaaggatggcaaggagcagagcgagaccgtgtccctgtctgaagatgagaccttctcctggccaggccccaagacagtgaccctgaagaggaccagccagggcttcggcttcaccctgcggcacttcatcgtgtacccacctgagagcgccatccagttctcctacaaggatgaagaaaatggaaacagaggaggcaagcagaggaaccggctggagcccatggacaccatctttgtgaagcaggtgaaggagggcggccctgcctttgaagctggcctgtgcacaggagaccgcatcatcaaggtgaatggagagagcgtcatcggcaagacctacagccaggtgattgccctgatccagaacagcgacaccaccctggagctgtctgtgatgcccaaggatgaggacatcctgcaggtggcctacagccaggatgcctacctgaagggaaatgaggcctacagcggaaatgccaggaacatccctgagcccccacccatctgctacccctggctgcccagcgcccccagcgccatggcccagcctgtggagatcagccccccagacagcagcctgagcaagcagcagaccagcacccctgtgctgacccagcccggccgggcctacaggatggagatccaggtgccccccagccccacagatgtggccaagagcaacacagctgtgtgtgtgtgcaatgaatctgtgaggacagtcatcgtgcccagcgagaaggtggtggacctgctgagcaacagaaacaaccacacaggccccagccacaggacagaggaggtgcgctatggagtgtctgagcagaccagcctgaagacagtgtccaggaccaccagcccccccctgagcatccccaccacccacctgatccaccagcctgctggcagccgcagcctggagcccagcggcatcctgctgaagagcggcaactacagcggccacagtgatggcatcagcagcagccgcagccaggccgtggaggcccccagcgtgtctgtgaaccactacagccccaacagccaccagcacatcgactggaagaactacaagacctacaaggagtacatcgacaacagaaggctgcacatcggctgcaggaccatccaggagcggctggacagcctgcgggccgccagccagagcaccacagactacaaccaggtggtgcccaacagaaccaccctgcagggcagaagaagaagcaccagccatgacagagtgccccagagcgtgcagatccggcagaggtctgtgtcccaggagcggctggaggacagcgtgctgatgaagtactgccccaggtctgccagccagggcgccctgaccagccccagcgtgtccttcagcaaccacaggaccaggtcctgggactacatcgagggccaggatgagaccctggagaatgtgaacagcggcacccccatcccagacagcaatggagagaagaagcagacctacaagtggagcggcttcacagagcaggatgaccggcggggcatctgtgagcggccccggcagcaggagatccacaagagcttccggggcagcaacttcaccgtggcccccagcgtggtgaacagcgacaacagaaggatgagcggccggggcgtgggctctgtgagccactggaggaagggcatccccagcatcatgaggaagacctttgagaagaagcccacagccaccggcaccttcggcgtgcggctggatgactgccccccagcccacaccaaccgctacatccccctgattgtggacatctgctgcaagctggtggaggagcggggcctggagtacacaggcatctacagagtgcccggcaacaatgctgccatcagctccatgcaggaggagctgaacaagggcatggctgacatcgacatccaggatgacaagtggagggacctgaatgtcatcagcagcctgctgaagagcttcttcaggaagctgcctgagcccctcttcaccaatgacaagtatgctgacttcatcgaggccaacagaaaagaagaccccctggaccggctgaagaccctgaagaggctcatccatgacctgcctgagcaccactatgagaccctgaagttcctgagcgcccacctgaagacagtggctgaaaattctgagaagaacaagatggagcccaggaacctggccatcgtgtttggccccaccctggtgaggaccagcgaggacaacatgacccacatggtgacccacatgccagaccagtacaagatcgtggagaccctcatccagcaccacgactggttcttcacagaggagggcgctgaggagcccctgaccaccgtgcaggaggagagcacagtggacagccagcctgtgcccaacatcgaccacctgctgaccaacattggaagaactggagtgtccccaggagatgtgtctgacagcgccaccagtgacagcaccaagagcaagggctcctggggcagcggcaaggaccagtacagccgggagctgctggtgagcagcatctttgctgctgccagcaggaagaggaagaagcccaaggagaaggcccagcccagcagcagtgaagatgagctggacaacgtgttcttcaagaaggaaaatgtggagcagtgccacaatgacaccaaggaggagagcaagaaggagagcgagaccctgggcaggaagcagaagatcatcatcgccaaggagaacagcaccaggaaggaccccagcaccaccaaggatgagaagatcagcctgggcaaggagagcaccccatctgaggagcccagccccccccacaacagcaagcacaacaagagccccaccctgagctgccgctttgccatcctgaaggagagccccaggagcctgctggcccagaagagcagccacctggaggagactggaagtgacagcggcaccctgctgagcaccagcagccaggccagcctggcccgcttctccatgaagaagagcaccagccctgagaccaagcacagcgagttcctggccaacgtgtccaccatcaccagtgactacagcaccaccagcagcgccacctacctgaccagcctggacagcagccggctgagccctgaggtgcagagcgtggccgagagcaaaggagatgaagcagatgatgagaggtctgagctgatcagcgagggccggcctgtggagacagacagcgagagcgagttccctgtgttccccacagccctgaccagcgagcggctcttccggggcaagctgcaggaggtgaccaagagcagcagaagaaacagcgagggcagcgagctgagctgcacagagggcagcctgaccagcagcctggacagccggcggcagctgttcagcagccacaagctgattgaatgtgacaccctgagcaggaagaagagcgcccgcttcaagagtgacagcggcagcctgggagatgccaagaatgagaaggaggcccccagcctgaccaaggtgtttgatgtgatgaagaagggcaagagcacaggcagcctgctgacccccaccagaggagagagcgagaagcaggagcccacctggaagaccaagattgctgaccggctgaagctgcggccccgggccccagcagatgacatgtttggagtgggcaaccacaaggtgaatgctgagacagccaagaggaagagcatcagaagaagacacaccctgggcggccacagagatgccacagagatctctgtgctgaacttctggaaggtgcatgagcagagcggggagcgggagagcgagctgtctgctgtgaaccggctgaagcccaagtgcagcgcccaggacctgagcatcagtgactggctggcccgggagcggctgcggaccagcaccagtgacctgagcagaggagaaattggagacccccagacagagaaccccagcacccgggagatcgccaccacagacacccccctgagcctgcactgcaacacaggcagcagcagcagcaccctggccagcaccaaccggcccctgctgagcatccccccccagagcccagaccagatcaatggagagagcttccagaatgtgtccaagaatgccagcagcgctgccaatgcccagccccacaagctgtctgagaccccaggcagcaaggccgagttccacccctgcctgtag

SEQ ID NO: 311839 - DNA, 4224 bp, Artificial Sequence
  derived and/or modified sequence
atggccacccggcggaccggcctgagcgagggcgacggcgacaagctcaaagcctgcgaggtcagtaaaaataaggatggcaaagaacagtcagaaaccgtgtctctgagtgaggatgaaactttttcttggcccggaccgaaaacggtgacacttaagagaaccagccagggattcggttttactttgcggcacttcatagtgtatccaccagagtccgcaattcaattctcttataaagatgaggaaaatggtaatcgcggcggaaaacagagaaatcggcttgagcccatggatacaatcttcgtgaagcaggtgaaggaaggcggaccggcctttgaggctgggctatgcacaggcgatcggattattaaagtaaatggggagagtgtgatcggcaagacatattcccaggttatcgctctgatccagaacagcgatacaaccctcgaactctctgtcatgccaaaggacgaggacatattgcaggtggcatatagccaggacgcgtacctgaagggaaacgaagcttactccgggaacgcccgtaacatcccagagccccctcccatttgttatccgtggctgccttctgcccccagcgcgatggcccagcccgtggaaattagccctccagacagctccctcagcaaacagcagactagtacaccggttctcacccagccaggaagagcgtaccgcatggagatacaagttccccctagccctactgatgtcgctaaatctaatacagctgtgtgtgtctgtaacgagtctgtaaggactgtcatcgtcccaagcgagaaggtagtggacctgctgagcaatcgcaacaatcatacaggccctagccaccgaacagaggaagtgcgttatggtgtatcggagcaaacgtctctcaagaccgtgagcagaacaacctctccaccactttcaattcctactactcatttaattcaccaacctgccgggtcaagatcgttggagccctctggcattctcttgaagagcgggaattatagtggccactcagatggcataagtagtagccgttcccaggctgtcgaagctccttctgtgagcgtcaatcactactcacctaatagtcatcagcatatagactggaagaactacaagacatacaaggaatacattgacaatcgccgcctgcacattggatgcaggacaatccaggagcgtctggacagcttacgggccgcctcacagtctactaccgattataatcaggtcgtgcccaaccgtacaacactgcagggccggcggcgttcaactagtcatgacagagttcctcagtcagtccaaattagacaacgatctgtctcccaggagcgcctcgaggactctgtgctgatgaaatactgcccccgatccgcgtctcagggagctctcaccagtccatcagtgtctttctctaatcatagaacacggagttgggattacatcgaggggcaggacgagaccttggagaatgtcaattccggaactcccatccccgactccaacggcgagaagaagcagacgtataaatggtccgggttcacggaacaagacgaccgaagaggtatttgcgagaggccccgacaacaagagatacacaaatcttttagagggtccaacttcacagtagcaccctctgtggtgaactcagataataggcggatgtctggtcggggtgtgggtagtgtcagccattggagaaaggggattccctccattatgagaaaaaccttcgaaaaaaagcctacggcgaccgggactttcggcgtgcgtctggacgattgcccacccgcgcacactaatcgatacatacccctcatagtggatatttgctgcaagttagtggaagagaggggactagaatacaccggtatttatcgggttcctgggaataatgctgcaatctccagcatgcaggaggaactgaataaaggaatggcggacattgacatccaggacgataaatggagagacctcaacgtcatttcttcactcttgaaatccttttttcggaagctgcccgagccactgtttacaaatgacaaatatgccgattttattgaggccaaccggaaggaagatcctttggatcgcttgaaaaccctgaaaagactgatacatgaccttccggagcaccactacgaaacactgaaatttctttctgcccaccttaaaaccgtggcagagaactcagagaagaacaaaatggagccacgcaacctcgctatcgtctttggcccaacacttgtccgaaccagcgaggacaatatgactcacatggtgacgcacatgcccgatcagtacaaaattgtggagaccttgattcaacatcacgattggttttttaccgaggaaggagcagaagagccgctcacaacagttcaggaagagtctacagttgacagtcagcctgtgcccaacattgatcacctgttgacaaacatcggacgaacaggcgtgtccccaggagatgtgagcgactccgctacatcagacagtaccaaaagcaaaggctcatgggggagcgggaaggatcagtatagcagagagctgctggtcagtagtatctttgcagcagccagtagaaagcgcaaaaagcccaaagaaaaagcccaacctagcagcagtgaggatgaactcgataacgttttttttaaaaaagaaaatgtggagcaatgtcacaacgacacaaaggaggaatctaagaaggagtccgagacattgggacgtaagcaaaaaatcataatcgccaaggagaactccacccgcaaggatccaagtacaacaaaagatgagaagatttctctaggaaaagaaagtacaccaagtgaagagccatctccccctcacaattcaaaacataacaaatccccaaccctgtcctgtcgcttcgccatcctgaaggaaagtccacggagtctgctcgcacagaaaagctcgcatctggaggaaacgggctccgacagcggcaccttgctctctacctcttcacaggccagcctggcacggttttccatgaagaaaagtaccagtccggagaccaagcacagtgaatttctggccaacgtgagtacaatcacctctgactattccacgaccagctcagcaacgtacctcacatctttggattcctcacgactgtcgccggaagttcaatcagtggccgagagtaagggggacgaagctgacgacgaaaggagtgagctcatcagcgagggaagaccagtcgagaccgacagcgaatccgaatttcccgtgttcccaaccgcactcacctctgagaggctgttcagggggaagctgcaggaggtcacaaaaagcagcagacgaaatagcgaggggagcgaactatcttgtaccgaaggttcactgacgagcagcttggatagtaggcgccagctattttcgtcccataaactgatcgagtgtgacacactgtcacgcaagaaatctgcacgtttcaagagtgactcaggatcactcggggacgcaaagaatgagaaagaagcaccgtccctaaccaaagtctttgacgtcatgaaaaaaggaaaaagcacgggaagtcttttaactcccacccgaggtgaatctgaaaagcaggagcctacatggaaaacaaagattgccgatcggctgaagctccgcccgcgtgcccccgcagatgatatgttcggggtggggaatcataaggtgaatgccgagactgctaagcggaagagcattcgtagaaggcacacgctgggtggacatagggacgctactgaaatctctgtattgaatttctggaaggtacacgagcagtccggcgaacgtgaatccgagctgtcagccgtgaaccgcctgaagcctaaatgtagcgcccaggacctctcaatctcagactggttagcgcgcgagaggttacgtacttccacttccgatctgagcagaggggaaatcggggacccacagacggagaatccctctacacgcgagatcgcaaccacagacacaccactaagtctacactgcaacaccggatcaagttcaagcactctggcttcgacaaatcgcccactgctgtcgattccgcctcagagccctgatcagattaatggtgagtctttccaaaatgttagcaaaaatgcaagttccgccgcaaatgctcaaccccataagttgagcgaaacgccgggttccaaggctgaattccatccttgcctgtag

SEQ ID NO: 311840 - DNA, 4224 bp, Artificial Sequence
  derived and/or modified sequence
atggctacgaggagaactggcctttctgagggcgacggtgacaagctgaaagcttgtgaggtatcaaaaaataaggatggcaaggaacaatctgagaccgtcagcctgagcgaggatgagactttcagctggccgggtcccaagactgtaaccctgaagaggacctctcaaggcttcggatttacgttgcggcatttcatagtttatccaccagagtccgctatacagttcagctataaagacgaagagaatggaaaccgcggtggtaagcagagaaatcgactggaacctatggacaccatttttgtcaaacaggtgaaggagggtgggccagcctttgaggccggactttgtaccggagaccggattattaaggtgaatggagagagtgttataggcaagacctattcccaagtcattgccctgattcagaacagcgacacaaccttagagctgtccgtcatgcccaaggacgaggacatcctgcaggtagcttacagtcaagacgcttatctaaagggcaatgaagcttactccggcaacgccaggaacatccctgagcccccacctatctgctacccctggcttccgtctgcgccttctgccatggcccagccggtggaaatcagtccaccagattcctcactcagtaaacaacaaacctccacccccgtgctgacccaaccagggagagcttaccggatggagatccaggttccaccatctcccaccgatgtggccaagtccaacaccgccgtgtgcgtgtgcaatgagtccgtgcgtactgtgattgttccgtccgagaaggtggttgatctcctctctaatcgcaataaccacaccggtccttcgcaccgcaccgaagaagttaggtatggtgtttccgagcaaacctcccttaaaactgtctctcggacaacctcaccacccctgagcatcccaaccactcacttaatacatcagccggcaggatctcgctcacttgagccttccggcattctcctgaaatctgggaattactccgggcacagcgatggcatcagtagctcgcggtcacaggcagtggaagctcctagcgtcagtgtcaatcactactctccaaattctcaccagcatatcgattggaagaactacaagacctacaaagaatacatcgataaccgtcgcctgcatatcggatgcagaactatccaagagcggctggattcattacgcgctgctagccagtcaacaaccgactataaccaggtggttcccaacaggaccacacttcaaggccgtaggaggtccacctctcacgatcgcgtgccccagtccgtgcagattaggcagaggtcagtttcccaggaacgactggaagactccgtactgatgaagtattgcccccgatccgcatcccagggcgcactaacttctccaagcgtttcatttagtaaccatcgaacaaggagttgggattatatcgagggccaggatgaaacactggagaacgtaaacagcgggaccccgattcccgactccaacggagaaaagaagcagacctacaagtggagtgggtttacagaacaagatgaccggaggggcatttgtgagcgaccccgtcagcaggagatccacaaatcctttagaggttccaattttaccgttgctccaagcgttgtgaatagtgataacagaaggatgtcggggaggggagttggttctgtgtcccactggcggaaaggcatcccatctataatgagaaagacattcgagaagaaacctacggccaccggcacgttcggggttagacttgacgactgtcccccagctcacactaataggtacatcccacttatagtcgacatttgctgcaagcttgtggaggagcgtggtcttgaatataccggaatttacagggtccctgggaacaacgccgcaatctcttctatgcaggaagagttaaacaagggcatggcagatattgatatccaggacgacaaatggagagacctgaacgtcatctcatcgttgttgaaatccttcttccgcaaacttccagaacccctgttcacgaacgacaagtatgccgatttcatcgaagcgaaccggaaggaggacccgttggataggctcaagacactgaagcggctgatacacgatctcccggagcatcattatgagacactgaaattcctgagtgcacatttgaaaacagtcgctgagaactctgagaaaaacaaaatggagcccagaaacttggcaattgtgtttgggcctaccctagtacggacaagtgaagataacatgacccatatggtcactcacatgcctgaccaatacaagatcgtcgaaacactcatccagcaccacgactggttctttacggaggagggtgctgaggaaccactcaccacagtgcaggaagaatcaacagtggattcacagccggtgcccaacattgaccatctgctcaccaacatcggacggacaggagtctcacccggagacgtatctgacagtgccaccagcgactcaacaaaatcaaagggctcatggggttctggtaaagatcagtatagtagagagctgcttgtatcatctatcttcgccgctgccagcaggaagagaaagaaacccaaggaaaaagctcagccttcttctagcgaggatgagctggataatgtgtttttcaagaaggagaatgttgagcagtgccataacgacaccaaggaggaatccaaaaaagagtccgagacccttggcaggaaacagaagatcatcattgctaaggagaacagtactcgcaaagatcccagcaccaccaaagacgagaagatctccctcgggaaggaaagtacacctagtgaagagccatctcctcctcacaattcaaaacacaataagagtcccaccctcagctgtcggttcgcaattttaaaagagtcgcctcgtagtctgttagctcagaaatcttcccatttggaggagactggtagtgactctggcactctgttatcaacctcttctcaggcaagcttggccagattttctatgaaaaagagtacaagccccgagacaaagcactctgagttcctggcaaacgtttcgaccataacgtctgactactctacgaccagttccgccacctatctgactagccttgatagcagccgactgtcaccagaagttcagtctgtggctgagtctaagggggacgaggccgacgacgaacggtcagagctcattagtgaaggacgacctgtggagaccgattcagagtccgagttccctgtgtttcccaccgcgctcacctctgaacggctctttaggggcaaattacaggaggtcactaaaagctccagacgcaattcagagggcagcgaactgtcctgcactgagggatcgctgacttcgtctctggattcacggcgtcagttattctcctcccacaaactcattgaatgtgacacattatcccggaagaaatcagccaggtttaaaagtgattccggctctcttggcgatgccaaaaacgagaaggaggctccttcattaaccaaagttttcgacgtgatgaagaaaggcaagagtaccgggagtcttttaactccaactcggggagaatctgaaaagcaggaacccacttggaagacgaagattgcggacaggcttaagcttcggcctagggctccagctgacgatatgttcggtgtgggtaatcataaggtgaatgcagaaacggctaaacgcaagagcatcaggcgcaggcacacgttaggaggccaccgagatgccacagaaatttcagtcctcaacttctggaaagtccacgagcagagtggcgagagggaaagcgagctgtccgctgtcaatcggcttaaacctaaatgcagtgcacaggatctgagcataagcgattggcttgctagggagcggctgaggacatccacctctgacctgtcccggggagaaatcggcgatccccagacggaaaaccccagtacaagagagatcgctaccactgatacaccactaagcctgcattgtaacaccggttcatcttcttctactctagcatcgacaaaccgccctctgctgtcaatccctccgcagtcgcccgaccagattaatggggaatctttccaaaacgtgtcaaagaatgcaagctctgctgctaatgcgcagcctcataagttgtccgagacacccggatcgaaggccgagtttcatccttgcctgtag

SEQ ID NO: 311841 - DNA, 4343 bp, Artificial Sequence
  derived and/or modified sequence
aattcttccccttcgggtgtgtggtggcattccccgccacgtccaatgtggactccaaaggatttgtcccttctttgtcatttgaaatgaaatgatggccacgcgtcggactggtctgtctgagggagatggtgacaagctcaaggcctgcgaggtctcaaaaaataaagatggaaaagaacaaagtgaaactgtatcactgtctgaagatgaaacattctcctggccaggtcccaaaacagttacgttgaaaagaacatctcaaggctttggttttacattaagacattttattgtttatcccccagagtctgcaattcaattttcatataaggatgaagaaaatggaaacagaggaggaaaacaaagaaaccgcttggaaccaatggataccatatttgttaagcaagttaaagaaggaggacctgcttttgaagctggattatgtacaggtgaccgaattataaaagtcaatggagaaagtgttattggcaaaacctattcccaagtaattgctttaattcaaaacagtgatacaacattggaacttagtgttatgccaaaagatgaagacattctccaagtggcatattctcaagatgcctacctgaaaggcaacgaagcttatagcggcaatgcccgcaatatacctgaacctccaccaatctgctatccctggctgccatctgccccatcagccatggcacagccagttgaaatatctcctcctgactcatcattgagcaaacagcaaaccagtacaccagtactgacacaacctggtagggcctatagaatggaaatacaagtgcctccatcaccaacagatgttgcaaaatcaaacacagcagtgtgtgtttgcaatgaaagtgtaaggactgtcattgtgccttctgagaaggttgtagatttgttatccaatagaaacaaccatacaggtccttcacatagaactgaagaagtgaggtatggcgtgagtgagcagacctctttaaaaacagtgtcaagaaccacatcaccaccattatcaattcccaccactcatctaattcatcagcctgcaggctccagatcactggaaccttctggaattttacttaagtctggaaattacagtggacattctgatggaatctcaagcagcagatctcaagctgtggaggctccctctgtatctgttaatcactattcgccaaattcccatcagcacatagactggaaaaactataaaacttacaaagagtatattgataacagacgattgcacataggttgtcggacaatacaagaaagattagatagtttaagagcagcatctcaaagcacgacagattataaccaggtcgtccccaaccgcactactttgcagggacgacgtcgaagcacctctcatgatcgagtgccccagtctgtccagatacggcaacgcagtgtgtcccaagaaagactggaagattctgtgctaatgaagtattgtccaagaagtgcatctcaaggagcactgacgtctccatctgttagttttagtaatcatagaactcgttcatgggattatattgagggacaggatgaaaccttagaaaatgtcaattctggaactccaatacctgattccaatggagagaaaaaacagacttacaagtggagtgggtttactgaacaggatgatagacgaggtatttgtgaaagacctaggcagcaagaaattcataaatcttttcgaggttccaattttactgtggctccaagcgttgttaattctgataacaggcgaatgagtggtagaggagtgggatctgtgtcgcactggagaaaaggcattccaagtatcatgagaaagacatttgagaaaaagccaactgctacaggaactttcggcgtccgactagatgactgcccaccagctcatactaatcggtatattccattaatagttgacatatgttgcaaattagttgaagaaagaggtcttgaatatacaggtatttatagagttcctggaaataatgcagccatctcaagtatgcaagaagaactcaacaagggaatggctgatattgatatacaagatgataaatggcgagatttgaatgtgataagcagtttactaaaatccttcttcagaaaactccctgagcctctcttcacaaatgataaatatgctgattttattgaagccaatcgtaaagaagatcctctagatcgtctgaaaacattaaaaagactaattcacgatttgcctgaacatcattatgaaacacttaagttcctttcagctcatctgaagacagtggcagaaaattcagaaaaaaataagatggaaccaagaaacctagcaatagtgtttggtcccacccttgttcgaacatcagaagacaacatgacccacatggtcacccacatgcctgaccagtacaagattgtagaaacgctcatccagcaccatgactggtttttcacagaagaaggtgctgaagagcctcttacaacagtgcaggaggaaagcacagtagactcccagccagtgccaaacatagatcatttactcaccaacattggaaggacaggagtctccccaggagatgtatcagattcagctactagtgactcaacaaaatctaagggttcttggggatctggaaaggatcagtatagcagggaactgcttgtgtcctccatctttgcagctgctagtcgcaagaggaagaagccgaaagaaaaagcacagcctagcagctcagaagatgaactggacaatgtattttttaagaaagaaaatgtggaacagtgtcacaatgatactaaagaggagtccaaaaaagaaagtgagacactgggcagaaaacagaagatcatcattgccaaagaaaacagcactaggaaagaccccagcacgacaaaagatgaaaagatatcactaggaaaagagagcacgccttctgaagaaccctcaccaccacacaactcaaaacacaacaagtcaccaactctcagctgtcgctttgccatcctgaaagagagccccaggtcacttctggcacagaagtcctcccaccttgaagagacaggctctgactctggcactttgctcagcacgtcttcccaggcctccctggcaaggttttccatgaagaaatcaaccagtccagaaacgaaacatagcgagtttttggccaacgtcagcaccatcacctcagattattccaccacatcgtctgctacatacttgactagcctggactccagtcgactgagccctgaggtgcaatccgtggcagagagcaagggggacgaggcagatgacgagagaagcgaactcatcagtgaagggcggcctgtggaaaccgacagcgagagcgagtttcccgtgttccccacagccttgacttcagagaggcttttccgaggaaaactgcaagaagtgactaagagcagccggagaaattctgaaggaagtgaattaagttgcaccgagggaagtttaacatcaagtttagatagccggagacagctcttcagttcccataaactcatcgaatgtgatactctttccaggaaaaaatcagctagattcaagtcagatagtggaagtctaggagatgccaagaatgagaaagaagcaccttcgttaactaaagtgtttgatgttatgaaaaaaggaaagtcaactgggagtttactgacacccaccagaggcgaatccgaaaaacaggaacccacatggaaaacgaaaatagcagatcggttaaaactgagacccagagcccctgcggatgacatgtttggagtagggaatcacaaagtgaatgccgagactgctaaaaggaaaagcatccggcgcagacatacactaggagggcacagagatgctaccgaaatcagcgttttgaatttttggaaagtgcatgagcagagcggggagagagaatctgaactttcagctgtaaaccggttaaaaccaaaatgctcagcccaggacctttccatctcagactggctggccagggaacgcctacgcaccagtacctctgaccttagcagaggagaaatcggagatccccagacagagaacccaagcacacgagaaatagccacgaccgacacacctttgtctcttcattgcaacacaggcagttcttccagcaccttggcttcaacaaacaggccccttctttccataccaccacagtcacctgaccaaataaacggagaaagcttccagaacgtgagcaaaaatgctagttctgcagcgaatgcccaacctcataaactgtctgaaaccccaggcagtaaagcagagtttcatccctgtctttaaactgggggtatgtccactctagcaa

SEQ ID NO: 311842 - DNA, 4224 bp, Artificial Sequence
  derived and/or modified sequence
atggccaccagaagaaccggcctgagcgagggcgacggcgacaagctgaaggcctgcgaggtgagcaagaacaaggacggcaaggagcagagcgagaccgtgagcctgagcgaggacgagaccttcagctggcccggccccaagaccgtgaccctgaagagaaccagccagggcttcggcttcaccctgagacacttcatcgtgtacccccccgagagcgccatccagttcagctacaaggacgaggagaacggcaacagaggcggcaagcagagaaacagactggagcccatggacaccatcttcgtgaagcaggtgaaggagggcggccccgccttcgaggccggcctgtgcaccggcgacagaatcatcaaggtgaacggcgagagcgtgatcggcaagacctacagccaggtgatcgccctgatccagaacagcgacaccaccctggagctgagcgtgatgcccaaggacgaggacatcctgcaggtggcctacagccaggacgcctacctgaagggcaacgaggcctacagcggcaacgccagaaacatccccgagcccccccccatctgctacccctggctgcccagcgcccccagcgccatggcccagcccgtggagatcagcccccccgacagcagcctgagcaagcagcagaccagcacccccgtgctgacccagcccggcagagcctacagaatggagatccaggtgccccccagccccaccgacgtggccaagagcaacaccgccgtgtgcgtgtgcaacgagagcgtgagaaccgtgatcgtgcccagcgagaaggtggtggacctgctgagcaacagaaacaaccacaccggccccagccacagaaccgaggaggtgagatacggcgtgagcgagcagaccagcctgaagaccgtgagcagaaccaccagcccccccctgagcatccccaccacccacctgatccaccagcccgccggcagcagaagcctggagcccagcggcatcctgctgaagagcggcaactacagcggccacagcgacggcatcagcagcagcagaagccaggccgtggaggcccccagcgtgagcgtgaaccactacagccccaacagccaccagcacatcgactggaagaactacaagacctacaaggagtacatcgacaacagaagactgcacatcggctgcagaaccatccaggagagactggacagcctgagagccgccagccagagcaccaccgactacaaccaggtggtgcccaacagaaccaccctgcagggcagaagaagaagcaccagccacgacagagtgccccagagcgtgcagatcagacagagaagcgtgagccaggagagactggaggacagcgtgctgatgaagtactgccccagaagcgccagccagggcgccctgaccagccccagcgtgagcttcagcaaccacagaaccagaagctgggactacatcgagggccaggacgagaccctggagaacgtgaacagcggcacccccatccccgacagcaacggcgagaagaagcagacctacaagtggagcggcttcaccgagcaggacgacagaagaggcatctgcgagagacccagacagcaggagatccacaagagcttcagaggcagcaacttcaccgtggcccccagcgtggtgaacagcgacaacagaagaatgagcggcagaggcgtgggcagcgtgagccactggagaaagggcatccccagcatcatgagaaagaccttcgagaagaagcccaccgccaccggcaccttcggcgtgagactggacgactgcccccccgcccacaccaacagatacatccccctgatcgtggacatctgctgcaagctggtggaggagagaggcctggagtacaccggcatctacagagtgcccggcaacaacgccgccatcagcagcatgcaggaggagctgaacaagggcatggccgacatcgacatccaggacgacaagtggagagacctgaacgtgatcagcagcctgctgaagagcttcttcagaaagctgcccgagcccctgttcaccaacgacaagtacgccgacttcatcgaggccaacagaaaggaggaccccctggacagactgaagaccctgaagagactgatccacgacctgcccgagcaccactacgagaccctgaagttcctgagcgcccacctgaagaccgtggccgagaacagcgagaagaacaagatggagcccagaaacctggccatcgtgttcggccccaccctggtgagaaccagcgaggacaacatgacccacatggtgacccacatgcccgaccagtacaagatcgtggagaccctgatccagcaccacgactggttcttcaccgaggagggcgccgaggagcccctgaccaccgtgcaggaggagagcaccgtggacagccagcccgtgcccaacatcgaccacctgctgaccaacatcggcagaaccggcgtgagccccggcgacgtgagcgacagcgccaccagcgacagcaccaagagcaagggcagctggggcagcggcaaggaccagtacagcagagagctgctggtgagcagcatcttcgccgccgccagcagaaagagaaagaagcccaaggagaaggcccagcccagcagcagcgaggacgagctggacaacgtgttcttcaagaaggagaacgtggagcagtgccacaacgacaccaaggaggagagcaagaaggagagcgagaccctgggcagaaagcagaagatcatcatcgccaaggagaacagcaccagaaaggaccccagcaccaccaaggacgagaagatcagcctgggcaaggagagcacccccagcgaggagcccagccccccccacaacagcaagcacaacaagagccccaccctgagctgcagattcgccatcctgaaggagagccccagaagcctgctggcccagaagagcagccacctggaggagaccggcagcgacagcggcaccctgctgagcaccagcagccaggccagcctggccagattcagcatgaagaagagcaccagccccgagaccaagcacagcgagttcctggccaacgtgagcaccatcaccagcgactacagcaccaccagcagcgccacctacctgaccagcctggacagcagcagactgagccccgaggtgcagagcgtggccgagagcaagggcgacgaggccgacgacgagagaagcgagctgatcagcgagggcagacccgtggagaccgacagcgagagcgagttccccgtgttccccaccgccctgaccagcgagagactgttcagaggcaagctgcaggaggtgaccaagagcagcagaagaaacagcgagggcagcgagctgagctgcaccgagggcagcctgaccagcagcctggacagcagaagacagctgttcagcagccacaagctgatcgagtgcgacaccctgagcagaaagaagagcgccagattcaagagcgacagcggcagcctgggcgacgccaagaacgagaaggaggcccccagcctgaccaaggtgttcgacgtgatgaagaagggcaagagcaccggcagcctgctgacccccaccagaggcgagagcgagaagcaggagcccacctggaagaccaagatcgccgacagactgaagctgagacccagagcccccgccgacgacatgttcggcgtgggcaaccacaaggtgaacgccgagaccgccaagagaaagagcatcagaagaagacacaccctgggcggccacagagacgccaccgagatcagcgtgctgaacttctggaaggtgcacgagcagagcggcgagagagagagcgagctgagcgccgtgaacagactgaagcccaagtgcagcgcccaggacctgagcatcagcgactggctggccagagagagactgagaaccagcaccagcgacctgagcagaggcgagatcggcgacccccagaccgagaaccccagcaccagagagatcgccaccaccgacacccccctgagcctgcactgcaacaccggcagcagcagcagcaccctggccagcaccaacagacccctgctgagcatccccccccagagccccgaccagatcaacggcgagagcttccagaacgtgagcaagaacgccagcagcgccgccaacgcccagccccacaagctgagcgagacccccggcagcaaggccgagttccacccctgcctgtag

SEQ ID NO: 311843 - protein, 197 aa, Artificial Sequence
  derived and/or modified sequence
  misc_feature (1)..(1): Xaa can be any naturally occurring amino acid
XNNAAISSMQEELNKGMADIDIQDDKWRDLNVISSLLKSFFRKLPEPLFTNDKYADFIEANRKEDPLDRLKTLKRLIHDLPEHHYETLKFLSAHLKTVAENSEKNKMEPRNLAIVFGPTLVRTSEDNMTHMVTHMPDQYKIVETLIQHHDWFFTEEGAEEPLIQLLVTQQNLRVLGDLERISIAGNCLCPPSLQLLV

SEQ ID NO: 311844 - protein, 113 aa, Artificial Sequence
  derived and/or modified sequence
YIPLIVDICCKLVEERGLEYTGIYRVPGNNAAISSMQEELNKGMADIDIQDDKWRDLNVISSLLKSFFRKLPEPLFTNDKYADFIEANRKEDPLDRLKTLKRLFLSAHLKTVA

SEQ ID NO: 311845 - protein, 92 aa, Artificial Sequence
  derived and/or modified sequence
MDTIFVKQVKEGGPAFEAGLCTGDRIIKVNGESVIGKTYSQVIALIQNSDTTLELSVMPKDEDILQVNLEFSTFYKNTIAKFLQLSDMEMLC

SEQ ID NO: 311846 - DNA, 594 bp, Artificial Sequence
  derived and/or modified sequence
tagaacaatgcagcaatcagctctatgcaagaggagctcaataaagggatggcggatattgacatccaagacgacaagtggcgagatctgaatgtgatctcctcccttcttaagtccttctttcggaagcttcccgagccgctattcaccaacgacaaatatgctgatttcatcgaagctaacagaaaagaggatccactcgacagactcaagactctgaaacggctcatccatgatctgcctgaacaccactacgaaacactgaagttcctctccgcccatctgaaaaccgtagccgagaactctgaaaagaacaagatggagccccgcaacttggcgatcgtgtttggccctacattggtgcgtacgtccgaggacaatatgacccacatggtgacccacatgccagaccagtacaaaatcgtcgagaccttaattcagcatcacgactggttctttacagaggagggcgctgaagaacctcttattcagctcttagttacccagcagaacctgcgcgttttaggcgacctggagcgaataagcatcgccgggaattgtctgtgccccccatctctgcagttactggtgtag

SEQ ID NO: 311847 - DNA, 594 bp, Artificial Sequence
  derived and/or modified sequence
tgaaacaatgctgccatcagctccatgcaggaggagctgaacaagggcatggctgacatcgacatccaggatgacaagtggagggacctgaatgtcatcagcagcctgctgaagagcttcttcaggaagctgcctgagcccctcttcaccaatgacaagtatgctgacttcatcgaggccaacaggaaggaggaccccctggaccggctgaagaccctgaagaggctcatccatgacctgcctgagcaccactatgagaccctgaagttcctgagcgcccacctgaagacagtggccgagaacagcgagaagaacaagatggagcccaggaacctggccatcgtgtttggccccaccctggtgaggaccagcgaggacaacatgacccacatggtgacccacatgccagaccagtacaagatcgtggagaccctcatccagcaccacgactggttcttcacagaggagggcgctgaggagcccctcatccagctgctggtgacccagcagaacctgcgggtgctgggggacctggagcgcatcagcattgctggcaactgcctgtgcccccccagcctgcagctgctggtgtag

SEQ ID NO: 311848 - DNA, 594 bp, Artificial Sequence
  derived and/or modified sequence
tgaaacaacgccgccatcagcagcatgcaggaggagctgaacaagggaatggcagatattgatatacaggatgacaaatggagagacctgaatgtcatctctagcttgctaaagtccttcttcaggaaactcccggagcctctgtttacaaacgataaatatgctgatttcatagaggctaacaggaaggaagatccattggatcgcctgaaaactctgaagcgcctcatccacgacttgcctgagcaccactacgaaactctgaaattcctttccgctcacctgaagacagtcgctgaaaactctgaaaagaataagatggagccacgcaacctggctatcgtgttcgggcccactctggtacggacaagcgaggacaacatgacccacatggtgactcatatgccggatcagtacaaaatcgtagagactctcatacagcatcacgactggttctttacagaggaaggtgctgaagagccactgattcagcttttggttacgcagcaaaatctgagagtgctgggagaccttgagcgaatctcaatagccggaaactgcctgtgcccgccctcactccagctcctggtgtag

SEQ ID NO: 311849 - DNA, 594 bp, Artificial Sequence
  derived and/or modified sequence
tgaaacaacgcggcaatctcctcaatgcaggaggaattgaataagggcatggccgacattgatatccaagacgacaagtggagagatcttaatgtgatcagtagcttgctaaaaagtttctttcggaaattgcccgagcccttatttaccaacgataaatacgcagacttcatcgaagccaaccgcaaggaagatcctctagatcggcttaagactctgaaaaggttgatccacgacctgccagagcatcactatgaaacacttaagtttctcagcgctcatctgaagactgtggcagagaattccgagaagaataaaatggaacccagaaacttggctatcgtctttggccctacactggtacggacaagtgaggataatatgacacatatggttacacacatgcccgatcagtacaagatcgtagagaccctgatacaacaccacgattggtttttcaccgaagagggagctgaggagccgcttattcagctgctggtcacccagcagaatctgagggtgctgggagatctcgaacggatctcaatcgccggaaactgcctgtgcccacccagtctccagctgctagtctag

SEQ ID NO: 311850 - DNA, 590 bp, Artificial Sequence
  derived and/or modified sequence
aaataatgcagccatctcaagtatgcaagaagaactcaacaagggaatggctgatattgatatacaagatgataaatggcgagatttgaatgtgataagcagtttactaaaatccttcttcagaaaactccctgagcctctcttcacaaatgataaatatgctgattttattgaagccaatcgtaaagaagatcctctagatcgtctgaaaacattaaaaagactaattcacgatttgcctgaacatcattatgaaacacttaagttcctttcagctcatctgaagacagtggcagaaaattcagaaaaaaataagatggaaccaagaaacctagcaatagtgtttggtcccacccttgttcgaacatcagaagacaacatgacccacatggtcacccacatgcctgaccagtacaagattgtagaaacgctcatccagcaccatgactggtttttcacagaagaaggtgctgaagagcctcttattcagctactagtgactcaacaaaatctaagggttcttggggatctggaaaggatcagtatagcagggaactgcttgtgtcctccatctttgcagctgctagtcg

SEQ ID NO: 311851 - DNA, 568 bp, Artificial Sequence
  derived and/or modified sequence
ggccacgcgtcggactggtctgtctgagggagatggtgacaagctcaaggcctgcgaggtctcaaaaaataaagatggaaaagaacaaagtgaaactgtatcactgtctgaagatgaaacattctcctggccaggtcccaaaacagttacgttgaaaagaacatctcaaggctttggttttacattaagacattttattgtttatcccccagagtctgcaattcaattttcatataaggatgaagaaaatggaaacagaggaggaaaacaaagaaaccgcttggaaccaatggataccatatttgttaagcaagttaaagaaggaggacctgcttttgaagctggattatgtacaggtgaccgaattataaaagtcaatggagaaagtgttattggcaaaacctattcccaagtaattgctttaattcaaaacagtgatacaacattggaacttagtgttatgccaaaagatgaagacattctccaagtgaatctggaattctctacattttacaaaaataccattgccaagtttttgcaattaagtgacatggaaatgttatgttga

SEQ ID NO: 311852 - DNA, 594 bp, Artificial Sequence
  derived and/or modified sequence
tgaaacaacgccgccatcagcagcatgcaggaggagctgaacaagggcatggccgacatcgacatccaggacgacaagtggagagacctgaacgtgatcagcagcctgctgaagagcttcttcagaaagctgcccgagcccctgttcaccaacgacaagtacgccgacttcatcgaggccaacagaaaggaggaccccctggacagactgaagaccctgaagagactgatccacgacctgcccgagcaccactacgagaccctgaagttcctgagcgcccacctgaagaccgtggccgagaacagcgagaagaacaagatggagcccagaaacctggccatcgtgttcggccccaccctggtgagaaccagcgaggacaacatgacccacatggtgacccacatgcccgaccagtacaagatcgtggagaccctgatccagcaccacgactggttcttcaccgaggagggcgccgaggagcccctgatccagctgctggtgacccagcagaacctgagagtgctgggcgacctggagagaatcagcatcgccggcaactgcctgtgcccccccagcctgcagctgctggtgtag

SEQ ID NO: 311853 - protein, 1359 aa, Artificial Sequence
  derived and/or modified sequence
MYSVEDLLISHGYKLSRDPPASREDNPKGRQAARTGTRAGQGLQNGHEDGPAALAHRKTSAGKGHVSDSESRRSTPRGHGEPQSTSASRTSEAGFCNQPPSAWSSHPPTGNDQAYRRRGRQEARSQKPREHENLEARGMAQAHSLPVHVREGPWEVGGRSEHVMKKPVWEEELRMSGPAKWQNVSLESWNQPRKLGRQMSDGDGERLFQDLYPFIQGEHVLNSQNKGKSRSLPRVLSPESLSCTEIPIPLNERHSPKMPPYPPTCAPNLDSTRNSEKSGCSAPFPRPKFGRPLKPPSYSSHQQSRGGADSSDSQDSQQMDAYVPRHELCLSDPGLEPPVYVPPPSYRSPPQNIPNPYLEDTVPINVCGGHSQQQSPTEKAGASGQPPSGPPGTGNEYGVSPRLPQGLPAHPRPVTAYDGFVQYIPFDDPRLRHFKLAQPQGFCEDIKLDDKSYNSSPVTAQEPAHGGMQPDGAIWNPQSLIPPSGDERGLVLADSSPRWLWGQPPGDGENSGLPNQRDRCVARGQWPDVRGSQHGHTGRQVSSPYSQGESTCETQTKLKKFQTGTRTKKSSKKKMNETIFCLVSIPVKSESHLPDRDMDNNDLKPSADQKNGSDKSPALQEQSLLSMSSTDLELQALTGSMGGRTEFQKQDLGEPEEDRQTNDLSFIHLTKHRELKHSGSWPGHRYRDQQTQTSFSEEPQSSQLLPGAKLGGPSRAALSPKCSDPAASEAQTHTAFPTGDHKQRPSARNLKGHRSLSPSSNSAFSRTSLSVDQAPTPKAGRSQPCVDVHGLGAHPGPKREVVKGEPTGPCNSKQLFGQFLLKPVSRRPWDLISQLESFNKELQEEEESSSSSSSSSSSSEESEAEPQQENRAHCRQEDVGFRGNSPEMRVEPQPRMWVPESPVCRSGRGESKSESWSEELQPGHPRAWPPSPGRFRVEEGGGAPFCSADGSTSAEKRHLEVSNGMDELAGSPFPVTRMSSRSSDAKPLPASYPAEPREPQESPKITSAFSSVKPSEAVPRKFDSGGERGAGLPLSLSNKNRGLSAPDLRSVGLTPGQEQGASELEGSLGEASTIEIPPGESLQARAARILGIEVAVESLLPGIRRAGQNQPAEPDASACTPESPQEELLSRPAPADVPRVSTDAFYGRRKCGWTKSPLFVGDRDSARRAPQAFEHSDVDGVVTSTDPVPEPEPSPLESKFFEQKDVETKPPFRSTLFHFVERTPSVAGSEKRLRSPSKVIESLQEKLASPPRRADPDRLMRMKEVSSVSRMRVLSFRNADSQEDAEELKATTRGQAGLPGGLVSPGSGDRAQRLGHSLSVSKDSISREEKEHPAAQKEKSMDQDFWCPDSYDPSRVERV

SEQ ID NO: 311854 - DNA, 4080 bp, Artificial Sequence
  derived and/or modified sequence
atgtactccgtggaggacctgcttatcagccacggctacaagctgtcgagggaccctcctgccagccgagaggataacccgaagggacgacaggccgcccggacaggtacccgggccgggcagggattacagaatgggcacgaagacggtccagcagcgcttgcccataggaagacaagtgctggaaagggacacgtatccgacagcgagtctcgcaggtctactcctcgaggccatggtgaacctcagtccacaagtgcgtcaagaaccagtgaggctggcttctgtaatcagccgccctcagcatggtcctcccaccccccaactgggaatgaccaggcctaccggaggcgggggcgtcaggaggcccggtcacagaagcctagagagcacgagaacctggaagcaagaggcatggcccaggcccactcgctgcccgtgcatgtcagggaaggcccctgggaagttggtgggaggtcggagcatgtgatgaagaaacctgtgtgggaggaggaactaagaatgtccggccctgctaagtggcagaatgtttcgctagagagctggaaccagccccggaagttgggaagacaaatgagtgatggcgacggtgagcgcctatttcaagatttatatcccttcatccagggcgagcatgttctcaatagccagaacaaaggtaagtctcgaagtctgcccagggtcctcagccctgagtctttaagctgcaccgagatcccgattcccctgaatgagagacactcaccgaaaatgcccccatatcctcctacctgtgcccccaatcttgatagtaccagaaactcagaaaaatcaggttgctccgccccttttccaagacctaaatttggacgtccactcaaacccccatcatatagcagtcaccagcagtccagaggcggtgccgacagtagcgactcccaggacagccagcaaatggacgcgtacgtgccacgacatgagctatgcctgtcagaccctgggctagaaccgcctgtctatgtgcctccccccagttatcgctctcctccgcagaatatacccaacccttacctggaggacacagtgcccataaatgtttgtggagggcattcacaacagcaatcccccacagaaaaggctggcgcatccgggcagcccccttcaggacctccgggcacaggcaatgagtatggagtttctcctaggctgccccagggattaccagcccacccccggccggtgacggcatacgacgggttcgtgcagtacattccctttgacgatccccgtctgcgacactttaagctagcacaaccccaggggttttgtgaagacatcaaactggacgacaagagctataactctagtccagtaaccgcccaagagccagctcatggaggaatgcagcccgatggggccatctggaatccgcagtccctcatacctcctagcggggatgaacgtggactcgtgttggctgacagctcaccacgttggctttgggggcaacccccgggagacggcgagaattcgggactgccgaatcagagggaccgctgtgtggcgcggggacagtggcccgacgtcaggggctcccagcatgggcacaccggccgacaggtctcctccccctactcacagggagagagtacatgtgaaacccagaccaagctgaagaaatttcagacagggactagaactaagaagagctccaagaagaagatgaacgagactatcttctgtttagtcagtatcccagttaagtcagagagtcaccttcccgacagggacatggacaacaatgatttaaagcccagtgccgatcaaaaaaatgggtccgacaagagtccagctttgcaagaacagtccctcctgtccatgtcatctactgacctggaactgcaggcgctaacaggtagcatgggcggccggacggaatttcagaagcaggacctcggcgagccagaggaggatcgtcagacgaatgatcttagcttcatccacttaaccaagcatcgcgaattgaagcatagcgggagctggccagggcataggtaccgggatcagcagacccaaacttcctttagcgaagagcctcagtcttcacagctgcttccaggagctaaactcggagggccctcacgggcggcattgtcacctaaatgctcagatccagcggcatcggaagctcaaacccataccgccttcccaactggcgaccacaagcagaggcccagcgctagaaacctgaaggggcaccgctcgctgtcaccttcgtctaacagtgccttttcgcgcacaagtctttcggtggatcaggctcctacacctaaggctggcaggtctcagccttgcgtggacgtgcacggcctcggcgcacaccccggacccaagcgcgaggtggtcaaaggcgaacctacaggtccctgtaattccaagcagctgttcggccaatttcttctgaagcctgtttcacgcagaccttgggacctgatttcccagctggagagcttcaataaggaactacaggaggaggaggagtcctcgagcagcagtagctcgtcttccagttcatctgaggaaagtgaagccgagccacaacaggagaatcgggcgcattgtcgccaggaggatgtggggttccgaggcaactcaccggaaatgagggtcgagccccagccaaggatgtgggttcctgagagtccggtgtgtaggtctggccgcggagagagtaagtctgaatcgtggagtgaggaacttcagcctggccatccccgggcctggcctccttctcccggacgatttagggtggaagaaggaggcggggctccattctgcagcgccgacggcagcacatcagccgagaagcgacatctggaagtgagcaacggcatggacgagctggctggctccccatttcctgtcactaggatgtcgagcagaagctccgatgcaaagcctttgccagcctcctatcccgccgagccacgcgagccccaggaatctcctaaaattacgtccgcattctctagtgttaaaccttctgaggctgtgccccggaagtttgatagtgggggggaaaggggggctggtctgcctctgtcactgtcaaacaaaaaccgcggcttgtccgcaccggatctgcgatcagtgggacttacacccggtcaggagcagggtgcatccgagctcgaggggtcactgggcgaggcttcgaccattgagataccaccaggtgagagcctgcaagctagagcagcccgtatactgggaatcgaggtagccgtggaaagtctcctgccagggatcaggcgggccggccagaatcagcctgccgagcccgacgcctcagcttgtacccccgaaagcccccaggaggagttgctctctaggcccgcgcctgcggatgtccctagagtcagtactgacgctttctatgggcgacgaaaatgcggctggaccaagagtcctctattcgttggagaccgggattcggccagaagagccccgcaggcttttgagcattctgacgtggacggtgttgtgaccagcaccgatcccgttcccgagccggagccgagccccctagagagtaaattctttgagcagaaggacgttgaaaccaaaccccccttccgcagcacgctcttccattttgtcgagcgcactccatccgtggctggatctgagaaaaggctgcgatcgccatcgaaggttattgaaagcctgcaagagaaactggcatctccgccaaggcgtgccgatccagatagactcatgcgaatgaaggaagtatcttccgtgtccagaatgcgcgtgctttcgttcagaaacgcggacagccaggaggacgctgaagaactcaaggccaccacccgcgggcaggcgggtcttcctggcggtctcgtgtctccaggctctggagaccgggcacaacgcctgggccacagcctcagcgtctcaaaggattcgatcagccgtgaagagaaggagcatccagctgctcagaaggagaaatccatggatcaggacttttggtgtccagacagctacgacccctcccgggttgagagagtatag

SEQ ID NO: 311855 - DNA, 4080 bp, Artificial Sequence
  derived and/or modified sequence
atgtacagcgtggaggacctgctgatcagccacggctacaagctgagccgggaccccccagccagccgggaggacaaccccaagggccggcaggccgccaggacaggcaccagggctggccagggcctgcagaatggacatgaagatggccctgctgccctggcccacaggaagaccagcgctggaaaaggacatgtgtctgattctgagagccgccgcagcaccccccggggccatggagagccccagagcaccagcgccagcaggaccagcgaggccggcttctgcaaccagcccccatctgcctggagcagccaccccccaactggaaatgaccaggcctacagaagaagaggccggcaggaggcccggagccagaagccccgggagcacgagaacctggaggcccggggcatggcccaggcccacagcctgcctgtgcacgtgcgggagggcccctgggaggtgggcggccgctctgagcacgtgatgaagaagcctgtgtgggaggaggagctgaggatgagcggccctgccaagtggcagaatgtgtccctggagagctggaaccagcccaggaagctgggccggcagatgtctgatggagatggagagcggctcttccaggacctgtaccccttcatccagggcgagcacgtgctgaacagccagaacaagggcaagagccgcagcctgccccgggtgctgagccctgagagcctgagctgcacagagatccccatccccctgaatgaaagacacagccccaagatgccaccctacccacccacctgtgcccccaacctggacagcaccagaaattctgagaagagcggctgcagcgcccccttcccccggcccaagtttggccggcccctgaagcccccatcctacagcagccaccagcagagccggggcggcgctgacagcagtgacagccaggacagccagcagatggatgcctacgtgcccaggcatgagctgtgcctgagtgaccccggcctggagccccctgtgtatgtgcccccacccagctaccgcagccccccccagaacatccccaacccctacctggaggacacagtgcccatcaacgtgtgtggcggccacagccagcagcagagccccacagagaaggccggggccagcggccagccccccagcggccccccaggcactggaaatgaatatggagtgagcccccggctgccccagggcctgcctgcccaccccaggcctgtgacagcctatgatggctttgtgcagtacatcccctttgatgacccccggctgcggcacttcaagctggcccagccccagggcttctgtgaggacatcaagctggatgacaagagctacaacagcagccctgtgacagcccaggagcccgcccatggaggcatgcagccagatggagccatctggaacccccagagcctcatcccccccagcggagatgagcggggcctggtgctggccgacagcagcccccgctggctgtggggccagcccccaggagatggagaaaattctggcctgcccaaccagagggacagatgtgtggcccggggccagtggccagatgtgcggggcagccagcacggccacacaggccggcaggtgagcagcccctacagccagggcgagagcacctgtgagacccagaccaagctgaagaagttccagacaggcaccaggaccaagaagagcagcaagaagaagatgaatgagaccatcttctgcctggtgtccatccctgtgaagtctgagagccacctgcctgaccgggacatggacaacaatgacctgaagcccagcgctgaccagaagaatggaagtgacaagagccctgccctgcaggagcagagcctgctgtccatgagcagcacagacctggagctgcaggccctgaccggctccatgggcggccgcacagagttccagaagcaggacctgggggagccagaagaagatcggcagaccaatgacctgtccttcatccacctgaccaagcaccgggagctgaagcacagcggctcctggccaggccaccgctacagagaccagcagacccagaccagcttcagcgaggagccccagagcagccagctgctgcccggggccaagctgggcggccccagccgggccgccctgagccccaagtgcagcgaccctgctgccagcgaggcccagacccacacagccttccccaccggggaccacaagcagaggcccagcgccaggaacctgaagggccacaggagcctgagccccagcagcaacagcgccttcagcaggaccagcctgtctgtggaccaggcccccacccccaaggccggccgcagccagccctgtgtggatgtgcacggcctgggcgcccaccctggccccaagcgggaggtggtgaagggggagcccaccggcccctgcaacagcaagcagctgtttggccagttcctgctgaagcctgtgtcccggcggccctgggacctgatcagccagctggagagcttcaacaaggagctgcaggaggaggaggagagcagcagcagcagcagcagcagcagcagcagcagcgaggagagcgaggccgagccccagcaggagaacagagcccactgccggcaggaggatgtgggcttccggggcaacagccctgagatgagggtggagccccagcccaggatgtgggtgcctgagagccctgtgtgccgcagcggccgcggggagagcaagtctgagagctggagcgaggagctgcagcccggccacccccgggcctggccacccagccctggccgcttccgggtggaggagggcggcggggcccccttctgcagcgcagatggcagcaccagcgctgagaagaggcacctggaggtgtccaatggcatggatgagctggccggcagccccttccctgtgaccaggatgagcagccgcagcagtgatgccaagcccctgcctgccagctacccagctgagccccgggagccccaggagagccccaagatcaccagcgccttcagctctgtgaagcccagcgaggccgtgcccaggaagtttgacagcggcggggagcggggggccggcctgcccctgagcctgagcaacaagaacagaggcctgagcgccccagacctgcggtctgtgggcctgaccccaggccaggagcagggcgccagcgagctggagggcagcctgggggaggccagcaccatcgagatccccccaggagagagcctgcaggcccgggccgcccgcatcctgggcatcgaggtggccgtggagagcctgctgcccggcatccggcgggccggccagaaccagcctgctgagccagatgccagcgcctgcaccccagagagcccccaggaggagctgctgagcaggcctgccccagcagatgtgccccgggtgtccacagatgccttctacggccgcaggaaatgtggctggaccaagagccccctgtttgtgggggaccgggacagcgcccggcgggccccccaggcctttgagcacagtgatgtggatggagtggtgaccagcacagatcctgtgcctgagcctgagcccagccccctggagagcaagttctttgagcagaaggatgtggagaccaagccacccttccgcagcaccctcttccactttgtggagaggaccccatctgtggccggcagcgagaagaggctgcggagccccagcaaggtgattgagagcctgcaggagaagctggccagccccccccggcgggctgaccctgaccggctgatgaggatgaaggaggtgtcctctgtgtccaggatgagggtgctgtccttcagaaatgctgacagccaggaggatgctgaggagctgaaggccaccacccggggccaggccggcctgcccggcggcctggtgtccccaggcagcggggaccgggcccagaggctgggccacagcctgtctgtgtccaaggacagcatcagccgggaggagaaggagcaccctgctgcccagaaggagaagtccatggaccaggacttctggtgcccagacagctatgaccccagccgggtggagcgggtgtag

SEQ ID NO: 311856 - DNA, 4080 bp, Artificial Sequence
  derived and/or modified sequence
atgtacagcgtggaggacctgctgatcagccacggctacaagctgagccgagacccacccgccagcagggaggataacccaaaaggtaggcaggctgcgaggaccggcactagagctggccaggggttgcagaatggacacgaagacggacccgccgcccttgcgcatcggaagacatcagccggcaaagggcacgtgtctgacagcgaaagccgacgcagtacccccaggggacatggtgagcctcaatctacaagtgctagtcgtacaagtgaagctggattttgtaaccaacccccctctgcctggagttctcacccccctactggaaatgaccaggcttatagacggcgcggtcgccaggaggcgcgttcccagaagccgcgtgaacacgagaacctggaagccagggggatggctcaggctcactcactccccgtgcacgttagggaaggtccctgggaagtcgggggccgaagcgaacatgttatgaaaaagcccgtttgggaggaagagttgaggatgtccggaccagccaaatggcagaacgtgtccttggagtcatggaatcaaccgcgaaagctgggcaggcaaatgtccgacggtgacggggaaaggcttttccaggacctgtatccgttcattcagggggagcacgtgctaaattcgcagaacaagggcaaatctcggtccttacccagagtactgagtccggagtcactgagctgtaccgagatcccaatccccctcaacgaaaggcactcacctaaaatgcctccgtacccgcctacctgcgcccctaacctagatagtacgcgcaatagcgaaaagagcgggtgctctgctccctttccaaggccaaaattcggccgccctcttaagcccccaagttatagctcccaccaacagagccgcggcggagctgattcatcagatagccaggattctcagcagatggatgcttatgtcccaaggcatgagctatgtttgtccgacccgggattagagccgcccgtatacgtgccccctccttcttatcgcagccccccccagaatatcccaaacccttatttggaagatacagtgcccatcaacgtgtgtgggggccacagtcagcagcagtctccaacagaaaaagccggagcatcgggacagccacccagcgggccccctggcacaggcaacgaatacggggtctcccctcggctgcctcaggggctgcctgcacatccaagacctgtgactgcctacgacggattcgtgcagtatataccttttgacgacccgcgactccgccacttcaagctagcacagccccaagggttctgcgaggacataaaacttgatgacaaatcttacaacagctcccccgttaccgcccaggaaccagcgcacgggggcatgcaacccgacggtgctatttggaacccacagtctctgatcccgccttctggcgatgagcggggattggtattagctgattccagtccgaggtggctgtgggggcaacctccaggcgacggcgaaaattccgggttgccgaaccagcgggataggtgcgtggcccgaggccaatggccagatgtgcgaggctcccaacacggccacaccggcagacaggtgagcagcccctattcccagggcgaaagcacatgcgagacacagaccaaactgaaaaaattccaaactgggacccggaccaagaagtcctcaaagaagaaaatgaatgaaacgatcttctgccttgtctcaatcccagtgaaatctgagagccatctccccgacagggatatggataataatgacttgaaaccgtctgcggatcaaaaaaacggcagtgataagtcacccgctctgcaagagcagtcccttcttagcatgtcatcaacagaccttgagctgcaggccctcactggaagcatgggcggtcgtacagaatttcagaaacaggatctgggcgaaccagaggaagaccggcaaactaatgacttgtcattcatccacctgactaaacaccgagaattgaaacacagcggctcttggcctggacatcgttatcgcgaccagcaaacacaaacctccttctccgaagaaccacagtcttcacagttgctgccaggtgccaaactcggtggcccttccagagctgctctgagtccaaaatgctctgatcccgctgccagcgaggcccaaactcacaccgcttttcctactggagaccataagcagcgtcccagtgcacgtaacctgaagggacaccggagtctgagccctagtagcaattccgccttcagtagaaccagcctgtccgtggatcaagcaccaacacccaaagcgggtcggtctcagccatgcgtcgatgtgcatggcctgggggcccatccggggcccaaacgcgaggttgtgaaaggcgagcctacggggccttgtaatagcaaacagctatttggtcaattccttctgaaacccgtctcacgcagaccatgggacctgatctcccagctcgaatcctttaacaaggagctgcaggaagaagaggaatcttcatcttctagcagtagcagctcctcctcctccgaagagagcgaagctgaaccacagcaggagaacagagcacactgtcggcaggaagatgtgggcttccgtggtaattctccagaaatgcgggttgagccccagccacggatgtgggtgcccgagagtcccgtctgcagatctggccggggtgaatcaaagtcagagagttggtctgaggaacttcagccagggcatcctagggcttggccaccctctccaggcagattccgggtggaagaaggagggggagcccccttttgctcggctgacgggtcaactagcgcagagaaacgtcaccttgaagtatcaaatgggatggatgaactggcaggaagtccatttcccgtcacccggatgtcgtcaaggtcgtctgatgccaagccacttcctgctagttaccccgccgagcctagagagcctcaggaatcacctaagataacttccgcattcagtagtgttaaaccttctgaagcagttcctcgcaaattcgactccggtggagaacgtggagccgggctgcccctcagcctgagcaacaagaaccgtggactgtccgcgcccgatttgcggtctgtgggattaacccccggacaggagcagggagcttctgaactggagggttcattaggggaggcaagtacgatagagatacccccgggggagtctcttcaggcacgggcggcgagaatcttgggaatcgaggtggccgtcgagagcctgctgcccggtatacggcgcgcaggacagaatcagcccgcagagccagacgcttccgcttgcacacccgagagcccacaggaggagttactgtctaggccagcccccgccgatgtcccccgggtatccaccgacgccttttatggacgacgcaaatgtggatggacaaagtccccattattcgttggggatcgcgacagcgctaggcgggcacctcaggcttttgagcattccgatgtggatggcgtagtcacgtcgacagacccagtgccggaaccagagcctagcccactggaatctaaattttttgaacagaaagacgtggagactaaaccccccttcagatccaccttgttccactttgttgagcgaactcccagtgtagccggcagcgaaaaacgcctgcgtagcccaagcaaggtaattgagagtctgcaggagaagctggcttccccgcccaggcgcgccgatcctgacaggctgatgagaatgaaggaagtcagctcggtctctaggatgcgggttctgtcattcaggaatgctgactcccaagaggacgctgaggaactgaaggccaccacccgcgggcaggctggtttacctggaggattggtgtcacctggaagtggcgacagagcgcaacgtctaggacacagcctcagtgtatcaaaggattcaatatcaagggaggagaaagaacatcccgcagcacagaaggagaaaagcatggatcaggacttttggtgccccgattcttacgatcctagcagggtggaacgggtgtag

SEQ ID NO: 311857 - DNA, 4080 bp, Artificial Sequence
  derived and/or modified sequence
atgtattcagtcgaggacctgctcataagtcatggctacaaactttcaagggacccccctgcttccagagaagataatccaaaggggagacaggcagcccgaaccggcacacgggcaggccaagggttacagaacggtcatgaagatggccctgccgctctggctcataggaagacatccgccggaaagggccacgtgtctgactctgaatcccgccgttctacaccgcgaggtcacggggagcctcagtccaccagcgcaagccgcacctcggaagccggattctgcaatcagcccccttccgcttggtcatcccatccgccaaccggaaacgaccaggcctatagaaggcgcggaaggcaggaagctagatcccagaagcctagggagcatgagaatctggaggcacggggaatggctcaggctcatagccttccagtgcacgtcagggaagggccttgggaggtaggtggaagatccgagcatgtgatgaagaagccagtttgggaagaggaacttcgcatgtccgggcctgctaagtggcaaaacgtgagcctggaaagctggaaccaaccaagaaaactcggacgccaaatgtccgatggggatggagagcgactgttccaagatttatacccctttatccaaggagagcacgtgctcaactcccagaacaaggggaagagtaggtcgctgccgagagttttatccccagagagcttatcctgcaccgaaatccctatcccactgaatgagcggcacagccctaagatgccaccttacccacctacttgtgccccaaacctcgatagcacacgtaactcggagaagagcggctgctctgcaccgttcccccgacctaagtttggaaggccgctgaagcctccaagctatagctcccatcagcaaagtcggggaggggcagatagctctgatagccaggacagccaacagatggacgcgtacgtgcccagacatgaattgtgcctttccgaccctggcctggagccacccgtttacgtgccaccgccttcatacaggtccccccctcagaatattccgaacccatatctggaggatactgtccctataaacgtgtgtggcggacactcgcaacaacagtctcctacagaaaaggccggtgcttccgggcaaccaccatcagggcctcctggtacaggaaatgaatatggcgtgtccccaaggctcccacaaggactgccggctcaccctcggccagtgacagcatatgatggtttcgtgcagtatattcctttcgacgatcccaggctacggcacttcaaactggctcagccacaggggttctgtgaggacatcaaactcgacgataagtcttacaattcaagccccgtgactgcacaggaaccagcccacgggggaatgcagcctgacggggctatctggaatccacagagcctgatcccaccatcgggggatgaacggggactagtgttggccgactcgtctccacggtggctttggggacagccaccaggcgacggcgagaacagcggattgccgaatcagcgcgatcgctgtgtggctcggggacagtggcccgacgtacggggaagtcagcacggccacaccggaaggcaagttagcagtccctactcgcagggcgaatctacctgtgagacacagacaaaacttaagaaatttcagacaggaactcggacaaagaagtctagcaagaagaaaatgaacgaaacaattttttgcctcgtgtccatccccgtgaagtcagaatctcacctccccgaccgggatatggacaacaacgacctgaagccatcagccgaccagaaaaacggatctgataagtctcccgctcttcaagagcagagtttactgtcaatgtcatccacagatctagagctgcaggcattaacagggagcatgggtgggagaacagagttccagaagcaggatttgggagagccagaagaggaccgccagacaaatgacttatctttcatccacctcaccaagcaccgggagctgaagcactctggctcctggccgggtcatagataccgcgaccagcagacacagactagtttctcggaggaaccccagtcttctcagctgctccccggtgctaaactgggcggtccgagtcgggcagctcttagcccgaagtgctcagacccagccgcttctgaggcccagacgcacaccgcatttcctacaggtgaccataagcaacgtccgagcgccaggaacctcaagggacacagaagcctgagtccatctagcaactccgcttttagtaggaccagcctttctgtcgatcaggcccctactcccaaggccggaaggagtcagccctgcgtcgacgttcacggcctcggagctcacccaggcccaaagagagaagttgtgaagggagagcccaccggaccctgcaattcaaagcagctctttggccagttcctcctaaagccggtgagccggagaccttgggacctcatctcccagctggaatctttcaataaggagttacaagaggaggaggaaagttctagcagctcatcttcctcttcatcatcttcggaagagtctgaagccgagccacagcaggagaatagggctcactgccgccaagaggacgtgggttttagagggaactccccggaaatgcgagtcgagccacagcccagaatgtgggtgcccgaatctcctgtatgccgtagtggcagaggggagagtaaatctgagtcctggagcgaagagcttcagccaggccaccccagggcctggccgccaagcccaggcaggttccgggtggaggaagggggtggtgctccgttttgcagtgccgacgggtcaacttctgctgagaaaagacatctagaagttagtaacggaatggatgagctggccggatctccgttcccagtgacaagaatgtctagcaggagttcagacgccaaaccgttaccagcgtcctaccctgcagagcctagggagccccaggagtcccccaagataacctccgcatttagctccgttaagccatccgaggccgtgccaagaaaatttgactcaggcggagaacggggagcgggtctgccgctgtcccttagcaataagaaccggggtctgtcagcccctgacctgcgctccgtgggtctgactccaggtcaagaacagggcgcttcagaactggaaggctccctgggggaggccagtactatagagataccacctggtgaaagcctgcaggcaagggcggctagaatcctgggtattgaggtcgctgtggaatccctgctgcccggaataagaagggcaggccagaaccagcctgcagagcctgacgcctccgcctgcaccccggagtctcctcaagaagagctgttgagccgtcccgcacctgcggatgtccccagggtcagcactgatgcattctatggcagacgtaaatgcggctggaccaaatctcctctcttcgtcggtgatcgggatagtgcccgtcgcgctccccaggcctttgagcactctgacgtggatggggtggtcacatccacggatccggttcctgagccagaaccgagcccgctcgagtcaaaatttttcgaacagaaggatgtggaaaccaagccgccattcaggagcaccctattccacttcgtagagaggactccgagcgttgctgggagcgagaagcgtttgcgcagcccgtcaaaagtgattgagagcctgcaggaaaagctcgcgtcacctccgagacgagctgacccggacagattgatgcggatgaaagaagtcagctcggtctcccgaatgcgagtgctgagcttcaggaatgccgacagccaggaagatgcagaagagttgaaagcaacaacacggggacaagctggtctgccaggaggacttgtgtcccctggctccggcgatcgtgcccaacgcctgggacattcactgagtgtgagcaaggactcgatatcacgtgaggagaaagagcacccggctgcgcagaaagagaaatcaatggatcaggacttctggtgccctgacagttatgacccatcgcgagtcgagagagtttag

SEQ ID NO: 311858 - DNA, 9265 bp, Artificial Sequence
  derived and/or modified sequence
gcggcggcggtggcggcgcgaggcggcatgagggagccgctcgtgctgggtcctgccaccaccatggttccagtggttgagctttgctgaagcccaggcatcatgtacagtgtagaagacctcctgatctctcatggatacaagctgtcaagagaccccccagcatcacgcgaggataaccccaaggggcgccaggcagcgaggactgggacacgagcaggccagggcctgcagaacgggcatgaggatggccctgcggccctcgcacatcgtaagacgtccgcggggaaaggacatgtgagtgactccgaaagccgccgcagcacaccgagaggccacggggagccccagagcacttctgcttccagaacctcggaggcggggttttgtaatcaacccccctcagcatggtcctctcatcccccgactggtaacgaccaagcctaccggagaagaggacggcaagaagccaggagccagaagccgagggagcacgaaaacctggaggccagaggaatggcccaagcccacagcctgcctgtccacgtgagggagggtccatgggaagttggaggaaggtcagagcatgtgatgaagaagccagtttgggaagaagaattgcgaatgtcaggtcctgccaagtggcagaacgtcagcctggaaagctggaaccagccaaggaaattagggaggcagatgtctgatggagatggggagagactgtttcaagacctgtacccattcattcaaggagaacatgtgttgaattctcaaaacaaagggaagtctcgctcactgcctagagttctttcccccgagagcctgagttgcacggaaattcccattccattaaatgaaagacattcacctaaaatgccaccgtatcctcccacttgcgcaccaaatttggactccacgaggaattctgagaagagtggctgctcagccccatttccccggcctaagtttgggaggcccctcaagcccccatcttacagctcgcaccagcagtctaggggaggagcggacagcagtgactctcaggacagccagcagatggacgcctatgtccccaggcatgagctctgcctgtcagaccctggattggaacctccagtgtacgtgcctccgccctcatacagatcgcccccgcagaacatcccaaacccctacttggaagacacggtgcccataaatgtgtgtggcggtcacagtcaacagcagtctccgaccgagaaggctggggccagcggtcagcctccttcaggcccccctggaactgggaatgagtatggtgtgagcccccgcttgcctcaggggctccccgcacatccccgacctgtcactgcctatgacggcttcgttcagtacattccctttgatgatccacggttacgacattttaaactagctcagccccagggtttctgtgaagacataaagcttgacgataaatcatataactccagtcctgtcactgctcaagagccggctcatggaggaatgcagcctgatggtgccatttggaatccacagagcttaatacccccgtcgggggatgagagaggcctggtcttggccgattccagcccccggtggctgtggggccagccccccggggatggggaaaacagtggcctccccaaccagagagaccgctgtgtggcaaggggacagtggcctgatgtgagaggcagccagcacgggcacactggaagacaagtttcctccccttactcacagggcgagagcacctgcgaaactcaaaccaagctcaaaaagttccaaactgggactcggaccaagaaaagttcaaagaaaaaaatgaacgagactatattttgcttggtttctatcccagtgaaatcagaatcacatctgccagatagagatatggacaacaatgacttaaagcccagtgctgatcaaaagaatgggtctgataagagcccggctctgcaagaacagagtctgctgagcatgtcttccaccgacctggagctgcaggccctcacaggaagcatgggtgggagaacggagttccaaaaacaagatctaggggaaccagaagaagacagacaaacaaatgacctcagtttcatccaccttacaaagcacagagaactcaagcattctggctcttggccagggcaccggtacagagatcagcaaacacaaaccagtttctccgaggagccccaaagttcgcagctgctccctggtgcaaagctgggagggccgagtcgtgcagcattgagtccaaaatgttcagaccctgctgcctccgaagctcagacgcacacagcattccctaccggtgatcacaaacagaggccaagtgcccgtaacctgaaaggtcacaggtccctcagcccatccagcaacagtgcgttctcaaggacttccttgtccgtggaccaggcaccgacgccaaaagcaggccgaagtcagccctgcgtggatgtccacgggcttggagcccaccctgggcctaagcgggaggtggtgaagggggagcccacgggcccttgcaacagtaaacaactctttgggcagtttctcctgaaaccggtcagccgtcgtccctgggatttgatcagtcagttagaaagttttaacaaggagctccaggaagaggaagaaagcagcagtagcagcagcagcagcagcagcagcagtgaggagagtgaggcggagccgcagcaggagaaccgtgctcactgcagacaggaggatgtgggcttccgcggaaacagcccggaaatgagggttgagccacagccgaggatgtgggtgccggagagccctgtgtgtaggtcgggaagaggtgagagtaagtctgagagctggagtgaggagctgcagcctggccacccacgtgcctggcctccatccccgggccgctttcgcgtggaagaaggtggcggtgcacctttctgctcagcagatggaagcacgagtgcagagaagagacacctggaggttagcaacggaatggacgagctggcaggtagcccatttcctgtgacgagaatgtcttcaagatcaagtgacgcaaaaccactgcccgcgtcctatccagctgaacctagggagccccaggaaagtccgaaaatcaccagtgctttcagctctgtgaaaccaagtgaagcggtccctcggaagtttgacagtggtggagagaggggggcagggctcccactgtccctgtctaacaagaaccgagggctctcagctccagacttacggtctgtggggctcacccctgggcaagaacagggtgccagtgagctagaggggtctttgggtgaagcaagcacaatagaaatccccccaggtgagtccttgcaagccagggctgcaaggatcctgggcattgaggtggcggtggagtccctcctgccgggcatccggagagcgggacagaaccagcctgctgagcccgatgcaagtgcctgcaccccagagtccccccaggaagagttgctatctcgcccagcaccggcagatgtccccagggtgtccactgatgccttttatggcaggaggaagtgcggctggaccaagagccctctctttgtaggggacagggacagtgccaggcgggctcctcaggcttttgagcactcagatgtggacggggttgtcaccagcacagaccctgtccctgagcctgagcccagccccttggagtccaagttcttcgaacaaaaggatgtggaaacaaaaccacccttcaggtccactttattccattttgtagaaagaaccccaagtgtggcaggctctgaaaagagacttagaagcccttccaaagtgattgaaagtttacaagagaaactggcctccccgcctaggagagcagaccctgaccgcctgatgagaatgaaagaggtgagctcagtgtcacggatgagagtcctgagcttcaggaatgccgactcccaggaggacgccgaggaattgaaggccaccacaaggggccaggccgggctcccgggaggccttgtgtctcctggcagtggggaccgtgcccagagattgggccactcactctctgtgtccaaggacagcatctccagggaagagaaggagcatccggcagcacaaaaggagaagagcatggatcaagacttctggtgcccagattcctatgaccctagcagagtggagagggtgtgatgaaatgccggtggagcttgcattccgttgcgaattgagtattctcaagtagctggtagatttagtctatcagccccacttccccatgtagaagctggaagctgctgagtttttagcatcctgataacattctttaccactgccactaggaaacttgccatcctctcagaattgctttgtggcgataaagcaatcgtccgttgaaaccatctgtttttatagcatgaagatttaatgcctataattaggaaggagttttcacagaaaccctccctcatgacagatttgactaagctggtaaatagtttggtgttgctctcattctgggtgaagatttcaatgtggaagatctagcaaatgctttggaaaggcctgtgaatggtgtgctcccctctgtgtctccatggcctgcagtccatgctcttgtgaaggagtttgggacactggctgttgcccggtgtttcagcactttcagtttaggggaaatgtgaatcaataggtatgatccatttctaatcaatttggccttctgctgctggaagtaactttacttataagtaacttgccatcagagaataaaagcaatatcttttaagttcctgaaaaattaaaacttgtactgtaatatactaagagtattatttatctggcagtgaaatattttgatcatttgcaaacacgccattgtctgctttgcactcagtattatctatttttattttctgtatgggtatttagaaattctttatatgaaaaataattgctggtttaaaatagaccattttaacaaagtgactatatttctttttacgaaaatgctatttttctatgatgtaaacaattgttaggcggcagatttttaaggaagtattattttatttaagagtctgtatccctttgtgtgagaggaacccaaagagggttcacttttgctttaaagctctgtcccttacccactgacaactctgctacttttattttatcttagaaaatgtcaatatagacatatcacagggttaataaaagaaacttttcacaaagatttttgtacaagtgtagctatcaggttatatttgaaaataaccctctgaaaaccagccaacattgtcatgacaatttttgctgccgtatcaactagaattaccaaaaaacatagttttatctttgtatgtgtgtggggatctaccctgagaccatgcttttcttcccaccctgccaccccacccctttaaagaaatacgtatttttatctagaatgatcttgaattagtctctgcatatttttagaaagtgcttggggacattatatatatgccattacaaaagcattatgaggcctatgtattctactgtgtttaatactgcattaacctgcacaaagtttatgcattttttcatgcatttttttccttctttctaagtaaggtattcctgacaactaacattccctaaatcatttcccctccctccctccctccctcccttcctttcttccttccttctgtcctccctcccttgctacctcttgccctccttccttcaccctgtcctccttttcccttttattttttccccttctctttcattttattttcttttagagaaaccaccttatctatttttagacatttcgaattcctaaaatgtgaaccgttgggtgatctgtcctttggccctaaaacggctggccgggctgtcccggcctgttctcatctgtaccgtatgattttatttcataataactttatgtatttggactgtaacaaacaaaacagaacctaagtcgccccgaaaaatctttccaagccttttcaaaacacttatctgcagtccagaattcagctcttatgaaaagtgagagtgcactccagttttcacagcagcaataagtgcgggaaacaaaaagatcctcttcccaggaaaagttgagtggggaagagttcagacactgttgtagctggtgaatcattgaagtcacctggtagtaccaaataagggctgaggcgcctggaggtctttgtggggtcttccctctttaaatgcaaacgtaagaaggtatatgtgtatatacatttatatacgtgcacatgtatactcgtacatgtatgcacacatacccatacatgtatatgaactccgttctgatttcctctgaaattttgttgataccatctaaatacctctttgaatcaaaataacttaattttagctcattcctcaagagaaagagaaggatccccaaggaagaaaaactgttgtaccttctgtgattctcaaaccaaaatgtgatgcgcttctgttttgttatcttaaattgttgtatcatatctttctgaaaccattctgaattaagttgaaattttcaacatttatactttaactgttctaaatttaagcctacatgtaaatcttttttggggggaaggtaacttgaaaagtttaacttgaaaatttgacctttaaactttcatattctaaggtaaataatagcctataaccaacaacagctttcccagaggtcttgaatttaacactaattgtttagttattgtttctatttctcatacatacataacttcgttttttgtggctggaagaaaaagtttctatattttgtatttgtctttgttcttctcatgcacacaatttactgttggtgtttaataatttggagctcataaaattaaaagttgtaattttgaccatttgggctaaaaattatatgagggattacatatgcaatggattagtatttcttgatttgcaaaagaagggaaaatgatggtaatttagctcaaattgcctttctttgaagaaaatttctgaatgactgaaaaccaaatatctatattatcactttcaacctcatgtttctgcaaagtacagaaaaactcctcactgacagtgcacccagcccctgactgggttttcaggattatgtccatgtgcataactgcttggatttcttcttttaaagtccctaaaacatgaatctgttctttgagatcctggtttccttagcagagttgtaggttgcgggtttcattcacgtggaaattctaagtagaacttttgctgccccattttactgttggtgaagggccgttgttaatggaagtttacgttttaaaactcagatgactcagaaaccagactgtgatcattttttgcagcagcaaaatgacttattctgacagcatctcggtttggggcttctgaagaaaaaggatgaagctgatctgttgaaacaactactttcccaactcggaggcaaaaggggctgatagaagataacattcacctaccatttcatcttgtgacccccagagatcacgtttgcgtgttctggctgagttttttattattgtttgttttaaatgattaaataatacacaattaaatgtcaggatagcatctcttgcaaagtgaccagtgcagcagaattgtctttctatccatatttgagcttagagaaacatttcccatgtcctaagttcttagaagcaattactttagcgttggggagcattgttctaccagacccatttatgcaggggagatgaagcttaaaagacgggatgtggggtgggagtgtgtttcttaagccgaagctgttgcaggctgggggatttttgcattttctttttgttttgtttttgactgcagattctgtacatctgtctgtgggaggagagttgctactcaggacaggatttaagagacacattccagtgacctttaagaatctgcatggcgggaggtccttctccaggagtgtgggttggtccactctgggacccaccacactaagaagggggagatgataaaataacattaaaggaagaatggcctccagcctgcaggttttgttggaaagaaataaaaagggagtcattaagaccataaattcagattgaggcctcttgaaaaggttgatgtgggctagcaacctgcctgtcgaaacagtccttggttcatcagcagtgtgggaaggcagccaaggctcctgcagattcctggcatcgaccttggaaagcctctgcgatacttgtgtgtacgaatacagcagaggacagggaggtccttgttctgtggtctctgtttagtgactgaaacttaaacccaaaggcaagcccagattgtctggccgttcatccccatgctttgataggggttaggaggaaccctttccgtatgaaagacaggccctactagggcttacaaccaagccaaaggaccatctcttctttcttccacctcccttcacccctgccccgcagcagagccgagatgtgagacattcattgtcacggagcaaggagacaaaggcaagttcaagttgagaagcatatggcagcaaacagaaatgaaaaccatatgtcccagcaaggggaaaagcagtcatttccagattataaaaatcaatgaagtactctccacctaggtcagctgaaattcgagccctcacagtcaggcctgtcagagaagttaagcagaaacatctcggggggacttctaaaatttagtgaagacaaggccttgcaactccaaagaaactttttttcccccccttgaaacagggtcttgctctgttgcccagcctggagtgcagtggtgcagtcacggctcactgcagcctcaagctcctgggctcaagcactatccccacctcaacctccttagtagctgggactacaggtgcacaccaccatgcccagctaaccacagaaactttcatctcttcattttttctttgggcaccattaatacctaagacaggtagaaagggtcccagaaagacaccattggtaatggccgattgccggctgcagtcatcgcccccagatcaggctggtacaggatgccttaaggtgatgagaggtgagggtgcatgaagaataatgagcacagggaagagagaagcaggacaaagtagcagataaaatgccggcaaagcacagatgaatgtcttcaagaagctcttgtatttctctgcacagtgtaaatatccttgctatttcaggatggcggctggcctgctcagtaacatacatgttccaaataaagattttgcatgaaagta

SEQ ID NO: 311859 - DNA, 132 bp, Artificial Sequence
  derived and/or modified sequence
atgctgggagccagagcctggctcggccgagtgctgctgctgcccagggctggggctgggctagcagccagccgtagaagcgcgtgttccccaacgagccgcttgaactccctgcggtcgctcatcccttag

SEQ ID NO: 311860 - DNA, 4080 bp, Artificial Sequence
  derived and/or modified sequence
atgtacagcgtggaggacctgctgatcagccacggctacaagctgagcagagacccccccgccagcagagaggacaaccccaagggcagacaggccgccagaaccggcaccagagccggccagggcctgcagaacggccacgaggacggccccgccgccctggcccacagaaagaccagcgccggcaagggccacgtgagcgacagcgagagcagaagaagcacccccagaggccacggcgagccccagagcaccagcgccagcagaaccagcgaggccggcttctgcaaccagccccccagcgcctggagcagccacccccccaccggcaacgaccaggcctacagaagaagaggcagacaggaggccagaagccagaagcccagagagcacgagaacctggaggccagaggcatggcccaggcccacagcctgcccgtgcacgtgagagagggcccctgggaggtgggcggcagaagcgagcacgtgatgaagaagcccgtgtgggaggaggagctgagaatgagcggccccgccaagtggcagaacgtgagcctggagagctggaaccagcccagaaagctgggcagacagatgagcgacggcgacggcgagagactgttccaggacctgtaccccttcatccagggcgagcacgtgctgaacagccagaacaagggcaagagcagaagcctgcccagagtgctgagccccgagagcctgagctgcaccgagatccccatccccctgaacgagagacacagccccaagatgcccccctacccccccacctgcgcccccaacctggacagcaccagaaacagcgagaagagcggctgcagcgcccccttccccagacccaagttcggcagacccctgaagccccccagctacagcagccaccagcagagcagaggcggcgccgacagcagcgacagccaggacagccagcagatggacgcctacgtgcccagacacgagctgtgcctgagcgaccccggcctggagccccccgtgtacgtgcccccccccagctacagaagccccccccagaacatccccaacccctacctggaggacaccgtgcccatcaacgtgtgcggcggccacagccagcagcagagccccaccgagaaggccggcgccagcggccagccccccagcggcccccccggcaccggcaacgagtacggcgtgagccccagactgccccagggcctgcccgcccaccccagacccgtgaccgcctacgacggcttcgtgcagtacatccccttcgacgaccccagactgagacacttcaagctggcccagccccagggcttctgcgaggacatcaagctggacgacaagagctacaacagcagccccgtgaccgcccaggagcccgcccacggcggcatgcagcccgacggcgccatctggaacccccagagcctgatcccccccagcggcgacgagagaggcctggtgctggccgacagcagccccagatggctgtggggccagccccccggcgacggcgagaacagcggcctgcccaaccagagagacagatgcgtggccagaggccagtggcccgacgtgagaggcagccagcacggccacaccggcagacaggtgagcagcccctacagccagggcgagagcacctgcgagacccagaccaagctgaagaagttccagaccggcaccagaaccaagaagagcagcaagaagaagatgaacgagaccatcttctgcctggtgagcatccccgtgaagagcgagagccacctgcccgacagagacatggacaacaacgacctgaagcccagcgccgaccagaagaacggcagcgacaagagccccgccctgcaggagcagagcctgctgagcatgagcagcaccgacctggagctgcaggccctgaccggcagcatgggcggcagaaccgagttccagaagcaggacctgggcgagcccgaggaggacagacagaccaacgacctgagcttcatccacctgaccaagcacagagagctgaagcacagcggcagctggcccggccacagatacagagaccagcagacccagaccagcttcagcgaggagccccagagcagccagctgctgcccggcgccaagctgggcggccccagcagagccgccctgagccccaagtgcagcgaccccgccgccagcgaggcccagacccacaccgccttccccaccggcgaccacaagcagagacccagcgccagaaacctgaagggccacagaagcctgagccccagcagcaacagcgccttcagcagaaccagcctgagcgtggaccaggcccccacccccaaggccggcagaagccagccctgcgtggacgtgcacggcctgggcgcccaccccggccccaagagagaggtggtgaagggcgagcccaccggcccctgcaacagcaagcagctgttcggccagttcctgctgaagcccgtgagcagaagaccctgggacctgatcagccagctggagagcttcaacaaggagctgcaggaggaggaggagagcagcagcagcagcagcagcagcagcagcagcagcgaggagagcgaggccgagccccagcaggagaacagagcccactgcagacaggaggacgtgggcttcagaggcaacagccccgagatgagagtggagccccagcccagaatgtgggtgcccgagagccccgtgtgcagaagcggcagaggcgagagcaagagcgagagctggagcgaggagctgcagcccggccaccccagagcctggccccccagccccggcagattcagagtggaggagggcggcggcgcccccttctgcagcgccgacggcagcaccagcgccgagaagagacacctggaggtgagcaacggcatggacgagctggccggcagccccttccccgtgaccagaatgagcagcagaagcagcgacgccaagcccctgcccgccagctaccccgccgagcccagagagccccaggagagccccaagatcaccagcgccttcagcagcgtgaagcccagcgaggccgtgcccagaaagttcgacagcggcggcgagagaggcgccggcctgcccctgagcctgagcaacaagaacagaggcctgagcgcccccgacctgagaagcgtgggcctgacccccggccaggagcagggcgccagcgagctggagggcagcctgggcgaggccagcaccatcgagatcccccccggcgagagcctgcaggccagagccgccagaatcctgggcatcgaggtggccgtggagagcctgctgcccggcatcagaagagccggccagaaccagcccgccgagcccgacgccagcgcctgcacccccgagagcccccaggaggagctgctgagcagacccgcccccgccgacgtgcccagagtgagcaccgacgccttctacggcagaagaaagtgcggctggaccaagagccccctgttcgtgggcgacagagacagcgccagaagagccccccaggccttcgagcacagcgacgtggacggcgtggtgaccagcaccgaccccgtgcccgagcccgagcccagccccctggagagcaagttcttcgagcagaaggacgtggagaccaagccccccttcagaagcaccctgttccacttcgtggagagaacccccagcgtggccggcagcgagaagagactgagaagccccagcaaggtgatcgagagcctgcaggagaagctggccagcccccccagaagagccgaccccgacagactgatgagaatgaaggaggtgagcagcgtgagcagaatgagagtgctgagcttcagaaacgccgacagccaggaggacgccgaggagctgaaggccaccaccagaggccaggccggcctgcccggcggcctggtgagccccggcagcggcgacagagcccagagactgggccacagcctgagcgtgagcaaggacagcatcagcagagaggagaaggagcaccccgccgcccagaaggagaagagcatggaccaggacttctggtgccccgacagctacgaccccagcagagtggagagagtgtag

SEQ ID NO: 311861 - DNA, 114 bp, Artificial Sequence
  derived and/or modified sequence
atgatggtgcggtgggcccttctttgcggagaatgccggatcctgggacggcactgtcagggaattttgttggaggactctatgccgtggccaattcccagcgtgcagctgtag

SEQ ID NO: 311862 - DNA, 330 bp, Artificial Sequence
  derived and/or modified sequence
atgaccgccccctgcagccagcccgcccagctgcccggcagaagacagctgggcctggtgcccttccccccccccccccccagaacccccctgctgtggctgctgctgctgctgctggccgccgtggcccccgccagaggctgggagagcggcgacctggagctgttcgacctggtggaggaggtgcagctgaacttctaccagttcctgggcgtgcagcaggacgccagcagcgccgacatcagaaaggcctacagaaagctgagcctgaccctgcaccccgacaagaacaaggacgagaacgccgagacccagttcagacaggtgtag

SEQ ID NO: 311863 - DNA, 351 bp, Artificial Sequence
  derived and/or modified sequence
tgaggcagaagacagctgggcctggtgcccttccccccccccccccccagaacccccctgctgtggctgctgctgctgctgctggccgccgtggcccccgccagaggctgggagagcggcgacctggagctgttcgacctggtggaggaggtgcagctgaacttctaccagttcctgggcgtgcagcaggacgccagcagcgccgacatcagaaaggcctacagaaagctgagcctgaccctgcaccccgacaagaacaaggacgagaacgccgagacccagttcagacagctggtggccatctacgaggtgctgaaggacgacgagagaagacagagaatgaactactag

SEQ ID NO: 311864 - DNA, 363 bp, Artificial Sequence
  derived and/or modified sequence
tggacgccgccagctcgggctggtgccgttcccgccgccgccgccgcggacgccgctgctgtggctgctgctgctgctgctggccgccgtggcgccggcgcgcggctgggagagcggagacctggagttgtttgacttagtggaggaggtgcagctcaacttctaccagttcctcggggtgcagcaggatgcatcatctgcagacatcagaaaagcatatcgtaagctttcactaactttacatccagacaagaataaagatgaaaatgcagaaactcagtttagacaattggtggccatttatgaagttttaaaggatgatgaacgaaggcagaggatgaactactaagtagaaaaaagaga

SEQ ID NO: 311865 - DNA, 330 bp, Artificial Sequence
  derived and/or modified sequence
atgactgccccttgcagtcagcccgcacaactgcctgggcgacgccagttaggcttggtgccatttccacccccacctccaaggactcctcttctttggttgctcctcctcctgcttgcagccgtggccccggcgcggggttgggaatctggcgacctagaactcttcgacctcgttgaggaggtccaattaaacttctaccagttcctgggtgtacagcaagatgctagctcagctgacattcggaaggcctacaggaagctgagcctcaccctgcaccctgacaagaataaagatgagaacgccgaaacacaattccgccaagtgtag

SEQ ID NO: 311866 - DNA, 351 bp, Artificial Sequence
  derived and/or modified sequence
tagggacgcaggcagcttggactggtgcctttccccccgcccccgcctcgtacccccttattgtggctgctgctccttctgctggctgcggtagctccggcgagagggtgggagtctggagatctggaactctttgatctggtcgaggaggtgcagctgaacttctatcaatttctgggcgttcagcaggatgcatcatcggccgatatcaggaaggcctataggaaattatccctgactctgcatcccgacaagaataaagacgagaacgcagagacgcaattccgtcagcttgtggcaatatacgaggtgcttaaagacgacgagcgacggcagcggatgaactactag

SEQ ID NO: 311867 - DNA, 330 bp, Artificial Sequence
  derived and/or modified sequence
atgacagccccctgcagccagcctgcccagctgcccggccggcggcagctgggcctggtgcccttccccccacctccacccaggacccccctgctgtggctgctgctgctgctgctggccgctgtggccccagcccggggctgggagagcggggacctggagctgtttgacctggtggaggaggtgcagctgaacttctaccagttcctgggcgtgcagcaggatgccagcagcgctgacatcaggaaggcctacaggaagctgagcctgaccctgcacccagacaagaacaaggatgaaaatgctgagacccagttccggcaggtgtag

SEQ ID NO: 311868 - DNA, 351 bp, Artificial Sequence
  derived and/or modified sequence
tgaggaagacggcagctgggcctggtgcccttccccccacctccacccaggacccccctgctgtggctgctgctgctgctgctggccgctgtggccccagcccggggctgggagagcggggacctggagctgtttgacctggtggaggaggtgcagctgaacttctaccagttcctgggcgtgcagcaggatgccagcagcgctgacatcaggaaggcctacaggaagctgagcctgaccctgcacccagacaagaacaaggatgaaaatgctgagacccagttccggcagctggtggccatctatgaggtgctgaaggatgatgagcggcggcagaggatgaactactag

SEQ ID NO: 311869 - DNA, 330 bp, Artificial Sequence
  derived and/or modified sequence
atgaccgccccctgcagccagcccgcccagctgcccggccggcggcagctggggctcgtaccatttccacccccaccacctagaacccccctcctgtggttgctcttactcctcttagcagccgtcgcccccgcccggggatgggagtcaggcgacttagagctgttcgacttggtggaggaagtacaactgaatttttaccagttcctcggtgttcagcaggacgcatcatccgcggatattcggaaagcttaccgaaagctgtccttaacactgcacccagacaagaataaggacgagaacgccgagacgcagttccggcaagtgtag

SEQ ID NO: 311870 - DNA, 351 bp, Artificial Sequence
  derived and/or modified sequence
tgaggccggcggcagctgggcctggtgcccttcccccccccccccccgcgcactcccctgctatggctcctgctgctacttctggcagccgtcgcccctgcccgtggctgggaatctggcgatttggagctcttcgatctcgtcgaagaggtgcaacttaatttttatcagttccttggtgttcagcaggacgcctcttcggcagatattagaaaggcctaccggaagctgagcttgacattgcacccagacaaaaacaaagacgagaacgcagagacacagtttcggcagctcgtcgcaatctatgaggtccttaaggatgacgagaggcggcagcgtatgaactactag

SEQ ID NO: 311871 - DNA, 330 bp, Artificial Sequence
  derived and/or modified sequence
atgactgcaccttgctctcagcctgcccagttgcctggcaggaggcagttgggcctagtgccctttcctccacctccgcctcgcacaccactcctatggctcctgctcctcttactagccgctgttgctcctgcccgtgggtgggagtcgggcgatctcgagctgtttgacctggtcgaggaggtgcagctgaacttttaccagttcctgggtgtgcagcaggacgccagctctgcagatattagaaaggcgtatcggaagctgagtctcacgcttcaccccgataagaacaaggacgagaacgccgagacacagttcaggcaagtttag

SEQ ID NO: 311872 - DNA, 351 bp, Artificial Sequence
  derived and/or modified sequence
taaggacgacgtcaactgggactagtgccttttccccctcccccaccacggacacccctcttgtggctcctcttgctgctgttggctgccgtagcgccagccagaggatgggagagcggtgacctggaactgtttgatcttgtagaagaggtccagctcaacttctaccagttcctgggagtccagcaggacgcaagttctgctgatatccgcaaggcatatagaaaattgtctctgactctgcatcccgacaagaataaggacgagaacgccgagacgcagttccggcagctggtggccatttacgaggtgttgaaggacgatgagcgcagacagcgcatgaattattag

SEQ ID NO: 311873 - protein, 577 aa, Artificial Sequence
  derived and/or modified sequence
MKHQERFLFQGNNGTVLYTGDFRLAQGEAARMELLHSGGRVKDIQSVYLDTTFCDPRFYQIPSREECLSGVLELVRSWITRSPYHVVWLNCKAAYGYEYLFTNLSEELGVQVHVNKLDMFRNMPEILHHLTTDRNTQIHACRHPKAEEYFQWSKLPCGITSRNRIPLHIISIKPSTMWFGERSRKTNVIVRTGESSYRACFSFHSSYSEIKDFLSYLCPVNAYPNVIPVGTTMDKVVEILKPLCRSSQSTEPKYKPLGKLKRARTVHRDSEEEDDYLFDDPLPIPLRHKVPYPETFHPEVFSMTAVSEKQPEKLRQTPGCCRAECMQSSRFTNFVDCEESNSESEEEVGIPASLQGDLGSVLHLQKADGDVPQWEVFFKRNDEITDESLENFPSSTVAGGSQSPKLFSDSDGESTHISSQNSSQSTHITEQGSQGWDSQSDTVLLSSQERNSGDITSLDKADYRPTIKENIPASLMEQNVICPKDTYSDLKSRDKDVTIVPSTGEPTTLSSETHIPEEKSLLNLSTNADSQSSSDFEVPSTPEAELPKREHLQYLYEKLATGESIAVKKRKCSLLDT

SEQ ID NO: 311874 - protein, 57 aa, Artificial Sequence
  derived and/or modified sequence
MKHQERFLFQGNNGTVLYTGDFRLAQGEAARMELLHSGGRVKDIQSVYLDTTFCDPR

SEQ ID NO: 311875 - DNA, 1734 bp, Artificial Sequence
  derived and/or modified sequence
atgaagcaccaggagagattcctgttccagggcaacaacggcaccgtgctgtacaccggcgacttcagactggcccagggcgaggccgccagaatggagctgctgcacagcggcggcagagtgaaggacatccagagcgtgtacctggacaccaccttctgcgaccccagattctaccagatccccagcagagaggagtgcctgagcggcgtgctggagctggtgagaagctggatcaccagaagcccctaccacgtggtgtggctgaactgcaaggccgcctacggctacgagtacctgttcaccaacctgagcgaggagctgggcgtgcaggtgcacgtgaacaagctggacatgttcagaaacatgcccgagatcctgcaccacctgaccaccgacagaaacacccagatccacgcctgcagacaccccaaggccgaggagtacttccagtggagcaagctgccctgcggcatcaccagcagaaacagaatccccctgcacatcatcagcatcaagcccagcaccatgtggttcggcgagagaagcagaaagaccaacgtgatcgtgagaaccggcgagagcagctacagagcctgcttcagcttccacagcagctacagcgagatcaaggacttcctgagctacctgtgccccgtgaacgcctaccccaacgtgatccccgtgggcaccaccatggacaaggtggtggagatcctgaagcccctgtgcagaagcagccagagcaccgagcccaagtacaagcccctgggcaagctgaagagagccagaaccgtgcacagagacagcgaggaggaggacgactacctgttcgacgaccccctgcccatccccctgagacacaaggtgccctaccccgagaccttccaccccgaggtgttcagcatgaccgccgtgagcgagaagcagcccgagaagctgagacagacccccggctgctgcagagccgagtgcatgcagagcagcagattcaccaacttcgtggactgcgaggagagcaacagcgagagcgaggaggaggtgggcatccccgccagcctgcagggcgacctgggcagcgtgctgcacctgcagaaggccgacggcgacgtgccccagtgggaggtgttcttcaagagaaacgacgagatcaccgacgagagcctggagaacttccccagcagcaccgtggccggcggcagccagagccccaagctgttcagcgacagcgacggcgagagcacccacatcagcagccagaacagcagccagagcacccacatcaccgagcagggcagccagggctgggacagccagagcgacaccgtgctgctgagcagccaggagagaaacagcggcgacatcaccagcctggacaaggccgactacagacccaccatcaaggagaacatccccgccagcctgatggagcagaacgtgatctgccccaaggacacctacagcgacctgaagagcagagacaaggacgtgaccatcgtgcccagcaccggcgagcccaccaccctgagcagcgagacccacatccccgaggagaagagcctgctgaacctgagcaccaacgccgacagccagagcagcagcgacttcgaggtgcccagcacccccgaggccgagctgcccaagagagagcacctgcagtacctgtacgagaagctggccaccggcgagagcatcgccgtgaagaagagaaagtgcagcctgctggacacctag

SEQ ID NO: 311876 - DNA, 174 bp, Artificial Sequence
  derived and/or modified sequence
atgaagcaccaggagagattcctgttccagggcaacaacggcaccgtgctgtacaccggcgacttcagactggcccagggcgaggccgccagaatggagctgctgcacagcggcggcagagtgaaggacatccagagcgtgtacctggacaccaccttctgcgaccccagatag

SEQ ID NO: 311877 - DNA, 2637 bp, Artificial Sequence
  derived and/or modified sequence
gcttcccggaagtggcggcgcggtcagggctggccttggcttcagctgcggttttggggtcccggactctgggatcggcggcgctatgagttctttcgaggggcagatggccgagtatccaactatctccatagaccgcttcgatagggagaacctgagggcccgcgcctacttcctgtcccactgccacaaagatcacatgaaaggattaagagcccctaccttgaaaagaaggttggagtgcagcttgaaggtttatctatactgttcacctgtgactaaggagttgttgttaacgagcccgaaatacagattttggaagaaacgaattatatctattgaaatcgagactcctacccagatatctttagtggatgaagcatcaggagaggtttttatttcagggcaataatggaactgtcctgtacacaggagacttcagattggcgcaaggagaagctgctagaatggagcttctgcactccgggggcagagtcaaagacatccaaagtgtatatttggatactacgttctgtgatccaagattttaccaaattccaagtcgggaggagtgtttaagtggagtcttagagctggtccgaagctggatcactcggagcccgtaccatgttgtgtggctgaactgcaaagcggcttatggctatgaatatctgttcaccaaccttagtgaagaattaggagtccaggttcatgtgaataagctagacatgtttaggaacatgcctgagatccttcatcatctcacaacagaccgcaacactcagatccatgcatgccggcatcccaaggcagaggaatattttcagtggagcaaattaccctgtggaattacttccagaaatagaattccactccacataatcagcattaagccatccaccatgtggtttggagaaaggagcagaaaaacaaatgtaattgtgaggactggagagagttcatacagagcttgtttttcttttcactcctcctacagtgagattaaagatttcttgagctacctctgtcctgtgaacgcatatccaaatgtcattccagttggcacaactatggataaagttgtcgaaatcttaaagcctttatgccggtcttcccaaagtacggagccaaagtataaaccactgggaaaactgaagagagctagaacagttcaccgagactcagaggaggaagatgactatctctttgatgatcctctgccaatacctttaaggcacaaagttccatacccggaaacttttcaccctgaggtattttcaatgactgcagtatcagaaaagcagcctgaaaaactgagacaaaccccaggatgctgcagagcagagtgtatgcagagctctcgtttcacaaactttgtagattgtgaagaatccaacagtgaaagtgaagaagaagtaggaatcccagcttcactgcaaggagatctgggctctgtacttcacctgcaaaaggctgatggggatgtaccccagtgggaagtattctttaaaagaaatgatgaaatcacagatgagagtttggaaaacttcccttcctccacagtggcagggggatctcagtcaccaaagcttttcagtgactctgatggagaatcaactcacatctcctcccagaattcttcccagtcaacacacataacagaacaaggaagtcaaggctgggacagccaatctgatactgttttgttatcttcccaagagagaaacagtggggatattacttccttggacaaagctgactacagaccaacaatcaaagagaatattcctgcctctctcatggaacaaaatgtaatttgcccaaaggatacttactctgatttgaaaagcagagataaagatgtgacaatagttcctagtactggagaaccaactactctaagcagtgagacacatatacccgaggaaaaaagtttgctaaatcttagcacaaatgcagattcccagagctcttctgattttgaagttccctcaactccagaagctgagttacctaaacgagagcatttacaatatttatatgagaagctggcaactggtgagagtatagcagtcaaaaaaagaaaatgctcactcttagatacctaagaattcaaagcgtttcaacctagagcaaccactaaaaaacctgcacagagatgacagtcaatattacaatagagaaaatacagtacttaaaaatgttcaaataacctggttgggtgtggtggctcacacttgtaatcccagcactttgaggtgggcaatggcttgagcccaggagttcgacaccagcctggccaacacagtgaaatgtgtctctacttacaaaaaaaaaaaaaaaaaaaaaagccaggcatggtggtgggctactctggaggcccttgaggatcacttgagcccaggagattgaggctgcagtgagccatgactgtgccactgcacctctagtctgggtgacagagcaagaccctgtttaaaaaagaaaaaggccaggcacggtggctcatgcctgtaatcccagctacgcaggaggccaaggcaggagaatcacttgaacctgggaggtggtggttgcagtgagctgagattgtgtcattgcactccagcctgggcaacaagagcaaaactctgtctc

SEQ ID NO: 311878 - DNA, 2246 bp, Artificial Sequence
  derived and/or modified sequence
gcggttttggggtcccggactctgggatcggcggcgctatgagttctttcgaggggcagatggccgagtatccaactatctccatagaccgcttcgatagggagaacctgagggcccgcgcctacttcctgtcccactgccacaaagcttgaaggtttatctatactgttcacctgtgactaaggagttgttgttaacgagcccgaaatacagattttggaagaaacgaattatatctattgaaatcgagactcctacccagatatctttagtggatgaagcatcaggagaggtttttatttcagggcaataatggaactgtcctgtacacaggagacttcagattggcgcaaggagaagctgctagaatggagcttctgcactccgggggcagagtcaaagacatccaaagtgtatatttggatactacgttctgtgatccaagattttaccaaattccaagtcgggaggagtgtttaagtggagtcttagagctggtccgaagctggatcactcggagcccgtaccatgttgtgtggctgaactgcaaagcggcttatggctatgaatatctgttcaccaaccttagtgaagaattaggagtccaggttcatgtgaataagctagacatgtttaggaacatgcctgagatccttcatcatctcacaacagaccgcaacactcagatccatgcatgccggcatcccaaggcagaggaatattttcagtggagcaaattaccctgtggaattacttccagaaatagaattccactccacataatcagcattaagccatccaccatgtggtttggagaaaggagcagaaaaacaaatgtaattgtgaggactggagagagttcatacagagcttgtttttcttttcactcctcctacagtgagattaaagatttcttgagctacctctgtcctgtgaacgcatatccaaatgtcattccagttggcacaactatggataaagttgtcgaaatcttaaagcctttatgccggtcttcccaaagtacggagccaaagtataaaccactgggaaaactgaagagagctagaacagttcaccgagactcagaggaggaagatgactatctctttgatgatcctctgccaatacctttaaggcacaaagttccatacccggaaacttttcaccctgaggtattttcaatgactgcagtatcagaaaagcagcctgaaaaactgagacaaaccccaggatgctgcagagcagagtgtatgcagagctctcgtttcacaaactttgtagattgtgaagaatccaacagtgaaagtgaagaagaagtaggaatcccagcttcactgcaaggagatctgggctctgtacttcacctgcaaaaggctgatggggatgtaccccagtgggaagtattctttaaaagaaatgatgaaatcacagatgagagtttggaaaacttcccttcctccacagtggcagggggatctcagtcaccaaagcttttcagtgactctgatggagaatcaactcacatctcctcccagaattcttcccagtcaacacacataacagaacaaggaagtcaaggctgggacagccaatctgatactgttttgttatcttcccaagagagaaacagtggggatattacttccttggacaaagctgactacagaccaacaatcaaagagaatattcctgcctctctcatggaacaaaatgtaatttgcccaaaggatacttactctgatttgaaaagcagagataaagatgtgacaatagttcctagtactggagaaccaactactctaagcagtgagacacatatacccgaggaaaaaagtttgctaaatcttagcacaaatgcagattcccagagctcttctgattttgaagttccctcaactccagaagctgagttacctaaacgagagcatttacaatatttatatgagaagctggcaactggtgagagtatagcagtcaaaaaaagaaaatgctcactcttagatacctaagaattcaaagcgtttcaacctagagcaaccactaaaaaacctgcacagagatgacagtcaatattacaatagagaaaatacagtacttaaaaatgttcaaataacctggttgggtgtggtggctcacacttgtaatcccagcactttgaggtgggcaatggcttgagcccaggagttcgacaccagcctggccaacacagtgaaatgtgtctctacttacaaaaaaaaaaaaaaaaa

SEQ ID NO: 311879 - DNA, 1734 bp, Artificial Sequence
  derived and/or modified sequence
atgaaacaccaggagagattcctcttccagggcaataatggcactgttctgtacacgggcgactttagattggctcaaggagaggctgcacggatggaactgttacactcaggcgggcgggtaaaggatatccagtcagtgtacctcgacacaactttttgcgatcctcgcttttaccagatcccaagccgagaggaatgtctgagtggggtgctggagcttgtccgatcctggatcactagatcgccttatcacgttgtgtggctgaactgtaaggcggcatacggctatgaatatctgtttaccaacctgagcgaggaactcggagtgcaagtgcatgtcaataagctggacatgtttcgtaacatgcccgaaatcctccaccatttgaccacggacagaaatactcagattcacgcatgcagacaccctaaagcggaggaatacttccagtggtccaaactgccttgcggcattacatcccgaaaccggatacccctccatatcatctctatcaagccttccacaatgtggttcggagagcgctcaaggaagaccaacgttatcgtgcgcaccggtgagtcctcttaccgcgcttgctttagcttccacagtagttatagcgagataaaggactttctgtcctatctctgtcctgtaaacgcttatcccaatgtaattcccgtcggtacaactatggataaagtagttgaaatcttgaaacccttatgtcggtcctcccagtccacggaacccaagtataagcccttagggaaacttaaacgagcacgcaccgtgcaccgggattccgaagaggaggacgattatttatttgatgatccactgccaatcccgctacgccacaaggtcccctatccagaaacctttcacccagaggtattctccatgacagctgtgtctgagaagcagccagagaagctgcgccagacccccgggtgttgtcgcgcagagtgcatgcagtcttccaggttcacaaattttgtggattgcgaggagtcaaactcagagtctgaagaggaagtcgggataccagcctcactgcagggcgacctagggtccgtgctgcacctccaaaaggcagacggtgatgtgccacaatgggaagtatttttcaagcgtaatgacgaaatcacagacgagagcctggagaactttccttctagcacggtggcaggagggtcacagagtcctaagctattctcagattctgatggggaaagcacccatattagctctcagaacagctcacagtccacccacatcaccgaacaagggtcccagggctgggatagccagagtgacactgtgctcctcagttcccaggaaaggaattctggcgatatcacctccctggataaggcagactatagaccaaccatcaaggagaacatccccgcatccctgatggagcaaaatgtcatctgtcctaaggatacttattctgacttaaaaagtagggacaaggacgtgacaatcgtgccgtctacaggcgaaccaaccacccttagtagtgagacgcatatcccagaagaaaagtcactgctgaatttgagcaccaatgccgatagccagagttcctctgattttgaagtacccagcaccccagaggcagaactccccaagagagaacatctccagtacctctacgagaagttggccacaggcgaaagcatagctgtcaagaagagaaagtgttcactgcttgacacttag

SEQ ID NO: 311880 - DNA, 1734 bp, Artificial Sequence
  derived and/or modified sequence
atgaagcatcaggaacggtttctgtttcagggcaataatggtactgtgttgtacacaggagactttcgacttgctcaaggagaggctgccaggatggagctgttgcactcaggcggtcgggtaaaggacattcagagcgtgtatttggacaccaccttctgtgacccccggttttatcagattccatcaagagaggaatgcctgtccggcgtgctggaacttgtgcggtcttggattacacgctctccctaccatgtagtgtggctcaactgtaaggccgcgtacggctacgaatacctgttcaccaacttgagcgaagagttaggcgtccaagtccatgtcaacaaactggacatgtttcgtaacatgccagagatcttgcaccatctcacaacggataggaacacccagattcatgcttgtcgccaccctaaggccgaggagtactttcagtggtcgaaacttccatgtgggatcacatcaaggaaccggatccctctgcatatcatatctataaaaccatctaccatgtggtttggggagcgcagccggaagacaaatgtcatagttcgaacaggtgagtcttcgtatagggcctgctttagttttcattcatcatattcggagatcaaagacttccttagctacctgtgtcccgtgaacgcttatcccaatgtgatccctgtcgggacaaccatggataaggtcgttgagattctcaagcctctgtgtcgcagctctcagtctactgaaccaaagtataaaccattaggtaagcttaaaagggcccggactgttcaccgggattctgaggaagaagacgattatctgttcgacgatcctcttcccataccattgcggcacaaggtcccttaccccgaaactttccaccccgaggtgttcagcatgaccgccgtcagcgagaaacagcctgagaaactccggcagaccccgggatgctgccgggctgagtgcatgcagtcaagcaggttcactaacttcgtggattgcgaggaatcaaactcggagagtgaggaggaggtgggaattccagcttcgttgcagggcgacctgggtagcgtgctccatctgcaaaaggccgatggggacgtgccacaatgggaagtgttcttcaaacggaacgatgagatcactgatgaaagtctagagaacttcccctcaagcactgtagcaggcggctcccagtcgcctaaattattctcggacagtgatggggaatccacgcatatatccagccagaatagctcccaatcaacccacatcactgagcagggcagccaggggtgggactcacagtctgacactgtgttgctgtcttcccaggaacggaattctggtgacatcacaagtttggataaggcagactatcgccctacaatcaaggagaacattcctgcgagcctgatggagcaaaacgtgatttgccctaaggatacctattctgatttaaaaagccgggacaaggatgtgacaattgtgccgtcgactggtgagcctactacactgtcctccgagacccatatcccggaggagaagtctctcctaaatttgagtactaatgccgactcacaatcaagctccgatttcgaggtcccctccacccccgaggccgaactgcccaaaagggaacacctgcagtatctgtatgaaaagctggcaaccggggaatccatcgccgtcaaaaaacggaaatgctctttgttggatacctag

SEQ ID NO: 311881 - DNA, 1734 bp, Artificial Sequence
  derived and/or modified sequence
atgaaacaccaggaacgctttctcttccaagggaataacggaactgtgctgtataccggggactttaggctcgcccagggggaggccgctcgaatggaattgttacacagcggaggccgagtaaaggacattcaaagcgtgtacctggacacaacgttctgtgaccctaggttttatcagatcccatctcgggaagaatgtcttagcggtgtgctagaacttgttcggtcctggataacccgctctccatatcacgtggtctggctaaattgcaaagctgcgtatggttacgagtacttgtttactaacctgtcagaagaactcggagtgcaggtgcatgttaacaagctcgacatgttccggaatatgccagagattctgcaccacctaaccactgacaggaatacacagatccacgcttgcaggcatcccaaggcagaagagtactttcagtggtcaaagctcccgtgcggaatcaccagtcgtaacaggatacccctgcacatcatcagtattaagccctccaccatgtggtttggagaaagatctcgcaaaactaacgtgatcgtgaggacgggcgagagcagttacagggcctgcttctcctttcattccagttattcagaaatcaaggatttcttaagctatctgtgccccgtgaacgcctatcctaacgtgatccccgttgggacgaccatggacaaggtcgtggaaattctaaaacccctatgccgctcatcacagtcaactgagcctaagtataaaccactgggcaagctgaaacgggctcgtacagtgcaccgggactcggaagaagaggatgactatctctttgatgaccccctgcccatccctctccgccacaaggtcccatatcccgaaactttccaccccgaggtcttttccatgactgcagtgtccgagaagcaacccgagaaactgcggcaaactcccggatgctgccgtgcggagtgtatgcagtcctcaagattcacaaattttgtcgattgcgaagaatcaaactccgaatccgaagaggaggtgggcatacccgccagcctgcagggcgatttgggttcagtgctgcacctccagaaggctgatggggacgttccccagtgggaggtattctttaagcgcaacgacgagattactgatgaaagtctggaaaatttcccaagctcgaccgtcgctggtggttcgcaatcccccaagctatttagcgacagcgacggcgagtctacccacataagcagccagaactccagtcaatccactcacattacagaacaagggtcacagggctgggactctcaaagcgacaccgtgttgctgtccagccaagagcgcaattccggggacatcacttcccttgacaaggcagattatcgccccactataaaagagaacatccccgcatctttaatggagcagaatgtgatttgccccaaagatacatattccgacctcaagtcccgtgacaaggacgtgacaattgtgccttctaccggagagcctacaaccttaagttctgagacccacattcctgaagagaaaagtttgctgaatctgtcaaccaatgctgatagccagtctagttcagatttcgaggtaccctcaactccagaggccgagttgcctaaacgcgaacacctgcagtacctttacgagaaactggctactggggaaagcatcgccgtgaaaaagaggaaatgtagtctcttggacacttag

SEQ ID NO: 311882 - DNA, 174 bp, Artificial Sequence
  derived and/or modified sequence
atgaagcaccaagaacgcttcctgttccagggcaacaacggtacagtcctttatactggggacttcagactagcgcagggggaagctgctaggatggagctgctgcatagtgggggccgggtgaaagatatccaatctgtttatcttgacacgactttttgtgaccccaggtag

SEQ ID NO: 311883 - DNA, 1734 bp, Artificial Sequence
  derived and/or modified sequence
atgaagcaccaggagcgcttcctgttccagggcaacaatggaacagtgctgtacacaggagacttccggctggcccagggcgaggccgccaggatggagctgctgcacagcggcggccgggtgaaggacatccagagcgtgtacctggacaccaccttctgtgacccccgcttctaccagatccccagccgggaggagtgcctgtctggagtgctggagctggtgcgctcctggatcaccaggagcccctaccacgtggtgtggctgaactgcaaggccgcctacggctatgagtacctgttcaccaacctgtctgaggagctgggcgtgcaggtgcacgtgaacaagctggacatgttcaggaacatgcctgagatcctgcaccacctgaccacagacaggaacacccagatccacgcctgccgccaccccaaggccgaggagtacttccagtggagcaagctgccctgtggcatcaccagcaggaaccgcatccccctgcacatcatcagcatcaagcccagcaccatgtggtttggagagaggagcaggaagaccaacgtgattgtgaggactggagagagcagctaccgggcctgcttctccttccacagcagctacagcgagatcaaggacttcctgagctacctgtgccctgtgaatgcctacccaaatgtcatccctgtgggcaccaccatggacaaggtggtggagatcctgaagcccctgtgccgcagcagccagagcacagagcccaagtacaagcccctgggcaagctgaagagggccaggacagtgcaccgggacagcgaggaggaggatgactacctgtttgatgaccccctgcccatccccctgcggcacaaggtgccctacccagagaccttccaccctgaggtgttctccatgacagctgtgtctgagaagcagcctgagaagctgcggcagaccccaggctgctgcagagctgagtgcatgcagagcagccgcttcaccaactttgtggactgtgaggagagcaacagcgagagcgaggaggaggtgggcatcccagccagcctgcagggcgacctgggctctgtgctgcacctgcagaaggcagatggagatgtgccccagtgggaggtgttcttcaagagaaatgatgagatcacagatgagagcctggagaacttccccagcagcacagtggccggcggcagccagagccccaagctgttcagtgacagtgatggagagagcacccacatcagcagccagaacagcagccagagcacccacatcacagagcagggcagccagggctgggacagccagagcgacacagtgctgctgagcagccaggagaggaacagcggggacatcaccagcctggacaaggctgactaccggcccaccatcaaggagaacatcccagccagcctgatggagcagaatgtcatctgccccaaggacacctacagcgacctgaagagccgggacaaggatgtgaccatcgtgcccagcactggagagcccaccaccctgagcagcgagacccacatccctgaggagaagagcctgctgaacctgagcaccaatgctgacagccagagcagcagtgactttgaggtgcccagcaccccagaggccgagctgcccaagcgggagcacctgcagtacctgtatgagaagctggccactggagagagcattgctgtgaagaagaggaagtgcagcctgctggacacctag

SEQ ID NO: 311884 - DNA, 174 bp, Artificial Sequence
  derived and/or modified sequence
atgaagcaccaggagcgcttcctgttccagggcaacaatggaacagtgctgtacacaggagacttccggctggcccagggcgaggccgccaggatggagctgctgcacagcggcggccgggtgaaggacatccagagcgtgtacctggacaccaccttctgtgaccccaggtag

SEQ ID NO: 311885 - DNA, 1734 bp, Artificial Sequence
  derived and/or modified sequence
atgaagcaccaggagcggttcctgttccagggcaacaacggcaccgtgctgtacactggcgacttccggcttgcacaaggcgaggcagcccgcatggagctccttcacagtgggggacgagtcaaggacattcagagcgtatatttagacacaactttctgtgacccgaggttttatcagatcccctcacgggaggaatgcctttcgggtgttctggagctcgtaaggagttggatcactcgctccccatatcacgtggtgtggttaaattgtaaggcggcatatggctatgagtacctctttacaaacttgtccgaagagctcggagttcaagtgcatgtaaataagttggacatgttcagaaatatgcccgagattctgcatcatctcacaaccgatagaaatacacaaattcatgcctgtaggcaccccaaagccgaagaatactttcagtggtcgaaacttccttgtgggattaccagccggaatcgaatcccactacacataatctcaatcaagcccagtacgatgtggtttggggaacgaagtcgcaaaacgaatgtcatcgtgaggacgggagagtctagttaccgcgcatgtttctcttttcactcttcgtatagcgagattaaggattttttaagttacctgtgtcccgttaatgcttatcccaacgtcattccagtggggacgactatggataaggtggtggagatactgaaaccactctgcagatctagccagagcacggagccgaaatataaacctctgggcaaactgaagcgggcgcggacagtccatcgggacagcgaagaggaggacgactacctgttcgacgacccactcccgatcccactcagacataaagtcccataccccgaaaccttccaccccgaagttttttctatgacggccgtcagcgaaaagcagcctgaaaagttgcggcagactcccggatgttgtcgcgccgaatgcatgcagtcttctcgtttcactaacttcgtggattgtgaagagtccaatagcgagagtgaggaggaggtcggcatcccagcaagtttgcagggagatctcggctcagttctgcatttgcagaaagctgatggcgatgtgccccagtgggaagtgttttttaaaaggaacgacgaaatcacggatgagtcccttgagaatttcccctccagcaccgtggccggcggatcccagagcccaaagttattttcagattctgatggcgagtcaacacatataagctcccaaaattcctcccagagcacccacataacggaacagggatcacagggctgggacagccagtctgacacagtgctgttaagtagccaggagagaaacagcggtgacataacttccctcgataaggcggattatagacccaccataaaggagaatatccctgcatctcttatggagcagaacgtcatttgcccgaaagatacatactccgatttaaagtcacgggataaggatgtcaccatcgtgcctagtacaggcgaacctaccaccctgagttcagagactcatattcccgaggagaaaagcctgctgaacctgtccacaaatgcggattcccagtctagcagtgattttgaggtgccctctactcctgaggctgaattgcctaagcgggaacacctgcagtatctctacgagaaactggccaccggagaaagcatcgccgtcaagaaaaggaagtgcagtctgctagacacatag

SEQ ID NO: 311886 - DNA, 1734 bp, Artificial Sequence
  derived and/or modified sequence
atgaagcaccaggagcggttcctgttccagggcaacaacggcaccgtattgtacactggagacttccgacttgctcagggagaagccgctaggatggagctgctgcactctggcggccgggtcaaggatattcaaagcgtgtatctcgacacaaccttctgcgaccctagattttatcaaatcccatcccgagaggaatgtcttagtggagttctggaactggttcggagctggatcacccgtagcccctaccacgtggtgtggctaaattgtaaagctgcctacggctacgagtacttgtttacgaacctcagtgaagagctgggcgtgcaggttcacgtcaacaagttagacatgtttcgaaacatgcctgagatactccaccacctgacaactgacaggaatactcagattcatgcttgccggcatcccaaggctgaggaatattttcaatggtccaagttaccctgcggtatcacatcaagaaatcggatacctcttcatatcatctcaattaagccctctacaatgtggtttggagaacggtcgcgcaagaccaatgtcatagtgagaaccggcgagagcagctacagagcatgtttctccttccacagtagctattccgaaatcaaagattttctgtcttatctgtgtccggtgaatgcatacccgaacgtgatacccgtgggcaccaccatggataaagtggttgagatattgaaaccactgtgcaggtcctcacagagtactgagcctaaatacaagccgctaggtaagctgaagcgggcgaggactgttcaccgagacagcgaggaagaggatgactatctctttgatgatcccctgcccataccactgagacacaaggtgccttaccccgagacctttcatccagaggtgttctctatgaccgctgtgtctgaaaaacaaccggaaaagctgagacagacacccggatgttgccgggcagagtgcatgcagtcatctagatttacgaactttgtggactgtgaagaatccaacagcgagagtgaagaggaagtgggcattccagcttctctgcagggtgatctggggagcgttctgcatcttcaaaaggcggatggcgatgttccacaatgggaagtattctttaaacggaatgacgaaataacggacgagtcattagagaatttcccatcttccacagtcgcagggggaagtcagtcccccaagctgtttagcgatagcgacggcgagtcaactcacatatcatcccagaactcctctcagagcacccatattaccgagcaaggctctcaaggctgggactcgcagtccgataccgtcctcctgtctagtcaggaacgcaattcaggggacattacctcactcgataaagcagactatagacctactattaaggagaatatccctgcctcgctgatggagcagaacgtgatttgtccaaaggacacatactccgacctaaaaagccgcgataaggatgtaacaattgtgccgtctactggcgaacctacaacgttatcttctgagacccacattccagaagaaaaatcactgctgaacctgagcacgaacgctgattctcagtcttcctcggatttcgaggtgcccagtacccctgaagccgagctacctaaaagagagcacctccaatacctttacgagaagcttgctaccggcgaaagtatcgccgtgaagaagcggaagtgtagcttacttgatacctag

SEQ ID NO: 311887 - DNA, 1734 bp, Artificial Sequence
  derived and/or modified sequence
atgaagcaccaggagcggttcctgttccagggcaacaacggcaccgtcctttacacaggcgacttcaggctggctcaaggagaggccgctcgcatggagctgttgcacagcggtggacgcgtgaaggatattcaatcagtatatctggataccacattctgcgacccgcggttttaccagataccatcacgcgaagaatgtctttccggtgtgctggagctggtccgctcttggataactagatccccataccatgtggtctggctgaactgcaaggccgcctatggctatgaataccttttcaccaatctgagtgaagagctcggagtgcaggtacatgtcaacaaattggacatgtttcggaatatgcctgaaatcctgcaccacctgactactgatagaaacactcagatacacgcttgcagacacccaaaagctgaggagtactttcagtggtcaaagcttccttgcggcattacaagccgcaatcgcatcccgctgcacattatttctatcaagccgtctacaatgtggttcggcgagcggagtcggaaaacaaatgtgattgtgaggactggcgagtcgtcctaccgcgcttgcttcagcttccacagttcatattctgaaatcaaggatttcctctcctacctctgccccgtgaatgcctacccgaatgtcatccctgttggcaccaccatggacaaagttgtagagattctgaaacctctttgccgatcatctcagtcaaccgaacctaaatacaaaccgctgggcaagctcaaacgcgcccgtacagtccatcgggacagtgaggaagaagatgattatctgtttgatgaccccctgccaatcccacttcggcacaaggttccttatcctgagacctttcacccagaggtgttcagtatgacagcggtcagcgaaaaacagccagaaaaacttcggcagaccccagggtgttgtcgcgccgagtgcatgcagtcatctcggtttacaaactttgttgattgcgaggaatcaaactccgagagcgaagaagaggtggggattcccgctagtcttcagggagatcttggcagcgttttgcatctgcagaaagctgatggggatgtgcctcaatgggaagtgtttttcaagcgaaacgatgagattactgatgagagcctcgaaaacttcccatcctccaccgtggccgggggctcccagtcccccaagctcttttcagattccgatggtgaatccacccacattagttcacagaactcttctcagagtactcatatcactgagcaggggtcgcagggatgggattcacagtcagacacagtgcttctgtcttcccaggagaggaactccggagatataacaagtctggataaagccgactatcgccccacgatcaaggaaaacatccctgcttcattgatggagcaaaatgtcatctgtccaaaggatacttattcagatctaaagagcagggataaagacgtgaccattgtgccgagcaccggagaacctaccaccctctcgtctgagacgcatataccggaggagaagtctctattgaatctgagtacaaacgccgacagccagagttcctctgactttgaggtaccgtcaaccccagaagctgaattgcctaagcgggagcacctccagtacctttatgagaaacttgctacgggagaatccatcgcagtgaaaaagcgcaagtgctcccttttagacacatag

SEQ ID NO: 311888 - DNA, 174 bp, Artificial Sequence
  derived and/or modified sequence
atgaagcaccaggagcggttcctgttccagggcaacaacggcaccgtgctctacacaggcgacttccgcctggcccagggcgaagccgcacggatggaactgctccatagtggggggcgcgtcaaggatattcaatccgtgtaccttgacaccacgttctgtgaccctaggtag

SEQ ID NO: 311889 - DNA, 1734 bp, Artificial Sequence
  derived and/or modified sequence
atgaaacatcaggagaggtttttattccaaggcaacaatggaactgttttgtatactggagatttcaggctggctcaaggggaggccgcacgaatggaactgctgcacagtgggggacgcgttaaggacatccaaagtgtgtacttggacactaccttttgcgacccacggttctatcagattcccagtagggaagagtgcttgtcgggtgtcctagaattggtgaggagctggatcactcgcagcccatatcatgtggtgtggctaaattgtaaagccgcatacgggtatgaatacctattcacaaacctttccgaggaactcggcgtccaggtgcacgtaaacaagcttgacatgttccgcaatatgcctgaaatccttcaccaccttaccaccgatagaaacacgcagatacacgcgtgccggcatcctaaggcagaagaatatttccagtggtcgaagctgccatgtggaattacatcacgaaatcgcattcctctgcacattatcagcatcaagccctctaccatgtggtttggggagcgaagccgcaaaacgaacgtgattgtgcggaccggggagtctagctaccgcgcatgttttagctttcactcctcctacagcgagatcaaggattttctgtcatacctgtgtcccgtgaacgcttatcccaacgtgatccctgtgggtactaccatggacaaggtggtggaaatcctgaaacctctgtgcagaagctctcagtctacagaacctaaatacaagcccctgggaaagcttaagagggccagaacagtgcaccgcgacagcgaagaggaggatgattatcttttcgatgacccgttgcccatcccactgcgtcataaggtgccgtaccccgagacattccatcccgaagtgttttccatgaccgctgtctccgaaaagcagcccgagaaacttagacagacacccggatgttgcagggccgagtgcatgcagagctctcggtttactaactttgttgattgtgaagagagcaactccgaatcagaggaagaagtgggcatccctgcctcgcttcagggggatctggggtccgtcctgcatctgcagaaagcagatggagatgtgccgcagtgggaggtattcttcaagcgcaatgacgagattacggatgagtcccttgagaatttcccatcttccacggtggccggtgggtcacagagccctaagctattctctgatagtgatggtgaatccacacacatttcctctcagaactcctcacagagcactcatattacagagcagggaagccaaggttgggattcccaaagcgacactgtgctgctgagcagccaagagaggaactcaggggatatcacgtccttagataaggccgactaccggccaactataaaggagaatatacccgcatcgctcatggaacagaatgtcatttgcccaaaggatacctactctgatctcaaatcacgggataaagacgtaacaattgtgccaagtacaggcgagccaactaccctgagttcagaaacacatatccctgaggaaaaatcacttcttaatttaagcactaatgctgacagccagtcgtcatcggattttgaagtgccatctacccctgaggcggaactgcctaagagggagcatttgcagtacctgtatgagaagctggcaactggcgaatcaattgcggtcaagaaaaggaagtgtagtctcctggacacctag

SEQ ID NO: 311890 - DNA, 1734 bp, Artificial Sequence
  derived and/or modified sequence
atgaagcaccaggaaagatttctctttcagggaaataatggcaccgtgctgtatactggagacttccgtctggcacagggcgaagcagcaagaatggaactcctgcactcaggcggacgcgtgaaagatatacaatcagtttatcttgataccactttctgcgaccccaggttttatcagataccgagcagagaggagtgcttgtcgggcgtccttgagctcgtgaggagttggattaccaggagcccataccacgttgtgtggctgaattgcaaagccgcttacggatacgagtatctctttaccaacttaagcgaggagttgggcgttcaggtccatgttaataagctcgatatgttccggaacatgcctgagatactgcaccacctcaccacggacaggaatacccagatccatgcttgtcggcaccctaaggcagaagagtattttcagtggagcaaactgccctgcggcatcactagccgcaatagaattccgctgcatatcatatctataaagccttcgactatgtggtttggggaacgctcacgcaagaccaacgtgatcgtccgaacaggcgagtcgagttatagagcttgtttcagtttccactcaagctattcggaaataaaagattttctttcatatctgtgccctgtgaatgcttacccaaatgtgatccctgtgggaactacaatggataaggtggttgagatccttaaacccctctgtcgcagcagtcagagcaccgagcctaaatacaaacctctgggcaagctcaaaagggcacggacggtgcacagggacagcgaggaggaggacgattacctattcgatgaccccttgcccataccactacgtcataaagttccataccccgaaacttttcatccggaagtcttcagcatgacggcggtctcagagaaacagcccgagaaattgaggcagacacccggatgctgtcgcgcagaatgtatgcaatctagcagattcaccaatttcgtggattgtgaggaaagcaactcagaatccgaagaggaggtggggatcccggcatcattacaaggagacttggggtccgtgttgcatctccaaaaggccgatggagacgtgccccagtgggaggtgttttttaagcgaaacgacgaaataaccgatgagtctctggagaatttcccgtcaagtacagttgcaggcggatctcagtcaccaaaattattttctgatagtgacggcgaatcaacacatatcagcagccaaaactccagccagagcactcacatcactgaacaagggtcccaaggatgggatagtcagagcgacaccgtgctgctgagctctcaggagcggaacagtggggacatcacaagtctcgataaagccgactaccggccaacaattaaagaaaatatccccgcttccctgatggagcagaacgtcatctgccccaaggatacctatagtgacctcaaatcccgagataaggacgtgactatcgtccctagcaccggcgaacctaccacattaagcagtgaaacccatattcccgaggagaaatctctgctgaacttgagcactaacgccgattcacagtcgagctcggactttgaagtcccctccacaccggaggcagaactacctaaacgagagcacctgcagtacctatatgagaagctcgctaccggcgagagcatcgctgtgaagaaacgaaaatgtagccttctagatacctag

SEQ ID NO: 311891 - DNA, 1734 bp, Artificial Sequence
  derived and/or modified sequence
atgaagcatcaagagaggtttctttttcagggaaacaatggcacagtactctatacaggcgacttccgcctggcccagggtgaggcagcaagaatggagctgttgcattctgggggacgggtgaaggatattcagagtgtctacctcgatacaacattctgcgatcccagattctatcagatcccgtcccgggaagagtgtctttccggcgtgctggagctcgtgaggagttggatcacccggagtccctatcatgtcgtgtggctaaactgtaaggctgcctacggctacgagtacttattcactaacctgtccgaggagctgggcgtccaggtgcatgtcaataagctggatatgttcaggaatatgcctgagattctacaccaccttaccacagaccgcaacactcagatccacgcttgcagacaccccaaagccgaggagtattttcagtggtctaaattgccatgcggcattacaagtaggaacagaattccattacatattatctcgatcaaacccagtactatgtggttcggcgaaaggagtcgcaagacaaatgtgattgtgaggaccggagagtcttcctacagagcctgctttagcttccatagttcgtattccgagatcaaagactttctgtcgtacctgtgtcccgtgaatgcctacccaaacgtgattcctgtcgggacaacaatggataaagtcgtggaaatcttgaaaccattgtgccggtccagtcagtccactgagcctaaatataagccactgggcaagctaaagagagccaggactgtgcaccgcgattccgaggaagaagatgactacctttttgacgatcctctgcctatcccactgaggcacaaggtgccttatcctgagacctttcatcctgaagtcttttctatgaccgcagtatcagaaaagcagccggaaaaactgcggcagacccctggatgttgccgagcagagtgcatgcagagtagtagatttacaaactttgtcgattgtgaagaatccaactccgaaagtgaagaagaggtaggcatccctgcctcactccagggcgatcttgggtctgtactgcatcttcaaaaggcagatggggatgtgccccaatgggaggtgttttttaaacgcaacgacgaaatcactgacgagtcacttgaaaacttcccaagcagtaccgtcgccggtggtagtcaatctcctaagctttttagtgactcggacggtgaatccacccacatctcctcccagaattcatctcagtctacccacatcacagagcagggcagccagggttgggactcgcaaagcgacactgtgctgctcagttctcaagagcgaaattctggcgatattacatcattagataaagccgattatcggccaaccattaaggagaacattcccgcatctcttatggagcagaatgtcatctgccccaaggatacgtatagcgacctgaagtcccgagataaggatgtcacaatcgttcccagcacaggggagcccactacgctgtctagcgagacccacatacctgaagagaaatccctgctcaatctatccactaacgcagactcgcagagctcttcagattttgaggtcccatccacgcccgaggctgagttgcccaagcgcgagcacctgcagtatctatatgaaaaactcgctacaggcgagagcattgcagtgaaaaagcggaagtgctctctgctcgatacctag

SEQ ID NO: 311892 - DNA, 174 bp, Artificial Sequence
  derived and/or modified sequence
atgaaacaccaggagcgattcctgttccagggaaacaacggaaccgtgttgtacacgggagacttccggttggcccagggcgaagctgcccgaatggagttgcttcacagtggtggccgagtcaaggacattcagagtgtgtatcttgacacaaccttttgtgatccgaggtag

SEQ ID NO: 311893 - protein, 84 aa, Artificial Sequence
  derived and/or modified sequence
MFLFQGNNGTVLYTGDFRLAQGEAARMELLHSGGRVKDIQSVYLDTTFCDPRFYQIPSREECLSGVLELVRSWITRSPYHVVWL

SEQ ID NO: 311894 - protein, 572 aa, Artificial Sequence
  derived and/or modified sequence
MFLFQGNNGTVLYTGDFRLAQGEAARMELLHSGGRVKDIQSVYLDTTFCDPRFYQIPSREECLSGVLELVRSWITRSPYHVVWLNCKAAYGYEYLFTNLSEELGVQVHVNKLDMFRNMPEILHHLTTDRNTQIHACRHPKAEEYFQWSKLPCGITSRNRIPLHIISIKPSTMWFGERSRKTNVIVRTGESSYRACFSFHSSYSEIKDFLSYLCPVNAYPNVIPVGTTMDKVVEILKPLCRSSQSTEPKYKPLGKLKRARTVHRDSEEEDDYLFDDPLPIPLRHKVPYPETFHPEVFSMTAVSEKQPEKLRQTPGCCRAECMQSSRFTNFVDCEESNSESEEEVGIPASLQGDLGSVLHLQKADGDVPQWEVFFKRNDEITDESLENFPSSTVAGGSQSPKLFSDSDGESTHISSQNSSQSTHITEQGSQGWDSQSDTVLLSSQERNSGDITSLDKADYRPTIKENIPASLMEQNVICPKDTYSDLKSRDKDVTIVPSTGEPTTLSSETHIPEEKSLLNLSTNADSQSSSDFEVPSTPEAELPKREHLQYLYEKLATGESIAVKKRKCSLLDT

SEQ ID NO: 311895 - protein, 117 aa, Artificial Sequence
  derived and/or modified sequence
MELLHSGGRVKDIQSVYLDTTFCDPRFYQIPSREECLSGVLELVRSWITRSPYHVVWLNCKAAYGYEYLFTNLSEELGVQVHVNKLDMFRNMPEILHHLTTDRNTQIHACRHPKAEE

SEQ ID NO: 311896 - DNA, 1038 bp, Artificial Sequence
  derived and/or modified sequence
atggacaaggtggtggagatcctgaagcccctgtgcagaagcagccagagcaccgagcccaagtacaagcccctgggcaagctgaagagagccagaaccgtgcacagagacagcgaggaggaggacgactacctgttcgacgaccccctgcccatccccctgagacacaaggtgccctaccccgagaccttccaccccgaggtgttcagcatgaccgccgtgagcgagaagcagcccgagaagctgagacagacccccggctgctgcagagccgagtgcatgcagagcagcagattcaccaacttcgtggactgcgaggagagcaacagcgagagcgaggaggaggtgggcatccccgccagcctgcagggcgacctgggcagcgtgctgcacctgcagaaggccgacggcgacgtgccccagtgggaggtgttcttcaagagaaacgacgagatcaccgacgagagcctggagaacttccccagcagcaccgtggccggcggcagccagagccccaagctgttcagcgacagcgacggcgagagcacccacatcagcagccagaacagcagccagagcacccacatcaccgagcagggcagccagggctgggacagccagagcgacaccgtgctgctgagcagccaggagagaaacagcggcgacatcaccagcctggacaaggccgactacagacccaccatcaaggagaacatccccgccagcctgatggagcagaacgtgatctgccccaaggacacctacagcgacctgaagagcagagacaaggacgtgaccatcgtgcccagcaccggcgagcccaccaccctgagcagcgagacccacatccccgaggagaagagcctgctgaacctgagcaccaacgccgacagccagagcagcagcgacttcgaggtgcccagcacccccgaggccgagctgcccaagagagagcacctgcagtacctgtacgagaagctggccaccggcgagagcatcgccgtgaagaagagaaagtgcagcctgctggacacctag

SEQ ID NO: 311897 - DNA, 1719 bp, Artificial Sequence
  derived and/or modified sequence
atgttcctgttccagggcaacaacggcaccgtgctgtacaccggcgacttcagactggcccagggcgaggccgccagaatggagctgctgcacagcggcggcagagtgaaggacatccagagcgtgtacctggacaccaccttctgcgaccccagattctaccagatccccagcagagaggagtgcctgagcggcgtgctggagctggtgagaagctggatcaccagaagcccctaccacgtggtgtggctgaactgcaaggccgcctacggctacgagtacctgttcaccaacctgagcgaggagctgggcgtgcaggtgcacgtgaacaagctggacatgttcagaaacatgcccgagatcctgcaccacctgaccaccgacagaaacacccagatccacgcctgcagacaccccaaggccgaggagtacttccagtggagcaagctgccctgcggcatcaccagcagaaacagaatccccctgcacatcatcagcatcaagcccagcaccatgtggttcggcgagagaagcagaaagaccaacgtgatcgtgagaaccggcgagagcagctacagagcctgcttcagcttccacagcagctacagcgagatcaaggacttcctgagctacctgtgccccgtgaacgcctaccccaacgtgatccccgtgggcaccaccatggacaaggtggtggagatcctgaagcccctgtgcagaagcagccagagcaccgagcccaagtacaagcccctgggcaagctgaagagagccagaaccgtgcacagagacagcgaggaggaggacgactacctgttcgacgaccccctgcccatccccctgagacacaaggtgccctaccccgagaccttccaccccgaggtgttcagcatgaccgccgtgagcgagaagcagcccgagaagctgagacagacccccggctgctgcagagccgagtgcatgcagagcagcagattcaccaacttcgtggactgcgaggagagcaacagcgagagcgaggaggaggtgggcatccccgccagcctgcagggcgacctgggcagcgtgctgcacctgcagaaggccgacggcgacgtgccccagtgggaggtgttcttcaagagaaacgacgagatcaccgacgagagcctggagaacttccccagcagcaccgtggccggcggcagccagagccccaagctgttcagcgacagcgacggcgagagcacccacatcagcagccagaacagcagccagagcacccacatcaccgagcagggcagccagggctgggacagccagagcgacaccgtgctgctgagcagccaggagagaaacagcggcgacatcaccagcctggacaaggccgactacagacccaccatcaaggagaacatccccgccagcctgatggagcagaacgtgatctgccccaaggacacctacagcgacctgaagagcagagacaaggacgtgaccatcgtgcccagcaccggcgagcccaccaccctgagcagcgagacccacatccccgaggagaagagcctgctgaacctgagcaccaacgccgacagccagagcagcagcgacttcgaggtgcccagcacccccgaggccgagctgcccaagagagagcacctgcagtacctgtacgagaagctggccaccggcgagagcatcgccgtgaagaagagaaagtgcagcctgctggacacctag

SEQ ID NO: 311898 - DNA, 1933 bp, Artificial Sequence
  derived and/or modified sequence
aggagtaaataagtgcaattcttttgttgttcttttttggagatgaggtgtctctgtgttgcccaggctggcctcaaatccctgggcttaagcaatcctcctgcctcagccttgagtagctgggatcacagacatgtaccactgtgcccagctaagaaatgcaattctgagaccttgggtttttgtgtatattatagttaatgcccagctaaattctaacttatttgaaaagggatttgttaaacataagcaactgaccttcttggacaaggaaagcaatatattaaaaaagagaaaaaaaaaagaatctttgagtcccattggtgattctcagctcttactgtggatcagaatcacctggggaatatttaaatgtactgatttctaggcccactagtactcagtgttcaggagatctttgggagtgaggcccaggcattggatatttttttcccaagaggtccctggtgatccccacgtgcagccagcattgagaaccacagccataagagagttctgcttctctttccccagcctccctttatctcccctaacaacctgtttcatcgtagagattgttgatccatgtgattttcctttttctagattaaagatttcttgagctacctctgtcctgtgaacgcatatccaaatgtcattccagttggcacaactatggataaagttgtcgaaatcttaaagcctttatgccggtcttcccaaagtacggagccaaagtataaaccactgggaaaactgaagagagctagaacagttcaccgagactcagaggaggaagatgactatctctttgatgatcctctgccaatacctttaaggcacaaagttccatacccggaaacttttcaccctgaggtattttcaatgactgcagtatcagaaaagcagcctgaaaaactgagacaaaccccaggatgctgcagagcagagtgtatgcagagctctcgtttcacaaactttgtagattgtgaagaatccaacagtgaaagtgaagaagaagtaggaatcccagcttcactgcaaggagatctgggctctgtacttcacctgcaaaaggctgatggggatgtaccccagtgggaagtattctttaaaagaaatgatgaaatcacagatgagagtttggaaaacttcccttcctccacagtggcagggggatctcagtcaccaaagcttttcagtgactctgatggagaatcaactcacatctcctcccagaattcttcccagtcaacacacataacagaacaaggaagtcaaggctgggacagccaatctgatactgttttgttatcttcccaagagagaaacagtggggatattacttccttggacaaagctgactacagaccaacaatcaaagagaatattcctgcctctctcatggaacaaaatgtaatttgcccaaaggatacttactctgatttgaaaagcagagataaagatgtgacaatagttcctagtactggagaaccaactactctaagcagtgagacacatatacccgaggaaaaaagtttgctaaatcttagcacaaatgcagattcccagagctcttctgattttgaagttccctcaactccagaagctgagttacctaaacgagagcatttacaatatttatatgagaagctggcaactggtgagagtatagcagtcaaaaaaagaaaatgctcactcttagatacctaagaattcaaagcgtttcaacctagagcaaccactaaaaaacctgcacagagatgacagtcaatattacaatagagaaaatacagtacttaaaaatgttcaaataacctggttgggtgtggtggctcacacttgtaatcccagcactttgaggtgggcaatggcttgagcccaggagttcgacaccagcctggccaacacagtgaaatgtgtctctacttac

SEQ ID NO: 311899 - DNA, 1038 bp, Artificial Sequence
  derived and/or modified sequence
atggacaaagtggtcgagatactgaagccgctgtgcagatcctcacaatccactgagccgaaatataagcccctcggcaaacttaagcgagcgaggacagttcatcgggactcagaggaggaagacgactatctttttgacgaccccctaccgattcccctaagacacaaggtgccataccccgagacgttccacccagaggtgttctctatgacagccgtgagtgaaaaacaacctgagaaactccggcagaccccggggtgttgtcgcgcagaatgcatgcagtcaagtcgctttacaaattttgtggactgtgaggagtccaattctgaatcagaagaggaggtggggattcctgcaagcctgcaaggtgatctcggatccgttctccacctgcaaaaagccgacggtgatgttccccagtgggaagttttctttaagcggaatgacgagatcaccgacgagtctctggaaaatttcccttcctccacagtggcaggaggcagtcagagtccaaaactcttctccgattcagacggggagtctacccatataagctctcagaactcgtcacagtctacacacataaccgaacaaggaagccagggctgggacagccagtctgatacagtgctcctttctagtcaggagcggaattcaggagacatcacttccttagacaaagctgactaccgccctactataaaagagaatatccccgcatcgctcatggaacagaatgtcatctgccccaaggatacttactcagatctcaaaagcagagataaagacgtcactattgttccatcgactggcgaacctaccacactgagtagcgagacccacattcctgaagagaaaagcctcctcaacctgtctacgaacgccgatagccagagcagtagcgattttgaggttcccagtactccagaagccgagctacctaagagggaacatctgcagtatctctatgagaagctggcaacaggggagtcgattgcagtaaagaaacgaaagtgctctctgctcgatacatag

SEQ ID NO: 311900 - DNA, 1719 bp, Artificial Sequence
  derived and/or modified sequence
atgtttctcttccagggaaataatggaaccgtgttgtatacaggagactttcgcctggcccagggcgaggctgccaggatggaattactgcattctgggggccgcgttaaggatatccaaagtgtctatttggacaccaccttctgcgacccacgcttctaccagatcccaagcagagaagagtgtctgtccggggtgctagagctggtgcgctcatggatcacaaggtcaccttaccacgtggtttggcttaactgtaaggccgcctatggatacgaatatctgttcacgaatctgtcagaagagctgggggtgcaggtccacgtcaataaactggacatgttcagaaacatgcctgagatccttcaccaccttaccacagaccgaaatactcagattcatgcctgccggcaccccaaggccgaggagtattttcaatggtctaagctgccctgtggcatcacatccaggaatcggatcccattgcatattatttctatcaagccctctaccatgtggtttggagaacgctcaagaaagaccaatgtgatcgtaagaacaggcgagagttcctaccgtgcatgcttttctttccattctagttatagtgaaattaaggacttcctgagctatctctgtcctgtgaatgcatacccaaatgtgatcccagtgggaaccacaatggataaagtggtcgaaatcctgaaacctctgtgtcgatcctctcagagcaccgaaccaaagtataagcccctggggaagttaaaaagggccaggacggtccacagggattctgaggaggaggacgattacctctttgatgaccccttgccgattcctctacggcacaaggtaccttatcccgagaccttccatccagaagttttttccatgacagcagtgtccgagaagcagccggaaaaattgcgtcaaaccccaggatgttgtcgagccgaatgtatgcagtccagtagattcactaatttcgtcgactgcgaggaatccaattcagaatccgaggaagaggtaggcatcccagcttccctacagggggacttaggctccgtgttgcatttacaaaaagcagacggcgacgttccgcaatgggaagtattcttcaaacgcaatgatgaaatcaccgacgaaagtctagagaatttccctagctcaaccgtagcagggggttctcagtcgcccaagctgttctctgacagcgatggcgagagtacacatattagctcccaaaattcaagccagagtacccatatcacagagcaaggttctcagggctgggatagccagagcgatactgtgttacttagttcacaggagcggaatagtggggacatcaccagtctggataaggccgattatagacccactatcaaggagaacatccccgctagtttgatggaacaaaatgttatctgcccaaaggatacatatagtgatctcaagagccgggacaaggatgttacgatcgtgccgtccacaggtgaacctacaaccctgtctagcgaaacacacatcccagaggagaagagtctgctcaacctgtccactaatgcagactcgcaatcctcctctgacttcgaggttcccagcacacctgaggccgaactgcctaaacgcgagcacctgcagtatctgtatgaaaaacttgccaccggtgaaagtatagccgtcaagaaaaggaagtgcagcctgctggatacctag

SEQ ID NO: 311901 - DNA, 1719 bp, Artificial Sequence
  derived and/or modified sequence
atgttcctgtttcaaggtaataatggcactgttttgtacaccggagattttaggctggcgcagggtgaggccgcccggatggagctgttgcatagcggagggcgtgtgaaggacatccagagtgtttacctggatacaaccttttgtgatccaaggttttaccagatcccttcaagggaagagtgtctgtcaggggtcctggagcttgtgcggtcatggatcacaaggtccccataccatgtggtgtggctgaactgtaaggccgcatacgggtatgaatatttgtttactaatctctccgaggagctgggtgtgcaggtgcatgttaacaagcttgacatgttcaggaacatgcccgagatcctgcaccacctcacaaccgaccggaacacacagatacacgcctgcagacacccaaaggccgaagagtactttcagtggagtaagctgccatgtggcatcactagtcgaaaccgaattcctctccacatcatcagtataaaacctagtacaatgtggttcggcgagcggtccagaaaaacgaatgtgatagttagaacaggggagtcctcctacagagcctgtttctccttccattcctcctactctgagatcaaagattttttgtcatacctttgcccagtgaatgcctacccaaacgtgattcctgtgggcacaacgatggacaaggtggtggaaattcttaaaccactatgccgttcctctcagtctaccgaacccaagtacaagcccttgggcaagctcaaaagggctagaactgtccatagagactctgaggaagaggatgactacctgttcgatgacccccttcccatccccttacggcataaggtcccctacccggagacttttcaccctgaggttttttcaatgacagcagtcagcgagaagcaacccgagaagcttcgacagacacccgggtgctgtagggccgagtgcatgcaaagcagcaggtttaccaacttcgtggactgtgaagagagcaattcagaatctgaagaggaggtagggataccagcatctctgcaaggagacctgggtagcgtgcttcatttgcaaaaggccgatggtgatgtaccacagtgggaagtattcttcaagcggaacgacgaaattacggatgaaagtttggaaaattttcccagcagtacagtggcgggcgggagtcagagtcccaagcttttttctgatagtgatggagaatccacacacatttccagtcagaacagctctcagtcaacccatataacagagcagggtagccagggctgggattctcagagtgataccgttctcctaagttctcaagaacggaacagcggggatatcacatccctcgacaaggccgactatagacccactattaaagagaatattcctgctagcctgatggagcagaatgtgatctgccccaaggacacttacagtgatctgaagtccagggacaaggatgtgactattgtccctagcactggcgagccaaccacactcagctcagagacacacattccagaggaaaagagcctgctgaacttgtccacaaacgccgacagccagtccagctccgacttcgaagttcctagtacgcccgaagccgaacttccaaaacgcgaacacttgcaatatttgtatgaaaaattagccaccggagaaagcatcgctgtgaaaaagcgcaagtgctcccttctggatacatag

SEQ ID NO: 311902 - DNA, 1719 bp, Artificial Sequence
  derived and/or modified sequence
atgtttctttttcaaggaaacaatggaactgtactatacaccggcgatttcagattggctcaaggcgaggcggcccgcatggaactgctgcattccggcggtcgtgtaaaagatattcagtctgtctatctggacacaaccttctgcgatccacgcttttatcagatccctagcagggaggagtgtctttccggggtgcttgagctggttcgcagctggatcacgcggtcaccatatcacgtggtctggctgaattgtaaggccgcgtatggatatgagtacctttttaccaacctgagcgaggaactgggcgtgcaggttcatgttaacaaactggatatgtttaggaacatgcccgagatcctgcaccacctcaccacagaccgcaacacccagattcacgcttgcaggcaccccaaagcggaggagtattttcagtggtccaagctgccttgcggcattacatccagaaaccgaattccgctccatatcatctctatcaaaccatcgacaatgtggtttggagagcggagtagaaaaactaacgtaattgtacgaacgggggaatcaagttaccgagcatgtttttcatttcatagctcatacagcgagatcaaggattttctgtcttatctgtgccccgtaaatgcctaccctaatgttattcctgttggcacaacaatggacaaagtggttgagatcttgaaaccactctgtcggagtagtcaatcaacagagcctaagtacaagccactgggaaaattaaagcgagcacgtaccgtgcacagggactctgaagaagaggatgattatctttttgacgatcccctgcctatcccactccggcacaaagtgccctacccagaaacgtttcacccggaagtgttcagtatgaccgcggtaagtgaaaagcaaccggagaagctccggcagacccctgggtgctgcagggcggagtgcatgcagtctagtcgctttacaaattttgtcgattgcgaggagagtaattcggaaagcgaagaggaagttggaattccagcctctcttcagggagatcttggatccgtgctccacctccagaaagcagatggcgatgttccccagtgggaagtgttttttaagcggaacgacgaaataaccgatgaatctctggaaaatttccccagcagcacagtcgccggtgggagtcagagtcctaagctgtttagcgacagcgacggcgagtccactcacattagcagtcaaaatagcagccagtccactcacattacagagcaggggtctcagggctgggattcgcagagtgatactgtgttgctgtcatcacaggaacggaattccggggacattacctctctggacaaggctgactaccgtccaacgataaaggagaacatacccgcaagcttaatggaacaaaacgttatctgccctaaagatacctattcagacttaaagagccgcgacaaggatgtgacaatagtaccctcaacaggtgagcctaccacgctctcctcagagacccatattcccgaggaaaagagcctgttaaacctcagtaccaatgccgattcgcagtctagctctgacttcgaagtgccctcaacccctgaggcagaactgcccaagagggagcatctgcaatatctctatgaaaaactggctactggcgaaagtatcgccgtgaaaaaacggaagtgcagccttctggacacgtag

SEQ ID NO: 311903 - DNA, 1719 bp, Artificial Sequence
  derived and/or modified sequence
atgttcctgttccagggtaacaatggcaccgttctctacaccggggatttcagactcgcgcagggcgaggccgcaaggatggaattgctgcacagcggaggccgcgtgaaagacattcagtcagtttatctggacactaccttctgtgacccccgattttaccagatccctagccgtgaagaatgtctgtcaggcgtgctggagctggtgcgttcttggataacacgaagtccctaccatgtggtctggctgaactgcaaggctgcctacgggtacgaatacctgttcaccaatctgtcagaagagctcggagtacaggttcatgttaataaactagacatgttccgcaacatgcctgaaattttacatcacttaacaactgacagaaacacacaaatccacgcgtgtagacatcccaaagccgaagaatatttccagtggtccaagctcccctgcggtatcacatctaggaaccgtattcctctccacattatcagcatcaaaccctctacaatgtggttcggggagcgatcccggaagaccaacgtgatcgtgaggactggtgagtctagttatagggcttgtttctcctttcactcgagctattctgagatcaaggatttcctctcatatctttgtcctgtaaacgcatatccaaacgtgattccagttggtactaccatggataaggtggtggagatcctgaaacccctttgtcgatcaagtcagtctacagaaccaaagtataaacctctcggaaagctgaaacgcgcccgaactgtgcatagagattccgaggaggaagacgattacttgttcgacgatccacttcccatccctttgcggcacaaagtcccctatcccgagacctttcatcctgaagtattctctatgactgcagttagcgaaaaacaacccgaaaagctacggcagacaccaggatgctgcagggccgagtgcatgcagagctcccgctttaccaacttcgtagactgtgaagaaagcaatagtgagagcgaagaagaagtaggaatccccgcaagcctgcagggggacttgggatctgttctgcatctgcagaaagctgatggggatgtgcctcagtgggaagtttttttcaaacgaaacgacgagattacagatgaaagtctagagaacttcccatcaagtacagtggccggcgggagtcagtcccctaagttgttttccgatagtgatggagagtctacacacatatcaagtcagaacagcagccagagtacacatattaccgagcagggatctcagggatgggactcccagagcgacacggtgctactgtcttctcaggagaggaactctggcgatataacctccctggataaggccgattacaggcctacgataaaagagaatatccctgcttcactgatggagcagaacgttatttgtcccaaagatacttactcagacctaaaatcgagagataaagacgttaccatcgtacctagcactggggaaccgaccacgttgtcatccgagacacacatccctgaggagaagagcctgctgaacctttccactaacgcagactcccagagctcatcagacttcgaagtgccttcgacccccgaggcagagctgcctaagagagaacatctccaatatctttacgagaagctggcaacaggagaatctatagcggtgaagaagcggaagtgtagcttacttgacacctag

SEQ ID NO: 311904 - DNA, 1719 bp, Artificial Sequence
  derived and/or modified sequence
atgttcctgtttcagggtaataacggcaccgtgctgtatactggagatttccggctagcccaaggggaagccgctagaatggaactactgcactcaggagggagggtgaaggacattcagtcagtgtacctggacaccaccttttgtgatcctcgattttaccaaatcccgtcccgggaagagtgcctgtcaggggtgctagaactagttaggtcatggatcacccgctctccgtaccatgttgtgtggttaaactgcaaagccgcatatgggtacgagtacctgttcacgaacttaagcgaagaactgggagtgcaggtccacgtgaataagcttgatatgtttcgtaatatgccagagatcttacaccaccttacgacagataggaacacacagatccatgcatgccgccaccctaaggcagaagagtatttccaatggagtaagctgccgtgtggcatcacatcccggaacaggattcctctccacattatcagtataaaaccctcaactatgtggtttggcgagagaagccggaaaaccaatgtcattgtgcgaactggcgagtcaagctaccgggcctgtttcagctttcacagcagctatagcgagattaaagatttcctttcctacttgtgtccagtgaatgcttaccctaacgtcattccagtcggcaccactatggacaaagtggtagaaatcctcaagcccttatgccgcagttcgcagagcactgagccgaagtacaagcccctcggaaaactgaagcgcgcccggacggtccatcgggactccgaggaggaggatgattatctgtttgacgaccctctgccgattcctctcagacacaaggttccataccccgagaccttccacccagaagtgttttccatgacagctgtttcggaaaaacagcctgaaaagcttcgacagacacccgggtgttgcagagcagaatgcatgcagagtagccgtttcaccaatttcgtagattgtgaggagagcaacagcgaaagcgaggaagaagtaggaattcccgcgtctctccagggcgacctgggatcagtccttcacctccagaaagctgatggagatgttccacagtgggaggtgttcttcaagaggaatgacgaaatcacagacgagtccctcgaaaattttccatcctctacagtggccggcggatcgcaaagccctaagctattcagtgattctgatggtgagtcaacacacatctcctctcaaaactcatctcagagcacacacatcacggagcaggggagccaaggatgggactcacaatcagataccgtgctcttaagttctcaagagcggaactctggtgatatcacgtccttggacaaagcagattatagacccacgatcaaagaaaatattccagcatctttaatggaacagaacgtgatctgtccaaaggatacatattctgacctcaagtccagggacaaggatgtaaccatcgtgcccagcactggcgagcccaccaccctgagttctgagacacacataccggaggagaagtcccttctgaatctttcgacgaacgctgactcccagtcctccagtgattttgaggttccctccaccccagaggcagaactgcccaaacgtgaacacctgcagtacttgtacgagaaactggctactggggaaagcatcgcagtcaaaaaacggaaatgttccctgctcgatacatag

SEQ ID NO: 311905 - DNA, 1038 bp, Artificial Sequence
  derived and/or modified sequence
atggacaaggtggtggagatcctgaagcccctgtgccgcagcagccagagcacagagcccaagtacaagcccctgggcaagctgaagagggccaggacagtgcaccgggacagcgaggaggaggatgactacctgtttgatgaccccctgcccatccccctgcggcacaaggtgccctacccagagaccttccaccctgaggtgttctccatgacagctgtgtctgagaagcagcctgagaagctgcggcagaccccaggctgctgcagagctgagtgcatgcagagcagccgcttcaccaactttgtggactgtgaggagagcaacagcgagagcgaggaggaggtgggcatcccagccagcctgcagggcgacctgggctctgtgctgcacctgcagaaggcagatggagatgtgccccagtgggaggtgttcttcaagagaaatgatgagatcacagatgagagcctggagaacttccccagcagcacagtggccggcggcagccagagccccaagctgttcagtgacagtgatggagagagcacccacatcagcagccagaacagcagccagagcacccacatcacagagcagggcagccagggctgggacagccagagcgacacagtgctgctgagcagccaggagaggaacagcggggacatcaccagcctggacaaggctgactaccggcccaccatcaaggagaacatcccagccagcctgatggagcagaatgtcatctgccccaaggacacctacagcgacctgaagagccgggacaaggatgtgaccatcgtgcccagcactggagagcccaccaccctgagcagcgagacccacatccctgaggagaagagcctgctgaacctgagcaccaatgctgacagccagagcagcagtgactttgaggtgcccagcaccccagaggccgagctgcccaagcgggagcacctgcagtacctgtatgagaagctggccactggagagagcattgctgtgaagaagaggaagtgcagcctgctggacacctag

SEQ ID NO: 311906 - DNA, 1719 bp, Artificial Sequence
  derived and/or modified sequence
atgttcctgttccagggcaacaacggcaccgtgctgtacaccggggacttccggctggcccagggcgaggccgccaggatggagctgctgcacagcggcggccgggtgaaggacatccagagcgtgtacctggacaccaccttctgtgacccccgcttctaccagatccccagccgggaggagtgcctgagcggcgtgctggagctggtgcgctcctggatcaccaggagcccctaccacgtggtgtggctgaactgcaaggccgcctacggctatgagtacctgttcaccaacctgtctgaggagctgggcgtgcaggtgcacgtgaacaagctggacatgttcaggaacatgcctgagatcctgcaccacctgaccacagacaggaacacccagatccacgcctgccgccaccccaaggccgaggagtacttccagtggagcaagctgccctgtggcatcaccagcaggaaccgcatccccctgcacatcatcagcatcaagcccagcaccatgtggtttggagagaggagcaggaagaccaacgtcatcgtgaggactggagagagcagctaccgggcctgcttctccttccacagcagctacagcgagatcaaggacttcctgagctacctgtgccctgtgaatgcctaccccaacgtcatccctgtgggcaccaccatggacaaggtggtggagatcctgaagcccctgtgccgcagcagccagagcacagagcccaagtacaagcccctgggcaagctgaagagggccaggacagtgcaccgggacagcgaggaggaggatgactacctgtttgatgaccccctgcccatccccctgcggcacaaggtgccctacccagagaccttccaccctgaggtgttctccatgacagctgtgtctgagaagcagcctgagaagctgcggcagaccccaggctgctgcagagctgagtgcatgcagagcagccgcttcaccaactttgtggactgtgaggagagcaacagcgagagcgaggaggaggtgggcatcccagccagcctgcagggcgacctgggctctgtgctgcacctgcagaaggcagatggagatgtgccccagtgggaggtgttcttcaagagaaatgatgagatcacagatgagagcctggagaacttccccagcagcacagtggccggcggcagccagagccccaagctgttcagtgacagtgatggagagagcacccacatcagcagccagaacagcagccagagcacccacatcacagagcagggcagccagggctgggacagccagagcgacacagtgctgctgagcagccaggagagaaattctggggacatcaccagcctggacaaggctgactaccggcccaccatcaaggagaacatcccagccagcctgatggagcagaatgtcatctgccccaaggacacctacagcgacctgaagagccgggacaaggatgtgaccatcgtgcccagcactggagagcccaccaccctgagcagcgagacccacatccctgaggagaagagcctgctgaacctgagcaccaatgctgacagccagagcagcagtgactttgaggtgcccagcaccccagaggccgagctgcccaagcgggagcacctgcagtacctgtatgagaagctggccaccggggagagcattgctgtgaagaagaggaagtgcagcctgctggacacctag

SEQ ID NO: 311907 - DNA, 1038 bp, Artificial Sequence
  derived and/or modified sequence
atggacaaggtggtggagatcctgaagcccctgtgccggagcagccaaagtacggagcctaagtacaagccactcggtaaactcaagagggcccgcaccgtccatagagactccgaagaggaggatgactatcttttcgacgatcccctgccaatccctttgcgccataaggtgccttacccagaaactttccaccccgaagtgttctcaatgactgccgtctctgaaaaacagcctgagaagctacggcagaccccagggtgctgtagggctgagtgcatgcagagctcaagattcacgaatttcgtcgattgcgaggagtccaatagcgagagcgaggaggaggttgggatccccgccagtctccaaggcgacttgggaagtgttctccatcttcagaaagcagacggcgatgtgccacagtgggaagttttttttaaaagaaacgacgaaatcacggatgagtcactggaaaacttcccctccagcactgtcgcaggaggctctcagtctccaaaattatttagcgactcagatggcgagtcgacgcatatttcctcccagaactctagccagtcaacacacatcacggaacagggctctcaaggttgggattctcagtcagataccgtgctgctaagcagccaggagcgtaattctggagatataacaagcctcgacaaggccgactatagacccacaatcaaggagaacataccagcaagccttatggagcaaaacgtaatctgccctaaagacacgtacagcgatctcaagagccgagacaaggatgttaccatagtgccctctacgggcgaacctacaactctttcctccgaaacccacatccccgaagagaagagcttgctaaatctgtcaaccaacgctgattcacagtcatctagcgatttcgaagttccaagcacacccgaggccgaacttcctaaaagagaacatctccagtacctatatgagaaactagcgaccggcgagtccattgccgtcaaaaagcgcaaatgtagcctgctcgacacctag

SEQ ID NO: 311908 - DNA, 1719 bp, Artificial Sequence
  derived and/or modified sequence
atgttcctgttccagggcaacaacggcaccgtgctgtacaccggcgactttcgtctggcacaaggcgaagcagcaagaatggaacttctgcattcaggagggcgggtgaaggatattcagtctgtttatctggatacgacgttttgcgatccccgtttttaccagatacccagtcgcgaggagtgcctcagtggcgtactagagcttgtgagaagctggattacaaggtcgccctatcacgtggtgtggctgaattgtaaggcggcttacggctacgaatacttgttcactaaccttagcgaagaacttggcgtgcaggttcacgtgaacaaacttgacatgttcaggaatatgcccgaaattctgcatcatctgacaacggataggaacacccagattcacgcctgcagacaccccaaggctgaggaatacttccaatggtccaagttgccatgtggtattaccagccgcaatcggatccctctccatatcattagcatcaaaccatcaaccatgtggttcggcgagaggagtcgcaaaactaacgtcatcgtacggaccggggagagttcgtaccgcgcatgtttttctttccattcctcctactccgaaatcaaagactttctgtcctatctgtgtcccgtaaatgcctatcctaacgtgataccagtggggactaccatggataaagtcgtggagatattgaagcccttgtgtcggtcttcccaaagcaccgagccaaaatacaaacctctgggaaagctgaaacgcgcccgcactgtgcaccgcgattctgaggaagaagatgactatcttttcgatgatcccctcccaatccctctacggcacaaggtcccttacccagagacatttcatcccgaggtgttcagcatgaccgcagtctcagagaagcagccggagaagttgaggcaaaccccggggtgttgtagggccgaatgcatgcagagctctagattcacaaacttcgttgactgcgaagaaagtaatagtgagtccgaggaagaagtgggaatcccggcctcgctgcagggagatctaggaagcgttctccatttacaaaaggctgatggcgatgtgccccaatgggaggtgttctttaagagaaacgacgagataaccgacgagtctcttgagaacttcccgtccagtaccgtcgccggcggaagtcagagtcccaagctgttctcagacagcgacggagaatctacacatataagctcgcaaaactcttctcagtccacccacattacagagcaaggctcacaaggctgggacagccagtccgacactgtcctgctctcttctcaggaaaggaactccggagatataacatccttagacaaggccgattacaggcccaccattaaagaaaacatcccggccagcctgatggaacaaaatgtcatttgtccaaaagatacctactcagacctgaagagcagggataaggacgtcactatcgtgccatccacaggagagcccacaaccctgagctcggaaacgcatattccggaggaaaagtcacttctcaacctaagtacgaacgcggacagtcagtcaagctctgacttcgaagtccctagcacccctgaagcggagcttcccaaacgcgagcacctacaatatctctacgaaaaactagcaacaggcgagtcgattgcagtaaaaaagcgcaagtgctccctgctggacacatag

SEQ ID NO: 311909 - DNA, 1719 bp, Artificial Sequence
  derived and/or modified sequence
atgttcctgttccagggcaacaacggcaccgtgctgtacaccggcgattttcggttggcacagggcgaggccgcaaggatggagctgctgcactccggcggacgcgtgaaagatattcaaagcgtctacctggacaccacattttgcgaccctcggttttaccagattccatcgagggaagaatgtctatctggggtattagagctggtacgctcctggatcacccgtagcccgtaccacgtggtttggctgaattgcaaggccgcctacggttacgaatatctctttaccaacctttctgaagagctgggtgttcaggtccatgtcaacaagctggatatgtttagaaatatgcccgagatcctgcaccaccttaccactgacagaaatacccagattcacgcatgccgccatcctaaggctgaggagtacttccagtggtccaagctgccatgcggaattacctcacggaatcgaattcctttgcacataatctccattaaacctagcactatgtggtttggggaaaggagccgaaagactaatgttattgtgcgcaccggcgaatcttcttatcgtgcctgcttcagttttcacagctcttattccgagataaaggacttcctgtcttacctgtgcccggtgaacgcttatcccaacgttatacctgttggaacaactatggataaagtggtggagatcctgaagccattgtgcaggagttcacagtcaacggagcccaagtacaagcccctgggtaagctgaagcgcgctcggaccgttcatcgtgactccgaggaggaggacgactatctgtttgatgatcctttgccaattccgcttcggcataaggtgccttaccccgagaccttccaccccgaagtcttttcgatgactgccgtctcggaaaaacagccagaaaagctaaggcagactccagggtgttgtcgcgcagaatgtatgcagtcttcccgctttacaaacttcgtggactgcgaggaaagcaactccgagtcggaggaggaagtcggcatacccgccagcttgcagggcgacctcgggtccgtgctgcacctccagaaagctgatggagatgtgcctcagtgggaagtctttttcaaacggaacgacgagatcaccgatgagagcctcgagaactttccatcctcgaccgtggcgggaggctcgcaaagcccaaagctgtttagtgacagtgacggagagtcaacacacattagctcacaaaacagctcccagtcaacacacattactgaacagggcagtcaagggtgggactcccagtctgatactgtcctgctctcctcccaggaacggaattccggggatattacaagcctcgataaggctgattacaggcctactatcaaggaaaacataccagccagcctgatggagcagaacgtgatttgtcccaaggatacctacagtgatctcaaaagcagggataaggatgtgaccattgtgccatctaccggagaacctactacactgtcctccgagacccacatcccagaggagaagagcctgctgaacttgtcaacaaatgccgactcccagtcctcttctgatttcgaggtgccctctacccctgaggccgagttaccaaagagagagcatctgcagtacctatatgagaagctggctactggtgaatctattgctgttaaaaagcgtaagtgctctctcctggacacctag

SEQ ID NO: 311910 - DNA, 1719 bp, Artificial Sequence
  derived and/or modified sequence
atgttcctgttccagggcaacaacggcaccgtgctgtacaccggcgattttagactcgcacaaggagaggccgcgaggatggaacttctgcacagcggaggccgcgtgaaggacatacagtccgtttacctagataccacgttctgtgatcccaggttttatcaaataccatctcgagaggagtgtctctccggagtgctggagctagtgcgtagttggattaccaggtcaccttatcatgtagtgtggttaaactgtaaggcagcatatggatatgagtatctgtttacaaatttgagtgaggagttgggggtccaggtccacgtgaacaaactggacatgtttcgtaacatgcctgaaattctccaccacctgacaactgacaggaacactcagattcatgcctgccgacatcccaaggcagaggagtatttccaatggagcaagctgccatgtgggatcacatccaggaacaggattcccctgcatatcatttcaatcaagcccagtaccatgtggtttggcgagcgatctagaaagacaaatgtgatcgtgaggacaggcgaaagcagctacagggcgtgcttcagctttcatagcagttacagcgagatcaaggacttcctgtcttacttatgtcctgtcaatgcttatcccaatgtcatcccagtcggcacaacaatggataaggtggtggagatcttaaaacccttgtgtaggagttcccagagtactgaacccaagtacaagcctctgggcaagcttaaaagggcccgaactgtccaccgcgattccgaagaggaagatgactaccttttcgatgacccgcttcctatcccgcttagacacaaagtgccttaccccgaaacattccatcctgaggttttttccatgacagccgtctctgagaaacaacctgagaagctgaggcagacgccaggctgctgccgcgcagaatgcatgcaatcttctaggttcacgaatttcgttgactgtgaggaatccaatagcgagtcggaggaggaagtgggcatccctgcgagtctacagggtgacctgggctccgttctgcatcttcagaaagccgacggcgatgtgccccagtgggaagtattcttcaagcgcaacgatgagatcacagatgaaagtctagagaactttcctagtagtacagtggccggaggctcccagtctcccaaactgttttcagacagtgacggggagtccacacacatctctagtcagaatagttcacagagcacccacatcaccgaacaagggtcccaagggtgggattctcaatccgatacagtcctattgtcctctcaggagaggaacagcggagatatcacatccctggataaagcggactacagaccgacgatcaaggaaaatatcccagcttcactgatggaacagaacgtgatctgtcccaaagacacatacagcgacctaaaatcaagggataaggacgtgaccattgtcccttccaccggggagcctacaaccctgtcgagtgaaacgcatatcccagaagaaaagagtctcctgaatctatcgacgaatgccgactcacagtcgagctcggacttcgaagttccttccactccagaagccgagctgcccaagcgcgagcacttgcagtatctgtacgagaagctggcaacgggagagtctatagccgtcaaaaagcggaaatgctctctgctggacacttag

SEQ ID NO: 311911 - DNA, 1719 bp, Artificial Sequence
  derived and/or modified sequence
atgttcctgttccagggcaacaacggcaccgtgctgtacaccggcgactttaggcttgcacagggcgaagccgccaggatggagctgttgcactcggggggccgggtgaaagatatacagtctgtgtatcttgatacgacgttctgtgaccctaggttctaccagattccaagcagggaggagtgcctatccggtgtcttggaactcgtgcggtcctggattacacgtagcccttaccacgtagtttggttaaattgtaaggctgcctacggctacgagtacctttttactaacctgagtgaggaactgggagtgcaggtccacgtgaataagctggacatgttccgcaacatgccagaaatacttcatcacttgacgaccgataggaacacccagattcacgcctgccgccatcctaaggcagaggaatacttccaatggagcaaattgccatgcggaattacttcacgcaaccgcattcctctccacattatcagcatcaaacccagtacaatgtggtttggcgaaaggtcacggaaaaccaatgttattgtgcggacaggggaatccagctatagggcctgttttagcttccatagctcatactcagagatcaaggacttcctctcttacctttgtcccgtgaacgcttacccgaatgtcatccccgttggcacaactatggacaaagtggtggaaatcctgaagcctctgtgccgaagctcccaatcaaccgaaccaaaatacaaaccactggggaagctgaaacgagctaggactgtccacagggattccgaggaagaagatgattacctgttcgatgatcctctacccatccctcttaggcacaaagtgccctatccagagacatttcatcccgaggtgttctcaatgacagcagtgagcgagaagcagccagagaagctcaggcaaacaccgggatgctgtagagcagagtgtatgcagagctctcgctttactaattttgttgattgtgaagagagcaattcggagagcgaggaggaagtcggcattcccgcatccctccaaggtgacctcggttccgtgctgcatttgcagaaagctgatggcgacgttccgcagtgggaggtttttttcaagcgtaacgatgagattaccgacgagtccttagagaacttcccatcttccacagtcgccggtgggtcccaatcacctaagctgttcagcgactcggatggtgagtctacacacatctctagtcagaattcctcacagagtacacatatcaccgagcaaggcagccaagggtgggatagccagagtgatacagtgctcttgagctctcaggagcggaacagtggggatattacgagtcttgacaaggccgactaccggcctactataaaggaaaacatcccagcctctcttatggagcaaaatgtgatctgtcctaaagacacctactcggacttgaaaagccgggataaagacgtcacaattgtccccagtactggtgagcccacaacactatcttctgagactcacatacccgaggagaagagtctcttgaacctgagcaccaatgctgattcacagtcctctagtgatttcgaggtaccatccacaccggaagccgaattgccaaaaagagaacaccttcagtacctgtatgagaaactggcaacaggcgagtctatcgctgtcaagaagcgaaagtgttctctgctcgatacatag

SEQ ID NO: 311912 - DNA, 1719 bp, Artificial Sequence
  derived and/or modified sequence
atgttcctgttccagggcaacaacggcaccgtgctgtacaccggcgacttccggcttgcccaaggggaggctgctcggatggagctgcttcactctggaggacgtgtcaaggatatccagtctgtctacctggacacaaccttttgcgacccgagattctaccagatcccctctagggaagaatgtctctccggcgtcttagaactggtgcgatcatggatcactcgatcaccgtatcacgtggtctggctcaattgcaaggctgcctacggctacgaatacctgtttaccaatctctcagaggagctcggcgtccaagtccacgtaaataaacttgatatgttcaggaatatgcccgagatccttcaccatctgacaactgataggaatacgcagattcacgcgtgcagacatcccaaggccgaagaatattttcagtggagtaagctgccctgtggaataacctctagaaacagaatacccctgcacatcatctcgattaaacccagcacgatgtggttcggcgagcggagtagaaaaactaacgttattgtgaggactggcgagagtagctatcgtgcctgctttagcttccatagttcatactccgagatcaaggacttcctgtcatacctgtgccctgttaatgcctacccgaatgtcattcccgttggcacaactatggacaaggtggtcgagatcctcaaaccactgtgtagatcaagccagagtaccgagcccaaatacaagccactcggcaaacttaagagagcccggactgtccaccgggatagtgaggaagaggatgattacctgtttgatgaccccctgccaattccactacgccacaaagttccatatcctgagacctttcatccagaggtattttctatgaccgccgtgtccgaaaagcagccagaaaagttgcgacagacaccaggatgttgtcgtgccgaatgcatgcagtcatccagattcacaaattttgtggattgtgaggagagcaactcagagtccgaagaggaggtcgggatacccgctagtctgcagggggatcttggatcagtgcttcacctgcaaaaggccgacggtgatgtgcctcagtgggaagttttctttaagaggaacgacgagatcacagatgaatccttggaaaatttcccctccagcacagtagcagggggcagccagtctccgaagctattcagtgactcagacggagagagcacccatatcagtagtcagaacagctcccagagtacccacataaccgaacagggcagccaggggtgggattctcagagtgataccgtcctgctgagcagtcaggaacggaatagcggtgatatcacttctttagacaaagctgactataggccgacgattaaagaaaatataccagcctctctgatggaacagaatgttatctgcccgaaggacacctactccgacctgaagtcccgggataaagacgttaccattgtaccctcgaccggagaacctacaactctgagcagcgagactcacatcccagaggagaagtccctgctgaacctgtctaccaatgcggactctcagtcctctagcgactttgaggtgccttccactcctgaagccgagttgcccaaaagggagcacctccagtacctgtatgaaaagctcgccactggagagtccatagccgtgaagaagcggaaatgctcactgctggacacttag

SEQ ID NO: 311913 - DNA, 1038 bp, Artificial Sequence
  derived and/or modified sequence
atggataaggtggtggagattctcaaacccttatgtaggagtagtcaatccaccgaaccgaaatataagcccctcggcaagttaaagcgtgcacggaccgtccaccgtgattccgaggaagaagatgattacctgttcgatgatccactgcctataccgctacgccataaggtcccatatcctgagacttttcaccctgaggtgttttccatgacggccgtgtcagaaaagcagccagagaagctccgccaaacaccaggatgttgcagagctgagtgtatgcagtcatcccggtttacaaattttgtagattgcgaagaatccaactctgagtccgaggaagaggttggcattcctgcatctctacagggcgatcttggaagtgtactccatctgcagaaggctgatggcgatgttcctcaatgggaggtgtttttcaagagaaacgacgaaattactgacgagtcattggaaaacttcccatcaagcaccgtggccggtggcagtcagtccccaaagctttttagcgactcagatggggagagtacacatataagcagccagaacagttctcagtctacgcatatcacagagcaagggtcccagggctgggattctcaaagtgatacagtcttgctgagctcacaggaaagaaatagcggcgacattacttcgttggataaagccgattaccgcccaacgatcaaggaaaacataccagcctccctaatggagcaaaatgttatttgcccaaaggacacatacagtgacctaaaatcaagagataaagacgtgaccatcgtgccttcaacaggtgagccgactacactgagtagtgaaacccatattcctgaggaaaaatcgttgttgaacctcagcacaaatgcggactctcagtcatcttctgacttcgaggtcccaagtactccagaggccgagttgcctaaacgcgagcacctgcagtacctgtacgagaaactggccacgggtgagagcatcgccgtgaagaaaagaaaatgtagtctgctggatacttag

SEQ ID NO: 311914 - DNA, 1719 bp, Artificial Sequence
  derived and/or modified sequence
atgtttctctttcagggaaacaacggcacggtcctgtataccggtgactttaggctggcccaaggagaggccgctcgcatggaattactgcattcaggaggtcgcgtcaaagacatccagtctgtttacctagatacaacgttctgtgatccaagattttaccagatcccctctcgagaggagtgtcttagcggcgtgctagagctggttcgaagttggatcacccgatctccataccatgttgtgtggctcaattgtaaggccgcatacgggtatgagtacttatttacaaatctgtcagaggagctgggtgtgcaggtccacgtgaacaagctcgacatgttccgaaacatgcctgagatcttgcatcatctcaccaccgatagaaatacccaaatccacgcttgtcgacaccccaaggccgaagagtactttcaatggtccaagctgccttgcggcataacctctcgaaataggatacctctccacatcatcagcattaaaccctcaaccatgtggtttggggagcgtagcagaaagaccaatgtgatagttcggactggtgaaagttcctatcgggcatgtttcagctttcacagcagttacagtgagataaaggattttctctcatatttgtgtccggtcaatgcataccccaatgtgattccagttgggacaacaatggataaggtggtagagattctgaaacccctgtgtagaagcagccaaagcactgaacccaagtataaacctcttggaaagctgaagcgcgctcgcaccgtgcacagagattccgaagaagaagacgattatcttttcgacgatccattaccaattccgttgaggcacaaggtgccgtaccctgaaacttttcatcccgaagtcttcagcatgaccgctgtctccgagaagcaacccgagaaactcaggcaaactcccggatgttgccgagccgaatgcatgcagtcaagcagatttactaacttcgtggactgcgaggagagtaactcggagagcgaggaggaagtcggcatcccagcctccctgcagggcgacctgggaagcgtgctgcacttgcaaaaagctgacggcgacgtaccccagtgggaggtgttcttcaagagaaacgatgagattacggacgagtcccttgaaaacttcccgtcctctaccgtggccggaggctcccagtccccgaagctcttttctgactctgatggcgagtccactcacatcagctcgcagaactcctcccagagtacccatattaccgagcagggctcacagggctgggactcccaaagtgacactgtcttgcttagctcgcaagagcgaaactctggcgatattacatctctcgacaaagccgactaccgccctaccattaaggagaacattcctgcaagtttaatggaacagaatgtgatttgcccgaaggatacttattcagatttgaaaagtcgtgacaaggatgtgactattgtccctagcacaggcgaaccgacgacactatcaagcgaaactcatatccctgaagaaaagtcactcctgaaccttagcactaatgctgactcccagagtagtagtgattttgaggtcccaagcactcccgaggcggaactccccaagcgggaacatttgcagtacctctacgaaaaactggctaccggcgagtccatcgccgtcaaaaagagaaaatgctcactcctggatacttag

SEQ ID NO: 311915 - DNA, 1719 bp, Artificial Sequence
  derived and/or modified sequence
atgttcttatttcagggcaacaatggcactgtgctgtataccggggatttcaggctcgcccagggagaagctgcccgtatggaactattacatagcggcggaagagtgaaggatatccagagtgtgtacctggacaccactttttgcgacccccgtttctaccaaatcccatctcgggaggagtgcctctctggtgtcttggaactcgtgcgatcctggataactcgaagtccctatcatgtggtgtggcttaattgtaaggcagcttacggatatgaatacttgttcaccaatctcagcgaagagctgggggttcaagtgcatgttaacaagctcgacatgtttcggaacatgcccgaaatcctccaccacctcaccactgacagaaacacgcagattcacgcctgccgacatcctaaagctgaagagtatttccagtggtccaaactgccctgcggtataaccagtagaaaccggatccctcttcacattatatccattaaaccgagcacaatgtggtttggcgagcgcagtcggaagactaatgtgatagtgaggaccggggaaagctcataccgggcatgcttcagttttcattcttcctattctgagatcaaggacttcttaagctacctgtgtcctgtcaacgcgtacccaaatgtgattcccgtgggcaccactatggataaggtggttgagattctgaaacccctgtgcaggtcaagccagagcaccgagccaaaatacaagccgctaggcaagctaaaacgcgcacggactgtccaccgggactccgaagaagaagacgactacctcttcgatgatcctctgcctattccactccggcataaggtgccgtacccagagacgtttcacccagaggtctttagcatgacagccgtcagcgagaaacagccagagaagctcagacagacgcctggttgttgtagagccgagtgcatgcaaagctccaggtttaccaacttcgtggattgtgaagaaagtaattcagagagcgaagaggaggtggggatcccggctagtctccagggggatctgggtagtgttctgcacctacagaaagctgatggcgatgtgccacagtgggaagtgttcttcaagcgaaacgacgagattactgacgaaagcctcgaaaattttccctctagcaccgttgctggcggaagtcagtcaccgaaactgttctccgatagcgatggggagagcacccatatttccagccagaactcctcccaatctacacacataacagaacaaggatcacagggatgggactcccagtctgacactgtgctcttgtcctcacaggagaggaattccggtgacatcaccagtttagacaaggctgactatagaccgacaattaaggagaacataccagctagcctcatggagcagaacgttatctgtcccaaagatacgtactctgatctgaagtcaagggataaagacgtgactatcgtgcctagcacaggggaaccgacaacgttgtcctcagaaacccatatccccgaggagaagtccctgctgaatctatctaccaatgccgactcccaatccagtagtgacttcgaggttcccagcactccagaagccgaactcccaaaaagggaacacctgcaatatctctatgagaaactggccactggtgagtctattgccgtaaagaaaagaaaatgtagcctcttggatacctag

SEQ ID NO: 311916 - DNA, 1719 bp, Artificial Sequence
  derived and/or modified sequence
atgttcctgttccagggtaacaatgggactgtcctatacacaggggacttcagattggcccagggagaggctgccagaatggaactgttgcactcaggaggcagggtcaaggatattcagagcgtgtacctagatacaaccttctgtgaccccaggttttaccagatcccaagcagagaagaatgcttatcaggggtcctcgagctcgtcaggtcttggatcacacggtcaccataccatgtggtttggctgaactgtaaagctgcttatggctacgaatacttattcaccaatctctccgaagagctgggcgtgcaggtccacgttaacaagcttgatatgttccgcaacatgcctgagatcctgcaccatttgacaaccgatcgcaatactcagatacacgcttgtaggcaccccaaagctgaggagtatttccaatggtcaaaactgccgtgtggaattacctcaagaaacaggattcccctccatatcattagtatcaaaccatccaccatgtggtttggggagcgcagtagaaagactaacgtcattgttcgaacgggtgaatccagctatcgggcttgcttctccttccattcttcttacagcgagatcaaagattttttgtcctatctgtgtcccgttaatgcgtaccctaacgttattcccgtcggcactaccatggataaagtcgtcgaaatccttaagcctctgtgtagatcaagccagagcacagagccgaaatacaagccgctcggtaaactgaagcgcgctcggactgtccatagggactccgaagaagaagacgattatctgttcgatgatcccttgcctattccactgagacacaaagtcccttaccccgagacctttcatcctgaggtttttagtatgacggccgtgagcgaaaagcagccagaaaagctcaggcagacaccaggctgttgccgtgcagagtgtatgcagtcttcacgctttaccaacttcgtggactgcgaagagtcaaattctgagtccgaagaggaggtaggtatccccgcatcactgcagggcgacttgggaagtgttctgcaccttcagaaagcggatggtgacgtcccacagtgggaagtcttcttcaagagaaatgacgagatcacagatgaatcactcgaaaactttccaagctccacggtggccggaggctctcaatctccaaagctgtttagtgacagcgacggggagtctacccatatctctagtcagaactcaagccagtccacacatattacagagcaaggctcacagggctgggactcacagagtgatacagtactgctctcttcccaggaaagaaactccggcgatatcacatcattagacaaggcagactatagacctaccatcaaggagaacattcccgcatcattaatggagcaaaacgtcatctgtccaaaggacacgtattctgatttaaagtcccgcgataaggatgtgaccattgttcctagtacgggagagcctacgaccctctcctcagagactcatattccagaggagaagagcctgctcaacttgtctacaaatgctgatagccagtcaagctccgactttgaggtcccttccactcccgaggcagagctgcccaaaagagaacacttacagtacctttacgagaaattagctaccggagaaagcatcgccgtaaaaaaaagaaagtgtagcttgttagatacctag

SEQ ID NO: 311917 - DNA, 1719 bp, Artificial Sequence
  derived and/or modified sequence
atgtttctgttccaggggaataacgggaccgtgttgtataccggagatttccgattggctcaaggcgaggcggctcgcatggagctcctgcactccgggggtcgggtgaaagacattcaaagcgtgtacctggacactaccttttgtgacccacgattctaccagattccctccagggaagagtgtctgtccggggtgctcgagctcgtgcgctcctggatcaccaggagtccataccatgtcgtctggctgaactgcaaggccgcttacgggtacgaatatctgttcaccaatttaagtgaggaactcggcgttcaggtacacgtcaacaaactggacatgtttagaaatatgcccgaaattctccaccatttgactaccgacagaaatactcagatccatgcctgtcgtcaccccaaggccgaagaatactttcagtggagtaagctgccatgtggaattacatccaggaatcgtataccattacatatcatttcaattaagcctagcactatgtggttcggggaacgcagtcgaaagaccaatgtgatagtgcgcactggagagtcatcatatagggcttgcttctccttccactcatcttacagtgagataaaggactttttatcctacctttgcccagtgaacgcctatccaaacgtgatacctgtcggcacaacaatggacaaagtggtcgagatactgaagccactctgccgttcctcacagagcactgagcctaagtataagcccctaggcaagctaaagagggcaagaaccgtccatagagactctgaggaagaagacgattatcttttcgacgaccccttacccattccccttaggcacaaagtgccttatccagagactttccaccctgaggtgttttcgatgaccgctgtgtctgaaaaacagccagagaagttgcggcagaccccaggctgttgccgggcagaatgcatgcaatcctctcgtttcacgaattttgtagactgcgaggagtccaactcagaaagcgaggaagaagttggaattcctgcttccctccagggagatcttggatccgtcctgcacctccaaaaagcagacggcgacgtgcctcagtgggaggtgtttttcaagcgcaatgatgagatcaccgacgagagcctggaaaatttccccagttcaacagtggctggaggctcgcagtctcccaagctgttctccgactctgatggcgagtccacacacatcagcagtcagaactcctcccagagcactcacatcacagagcaaggctctcagggttgggactcccagagcgacacagttctgcttagttctcaggaaagaaactcaggggatatcacaagccttgataaggccgactatagaccaacgattaaggagaacatcccagcaagtctcatggagcaaaatgtaatctgtcctaaagacacctacagcgacctgaagtctagggacaaagacgtgactatcgtccccagtaccggcgaaccaacaactctgagtagcgagacccacatacccgaagaaaagtctctgctgaatctctcaacgaatgccgactcgcaatccagctcagattttgaagtacccagcaccccagaagccgaactgcccaagagagaacatttacagtatctgtacgagaaactggcgactggagagagtattgccgtgaagaagcggaagtgctccttgcttgacacctag

SEQ ID NO: 311918 - DNA, 1719 bp, Artificial Sequence
  derived and/or modified sequence
atgtttctcttccaaggcaataacggcaccgtgctgtacacaggtgattttcgcctggcccaaggagaggctgctagaatggagctcctgcatagcggaggtcgcgtcaaggatatacagtccgtctacttagacaccactttttgcgatccaagattctatcagatccctagtagggaggagtgcctctcgggagtccttgagttagtccgctcctggattacaagatcgccttaccacgttgtgtggttaaattgcaaggcagcttacggctatgaatatctgtttacaaatctgagcgaggaactcggggtccaggtgcatgtaaataagttggatatgtttcggaacatgccggagattctgcaccacctgaccacagaccgcaatactcagatccacgcatgtcggcaccctaaggccgaagagtacttccagtggtcaaaactgccctgcggcatcacttcccggaatcggatccctctgcatattatatccataaagcccagcaccatgtggttcggagagcgctctcgtaagactaatgtgatcgtccgaacaggagagtcctcctaccgagcttgtttttcctttcattcctcttattctgaaataaaagatttcctgtcctatttgtgtcccgttaatgcctatccaaatgtgattccagtcgggaccacaatggataaagtggtagaaattctgaagcctttatgcaggtcttcgcaaagcacagaacccaaatataagccactgggtaagctgaaacgggcacgcacagttcatcgggacagcgaggaggaggatgactacctgttcgacgatcctctgcccatcccccttaggcacaaagtgccatacccagagacgttccacccggaggtcttctcaatgacggcagtgagcgagaaacagccggagaaactgcggcagacgcctgggtgttgtcgggcagagtgcatgcaaagttcccgcttcacaaattttgtggattgtgaggagagcaactccgagagcgaagaggaagtggggataccagcgagtctgcaaggggacctgggcagtgtgttacatctgcaaaaggcggatggcgatgtgccccagtgggaggtgttcttcaagcgcaatgatgagatcactgatgagagtctggagaactttccaagctcaaccgttgctggaggtagccagtcacctaagctcttctccgattctgatggggagagcacacacatctcttcgcagaattccagccagtcgactcatatcactgaacaaggttctcagggctgggatagtcagtccgataccgttctcttaagtagccaagaaagaaattcaggagacattacatccctagataaggctgactatcgaccgacaatcaaagagaatatccccgcatccttgatggaacagaacgtgatctgccctaaggacacttacagcgaccttaagtctcgcgacaaggatgtgactattgttccttctactggagagccaacgactctttcgtccgaaacacacatccctgaggagaaaagcctgcttaacctatctaccaacgccgatagccagtcctccagcgattttgaagtgccaagcacccccgaggcagaactgcctaagcgggaacatctgcagtacctttacgaaaaactggcgactggagaatcaattgcagtaaagaaaaggaagtgctccctgttagacacttag

SEQ ID NO: 311919 - DNA, 1305 bp, Artificial Sequence
  derived and/or modified sequence
atgagcagcttcgagggccagatggccgagtaccccaccatcagcatcgacagattcgacagagagaacctgagagccagagcctacttcctgagccactgccacaaggaccacatgaagggcctgagagcccccaccctgaagagaagactggagtgcagcctgaaggtgtacctgtactgcagccccgtgaccaaggagctgctgctgaccagccccaagtacagattctggaagaagagaatcatcagcatcgagatcgagacccccacccagatcagcctggtggacgaggccagcggcgagaaggaggagatcgtggtgaccctgctgcccgccggccactgccccggcagcgtgatgttcctgttccagggcaacaacggcaccgtgctgtacaccggcgacttcagactggcccagggcgaggccgccagaatggagctgctgcacagcggcggcagagtgaaggacatccagagcgtgtacctggacaccaccttctgcgaccccagattctaccagatccccagcagagaggagtgcctgagcggcgtgctggagctggtgagaagctggatcaccagaagcccctaccacgtggtgtggctgaactgcaaggccgcctacggctacgagtacctgttcaccaacctgagcgaggagctgggcgtgcaggtgcacgtgaacaagctggacatgttcagaaacatgcccgagatcctgcaccacctgaccaccgacagaaacacccagatccacgcctgcagacaccccaaggccgaggagtacttccagtggagcaagctgccctgcggcatcaccagcagaaacagaatccccctgcacatcatcagcatcaagcccagcaccatgtggttcggcgagagaagcagaaagaccaacgtgatcgtgagaaccggcgagagcagctacagagcctgcttcagcttccacagcagctacagcgagatcaaggacttcctgagctacctgtgccccgtgaacgcctaccccaacgtgatccccgtgggcaccaccatggacaaggtggtggagatcctgaagcccctgtgcagaagcagccagagcaccgagcccaagtacaagcccctgggcaagctgaagagagccagaaccgtgcacagagacagcggcagccacagcgtgacccaggccagaatgagatggtgccaccacgacagcctgtaccccctgacccccggcatcaagagaagcagctgcctgagcctgctgaccagctggatcaccggcgcctacagacacgcccagctgatgatctag

SEQ ID NO: 311920 - DNA, 3532 bp, Artificial Sequence
  derived and/or modified sequence
cggaacgaagaatgatttctaagcgcagttccgcagcccactcacctcgtcggctggggccacctgctctgggagtttcgatttcccttcccgcgactgcacctccacagacatgggcaacgccttaccagagcaacacctgtgtttgttgggcgggaatgagccttgcactgggcagggctcagggcccatcgcgtgcagcgaagcgcgggtgatttaaacccaagcagcgggcgcctagaacccgaccggatgctccttgactttgcccccggtctccggactcctctgattggacgtggctgcgttcggccgcccaatggcgaggcagcgcgcggcttcccggaagtggcggcgcggtcagggctggccttggcttcagctgcggttttggggtcccggactctgggatcggcggcgctatgagttctttcgaggggcagatggccgagtatccaactatctccatagaccgcttcgatagggagaacctgagggcccgcgcctacttcctgtcccactgccacaaagatcacatgaaaggattaagagcccctaccttgaaaagaaggttggagtgcagcttgaaggtttatctatactgttcacctgtgactaaggagttgttgttaacgagcccgaaatacagattttggaagaaacgaattatatctattgaaatcgagactcctacccagatatctttagtggatgaagcatcaggagagaaggaagagattgttgtgactctcttaccagctggtcactgtccgggatcagttatgtttttatttcagggcaataatggaactgtcctgtacacaggagacttcagattggcgcaaggagaagctgctagaatggagcttctgcactccgggggcagagtcaaagacatccaaagtgtatatttggatactacgttctgtgatccaagattttaccaaattccaagtcgggaggagtgtttaagtggagtcttagagctggtccgaagctggatcactcggagcccgtaccatgttgtgtggctgaactgcaaagcggcttatggctatgaatatctgttcaccaaccttagtgaagaattaggagtccaggttcatgtgaataagctagacatgtttaggaacatgcctgagatccttcatcatctcacaacagaccgcaacactcagatccatgcatgccggcatcccaaggcagaggaatattttcagtggagcaaattaccctgtggaattacttccagaaatagaattccactccacataatcagcattaagccatccaccatgtggtttggagaaaggagcagaaaaacaaatgtaattgtgaggactggagagagttcatacagagcttgtttttcttttcactcctcctacagtgagattaaagatttcttgagctacctctgtcctgtgaacgcatatccaaatgtcattccagttggcacaactatggataaagttgtcgaaatcttaaagcctttatgccggtcttcccaaagtacggagccaaagtataaaccactgggaaaactgaagagagctagaacagttcaccgagactcagggtctcactctgtcactcaggctagaatgcggtggtgccatcatgactccctgtatcctttaactcctgggatcaagcgatcttcctgcctcagcctcctgactagctggatcacaggtgcataccgccatgcccagctaatgatttagtttttatagagatgtggggtctcactatgttgcccacactggtctggaactcctgggctcaagtgagcctccagccttgacctccccaagtgctgggattaactgtaactggttgatttatgactttttaaacaggatttgagcagtacattggaacactgcattactttcattataattaggatgttcaaaaagctatacaactatagctctctacaggacacaactgaatgttaaggactaaatctgcaagtatatgctctaaatatgatccaggcacatttttcctataacttatatatatgcagttacaaatggaaaattgttaaaaatacaggggagaagctatgttaactttggaatggaaggttttgtttttgtagaatatgttattttcatgcaattctgtaagtctaagatcgtcatctacagttctgctcttaagaacacaagttttatgacacgctcggcttaagaaaccaaaagtgtctaaagtactttatgttaccaaccaaatttggctgctgcactcattaagaatgcaacttaaaaaattttggttaacaaaaagagtaatttgattatacaagatcttgtatactgaataatttataataatctaccactgtctaaaagtgtaagaatcaaaacagccatctaatttagtttcagaattatagatgaatacagataattataggtgacccaattccaactaaaaaatccagagttgacaactccagatatgtagccatgcttgtgtctttctagtcacagctcaacctacccttcagtttgaagcagtgtggtgccatggtgaagactactgattttagagctttgaatctcggttcttattactatgtgacctgtgtgaccttgggcaaggtactcaatttctctacaataatggacataacagtactacttctcaaaaaaaaaaaaaaaaaaaaaaaaaaaagaaacagtactacctcactgagttttggagaggattagtgaattaatacatcaagtgcttagaatagtatgtgacacacggcaaatactttttacatttatatatatatatacatatatatgatttgtatacaaataaatttgctagtatttgtatggtagttttgagaatggtcttcacagttcaaaagtaagttacagattatggatgcaataaatgcttgtgtatattttacaaaactcataaatatagtatctttcatgttgatccaaaatagagttctgccaactacatttaatcatatttggtcaaatagatgaagtaaattaaaactttcaagtttcaaagcagcatgtgttacatctgagtttcttcttaggacttttgggtaaaaacagttgtcatattttaaattttacaaatcctaggtttgactagtaggaatgtgtatttgttgaaagatgactatatcaatttgttttaacgtatattttttattcatataaaagttttttatttctaaatatgccagtgaactcttctcctaaatctgaataaatttctacatatctgcaaatgaaaatatcaaaatgtaccaagtatctcttaaagagataaaaaggtaattttccaaaagtataaaccttgcatgtccatcatttactacgtggcaaatgaaacatacctctccaacatattccatgacaaaactcattcttttaatcttcacaagggtctttacaccccagccacgtccattgctagttcgaaagatgcaaagcgaatactgtgtgcctttttgtacaatcctattgggacaatcaggaccacactgacaccttga

SEQ ID NO: 311921 - DNA, 1305 bp, Artificial Sequence
  derived and/or modified sequence
atgagttcctttgaaggccaaatggccgagtacccaacaattagcatcgacaggtttgaccgagagaaccttcgcgctagggcctattttctgagccactgtcacaaagaccatatgaaaggcctgcgcgcaccaactctgaaacggcgccttgaatgctccctgaaggtgtacttatactgcagccccgtcacgaaagagctgctcttgacatctcccaagtaccggttctggaaaaagaggattatcagtatcgagatcgaaaccccgacacagatctccctggtggatgaggccagcggggagaaggaggaaatagtggtgacactgctcccagccggccactgtcctggaagtgtaatgtttcttttccaagggaataacggcactgtcctctatacgggagacttcagacttgcgcaaggcgaagcagcaaggatggaactgttgcattctggaggtagagtcaaggacatccaaagtgtgtaccttgatactacattctgtgacccaaggttctatcaaatccccagtcgcgaggagtgtctctccggcgtcctcgaactggtacgatcttggattactcgttcaccctaccatgtcgtgtggctgaactgcaaggctgcttatggctacgagtatctgtttaccaacttgagtgaggagctgggggttcaggtgcacgtcaataaactcgatatgtttcggaatatgccagaaattctgcaccatttaacaactgacaggaacacacagatccatgcctgtagacatccaaaggctgaagaatatttccagtggagtaagctgccctgtggcatcacttctcgcaacaggatacccctacacatcatctccataaagccgagtaccatgtggttcggggaacgctccagaaaaaccaacgtgattgtgaggaccggcgagtcttcgtaccgggcctgtttctcattccattcatcatatagcgaaattaaagatttcctgagctacctctgtccagtgaatgcctatccaaatgtgatcccagtgggcactacgatggacaaggttgtggaaatcctgaagccactgtgccgctccagccagagtacagaaccaaaatataagccgctgggcaagttaaagcgcgcgcgaactgtacatagggactccggtagccattccgtaacccaggccaggatgagatggtgccaccatgactccctctacccccttacccctggcatcaaaagatcatcctgcttgtcactgctcacgagctggatcacaggtgcctaccggcacgcccagctcatgatctag

SEQ ID NO: 311922 - DNA, 1305 bp, Artificial Sequence
  derived and/or modified sequence
atgagcagctttgagggccagatggccgagtaccccaccatcagcattgacagatttgaccgggagaacctgcgggcccgggcctacttcctgagccactgccacaaggaccacatgaagggcctgcgggcccccaccctgaagaggcggctggagtgcagcctgaaggtgtacctgtactgcagccctgtgaccaaggagctgctgctgaccagccccaagtaccgcttctggaagaagaggatcatcagcattgaaattgagacccccacccagatcagcctggtggatgaggccagcggggagaaggaggagatcgtggtgaccctgctgcctgctggccactgccccggctctgtgatgttcctgttccagggcaacaacggcaccgtgctgtacaccggggacttccggctggcccagggcgaggccgccaggatggagctgctgcacagcggcggccgggtgaaggacatccagagcgtgtacctggacaccaccttctgtgacccccgcttctaccagatccccagccgggaggagtgcctgagcggcgtgctggagctggtgcgctcctggatcaccaggagcccctaccacgtggtgtggctgaactgcaaggccgcctacggctatgagtacctgttcaccaacctgtctgaggagctgggcgtgcaggtgcacgtgaacaagctggacatgttcaggaacatgcctgagatcctgcaccacctgaccacagacaggaacacccagatccacgcctgccgccaccccaaggccgaggagtacttccagtggagcaagctgccctgtggcatcaccagcaggaaccgcatccccctgcacatcatcagcatcaagcccagcaccatgtggtttggagagaggagcaggaagaccaacgtcatcgtgaggactggagagagcagctaccgggcctgcttctccttccacagcagctacagcgagatcaaggacttcctgagctacctgtgccctgtgaatgcctaccccaacgtcatccctgtgggcaccaccatggacaaggtggtggagatcctgaagcccctgtgccgcagcagccagagcacagagcccaagtacaagcccctgggcaagctgaagagggccaggacagtgcaccgggacagcggcagccacagcgtgacccaggccaggatgcgctggtgccaccacgacagcctgtaccccctgaccccaggcatcaagaggagcagctgcctgagcctgctgacctcctggatcaccggggcctacagacatgcccagctgatgatctag

SEQ ID NO: 311923 - DNA, 1305 bp, Artificial Sequence
  derived and/or modified sequence
atgagcagcttcgagggccagatggccgagtaccccaccatcagcatcgatcgcttcgaccgagagaatctgcgagcgcgagcttacttcctctcccactgccataaggatcacatgaaaggtctccgagcacctaccctcaaacgtagactcgagtgcagccttaaggtctacctgtactgtagcccagtgactaaggaactcctcctgacctccccaaaatatagattttggaaaaaacgaattatatcaattgaaattgagacaccgactcagatcagtcttgtagacgaagcgtccggggagaaggaggagatcgtggtgaccctcctgcccgccggccactgtcccggaagcgtcatgttcctttttcaagggaacaacggtacggtactctataccggagattttaggttggcccagggggaggcagctcgcatggagttacttcattccggtggtcgggtcaaggacattcagtcagtctatctcgacacgaccttttgcgacccgagattttatcagatcccttctagagaagagtgcctctcaggcgttctcgaacttgtgcgctcatggatcacccggagtccctatcacgtggtgtggctgaattgcaaggccgcttacggctacgagtacctcttcactaacctgtccgaggaactgggagtgcaagtgcacgtgaataagctggacatgttcaggaacatgcccgaaatcctgcatcaccttactacagaccggaatacccaaatacacgcatgccgacaccccaaggccgaagagtattttcagtggagtaagcttccttgtggcattactagtcgcaatcgcattccactgcatataatcagtatcaaaccctccacaatgtggtttggagagcgctctagaaaaacaaatgttattgttcggaccggcgaatcatcttatagagcatgtttttcttttcatagtagttactctgagatcaaggactttctgtcctacttgtgccctgtgaacgcatatcctaatgtgatccccgttggaacaaccatggacaaggtagtcgagattctcaaaccactgtgtagaagtagccagtccactgagcctaagtataagcctctcggaaaactgaaacgagctcgaaccgttcacagggactccggcagtcactcagtgacccaagctcgcatgcgttggtgccatcacgatagcctgtatccgttaactccagggattaaacgttcgtcctgcctgtccttgttgacatcgtggatcacaggggcatatagacacgcccagttgatgatctag

SEQ ID NO: 311924 - DNA, 1305 bp, Artificial Sequence
  derived and/or modified sequence
atgtcctcctttgaaggccagatggctgagtatcctaccatcagtatcgataggtttgatcgcgagaacctacgcgcaagggcctactttttaagccattgtcataaggaccacatgaaagggttgcgggctcctacgttaaagcgaagattggagtgttcactgaaggtctacctgtattgctctccagtgaccaaggaactcctgttaacctcaccaaagtacaggttttggaaaaaaagaataatttcaatcgagattgagacgcctacccagatctctctggttgacgaggcctctggggagaaagaggagatcgttgttactttgctgcctgccggacactgtcccggatctgtgatgttcttgttccagggcaacaatgggacagttctgtatacaggcgattttcgactggcccagggagaagcagccaggatggagttgcttcacagtggaggtcgcgtgaaggatatccaatcagtttatctcgataccaccttctgtgaccccaggttctaccagatccccagtagagaagagtgcctgtcaggcgtgctcgaactggtcagaagttggatcacaagatctccataccacgtagtgtggctaaattgcaaggccgcatacggatacgaatacctgttcaccaatctgagcgaagagctcggtgtgcaagttcatgtaaacaagctggacatgttcagaaacatgccagagatactccatcacctgaccaccgataggaatacacagatccacgcttgcaggcatccaaaggccgaggagtactttcagtggtccaaactgccctgtggcatcacttcaagaaacagaattcctctccacatcatctcaattaaaccatctaccatgtggtttggagaaaggtcaaggaagaccaacgtaatcgtgcggactggcgagtcctcttacagagcttgcttttcatttcatagtagttatagtgagatcaaggactttctgtcctacctctgccctgtaaacgcttacccaaatgtaataccagttggcacaacaatggacaaagtggtcgagattttaaagcctctgtgtcggagctcacagtcaaccgagccaaagtataagcctttgggaaaacttaaaagggcccgtacggtgcaccgcgattccggatcgcattctgtgacacaggctcgcatgagatggtgtcatcacgacagtctgtaccccttaacccccggtattaagagatctagctgtctgtccctcctgacctcctggatcaccggagcataccgacatgcacagctgatgatttag

SEQ ID NO: 311925 - DNA, 255 bp, Artificial Sequence
  derived and/or modified sequence
atgttcctgttccagggcaacaacggcaccgtgctgtacaccggcgacttcagactggcccagggcgaggccgccagaatggagctgctgcacagcggcggcagagtgaaggacatccagagcgtgtacctggacaccaccttctgcgaccccagattctaccagatccccagcagagaggagtgcctgagcggcgtgctggagctggtgagaagctggatcaccagaagcccctaccacgtggtgtggctgtag

SEQ ID NO: 311926 - DNA, 354 bp, Artificial Sequence
  derived and/or modified sequence
atggagctgctgcacagcggcggcagagtgaaggacatccagagcgtgtacctggacaccaccttctgcgaccccagattctaccagatccccagcagagaggagtgcctgagcggcgtgctggagctggtgagaagctggatcaccagaagcccctaccacgtggtgtggctgaactgcaaggccgcctacggctacgagtacctgttcaccaacctgagcgaggagctgggcgtgcaggtgcacgtgaacaagctggacatgttcagaaacatgcccgagatcctgcaccacctgaccaccgacagaaacacccagatccacgcctgcagacaccccaaggccgaggagtag

SEQ ID NO: 311927 - DNA, 833 bp, Artificial Sequence
  derived and/or modified sequence
gcggcgctatgagttctttcgaggggcagatggccgagtatccaactatctccatagaccgcttcgatagggagaacctgagggcccgcgcctacttcctgtcccactgccacaaagatcacatgaaaggattaagagcccctaccttgaaaagaaggttggagtgcagatgaggaaactgaggaaccagagaggttaaattagttgcccagtgtcacacagccagtaagtggcaggaccaggattccagccagcttgaaggtttatctatactgttcacctgtgactaaggagttgttgttaacgagcccgaaatacagattttggaagaaacgaatttgctggtctcccgctttggctctgaagcacatgcacctgccccaggactcggaggagctgcacacgggcacccagcagaagctgatgttgctgcggccctgccccagactctgagttaagccagaagatatctattgaaatcgagactcctacccagatatctttagtggatgaagcatcaggagagaaggaagagattgttgtgactctcttaccagctggtcactgtccgggatcagttatgtttttatttcagggcaataatggaactgtcctgtacacaggagacttcagattggcgcaaggagaagctgctagaatggagcttctgcactccgggggcagagtcaaagacatccaaagtgtatatttggatactacgttctgtgatccaagattttaccaaattccaagtcgggaggagtgtttaagtggagtcttagagctggtccgaagctggatcactcggagcccgtaccatgttgtgtggctga

SEQ ID NO: 311928 - DNA, 255 bp, Artificial Sequence
  derived and/or modified sequence
atgttcttattccagggtaataacgggaccgtgctgtatacaggtgatttccgcttagcccagggggaggcagccaggatggagctgttgcattcaggcggtagggtgaaagatattcagtctgtttatcttgatacaacgttctgtgatccaaggttctatcagatccctagccgcgaggagtgtctgtctggcgtgctggagctagtgcggagctggataactaggtccccataccacgtggtgtggttatag

SEQ ID NO: 311929 - DNA, 354 bp, Artificial Sequence
  derived and/or modified sequence
atggagctactgcattctggggggcgcgtcaaggacatccaatctgtttatttagacactacgttctgtgacccgcgattttatcagatccccagcagagaggaatgcctttccggggtactcgagctggtccggtcttggatcacccgttctccctaccatgtggtttggttaaactgtaaggccgcctatgggtatgaatacttgttcaccaatctgagcgaggagctgggggttcaggttcacgtgaataagctggacatgttcaggaacatgccagagatcctgcaccatctcacaactgatcgtaatactcagatccatgcctgtcgccatccaaaagctgaggagtag

SEQ ID NO: 311930 - DNA, 255 bp, Artificial Sequence
  derived and/or modified sequence
atgttcctgttccagggcaacaacggcaccgtgctgtacaccggggacttccggctggcccagggcgaggccgccaggatggagctgctgcacagcggcggccgggtgaaggacatccagagcgtgtacctggacaccaccttctgtgacccccgcttctaccagatccccagccgggaggagtgcctgagcggcgtgctggagctggtgcgctcctggatcaccaggagcccctaccacgtggtgtggctgtag

SEQ ID NO: 311931 - DNA, 354 bp, Artificial Sequence
  derived and/or modified sequence
atggagctgctgcacagcggcggccgggtgaaggacatccagagcgtgtacctggacaccaccttctgtgacccccgcttctaccagatccccagccgggaggagtgcctgagcggcgtgctggagctggtgcgctcctggatcaccaggagcccctaccacgtggtgtggctgaactgcaaggccgcctacggctatgagtacctgttcaccaacctgtctgaggagctgggcgtgcaggtgcacgtgaacaagctggacatgttcaggaacatgcctgagatcctgcaccacctgaccacagacaggaacacccagatccacgcctgccgccaccccaaggccgaggagtag

SEQ ID NO: 311932 - DNA, 255 bp, Artificial Sequence
  derived and/or modified sequence
atgttcctgttccagggcaacaacggcaccgtgctgtacaccggcgactttcgactggctcagggcgaggcggctaggatggagttactacatagcggtggtcgcgtgaaagatatccagtccgtttacctggacaccaccttctgcgatcccagattttaccagatcccttcgagagaagagtgtctcagtggagtgctggagcttgtgaggagctggatcacacggagtccttaccacgtagtctggctgtag

SEQ ID NO: 311933 - DNA, 354 bp, Artificial Sequence
  derived and/or modified sequence
atggagctgctgcacagcggcggccgggtgaaggacatccagagcgtctatttggatacgacattttgtgacccccgtttttaccagatcccatcacgagaagaatgtctgagcggagttctcgagttagttaggtcatggatcacccgatccccctaccacgtagtgtggttaaattgtaaagccgcctatgggtacgagtacctgttcacaaacctgtctgaggagctaggagttcaggttcatgtcaacaaactggatatgttccgaaatatgcccgaaattctgcatcatctcacgactgatagaaacacacagatccacgcttgcagacaccctaaggcggaggagtag

SEQ ID NO: 311934 - DNA, 255 bp, Artificial Sequence
  derived and/or modified sequence
atgtttctattccaagggaacaacggcacagtgctgtacacgggagacttcaggctggcccagggggaggccgcaaggatggagctcctgcactctggcggaagagtgaaggatatccagtccgtgtacctggacaccaccttctgcgatcctaggttctatcaaatccctagcagagaggagtgtctgagtggtgtacttgaactcgttcggtcctggattaccaggagcccgtaccacgttgtgtggctgtag

SEQ ID NO: 311935 - DNA, 354 bp, Artificial Sequence
  derived and/or modified sequence
atggagctactacattctggaggcagggtgaaagacattcagagcgtgtatctggatacgacattctgcgaccccagattttatcagatcccttcccgggaggagtgcctgagtggagttcttgaactggtgcggtcatggattacacggtcaccatatcacgtggtctggctgaactgcaaagccgcttacggctatgagtatttgtttacaaacctatctgaagagttaggggtgcaggtccacgtcaataagctggacatgttcagaaacatgcctgagattctacaccaccttaccaccgatcgcaacacgcagattcacgcctgcagacacccgaaggcggaagagtag

SEQ ID NO: 311936 - protein, 1128 aa, Artificial Sequence
  derived and/or modified sequence
MFAAGEIKTPTGEGLLDSPSKTMSIKERLALLKKSGEEDWRNRLSRRQEGGKAPASSLHTQEAGRSLIKKEEGGVADDSAISNLLWRVTESRESQMTIEERKQLITVREEAWKTRGRGAANDSTQFTVAGRMVKKGLASPTAITPVASPICGKTRGTTPVSKPLEDIEARPDMQLESDLKLDRLETFLRRLNNKVGGMHETVLTVTGKSVKEVMKPDDDETFAKFYRSVDYNMPRSPVEMDEDFDVIFDPYAPKLTSSVAEHKRAVRPKRRVQASKNPLKMLAAREDLLQEYTEQRLNVAFMESKRMKVEKMSSNSNFSEVTLAGLASKENFSNVSLRSVNLTEQNSNNSAVPYKRLMLLQIKGRRHVQTRLVEPRASALNSGDCFLLLSPHCCFLWVGEFANVIEKAKASELATLIQTKRELGCRATYIQTIEEGINTHTHAAKDFWKLLGGQTSYQSAGDPKEDELYEAAIIETNCIYRLMDDKLVPDDDYWGKIPKCSLLQPKEVLVFDFGSEVYVWHGKEVTLAQRKIAFQLAKHLWNGTFDYENCDINPLDPGECNPLIPRKGQGRPDWAIFGRLTEHNETILFKEKFLDWTELKRSNEKNPGELAQHKEDPRTDVKAYDVTRMVSMPQTTAGTILDGVNVGRGYGLVEGHDRRQFEITSVSVDVWHILEFDYSRLPKQSIGQFHEGDAYVVKWKFMVSTAVGSRQKGEHSVRAAGKEKCVYFFWQGRHSTVSEKGTSALMTVELDEERGAQVQVLQGKEPPCFLQCFQGGMVVHSGRREEEEENVQSEWRLYCVRGEVPVEGNLLEVACHCSSLRSRTSMVVLNVNKALIYLWHGCKAQAHTKEVGRTAANKIKEQCPLEAGLHSSSKVTIHECDEGSEPLGFWDALGRRDRKAYDCMLQDPGSFNFAPRLFILSSSSGDFAATEFVYPARAPSVVSSMPFLQEDLYSAPQPALFLVDNHHEVYLWQGWWPIENKITGSARIRWASDRKSAMETVLQYCKGKNLKKPAPKSYLIHAGLEPLTFTNMFPSWEHREDIAEITEMDTEVSNQITLVEDVLAKLCKTIYPLADLLARPLPEGVDPLKLEIYLTDEDFEFALDMTRDEYNALPAWKQVNLKKAKGLF

SEQ ID NO: 311937 - DNA, 3387 bp, Artificial Sequence
  derived and/or modified sequence
atgttcgccgccggcgagatcaagacccccaccggcgagggcctgctggacagccccagcaagaccatgagcatcaaggagagactggccctgctgaagaagagcggcgaggaggactggagaaacagactgagcagaagacaggagggcggcaaggcccccgccagcagcctgcacacccaggaggccggcagaagcctgatcaagaaggaggagggcggcgtggccgacgacagcgccatcagcaacctgctgtggagagtgaccgagagcagagagagccagatgaccatcgaggagagaaagcagctgatcaccgtgagagaggaggcctggaagaccagaggcagaggcgccgccaacgacagcacccagttcaccgtggccggcagaatggtgaagaagggcctggccagccccaccgccatcacccccgtggccagccccatctgcggcaagaccagaggcaccacccccgtgagcaagcccctggaggacatcgaggccagacccgacatgcagctggagagcgacctgaagctggacagactggagaccttcctgagaagactgaacaacaaggtgggcggcatgcacgagaccgtgctgaccgtgaccggcaagagcgtgaaggaggtgatgaagcccgacgacgacgagaccttcgccaagttctacagaagcgtggactacaacatgcccagaagccccgtggagatggacgaggacttcgacgtgatcttcgacccctacgcccccaagctgaccagcagcgtggccgagcacaagagagccgtgagacccaagagaagagtgcaggccagcaagaaccccctgaagatgctggccgccagagaggacctgctgcaggagtacaccgagcagagactgaacgtggccttcatggagagcaagagaatgaaggtggagaagatgagcagcaacagcaacttcagcgaggtgaccctggccggcctggccagcaaggagaacttcagcaacgtgagcctgagaagcgtgaacctgaccgagcagaacagcaacaacagcgccgtgccctacaagagactgatgctgctgcagatcaagggcagaagacacgtgcagaccagactggtggagcccagagccagcgccctgaacagcggcgactgcttcctgctgctgagcccccactgctgcttcctgtgggtgggcgagttcgccaacgtgatcgagaaggccaaggccagcgagctggccaccctgatccagaccaagagagagctgggctgcagagccacctacatccagaccatcgaggagggcatcaacacccacacccacgccgccaaggacttctggaagctgctgggcggccagaccagctaccagagcgccggcgaccccaaggaggacgagctgtacgaggccgccatcatcgagaccaactgcatctacagactgatggacgacaagctggtgcccgacgacgactactggggcaagatccccaagtgcagcctgctgcagcccaaggaggtgctggtgttcgacttcggcagcgaggtgtacgtgtggcacggcaaggaggtgaccctggcccagagaaagatcgccttccagctggccaagcacctgtggaacggcaccttcgactacgagaactgcgacatcaaccccctggaccccggcgagtgcaaccccctgatccccagaaagggccagggcagacccgactgggccatcttcggcagactgaccgagcacaacgagaccatcctgttcaaggagaagttcctggactggaccgagctgaagagaagcaacgagaagaaccccggcgagctggcccagcacaaggaggaccccagaaccgacgtgaaggcctacgacgtgaccagaatggtgagcatgccccagaccaccgccggcaccatcctggacggcgtgaacgtgggcagaggctacggcctggtggagggccacgacagaagacagttcgagatcaccagcgtgagcgtggacgtgtggcacatcctggagttcgactacagcagactgcccaagcagagcatcggccagttccacgagggcgacgcctacgtggtgaagtggaagttcatggtgagcaccgccgtgggcagcagacagaagggcgagcacagcgtgagagccgccggcaaggagaagtgcgtgtacttcttctggcagggcagacacagcaccgtgagcgagaagggcaccagcgccctgatgaccgtggagctggacgaggagagaggcgcccaggtgcaggtgctgcagggcaaggagcccccctgcttcctgcagtgcttccagggcggcatggtggtgcacagcggcagaagagaggaggaggaggagaacgtgcagagcgagtggagactgtactgcgtgagaggcgaggtgcccgtggagggcaacctgctggaggtggcctgccactgcagcagcctgagaagcagaaccagcatggtggtgctgaacgtgaacaaggccctgatctacctgtggcacggctgcaaggcccaggcccacaccaaggaggtgggcagaaccgccgccaacaagatcaaggagcagtgccccctggaggccggcctgcacagcagcagcaaggtgaccatccacgagtgcgacgagggcagcgagcccctgggcttctgggacgccctgggcagaagagacagaaaggcctacgactgcatgctgcaggaccccggcagcttcaacttcgcccccagactgttcatcctgagcagcagcagcggcgacttcgccgccaccgagttcgtgtaccccgccagagcccccagcgtggtgagcagcatgcccttcctgcaggaggacctgtacagcgccccccagcccgccctgttcctggtggacaaccaccacgaggtgtacctgtggcagggctggtggcccatcgagaacaagatcaccggcagcgccagaatcagatgggccagcgacagaaagagcgccatggagaccgtgctgcagtactgcaagggcaagaacctgaagaagcccgcccccaagagctacctgatccacgccggcctggagcccctgaccttcaccaacatgttccccagctgggagcacagagaggacatcgccgagatcaccgagatggacaccgaggtgagcaaccagatcaccctggtggaggacgtgctggccaagctgtgcaagaccatctaccccctggccgacctgctggccagacccctgcccgagggcgtggaccccctgaagctggagatctacctgaccgacgaggacttcgagttcgccctggacatgaccagagacgagtacaacgccctgcccgcctggaagcaggtgaacctgaagaaggccaagggcctgttctag

SEQ ID NO: 311938 - DNA, 3387 bp, Artificial Sequence
  derived and/or modified sequence
atgtttgctgccggggaaataaagactcctacaggagaagggctcctggatagtccgtcaaagactatgagcatcaaggagagattggcactgctgaaaaaaagtggggaagaagattggcggaaccggctgagtcggcgacaggagggaggtaaagcgcccgcatccagtctgcacacacaagaagccgggaggtctcttataaagaaggaggagggcggagttgcggatgattcagctatttctaacctcttgtggcgcgtaaccgagtccagagaaagccagatgaccattgaggagcgtaaacagctcattacagtaagggaggaagcttggaaaaccagaggccggggagcagcaaatgactctacccaattcactgtggctggaaggatggtgaaaaagggactcgcttctcctacagccattactcctgtcgcttcacccatttgtggaaagaccagagggacaaccccggtttccaagccgttggaggatattgaagctagacccgatatgcagctggagtctgacctgaagctggatcgactggagactttcctgaggagactcaataacaaagtcgggggtatgcatgaaaccgtgctgactgtgaccggcaaaagtgttaaggaagtgatgaagcctgatgatgatgaaacattcgctaagttctaccgctctgtagactataatatgccgcgctcccccgtcgagatggacgaggattttgatgtgatctttgacccttacgcccccaaactcacttcatctgtagcagagcacaagcgggccgtgcggcccaagagacgtgtccaggcgtccaaaaacccccttaaaatgctggctgcccgcgaggatttactgcaggagtacacagagcagaggctgaacgtagccttcatggagagtaagaggatgaaagtggagaaaatgagttcaaattcgaatttctcggaggtcacactggcaggactggcatcaaaagagaacttttcgaacgtaagcttgcgatcggtcaatcttactgagcaaaattccaacaactcagctgtcccctacaaacgtctgatgcttctccagatcaaggggagacgacacgtacagacaaggctagttgagccacgagcctcagccttgaattctggtgactgtttcctgctgctctctcctcactgttgctttctgtgggttggtgagtttgctaacgtgatcgaaaaggcaaaagcaagcgagttggctacactgatccagaccaagcgcgaattaggatgtcgggctacttacatccagaccatagaagagggaatcaacacccacacgcatgccgcaaaggacttttggaagctgctcggtggacaaacatcctaccaatcagccggagatcctaaggaggatgaactgtacgaggccgctatcatcgaaacaaattgtatatatcgtttaatggatgacaaactggtacccgatgatgattattggggaaagattccaaagtgttcccttctccagcctaaggaagtcctggttttcgattttgggtctgaggtctacgtctggcacggcaaggaggtaactttagcccaaagaaagatcgctttccaattggctaagcacttgtggaacggcacattcgattacgagaattgtgacatcaaccctctagacccgggcgaatgcaatcctttaattccacggaaagggcaagggcgacctgactgggccatctttgggcgcctcacagagcacaatgaaaccatcctctttaaagagaaattcctggactggaccgagctgaagagaagcaatgagaaaaaccccggcgagctagcccagcacaaggaggatccccgcacagatgtgaaagcgtacgatgtgaccagaatggtgtccatgccgcagactacagcagggaccattctcgatggtgtgaatgtgggcagggggtacggtcttgtggagggccacgacagacgccagtttgaaataacgtccgtgagcgttgacgtgtggcacatacttgagtttgactattcccgcctcccaaagcaaagtatcggtcagtttcatgagggagatgcttatgtagtcaagtggaaatttatggtgagtactgccgtaggctctagacaaaaaggtgagcattctgtcagagctgctggcaaggaaaaatgcgtgtacttcttttggcagggcagacattccacagtgagtgaaaaagggacaagtgccctgatgacagtcgagctagatgaggagcgcggcgcacaggtccaggtccttcaggggaaggagccgccttgtttcttgcagtgcttccaaggcggtatggttgtacatagcggccgcagagaagaagaagaagagaacgtccagtctgagtggcgcctatattgcgtgagaggtgaagtgcctgtagagggtaacctgctggaagtggcatgtcattgtagcagtttacggagtagaacctccatggtggtgctgaacgtcaataaagccctaatttatctctggcacgggtgtaaggctcaggcccacactaaggaggtgggtcggaccgcagcaaacaagataaaggagcagtgcccactcgaggccggccttcacagctcaagtaaggttaccatacatgaatgtgatgaaggctctgagccattaggcttctgggatgctctgggacgcagggatcgcaaggcctacgactgcatgctccaggacccaggcagcttcaattttgctccacggctttttatattgagctcttcatctggcgatttcgcagcaactgagtttgtgtaccccgcccgcgcaccttctgttgtctcttctatgcccttcctgcaggaggatctgtattcagccccgcagccggcgctgtttctggtcgacaaccatcacgaggtgtacctgtggcaaggatggtggccaattgaaaacaagattacagggtccgcgcgaattaggtgggccagtgacagaaagtctgccatggaaacagtgctccagtactgtaagggtaaaaatctgaaaaagccggcaccgaagtcctacttgatacatgcgggccttgagccgttgacctttaccaacatgttcccttcatgggagcaccgtgaggacatcgctgaaattacagaaatggacactgaagtgtcaaaccaaatcacactggtggaagacgtgttggcgaagttgtgcaaaacaatctatccactcgcagatttgctcgccaggccacttcctgagggagtcgacccactgaagctggagatttacctcactgacgaggattttgaatttgcattggacatgacaagagatgaatataacgcactcccagcatggaaacaagttaacttaaaaaaagcgaaaggactgttttag

SEQ ID NO: 311939 - DNA, 3387 bp, Artificial Sequence
  derived and/or modified sequence
atgtttgctgctggggagatcaagacccccactggagagggcctgctggacagccccagcaagaccatgagcatcaaggagcggctggccctgctgaagaagtctggagaggaggactggaggaaccggctgagccggcggcaggagggcggcaaggccccagccagcagcctgcacacccaggaggccggccgcagcctcatcaagaaggaggagggcggcgtggctgatgattctgccatcagcaacctgctgtggagggtgacagagagccgggagagccagatgaccatcgaggagaggaagcagctgatcaccgtgcgggaggaggcctggaagacccggggcagaggagctgccaatgacagcacccagttcaccgtggccggccgcatggtgaagaagggcctggccagccccacagccatcacccctgtggccagccccatctgtgggaagacccggggcaccacccctgtgtccaagcccctggaggacatcgaggcccggccagacatgcagctggagagtgacctgaagctggaccggctggagaccttcctgcggcggctgaacaacaaggtgggcggcatgcatgaaacagtgctgactgtgacaggcaagtctgtgaaggaggtgatgaagccagatgatgatgagacctttgccaagttctacagatctgtggactacaacatgcccaggagccctgtggagatggatgaggactttgatgtgatctttgacccctatgcccccaagctgaccagctctgtggccgagcacaagagagctgtgcggcccaagagaagagtgcaggccagcaagaaccccctgaagatgctggccgcccgggaggacctgctgcaggagtacacagagcagaggctgaatgtggccttcatggagagcaagaggatgaaggtggagaagatgagcagcaacagcaacttcagcgaggtgaccctggccggcctggccagcaaggagaacttcagcaatgtgtccctgcggtctgtgaacctgacagagcagaacagcaacaacagcgctgtgccctacaagaggctgatgctgctgcagatcaagggcagaagacatgtgcagacccggctggtggagccccgggccagcgccctgaacagcggggactgcttcctgctgctgagcccccactgctgcttcctgtgggtgggggagtttgccaacgtgattgagaaggccaaggccagcgagctggccaccctcatccagaccaagcgggagctgggctgccgggccacctacatccagaccatcgaggagggcatcaacacccacacccatgctgccaaggacttctggaagctgctgggcggccagaccagctaccagagcgctggggaccccaaggaggatgagctgtatgaagctgccatcatcgagaccaactgcatctaccgcctgatggatgacaagctggtgcctgatgatgactactggggcaagatccccaagtgcagcctgctgcagcccaaggaggtgctggtgtttgattttggaagtgaggtgtatgtgtggcacggcaaggaggtgaccctggcccagaggaagatcgccttccagctggccaagcacctgtggaatggcacctttgattatgagaactgtgacatcaaccccctggaccctggagagtgcaaccccctcatccccaggaagggccagggccgcccagactgggccatcttcggccgcctgacagagcacaatgagaccatcctcttcaaggagaagttcctggactggacagagctgaagaggagcaatgagaagaaccctggagagctggcccagcacaaggaggaccccaggacagatgtgaaggcctatgatgtgaccaggatggtgtccatgccccagaccacagctggcaccatcctggatggagtgaatgtgggccggggctacggcctggtggagggccatgaccggcggcagtttgagatcacctctgtgtctgtggatgtgtggcacatcctggagtttgactacagccggctgcccaagcagagcatcggccagttccacgagggagatgcctacgtggtgaagtggaagttcatggtgtccacagctgtgggcagccggcagaagggggagcacagcgtgcgggccgccggcaaggagaagtgtgtgtacttcttctggcagggccgccacagcacagtgtctgagaagggcaccagcgccctgatgacagtggagctggatgaggagcggggggcccaggtgcaggtgctgcagggcaaggagcccccctgcttcctgcagtgcttccagggcggcatggtggtgcacagcggcagaagagaggaggaggaggagaatgtgcagagcgagtggaggctgtactgtgtgcggggggaggtgcctgtggagggcaacctgctggaggtggcctgccactgcagcagcctgcggagcaggacctccatggtggtgctgaatgtgaacaaggccctgatctacctgtggcacggctgcaaggcccaggcccacaccaaggaggtgggccgcacagctgccaacaagatcaaggagcagtgccccctggaggccggcctgcacagcagcagcaaggtgaccatccatgaatgtgatgagggcagcgagcccctgggcttctgggatgccctgggcagaagagacaggaaggcctatgactgcatgctgcaggaccccggcagcttcaactttgcccccaggctcttcatcctgagcagcagcagcggggactttgctgccacagaatttgtgtacccagcccgggcccccagcgtggtgtcctccatgcccttcctgcaggaggacctgtacagcgccccccagcctgccctcttcctggtggacaaccaccacgaggtgtacctgtggcagggctggtggcccatcgagaacaagatcactggaagtgcccgcatccgctgggccagtgacaggaagagcgccatggagaccgtgctgcagtactgcaagggcaagaacctgaagaagccagcccccaagagctacctgattcatgctggcctggagcccctgaccttcaccaacatgttccccagctgggagcaccgggaggacattgctgagatcacagagatggacacagaggtgagcaaccagatcaccctggtggaggatgtgctggccaagctgtgcaagaccatctaccccctggccgacctgctggcccggcccctgcctgagggcgtggaccccctgaagctggagatctacctgacagatgaagattttgaatttgccctggacatgaccagagatgagtacaatgccctgcctgcctggaagcaggtgaacctgaagaaggccaagggcctcttctag

SEQ ID NO: 311940 - DNA, 3387 bp, Artificial Sequence
  derived and/or modified sequence
atgttcgccgccggcgagatcaagacccccaccggcgagggcctgctggactctcctagcaaaaccatgagtattaaggaacgcttggcccttctcaaaaaatcaggagaagaggactggcgcaaccgcctgagtcgtaggcaggagggcggaaaagcccctgcctcatctttacatacgcaagaagccggccgatcactcatcaaaaaagaggaaggcggcgtggctgatgacagcgcgatatctaatttgttgtggcgcgtcaccgagtctagggagagtcagatgaccattgaggaacgtaagcagctcattaccgtaagggaggaagcatggaagacaagaggcaggggagctgccaacgattcaacccaatttaccgttgccggaagaatggtcaaaaaaggccttgccagccctacagcgattactcctgtggcatctccaatctgcggcaagacaagaggtacgacacccgtctccaaacccctggaagatattgaggccagaccagatatgcagctcgaatcagatctgaaactggaccggctcgagactttcctcagaagactcaataacaaggtgggcggtatgcacgaaaccgttctcacggttaccggcaaatctgtgaaggaagtaatgaaaccggatgacgacgagacctttgccaaattttatcggtcagtggactataacatgccaaggagtccagttgaaatggatgaggacttcgatgtgatttttgatccttatgcacccaaactgacctccagcgtggccgagcacaaaagagccgtccggccaaaacgccgggtccaggccagcaagaatcctctcaagatgctggcagctcgagaggacctgctgcaggaatatacagaacagcgtctgaatgtggcattcatggaaagtaagaggatgaaggtcgaaaagatgagttccaactccaactttagcgaggtcaccctggcagggttggctagtaaagagaacttctcaaatgtttctctccgcagcgtgaacctgactgagcaaaattccaataatagcgcagttccgtataaacggctgatgttactgcagattaagggtagacgccacgtacagacacgccttgtcgagcctagggcgagcgcgctgaatagtggggactgttttcttctactctcccctcattgttgcttcttgtgggtcggggaattcgccaatgttatcgagaaagctaaggcaagtgaactcgcaacacttatacagaccaagcgggagctgggatgtagggccacctatatacagaccatcgaagagggtataaatacacacacgcacgccgcaaaggatttttggaaactgttagggggacagacctcataccagagtgccggcgatcccaaagaagatgaactctacgaggccgccatcatagagaccaattgcatctatcgactcatggacgataagcttgtcccagacgatgactactggggcaagatccccaagtgtagtctgctgcaaccgaaggaagttctggtgttcgacttcggtagcgaagtgtacgtgtggcatggaaaagaggttacactggcgcaacgaaagattgcgttccagctggctaaacacctatggaatggaaccttcgactatgagaattgcgatatcaaccctctcgatcccggagagtgtaatcctctgatccccagaaaaggccagggtagaccagactgggccatttttggtagactcaccgaacataatgaaaccatcctgttcaaggagaagttccttgattggacagaactgaaacgctctaatgagaagaaccccggtgagctggcacagcataaggaagacccccgcaccgacgtgaaggcatacgacgttacacggatggtcagcatgcctcagacaaccgcgggaactatcctggacggggtgaacgtaggcaggggctacggacttgttgaggggcatgatcgcagacaattcgagattacctcagttagcgtcgacgtttggcacatcctcgagtttgattactcccgactccccaagcagtccatcggtcagttccatgagggggatgcctacgtcgtcaaatggaaatttatggtgtccactgctgtcggaagcaggcaaaaaggcgagcactctgtcagggccgcaggcaaagagaaatgtgtttattttttttggcagggaaggcatagcacagtgtcagaaaaaggaacttctgcattaatgacagtggagttagacgaggaaagaggagcgcaagtccaagtgctgcaagggaaagaaccaccatgtttccttcagtgtttccagggcggaatggtggtgcacagcggtagaagggaggaagaagaggaaaacgtgcagtctgagtggcggttgtactgtgtgcgaggcgaggtgccagtggagggtaatctgctcgaggtggcttgccattgttccagcctgagatcaaggacctccatggttgtcctaaatgtgaacaaggccttaatttatttatggcacgggtgtaaagcccaggcacacacaaaagaggttggtaggaccgcagccaataagataaaggagcagtgtccactggaagccgggttacattcatcttccaaagtaactatccacgagtgcgatgaggggtccgaacccctcggcttctgggatgccctcggtcgccgggatcgcaaagcctatgattgtatgctccaggacccagggtctttcaatttcgctcctcgtctcttcatcctgagttccagctctggagacttcgccgctactgagtttgtatacccggcacgcgcgccttcagtggtgtcaagcatgccattccttcaagaagatctgtactccgcccctcagcccgccctatttttggtcgacaaccaccacgaggtctatctgtggcaggggtggtggcccattgaaaacaagataacaggcagtgcccgtatccgctgggcatcggatcggaaatcagccatggagactgtgcttcagtactgcaaggggaagaacttaaagaagcctgctcccaaaagctacctcatccacgcaggcctagaacccctgaccttcaccaatatgttcccctcatgggaacatcgagaggatatcgcggagatcaccgagatggacacagaagtgagtaaccagattactttggtggaggatgtgctagccaagctgtgcaaaacaatttatcctctggcagatcttcttgcaagaccacttcccgaaggcgtggaccctttaaagttagagatctacctcacagacgaagactttgaattcgctctcgatatgacaagggatgaatacaacgccttaccggcttggaaacaggtgaacctcaagaaagctaaaggtttgttttag

SEQ ID NO: 311941 - DNA, 3387 bp, Artificial Sequence
  derived and/or modified sequence
atgttcgctgccggtgaaattaaaaccccgaccggtgaaggcctgttggatagtccaagcaaaacaatgtcaatcaaggaacgcctggccttattgaaaaagtccggggaggaggattggagaaatcgattgagcaggcggcaggagggtggaaaagcgcctgccagttccctgcacactcaagaagctggccgttccctcatcaagaaagaggaggggggtgttgccgacgattcggccataagcaacctcctctggcgggtcaccgaatcacgcgaatctcagatgaccatcgaagaaagaaaacaactgatcactgtccgggaagaggcgtggaaaacccgaggcaggggtgctgcaaatgactctactcaatttacagttgccggaaggatggttaagaaggggttggcctcccctaccgccatcaccccagtggccagtccaatctgtggtaagaccagaggtaccacaccggtgtcgaagcctctggaggatattgaggccaggcctgacatgcagctcgaatccgatcttaaactggatcgattggagactttccttcgcagactgaataataaagttggagggatgcacgaaactgtccttactgttactggcaagagtgtgaaggaagtaatgaaaccagacgacgacgagacctttgctaaattttacaggtcagtggactacaatatgcctaggagcccggtggaaatggacgaggacttcgatgtaattttcgatccatacgcccctaaactgaccagcagtgtggccgagcataaaagggccgtgcgccctaagcgccgagttcaggccagcaagaacccactaaaaatgctggcagcccgagaagatctgcttcaggagtacacagaacagcggttaaacgttgctttcatggagtctaagagaatgaaggtagagaagatgtcctctaattccaatttctcagaagtaactctggctggactggcttccaaggagaatttcagtaacgtgagtctgcggtcagtcaatctgacagaacagaactccaataactccgccgtaccctataagaggctaatgctgctgcagatcaaagggaggcgacacgtgcaaacaaggctcgtggaacctagagctagcgccctgaactctggcgactgctttctgctgctgtcacctcactgttgcttcttgtgggtgggggaatttgccaacgtgatcgaaaaggcgaaagcaagtgagctcgcaactttaatccaaaccaagagggagcttggatgtagagccacctacattcagaccatcgaagagggtattaatacccacacccacgctgccaaagatttctggaaactcttgggcggacagacttcgtaccagtcagctggagatccaaaggaggatgaactgtatgaagccgctatcatcgagaccaattgtatctatcggctcatggacgataaacttgtgcctgacgacgactactggggcaaaataccaaagtgctctctgctgcaacccaaggaagttttggtgtttgattttggctccgaagtctatgtttggcacgggaaggaggtgacactggcacaaagaaagatcgcattccaactggctaaacacctgtggaacggtacattcgactacgagaattgtgacataaatcctctcgatccaggcgagtgtaatcctctgatcccacgcaaaggacaggggaggcctgattgggccatcttcggaaggctcactgaacacaacgaaacaattttgtttaaagagaaatttctagattggactgagctcaaaaggtccaatgaaaagaatcccggtgagctcgcccagcataaagaggaccctaggaccgacgttaaggcatacgacgtgacaagaatggtgagcatgccccaaactaccgcgggaacgattctggatggagtcaatgtcggccgagggtacggtctggtcgaagggcacgatagaagacagtttgaaatcacaagtgtcagcgtggacgtttggcacatactggagtttgactactctcggcttcccaagcagtcaatcggacagttccacgagggagatgcatatgtcgtcaaatggaagttcatggtaagcaccgcagtgggttctcgccagaagggcgagcactcagtaagagctgccggtaaggaaaaatgtgtgtattttttttggcagggcaggcactcaacagtgtcggaaaaggggacgagtgccctaatgaccgtggaactcgacgaggagcgtggtgcacaggtgcaggtccttcaagggaaggaacctccgtgctttctccagtgttttcagggcggaatggtagtgcacagcgggcgacgggaggaggaagaggagaatgtgcagtccgaatggaggctctactgtgtcagaggagaggtgcctgtggaaggcaatcttttggaggtggcttgtcactgctcatccctacgctccagaacaagtatggtcgtgctcaacgtgaataaagctttaatctacctgtggcatgggtgcaaggcacaggcccatacaaaagaagtcgggagaaccgccgctaacaaaatcaaggaacagtgccccctggaagccggactccactctagcagcaaagttaccatccatgagtgtgatgagggatctgagccattggggttttgggatgccctaggtaggcgcgaccggaaagcctatgactgtatgttgcaggaccccggaagcttcaattttgccccacgacttttcattctctccagcagctctggggatttcgcggctacagagtttgtgtaccccgctcgcgcaccctcagtcgtctccagtatgccatttctccaggaagatctgtattcagcacctcagcccgctctgttcctggtcgataatcaccacgaggtttatttgtggcagggatggtggccgatcgagaataagattaccggatccgccaggatccggtgggcatctgaccggaagagtgccatggagaccgtactccagtattgcaagggcaaaaatctgaaaaagccggctcccaaaagttatctaatccatgccggactagagccactaacatttacaaatatgtttccaagttgggagcaccgtgaggatatcgctgaaattaccgagatggatacggaagtcagcaatcaaatcaccctggtcgaagacgtcctggccaagttgtgcaagactatctaccctctagccgacttgctggcaaggcccttgccggagggagttgatccccttaaattggagatctatctaacagacgaggactttgaatttgccctggacatgacgcgcgatgagtacaatgccttgccagcatggaagcaggtgaacttaaagaaggccaagggcctgttttag

SEQ ID NO: 311942 - DNA, 3556 bp, Artificial Sequence
  derived and/or modified sequence
agccacaggagaagctctgcaagaatccatgtgcgatgtttgctgctggagagatcaaaacgccgacaggggagggccttcttgactcacccagcaaaaccatgtctattaaagaaagattggcactgttgaagaaaagcggggaggaagattggagaaacagactcagcaggaggcaggagggcggcaaggcgccggccagcagcctgcacacccaggaagcagggcggtccctcatcaagaaggaagaaggaggagttgcggatgatagtgccatttctaatctgctttggcgggtcacagaaagtcgagagagccaaatgacgattgaggagaggaagcagctcatcactgtgagagaggaggcctggaagacgagaggcagaggagcggccaacgactcgacccagttcactgtggctggcaggatggtgaagaaaggtttggcgtcacctactgccataaccccagtagcctcacccatttgcggtaaaacaagaggcaccacacccgtttccaaacccctggaagatatcgaagccagaccagatatgcagttagaatcggacctgaagttggacaggctggaaacctttctaagaaggctgaataacaaagttggcgggatgcacgaaacggtgctcactgtcaccggcaaatctgtgaaggaggtgatgaagccagatgatgatgaaacctttgccaaattttaccgcagcgtggattataatatgccaagaagtcctgtggagatggatgaggacttcgatgtcattttcgatccttatgcacccaaattgacgtcttccgtggccgagcacaagcgggcagttaggcccaagcgccgggttcaggcctccaaaaaccccctgaaaatgctggcggcaagagaagatctccttcaggaatacactgagcagagattaaacgttgccttcatggagtcaaagcggatgaaagtagaaaagatgtcttccaactccaacttctcagaagtcaccctggcgggtttagccagtaaagaaaacttcagcaacgtcagcctgcggagcgtcaacctgacggaacagaactctaacaacagcgccgtgccctacaagaggctgatgctgttgcagattaaaggaagaagacatgtgcagaccaggctggtggaacctcgagcttcggcgctcaacagtggggactgcttcctcctgctctctccccactgctgcttcctgtgggtaggagagtttgcaaacgtcatagaaaaggcgaaggcctcagaacttgcaactttaattcagacaaagagggaacttggttgtagagctacttatatccaaaccattgaagaaggaattaatacacacactcatgcagccaaagacttctggaagcttctgggtggccaaaccagttaccaatctgctggagacccaaaagaagatgaactctatgaagcagccataatagaaactaactgcatttaccgtctcatggatgacaaacttgttcctgatgacgactactgggggaaaattccgaagtgctcccttctgcaacccaaagaggtactggtgtttgattttggtagtgaagtttacgtatggcatgggaaagaagtcacattagcacaacgaaaaatagcatttcagctggcaaagcacttatggaatggaacctttgactatgagaactgtgacatcaatcccctggatcctggagaatgcaatccgcttatccccagaaaaggacaggggcggcccgactgggcgatatttgggagacttactgaacacaatgagacgattttgttcaaagagaagtttctggattggacggaactgaagagatcgaatgagaagaaccccggggaacttgcccagcacaaggaagaccccaggactgatgtcaaggcatacgatgtgacacggatggtgtccatgccccagacgacagcaggcaccatcctggacggagtgaacgtcggccgtggctatggcctggtggaaggacacgacaggaggcagtttgagatcaccagcgtttccgtggatgtctggcacatcctggaattcgactatagcaggctccccaaacaaagcatcgggcagttccatgagggggatgcctatgtggtcaagtggaagttcatggtgagcacggcagtgggaagtcgccagaagggagagcactcggtgagggcagccggcaaagagaagtgcgtctacttcttctggcaaggccggcactccaccgtgagtgagaagggcacgtcggcgctgatgacggtggagctggacgaggaaaggggggcccaggtccaggttctccagggaaaggagcccccctgtttcctgcagtgtttccagggggggatggtggtgcactcggggaggcgggaagaggaagaagaaaatgtgcaaagtgagtggcggctgtactgcgtgcgtggagaggtgcccgtggaagggaatttgctggaagtggcctgtcactgtagcagcctgaggtccagaacttccatggtggtgcttaacgtcaacaaggccctcatctacctgtggcacggatgcaaagcccaggcccacacgaaggaggtcggaaggaccgctgcgaacaagatcaaggaacaatgtcccctggaagcaggactgcatagtagcagcaaagtcacaatacacgagtgtgatgaaggctccgagccactcggattctgggatgccttaggaaggagagacaggaaagcctacgattgcatgcttcaagatcctggaagttttaacttcgcgccccgcctgttcatcctcagcagctcctctggggattttgcagccacagagtttgtgtaccctgcccgagccccctctgtggtcagttccatgcccttcctgcaggaagatctgtacagcgcgccccagccagcacttttccttgttgacaatcaccacgaggtgtacctctggcaaggctggtggcccatcgagaacaagatcactggttccgcccgcatccgctgggcctccgaccggaagagtgcgatggagactgtgctccagtactgcaaaggaaaaaatctcaagaaaccagcccccaagtcttaccttatccacgctggtctggagcccctgacattcaccaatatgtttcccagctgggagcacagagaggacatcgctgagatcacagagatggacacggaagtttccaatcagatcaccctcgtggaagacgtcttagccaagctctgtaaaaccatttacccgctggccgacctcctggccaggccactcccggagggggtcgatcctctgaagcttgagatctatctcaccgacgaagacttcgagtttgcactagacatgacgagggatgaatacaacgccctgcccgcctggaagcaggtgaacctgaagaaagcaaaaggcctgttctgagtggggagacgccagaggagcctcacggtcacgtccaacaacaccactgcaccagggaaatggatatatatttttggactggtgtttttcacaaagtatttttcaatcagagttttcagaacctgacattgtta

SEQ ID NO: 311943 - protein, 766 aa, Artificial Sequence
  derived and/or modified sequence
MKRKFSLRAAEFGEPTSEQTGTAAGKTIAQTTAPVSWKPQDSSEQPQEKLCKNPCAMFAAGEIKTPTGEGLLDSPSKTMSIKERLALLKKSGEEDWRNRLSRRQEGGKAPASSLHTQEAGRSLIKKRVTESRESQMTIEERKQLITVREEAWKTRGRGAANDSTQFTVAGRMVKKGLASPTAITPVASPICGKTRGTTPVSKPLEDIEARPDMQLESDLKLDRLETFLRRLNNKVGGMHETVLTVTGKSVKEVMKPDDDETFAKFYRSVDYNMPRSPVEMDEDFDVIFDPYAPKLTSSVAEHKRAVRPKRRVQASKNPLKMLAAREDLLQEYTEQRLNVAFMESKRMKVEKMSSNSNFSEVTLAGLASKENFSNVSLRSVNLTEQNSNNSAVPYKRLMLLQIKGRRHVQTRLVEPRASALNSGDCFLLLSPHCCFLWVGEFANVIEKAKASELATLIQTKRELGCRATYIQTIEEGINTHTHAAKDFWKLLGGQTSYQSAGDPKEDELYEAAIIETNCIYRLMDDKLVPDDDYWGKIPKCSLLQPKEVLVFDFGSEVYVWHGKEVTLAQRKIAFQLAKHLWNGTFDYENCDINPLDPGECNPLIPRKGQGRPDWAIFGRLTEHNETILFKEKFLDWTELKRSNEKNPGELAQHKEDPRTDVKAYDVTRMVSMPQTTAGTILDGVNVGRGYGLVEGHDRRQFEITSVSVDVWHILEFDYSRLPKQSIGQFHEGDAYVVKWKFMVSTAVLRAWRGARGREFAGSGLSL

SEQ ID NO: 311944 - DNA, 2301 bp, Artificial Sequence
  derived and/or modified sequence
atgaagagaaagttcagcctgagagccgccgagttcggcgagcccaccagcgagcagaccggcaccgccgccggcaagaccatcgcccagaccaccgcccccgtgagctggaagccccaggacagcagcgagcagccccaggagaagctgtgcaagaacccctgcgccatgttcgccgccggcgagatcaagacccccaccggcgagggcctgctggacagccccagcaagaccatgagcatcaaggagagactggccctgctgaagaagagcggcgaggaggactggagaaacagactgagcagaagacaggagggcggcaaggcccccgccagcagcctgcacacccaggaggccggcagaagcctgatcaagaagagagtgaccgagagcagagagagccagatgaccatcgaggagagaaagcagctgatcaccgtgagagaggaggcctggaagaccagaggcagaggcgccgccaacgacagcacccagttcaccgtggccggcagaatggtgaagaagggcctggccagccccaccgccatcacccccgtggccagccccatctgcggcaagaccagaggcaccacccccgtgagcaagcccctggaggacatcgaggccagacccgacatgcagctggagagcgacctgaagctggacagactggagaccttcctgagaagactgaacaacaaggtgggcggcatgcacgagaccgtgctgaccgtgaccggcaagagcgtgaaggaggtgatgaagcccgacgacgacgagaccttcgccaagttctacagaagcgtggactacaacatgcccagaagccccgtggagatggacgaggacttcgacgtgatcttcgacccctacgcccccaagctgaccagcagcgtggccgagcacaagagagccgtgagacccaagagaagagtgcaggccagcaagaaccccctgaagatgctggccgccagagaggacctgctgcaggagtacaccgagcagagactgaacgtggccttcatggagagcaagagaatgaaggtggagaagatgagcagcaacagcaacttcagcgaggtgaccctggccggcctggccagcaaggagaacttcagcaacgtgagcctgagaagcgtgaacctgaccgagcagaacagcaacaacagcgccgtgccctacaagagactgatgctgctgcagatcaagggcagaagacacgtgcagaccagactggtggagcccagagccagcgccctgaacagcggcgactgcttcctgctgctgagcccccactgctgcttcctgtgggtgggcgagttcgccaacgtgatcgagaaggccaaggccagcgagctggccaccctgatccagaccaagagagagctgggctgcagagccacctacatccagaccatcgaggagggcatcaacacccacacccacgccgccaaggacttctggaagctgctgggcggccagaccagctaccagagcgccggcgaccccaaggaggacgagctgtacgaggccgccatcatcgagaccaactgcatctacagactgatggacgacaagctggtgcccgacgacgactactggggcaagatccccaagtgcagcctgctgcagcccaaggaggtgctggtgttcgacttcggcagcgaggtgtacgtgtggcacggcaaggaggtgaccctggcccagagaaagatcgccttccagctggccaagcacctgtggaacggcaccttcgactacgagaactgcgacatcaaccccctggaccccggcgagtgcaaccccctgatccccagaaagggccagggcagacccgactgggccatcttcggcagactgaccgagcacaacgagaccatcctgttcaaggagaagttcctggactggaccgagctgaagagaagcaacgagaagaaccccggcgagctggcccagcacaaggaggaccccagaaccgacgtgaaggcctacgacgtgaccagaatggtgagcatgccccagaccaccgccggcaccatcctggacggcgtgaacgtgggcagaggctacggcctggtggagggccacgacagaagacagttcgagatcaccagcgtgagcgtggacgtgtggcacatcctggagttcgactacagcagactgcccaagcagagcatcggccagttccacgagggcgacgcctacgtggtgaagtggaagttcatggtgagcaccgccgtgctgagagcctggagaggcgccagaggcagagagttcgccggcagcggcctgagcctgtag

SEQ ID NO: 311945 - DNA, 2301 bp, Artificial Sequence
  derived and/or modified sequence
atgaagcgcaagtttagccttagagccgccgagttcggagaacccacctcggaacaaacagggaccgctgcgggcaaaacgatcgcacagacgactgcccccgtgagctggaaacctcaggacagctcggaacagccacaggagaaactgtgcaagaatccctgcgcgatgtttgcagccggcgagatcaagacgccgacaggagagggtctcctcgattccccgtccaagacaatgtcgattaaagaacggctggcgcttctcaaaaaatccggcgaagaagattggaggaatcgtctctcacgccgacaggagggggggaaggcacccgcatcctctctgcacacgcaggaggccggcagatcactaattaaaaaacgggtcacagagagccgtgaaagtcagatgactatcgaggagaggaaacaattaattacagtgagagaagaagcctggaagactcgggggcggggagcagccaatgacagcacacaatttacggtcgccggcagaatggtgaagaagggactggcttcgcctacagccatcacccccgtggcgtccccaatatgcggcaaaacccggggaaccactccagtgagcaaacctctggaagacatcgaagctcgcccagatatgcaattagagtccgatctgaagctggataggctggagacattcctccgcagacttaacaacaaagtgggcggcatgcatgagacggtgctcacagtcacagggaaatccgttaaagaggtcatgaagcccgacgacgatgagacattcgccaaattctaccgctctgtggactataacatgccacggagcccagtggaaatggacgaagattttgatgtaatctttgacccctacgcacccaaacttacaagcagtgtggcagaacacaagcgggccgtgaggcccaaaaggcgtgtccaggccagcaaaaaccccctcaagatgctggctgcccgcgaggatctgcttcaagaatacacagaacagcgactgaatgtggctttcatggaaagcaagcggatgaaggtagagaaaatgtcgtccaatagcaatttctctgaggtgacgctagccggcttggcatccaaggaaaacttttccaatgtgtcactccgcagtgtgaacctcaccgagcagaacagtaacaacagtgccgtgccttacaagcgtctgatgctgctgcagataaagggaaggagacacgtacaaaccagactcgtggaacctcgcgcatcagcacttaactcaggtgactgctttctgctgttgtcaccgcactgctgtttcttgtgggtgggagagttcgcgaacgtgattgagaaagcaaaggccagtgaactggctacactgatccaaactaagcgggaattggggtgccgagcgacttacatccaaactattgaggagggtattaatacacatacacacgcagccaaagatttctggaaacttctgggcgggcagacttcttaccagagcgcgggcgaccccaaagaagacgagctgtatgaggcagcaatcatagagaccaattgtatttacagactgatggacgacaaactggttcctgacgacgactactggggaaagatccccaaatgctcccttctccaaccaaaagaggtcctggtttttgactttggatcagaggtttacgtttggcatggtaaggaagttacgctagcccagcgaaaaatagcctttcagctggctaagcacctgtggaatggtacgtttgattatgaaaactgcgacattaatccactggaccccggagaatgcaatcctctgattcccagaaagggacagggtaggcctgactgggcaatctttggcagactgactgagcacaacgaaacaatattgtttaaagaaaagttccttgactggaccgagctgaaacgttcaaacgaaaaaaatccgggcgagttggctcagcacaaggaagacccaaggaccgatgttaaggcctatgacgttacgcgaatggtgtcaatgccccaaactacagctggaaccatactggacggcgtgaacgtggggcggggatatggattggtcgaaggtcatgaccgaaggcaattcgagatcacgtccgtaagcgtggatgtgtggcatattctggagttcgactacagtaggctgccaaaacagtccattggtcaattccacgaaggcgacgcctatgtggtgaagtggaaatttatggtttcaacggctgtattaagagcctggaggggcgcccgagggcgagagtttgccggatccggtcttagtttatag

SEQ ID NO: 311946 - DNA, 2301 bp, Artificial Sequence
  derived and/or modified sequence
atgaagaggaagttcagcctgcgggctgctgagtttggagagcccaccagcgagcagacaggaacagctgctgggaagaccatcgcccagaccacagcccctgtgtcctggaagccccaggacagcagcgagcagccccaggagaagctgtgcaagaacccctgtgccatgtttgctgctggggagatcaagacccccactggagagggcctgctggacagccccagcaagaccatgagcatcaaggagcggctggccctgctgaagaagtctggagaggaggactggaggaaccggctgagccggcggcaggagggcggcaaggccccagccagcagcctgcacacccaggaggccggccgcagcctcatcaagaagagggtgacagagagccgggagagccagatgaccatcgaggagaggaagcagctgatcaccgtgcgggaggaggcctggaagacccggggcagaggagctgccaatgacagcacccagttcaccgtggccggccgcatggtgaagaagggcctggccagccccacagccatcacccctgtggccagccccatctgtgggaagacccggggcaccacccctgtgtccaagcccctggaggacatcgaggcccggccagacatgcagctggagagtgacctgaagctggaccggctggagaccttcctgcggcggctgaacaacaaggtgggcggcatgcatgaaacagtgctgactgtgacaggcaagtctgtgaaggaggtgatgaagccagatgatgatgagacctttgccaagttctacagatctgtggactacaacatgcccaggagccctgtggagatggatgaggactttgatgtgatctttgacccctatgcccccaagctgaccagctctgtggccgagcacaagagagctgtgcggcccaagagaagagtgcaggccagcaagaaccccctgaagatgctggccgcccgggaggacctgctgcaggagtacacagagcagaggctgaatgtggccttcatggagagcaagaggatgaaggtggagaagatgagcagcaacagcaacttcagcgaggtgaccctggccggcctggccagcaaggagaacttcagcaatgtgtccctgcggtctgtgaacctgacagagcagaacagcaacaacagcgctgtgccctacaagaggctgatgctgctgcagatcaagggcagaagacatgtgcagacccggctggtggagccccgggccagcgccctgaacagcggggactgcttcctgctgctgagcccccactgctgcttcctgtgggtgggggagtttgccaacgtgattgagaaggccaaggccagcgagctggccaccctcatccagaccaagcgggagctgggctgccgggccacctacatccagaccatcgaggagggcatcaacacccacacccatgctgccaaggacttctggaagctgctgggcggccagaccagctaccagagcgctggggaccccaaggaggatgagctgtatgaagctgccatcatcgagaccaactgcatctaccgcctgatggatgacaagctggtgcctgatgatgactactggggcaagatccccaagtgcagcctgctgcagcccaaggaggtgctggtgtttgattttggaagtgaggtgtatgtgtggcacggcaaggaggtgaccctggcccagaggaagatcgccttccagctggccaagcacctgtggaatggcacctttgattatgagaactgtgacatcaaccccctggaccctggagagtgcaaccccctcatccccaggaagggccagggccgcccagactgggccatcttcggccgcctgacagagcacaatgagaccatcctcttcaaggagaagttcctggactggacagagctgaagaggagcaatgagaagaaccctggagagctggcccagcacaaggaggaccccaggacagatgtgaaggcctatgatgtgaccaggatggtgtccatgccccagaccacagctggcaccatcctggatggagtgaatgtgggccggggctacggcctggtggagggccatgaccggcggcagtttgagatcacctctgtgtctgtggatgtgtggcacatcctggagtttgactacagccggctgcccaagcagagcatcggccagttccacgagggagatgcctacgtggtgaagtggaagttcatggtgtccacagctgtgctgcgggcctggaggggggcccggggccgggagtttgctggcagcggcctgagcctgtag

SEQ ID NO: 311947 - DNA, 2301 bp, Artificial Sequence
  derived and/or modified sequence
atgaagcggaagttcagcctgcgggccgccgagttcggcgagcccacatccgagcagacaggaaccgctgctggtaagaccatcgcccagacaaccgccccagtgtcttggaaaccacaagactcttccgaacaaccgcaggagaaactctgcaaaaacccttgcgctatgttcgccgctggagaaatcaagacgccaacgggagaaggcctgctggactctccatctaaaacgatgtccatcaaagagcggctggcacttctgaaaaagtcaggagaggaagactggaggaatcgcttatcccggcgccaagaaggcgggaaagcacccgcttctagtttacacactcaggaagccggccgcagcctcattaagaaacgcgtgaccgaatcgcgagagagtcagatgacaatcgaggagcgcaagcaactcatcaccgtgcgtgaggaggcgtggaaaacacgtggccgtggggctgctaatgactctacccagttcactgtcgccgggaggatggtgaagaaaggcctcgcctccccaacagcaattactccagtggcctctccaatttgcggcaaaacgcgtgggacaacgccggtttccaaacccctggaggacatagaagctcgcccagatatgcagttggaatcagatttgaagctcgatcgactggagacattcctccgcaggctgaataataaagtgggggggatgcatgaaactgtcctgacagtgacgggcaaaagcgtcaaggaggtgatgaagcctgatgatgacgagaccttcgccaaattttataggagcgtagactacaacatgccaagaagcccggtggagatggacgaggactttgatgtaatctttgatccatatgcaccaaagttgacctcaagtgtggcggaacacaaaagggctgtgaggcctaaaaggcgcgttcaggcaagtaaaaaccccctgaaaatgcttgcagctagagaagatctgctgcaggaatacaccgaacagcgcttgaacgttgctttcatggaatcaaagagaatgaaagtcgaaaagatgtcctccaattccaacttctcagaagtgacgctggccggattggcaagcaaagaaaatttctccaacgtctccttgcgaagcgtcaatcttactgaacaaaactctaacaatagtgcagtgccctacaagaggctgatgcttctgcagataaagggccgaaggcacgttcagacaaggctagtggaacctcgagccagcgcgctcaattctggcgattgcttcctcttgctttcaccccactgttgttttctttgggtgggggaattcgctaacgtgatagaaaaagcaaaggcgtccgagctcgccactctgattcagacgaaacgagagctgggttgcagggctacctacatccagacaattgaagaagggatcaatacccatacacatgcagccaaagatttctggaagctcctgggcggtcaaaccagctatcaatccgcgggtgatcccaaagaagatgagctgtacgaagctgccatcatcgaaacaaactgcatctaccggcttatggacgataagctcgtgccggatgatgactattggggaaagatcccaaaatgctcactcctgcagcctaaggaggtcctggtttttgattttggctctgaagtttatgtctggcacgggaaagaggttacgctggcacagcggaagatagcctttcagctggcgaagcacctgtggaacgggacgtttgactatgagaactgcgacatcaatcctctcgatcccggtgagtgcaaccctttgattccacggaaggggcaagggaggccagactgggcaatttttggaaggttgactgagcacaacgaaaccatcctcttcaaagaaaagttcctcgactggaccgaactaaagcgaagcaacgagaagaaccccggagagctggcccagcacaaggaggacccccgtactgacgtgaaagcctacgatgtgacacggatggtgtctatgccccagacaactgccggaaccatcctcgacggggtgaatgtcggtcgaggttacggcctggtggagggtcatgaccgccggcaattcgagatcacaagcgtgtctgttgacgtatggcatattttggaatttgactacagccggctgccaaagcagtccattggccaattccatgaaggtgacgcctacgtagtgaaatggaaattcatggtaagtaccgccgttctcagggcttggcgtggagctaggggacgcgagttcgccggatctggcttaagcctgtag

SEQ ID NO: 311948 - DNA, 2301 bp, Artificial Sequence
  derived and/or modified sequence
atgaaacgaaagttctctctgcgagctgccgagtttggtgagccaacaagtgaacagaccgggactgccgctgggaagacaatcgcccagactactgcgccagtgtcctggaaacctcaggattcgtctgagcagcctcaggagaagctgtgtaagaatccctgcgcaatgtttgccgctggcgaaattaagacccctacgggggagggcttgctcgatagcccttccaaaacaatgtccattaaagaaaggctggcactcctgaagaaatctggcgaagaggactggaggaatagactttcacggaggcaggagggtggcaaggcccctgccagctcccttcacacccaagaggccggtaggtctctgataaaaaagagggtcacagagagtagagaatcccagatgacaatagaggagcgcaagcagctcatcaccgtccgggaggaggcctggaagaccaggggcaggggagcagctaatgacagcacccagttcaccgtagcagggaggatggtaaaaaaagggctggcttcacctactgcaataacccctgtggcgtcccctatttgtggcaaaacaaggggcaccacaccagtgagcaagccgctagaggacatagaggcaaggcccgatatgcagcttgaaagcgacctgaagctggacagattggaaacttttcttagacggttaaataataaagtgggagggatgcatgagacagttttaaccgtgactgggaagagcgtgaaggaagtaatgaaaccagatgacgatgagacatttgccaagttttacaggtccgttgactacaacatgcccagatctcccgtggagatggacgaggacttcgacgtcatttttgacccgtatgctcctaaattgactagctctgtcgcagaacacaaacgagcagtaagacccaagaggcgcgtgcaggcctcaaaaaacccccttaaaatgctcgccgcaagagaggacctgctccaggagtacactgagcaacggctgaatgtggcctttatggaatcaaaacgtatgaaggtagagaagatgtcctcaaacagcaacttttcagaagtgacgctggccggactggcaagcaaggaaaattttagcaatgtctccctgcgctctgttaatctgactgaacagaatagcaataatagtgctgtcccatataaacgactgatgcttttgcaaattaagggaagacggcatgttcagacccgccttgtagagcctagagcaagtgcgctgaactcaggagattgcttccttctcctgtctccacattgctgctttctgtgggtcggcgagttcgctaatgtgattgagaaggccaaggcctccgagcttgcaaccctgattcaaactaaacgagagttaggatgtcgggcaacctatatacagacaatcgaagaggggataaatacccatacccacgccgctaaggacttctggaaattattggggggacagacgtcataccagtctgccggtgatccaaaagaagatgagctgtacgaggctgctattatagaaaccaattgcatctaccgcctcatggacgataaattagtgcctgacgatgattattgggggaaaatccctaaatgtagcctgctacagccaaaagaggtgcttgttttcgacttcggctcagaagtttatgtttggcatggtaaagaagtaacacttgcacagcgcaaaattgctttccagctggcaaaacacctatggaacggcacatttgactacgagaactgtgacattaatcctctggatcccggagagtgcaatccacttatcccacgaaaaggacagggacgcccagattgggccatctttggcagactcactgagcacaacgagaccattttgttcaaggaaaagttcctcgattggacagaactaaagcggtcaaatgagaagaatcctggagaactggctcagcataaggaggacccacgaactgacgtgaaggcatacgatgtcacgagaatggtttcaatgcctcagactacagccggaactatactggatggagtgaatgtcggaaggggctacgggctcgtcgagggccacgaccgaagacagttcgagattacctccgtgtctgttgacgtgtggcacattctagaatttgattattcacgcctaccaaagcagtcaatcggtcaattccatgaaggagatgcatacgtcgtaaagtggaagtttatggtgtcaacggccgtgctgagagcctggcgcggagctcgtggacgagagttcgcaggatcaggactctcattgtag

SEQ ID NO: 311949 - DNA, 1758 bp, Artificial Sequence
  derived and/or modified sequence
atgaacagcagcgacgtgagcagcctgaagcaccccagcagcctggccagccccaccgccatcacccccgtggccagccccatctgcggcaagaccagaggcaccacccccgtgagcaagcccctggaggacatcgaggccagacccgacatgcagctggagagcgacctgaagctggacagactggagaccttcctgagaagactgaacaacaaggtgggcggcatgcacgagaccgtgctgaccgtgaccggcaagagcgtgaaggaggtgatgaagcccgacgacgacgagaccttcgccaagttctacagaagcgtggactacaacatgcccagaagccccgtggagatggacgaggacttcgacgtgatcttcgacccctacgcccccaagctgaccagcagcgtggccgagcacaagagagccgtgagacccaagagaagagtgcaggccagcaagaaccccctgaagatgctggccgccagagaggacctgctgcaggagtacaccgagcagagactgaacgtggccttcatggagagcaagagaatgaaggtggagaagatgagcagcaacagcaacttcagcgaggtgaccctggccggcctggccagcaaggagaacttcagcaacgtgagcctgagaagcgtgaacctgaccgagcagaacagcaacaacagcgccgtgccctacaagagactgatgctgctgcagatcaagggcagaagacacgtgcagaccagactggtggagcccagagccagcgccctgaacagcggcgactgcttcctgctgctgagcccccactgctgcttcctgtgggtgggcgagttcgccaacgtgatcgagaaggccaaggccagcgagctggccaccctgatccagaccaagagagagctgggctgcagagccacctacatccagaccatcgaggagggcatcaacacccacacccacgccgccaaggacttctggaagctgctgggcggccagaccagctaccagagcgccggcgaccccaaggaggacgagctgtacgaggccgccatcatcgagaccaactgcatctacagactgatggacgacaagctggtgcccgacgacgactactggggcaagatccccaagtgcagcctgctgcagcccaaggaggtgctggtgttcgacttcggcagcgaggtgtacgtgtggcacggcaaggaggtgaccctggcccagagaaagatcgccttccagctggccaagcacctgtggaacggcaccttcgactacgagaactgcgacatcaaccccctggaccccggcgagtgcaaccccctgatccccagaaagggccagggcagacccgactgggccatcttcggcagactgaccgagcacaacgagaccatcctgttcaaggagaagttcctggactggaccgagctgaagagaagcaacgagaagaaccccggcgagctggcccagcacaaggaggaccccagaaccgacgtgaaggcctacgacgtgaccagaatggtgagcatgccccagaccaccgccggcaccatcctggacggcgtgaacgtgggcagaggctacggcctggtggagggccacgacagaagacagttcgagatcaccagcgtgagcgtggacgtgtggcacatcctggagttcgactacagcagactgcccaagcagagcatcggccagttccacgagggcgacgcctacgtggtgaagtggaagttcatggtgagcaccgccggctag

SEQ ID NO: 311950 - DNA, 1758 bp, Artificial Sequence
  derived and/or modified sequence
atgaatagttccgacgtctcttcgcttaaacatcccagctctcttgcatcccccaccgccatcacccccgtagcctcacccatttgcgggaagacacgaggcacaacgccagttagtaaaccccttgaggacatagaggcccgccccgatatgcaactggagagcgatctcaagctggacaggctagaaacattcctgcgacgcttgaacaacaaagtgggcgggatgcatgaaactgtcctgactgtcactggtaagagtgtgaaagaagttatgaaaccagatgacgatgaaacttttgcaaagttttacaggagtgtagactataatatgcctcgaagccctgttgaaatggatgaggacttcgatgtaattttcgacccttacgcccccaagctcacgagcagtgtggctgagcacaaacgtgctgtacggccaaagcgtcgtgtccaggcctctaaaaacccactgaaaatgctggccgccagagaggatctactgcaagagtacaccgagcagcgccttaacgttgcgtttatggaaagcaagcgcatgaaagtggagaaaatgagctcaaacagtaacttctctgaagtcacactggctggtctggccagtaaggaaaactttagcaacgtgtcgctgaggtccgtgaatctgactgagcagaattccaacaactctgccgtcccatacaagcgcctgatgttacttcaaatcaagggccggaggcacgtacaaacgagattggtcgagccaagggcaagtgccctcaacagcggcgattgtttcctactccttagcccacattgttgcttcttatgggtcggagagttcgcaaatgtcatagaaaaagctaaagccagcgaactggccaccctaatccagaccaaaagggagttgggctgccgtgccacgtatatccaaaccatagaagaaggaattaatactcacacccacgcagccaaggacttttggaagctgctgggagggcaaacaagctaccagagcgccggcgaccccaaggaagacgagttatatgaggccgccatcatcgaaacaaactgtatctatcgactgatggacgacaaactcgtgcctgacgatgattattggggcaaaatccccaagtgcagcctgctgcaacctaaggaggtactggtgttcgattttggaagcgaagtctatgtctggcacggaaaagaggtaacactcgctcagcggaaaatcgctttccaacttgcgaaacatttgtggaatggcacattcgattatgagaattgtgacattaatccgctcgatcctggcgaatgtaaccctctcatcccacggaaagggcaaggccggcctgactgggcgatcttcgggcgccttacagagcataacgagactatattgtttaaagagaagtttctggattggaccgagctgaagcgatctaacgagaaaaatcccggggagttggcccaacacaaagaggacccacgcaccgacgtgaaggcatacgatgttacccgcatggtctccatgccccagactaccgccggcaccatattagacggagtcaacgtggggcggggctatggccttgttgaagggcacgataggaggcagtttgaaatcacttccgtctctgttgatgtttggcacattctcgagttcgattattcaagactgcccaagcagtccatcggtcagtttcacgagggtgacgcttatgtggtcaagtggaaatttatggtgtccaccgcagggtag

SEQ ID NO: 311951 - DNA, 1758 bp, Artificial Sequence
  derived and/or modified sequence
atgaacagcagtgatgtgagcagcctgaagcaccccagcagcctggccagccccacagccatcacccctgtggccagccccatctgtgggaagacccggggcaccacccctgtgtccaagcccctggaggacatcgaggcccggccagacatgcagctggagagtgacctgaagctggaccggctggagaccttcctgcggcggctgaacaacaaggtgggcggcatgcatgaaacagtgctgactgtgacaggcaagtctgtgaaggaggtgatgaagccagatgatgatgagacctttgccaagttctacagatctgtggactacaacatgcccaggagccctgtggagatggatgaggactttgatgtgatctttgacccctatgcccccaagctgaccagctctgtggccgagcacaagagagctgtgcggcccaagagaagagtgcaggccagcaagaaccccctgaagatgctggccgcccgggaggacctgctgcaggagtacacagagcagaggctgaatgtggccttcatggagagcaagaggatgaaggtggagaagatgagcagcaacagcaacttcagcgaggtgaccctggccggcctggccagcaaggagaacttcagcaatgtgtccctgcggtctgtgaacctgacagagcagaacagcaacaacagcgctgtgccctacaagaggctgatgctgctgcagatcaagggcagaagacatgtgcagacccggctggtggagccccgggccagcgccctgaacagcggggactgcttcctgctgctgagcccccactgctgcttcctgtgggtgggggagtttgccaacgtgattgagaaggccaaggccagcgagctggccaccctcatccagaccaagcgggagctgggctgccgggccacctacatccagaccatcgaggagggcatcaacacccacacccatgctgccaaggacttctggaagctgctgggcggccagaccagctaccagagcgctggggaccccaaggaggatgagctgtatgaagctgccatcatcgagaccaactgcatctaccgcctgatggatgacaagctggtgcctgatgatgactactggggcaagatccccaagtgcagcctgctgcagcccaaggaggtgctggtgtttgattttggaagtgaggtgtatgtgtggcacggcaaggaggtgaccctggcccagaggaagatcgccttccagctggccaagcacctgtggaatggcacctttgattatgagaactgtgacatcaaccccctggaccctggagagtgcaaccccctcatccccaggaagggccagggccgcccagactgggccatcttcggccgcctgacagagcacaatgagaccatcctcttcaaggagaagttcctggactggacagagctgaagaggagcaatgagaagaaccctggagagctggcccagcacaaggaggaccccaggacagatgtgaaggcctatgatgtgaccaggatggtgtccatgccccagaccacagctggcaccatcctggatggagtgaatgtgggccggggctacggcctggtggagggccatgaccggcggcagtttgagatcacctctgtgtctgtggatgtgtggcacatcctggagtttgactacagccggctgcccaagcagagcatcggccagttccacgagggagatgcctacgtggtgaagtggaagttcatggtgtccacagctggatag

SEQ ID NO: 311952 - DNA, 1758 bp, Artificial Sequence
  derived and/or modified sequence
atgaacagcagcgacgtgagcagcctgaagcaccccagcagcctggcctcccctaccgcaatcactccagttgcatctcctatctgcggcaagactaggggtactactcccgtaagtaaaccattggaggacatagaggcacgcccggacatgcagctggagagcgatctgaaacttgatcgcctggagacatttctgcgcagattgaacaacaaggtggggggcatgcacgagaccgtgctaacagttaccgggaaatccgtgaaagaggtgatgaaacccgacgacgacgaaacattcgcaaaattctataggagcgttgactataacatgccacggagtcccgtagaaatggacgaggatttcgatgtgatcttcgacccctacgcacctaagctcacatcaagcgtcgcggagcacaagcgagcagtccgacctaaacggagagtacaggcctctaagaatcctctgaaaatgctagctgccagagaggatttattacaagaatacacggagcagagactgaatgttgcgtttatggaatcaaagagaatgaaagtagagaagatgtccagtaattcgaacttttccgaggttaccctagccggtctggcaagtaaagagaacttctcaaacgttagtctgagaagtgttaaccttactgagcagaattctaataattcagccgtcccatacaaaagactgatgcttctccagattaagggtcgacggcatgtccagacacggcttgtggaacccagagccagtgcgctgaacagtggtgattgcttcctcctgctgtctcctcactgctgctttctgtgggtcggcgagtttgccaacgtgattgagaaggccaaggcctctgagcttgcaactttgatacagaccaagcgcgaactcggatgccgcgctacctatattcagaccatcgaagagggcattaatacacatacccatgctgcaaaggacttctggaaacttctgggtgggcaaacatcttatcaaagcgccggggatcccaaggaggacgagctttatgaggccgcaatcattgagacaaactgtatataccgccttatggatgacaagttggtcccagacgatgactactggggaaaaatacctaagtgcagtctgttacaaccgaaagaagtcctcgttttcgacttcggatcagaggtgtacgtgtggcatggcaaggaagtgacacttgcccagcgaaaaattgctttccaattggctaagcatctctggaacggcacttttgattacgagaactgtgacatcaatccgctggaccccggcgagtgcaatcctttgatcccccggaaaggtcaagggaggcctgactgggcgatcttcggtagattaacagaacataacgaaaccatcctgttcaaggagaaatttttagactggactgagctgaagaggtcaaatgagaaaaaccctggggagttggcccaacataaggaagaccctaggacagacgtcaaggcctacgacgtgactcggatggtttcaatgcctcagactactgccgggactattctggacggtgtgaacgtgggtagaggctatggactcgtcgagggtcacgacagaaggcagtttgagataacatcagtgtccgtcgatgtgtggcatattctggaattcgactacagtagacttccgaagcagagcattggtcagttccacgaaggcgacgcctacgtggttaaatggaaatttatggtctcaaccgccggttag

SEQ ID NO: 311953 - DNA, 1758 bp, Artificial Sequence
  derived and/or modified sequence
atgaattcgagcgatgtgtcatccctgaaacacccttcttccttggcttcaccgacagcaattacacccgtggcatcacctatctgcggcaagaccagaggtacgacccctgtgtcaaaaccgttagaagatattgaagcacgtcccgatatgcaactggaaagcgatctgaaactcgaccggctcgagaccttccttaggcgcctaaataataaagtgggtggaatgcatgaaacagttctgacggtgacgggaaagagcgttaaggaggtcatgaaacccgacgatgacgaaactttcgcgaaattttatcgcagcgtggactacaacatgcccagatcccctgtggagatggacgaagatttcgacgtcatttttgacccgtatgctcccaagcttaccagcagcgtagcagaacataaacgtgccgtgaggccgaaaagaagggtacaggccagcaaaaatcctctcaagatgctggccgctcgggaagacctgctccaggagtacacagagcagagactcaacgtagcattcatggaatcaaaaaggatgaaggttgaaaaaatgtcttctaattcaaacttcagcgaagtgactctggcgggactcgcttccaaggagaattttagcaacgtgtcccttcgctcagtgaacctcaccgagcagaattcaaacaacagcgctgtgccctataaacgcctcatgctcctgcagattaagggaaggcgtcacgtgcagacccggctggtggagcccagagcatcagctttgaatagtggtgattgcttcctgctactctccccacattgctgcttcctttgggttggcgaatttgccaacgtgattgagaaggccaaggcttctgaattggcgaccctaatccagactaaacgtgaactgggctgtagagccacctatatacagacaatcgaggagggaatcaatacccatacacatgctgctaaggacttttggaagctgctgggtgggcagacatcttaccagagcgcaggagatcccaaagaagatgagttgtatgaggccgcaatcattgaaacaaattgcatctacagactgatggacgataagttggtgcctgacgatgattactggggtaaaatcccgaagtgctccctcttgcaacctaaggaggttctcgtgttcgattttggaagcgaagtttatgtttggcatggaaaagaggtcacccttgcacagcgcaaaatcgccttccaacttgcaaagcatttgtggaacggaaccttcgactacgagaattgtgacatcaatcctttagacccgggtgaatgcaaccctctcatccctcggaaaggccagggccgacccgactgggccatcttcgggaggctcaccgagcataacgaaaccatcctgtttaaggaaaagttcttggactggacagagcttaagaggagcaacgaaaagaatcccggagagctggcccagcataaagaggacccgagaacagacgttaaggcttacgatgtgacgcggatggtcagcatgcctcagacaacggccggtactattctggatggtgttaatgtgggtcgcggttacggtttggtagagggtcacgatcgaaggcagtttgagattaccagcgtgtctgtcgatgtgtggcatattctcgagttcgattactccagattacccaaacaatcaatcgggcagttccatgagggggatgcatatgtagtgaagtggaaattcatggtttccaccgccggttag

SEQ ID NO: 311954 - DNA, 2211 bp, Artificial Sequence
  derived and/or modified sequence
atggatttctccggttgctttggaaaccagccttcagagtcagtcctgttcattagctgcggagttaacggcctctgtgctaatgaactcctctgatgtctcttctcttaagcatccttctagtttggcgtcacctactgccataaccccagtagcctcacccatttgcggtaaaacaagaggcaccacacccgtttccaaacccctggaagatatcgaagccagaccagatatgcagttagaatcggacctgaagttggacaggctggaaacctttctaagaaggctgaataacaaagttggcgggatgcacgaaacggtgctcactgtcaccggcaaatctgtgaaggaggtgatgaagccagatgatgatgaaacctttgccaaattttaccgcagcgtggattataatatgccaagaagtcctgtggagatggatgaggacttcgatgtcattttcgatccttatgcacccaaattgacgtcttccgtggccgagcacaagcgggcagttaggcccaagcgccgggttcaggcctccaaaaaccccctgaaaatgctggcggcaagagaagatctccttcaggaatacactgagcagagattaaacgttgccttcatggagtcaaagcggatgaaagtagaaaagatgtcttccaactccaacttctcagaagtcaccctggcgggtttagccagtaaagaaaacttcagcaacgtcagcctgcggagcgtcaacctgacggaacagaactctaacaacagcgccgtgccctacaagaggctgatgctgttgcagattaaaggaagaagacatgtgcagaccaggctggtggaacctcgagcttcggcgctcaacagtggggactgcttcctcctgctctctccccactgctgcttcctgtgggtaggagagtttgcaaacgtcatagaaaaggcgaaggcctcagaacttgcaactttaattcagacaaagagggaacttggttgtagagctacttatatccaaaccattgaagaaggaattaatacacacactcatgcagccaaagacttctggaagcttctgggtggccaaaccagttaccaatctgctggagacccaaaagaagatgaactctatgaagcagccataatagaaactaactgcatttaccgtctcatggatgacaaacttgttcctgatgacgactactgggggaaaattccgaagtgctcccttctgcaacccaaagaggtactggtgtttgattttggtagtgaagtttacgtatggcatgggaaagaagtcacattagcacaacgaaaaatagcatttcagctggcaaagcacttatggaatggaacctttgactatgagaactgtgacatcaatcccctggatcctggagaatgcaatccgcttatccccagaaaaggacaggggcggcccgactgggcgatatttgggagacttactgaacacaatgagacgattttgttcaaagagaagtttctggattggacggaactgaagagatcgaatgagaagaaccccggggaacttgcccagcacaaggaagaccccaggactgatgtcaaggcatacgatgtgacacggatggtgtccatgccccagacgacagcaggcaccatcctggacggagtgaacgtcggccgtggctatggcctggtggaaggacacgacaggaggcagtttgagatcaccagcgtttccgtggatgtctggcacatcctggaattcgactatagcaggctccccaaacaaagcatcgggcagttccatgagggggatgcctatgtggtcaagtggaagttcatggtgagcacggcaggttagtgagcgcttgtggttttttccagctgaaagaggctggcccggcagccctgcgggagccagcttctccaatgaaccctgtcatgccctctgctgcgtccgtgcagtggggcactgcagtcatgcgcctttgagagccacctagtaaactacagagatgaaaagaagtaaggccgaattcctaacaacctagcattgccgaggccgctggtgttcacctgtagaaattgaacttgcacatcaaggcttctcagctccctctctccctcccctgcccctgtccccagagcttttctgggaaagagatgattggcctctaaatgatatttcccatgtggctgtgtgctgcttcaattaaagtcgttaagtacagc

SEQ ID NO: 311955 - protein, 906 aa, Artificial Sequence
  derived and/or modified sequence
MTSHKSGRDQRHVTQSGCNRKFKCTECGKAFKYKHHLKEHLRIHSGEKPYECPNCKKRFSHSGSYSSHISSKKCISLIPVNGRPRTGLKTSQCSSPSLSASPGSPTRPQIRQKIENKPLQEQLSVNQIKTEPVDYEFKPIVVASGINCSTPLQNGVFTGGGPLQATSSPQGMVQAVVLPTVGLVSPISINLSDIQNVLKVAVDGNVIRQVLENNQANLASKEQETINASPIQQGGHSVISAISLPLVDQDGTTKIIINYSLEQPSQLQVVPQNLKKENPVATNSCKSEKLPEDLTVKSEKDKSFEGGVNDSTCLLCDDCPGDINALPELKHYDLKQPTQPPPLPAAEAEKPESSVSSATGDGNLSPSQPPLKNLLSLLKAYYALNAQPSAEELSKIADSVNLPLDVVKKWFEKMQAGQISVQSSEPSSPEPGKVNIPAKNNDQPQSANANEPQDSTVNLQSPLKMTNSPVLPVGSTTNGSRSSTPSPSPLNLSSSRNTQGYLYTAEGAQEEPQVEPLDLSLPKQQGELLERSTITSVYQNSVYSVQEEPLNLSCAKKEPQKDSCVTDSEPVVNVIPPSANPINIAIPTVTAQLPTIVAIADQNSVPCLRALAANKQTILIPQVAYTYSTTVSPAVQEPPLKVIQPNGNQDERQDTSSEGVSNVEDQNDSDSTPPKKKMRKTENGMYACDLCDKIFQKSSSLLRHKYEHTGKRPHECGICKKAFKHKHHLIEHMRLHSGEKPYQCDKCGKRFSHSGSYSQHMNHRYSYCKREAEERDSTEQEEAGPEILSNEHVGARASPSQGDSDERESLTREEDEDSEKEEEEEDKEMEELQEEKECEKPQGDEEEEEEEEEVEEEEVEEAENEGEEAKTEGLMKDDRAESQASSLGQKVGESSEQVSEEKTNEA

SEQ ID NO: 311956 - protein, 1015 aa, Artificial Sequence
  derived and/or modified sequence
MMNASQMQKMSKTMILMLKSFYNNKTLLSFFLRHLKRTRGRAHQKPVVMMKMEHQMHFHNYSPVHIVIGYKRFTSLKEHIKYRHEKNEDNFSCSLCSYTFAYRTQLERHMTSHKSGRDQRHVTQSGCNRKFKCTECGKAFKYKHHLKEHLRIHSGEKPYECPNCKKRFSHSGSYSSHISSKKCISLIPVNGRPRTGLKTSQCSSPSLSASPGSPTRPQIRQKIENKPLQEQLSVNQIKTEPVDYEFKPIVVASGINCSTPLQNGVFTGGGPLQATSSPQGMVQAVVLPTVGLVSPISINLSDIQNVLKVAVDGNVIRQVLENNQANLASKEQETINASPIQQGGHSVISAISLPLVDQDGTTKIIINYSLEQPSQLQVVPQNLKKENPVATNSCKSEKLPEDLTVKSEKDKSFEGGVNDSTCLLCDDCPGDINALPELKHYDLKQPTQPPPLPAAEAEKPESSVSSATGDGNLSPSQPPLKNLLSLLKAYYALNAQPSAEELSKIADSVNLPLDVVKKWFEKMQAGQISVQSSEPSSPEPGKVNIPAKNNDQPQSANANEPQDSTVNLQSPLKMTNSPVLPVGSTTNGSRSSTPSPSPLNLSSSRNTQGYLYTAEGAQEEPQVEPLDLSLPKQQGELLERSTITSVYQNSVYSVQEEPLNLSCAKKEPQKDSCVTDSEPVVNVIPPSANPINIAIPTVTAQLPTIVAIADQNSVPCLRALAANKQTILIPQVAYTYSTTVSPAVQEPPLKVIQPNGNQDERQDTSSEGVSNVEDQNDSDSTPPKKKMRKTENGMYACDLCDKIFQKSSSLLRHKYEHTGKRPHECGICKKAFKHKHHLIEHMRLHSGEKPYQCDKCGKRFSHSGSYSQHMNHRYSYCKREAEERDSTEQEEAGPEILSNEHVGARASPSQGDSDERESLTREEDEDSEKEEEEEDKEMEELQEEKECEKPQGDEEEEEEEEEVEEEEVEEAENEGEEAKTEGLMKDDRAESQASSLGQKVGESSEQVSEEKTNEA

SEQ ID NO: 311957 - DNA, 2721 bp, Artificial Sequence
  derived and/or modified sequence
atgaccagccacaagagcggcagagaccagagacacgtgacccagagcggctgcaacagaaagttcaagtgcaccgagtgcggcaaggccttcaagtacaagcaccacctgaaggagcacctgagaatccacagcggcgagaagccctacgagtgccccaactgcaagaagagattcagccacagcggcagctacagcagccacatcagcagcaagaagtgcatcagcctgatccccgtgaacggcagacccagaaccggcctgaagaccagccagtgcagcagccccagcctgagcgccagccccggcagccccaccagaccccagatcagacagaagatcgagaacaagcccctgcaggagcagctgagcgtgaaccagatcaagaccgagcccgtggactacgagttcaagcccatcgtggtggccagcggcatcaactgcagcacccccctgcagaacggcgtgttcaccggcggcggccccctgcaggccaccagcagcccccagggcatggtgcaggccgtggtgctgcccaccgtgggcctggtgagccccatcagcatcaacctgagcgacatccagaacgtgctgaaggtggccgtggacggcaacgtgatcagacaggtgctggagaacaaccaggccaacctggccagcaaggagcaggagaccatcaacgccagccccatccagcagggcggccacagcgtgatcagcgccatcagcctgcccctggtggaccaggacggcaccaccaagatcatcatcaactacagcctggagcagcccagccagctgcaggtggtgccccagaacctgaagaaggagaaccccgtggccaccaacagctgcaagagcgagaagctgcccgaggacctgaccgtgaagagcgagaaggacaagagcttcgagggcggcgtgaacgacagcacctgcctgctgtgcgacgactgccccggcgacatcaacgccctgcccgagctgaagcactacgacctgaagcagcccacccagcccccccccctgcccgccgccgaggccgagaagcccgagagcagcgtgagcagcgccaccggcgacggcaacctgagccccagccagccccccctgaagaacctgctgagcctgctgaaggcctactacgccctgaacgcccagcccagcgccgaggagctgagcaagatcgccgacagcgtgaacctgcccctggacgtggtgaagaagtggttcgagaagatgcaggccggccagatcagcgtgcagagcagcgagcccagcagccccgagcccggcaaggtgaacatccccgccaagaacaacgaccagccccagagcgccaacgccaacgagccccaggacagcaccgtgaacctgcagagccccctgaagatgaccaacagccccgtgctgcccgtgggcagcaccaccaacggcagcagaagcagcacccccagccccagccccctgaacctgagcagcagcagaaacacccagggctacctgtacaccgccgagggcgcccaggaggagccccaggtggagcccctggacctgagcctgcccaagcagcagggcgagctgctggagagaagcaccatcaccagcgtgtaccagaacagcgtgtacagcgtgcaggaggagcccctgaacctgagctgcgccaagaaggagccccagaaggacagctgcgtgaccgacagcgagcccgtggtgaacgtgatcccccccagcgccaaccccatcaacatcgccatccccaccgtgaccgcccagctgcccaccatcgtggccatcgccgaccagaacagcgtgccctgcctgagagccctggccgccaacaagcagaccatcctgatcccccaggtggcctacacctacagcaccaccgtgagccccgccgtgcaggagccccccctgaaggtgatccagcccaacggcaaccaggacgagagacaggacaccagcagcgagggcgtgagcaacgtggaggaccagaacgacagcgacagcaccccccccaagaagaagatgagaaagaccgagaacggcatgtacgcctgcgacctgtgcgacaagatcttccagaagagcagcagcctgctgagacacaagtacgagcacaccggcaagagaccccacgagtgcggcatctgcaagaaggccttcaagcacaagcaccacctgatcgagcacatgagactgcacagcggcgagaagccctaccagtgcgacaagtgcggcaagagattcagccacagcggcagctacagccagcacatgaaccacagatacagctactgcaagagagaggccgaggagagagacagcaccgagcaggaggaggccggccccgagatcctgagcaacgagcacgtgggcgccagagccagccccagccagggcgacagcgacgagagagagagcctgaccagagaggaggacgaggacagcgagaaggaggaggaggaggaggacaaggagatggaggagctgcaggaggagaaggagtgcgagaagccccagggcgacgaggaggaggaggaggaggaggaggaggtggaggaggaggaggtggaggaggccgagaacgagggcgaggaggccaagaccgagggcctgatgaaggacgacagagccgagagccaggccagcagcctgggccagaaggtgggcgagagcagcgagcaggtgagcgaggagaagaccaacgaggcctag

SEQ ID NO: 311958 - DNA, 2721 bp, Artificial Sequence
  derived and/or modified sequence
atgaccagccacaagtctgggcgagaccagagacacgtcacccagagtggatgtaaccgcaaatttaagtgcacagagtgcgggaaggctttcaaatataagcaccatcttaaggagcaccttcggattcactctggcgaaaagccatatgagtgtcctaattgcaaaaaaaggttctctcatagtgggtcttatagttcccacatctccagtaaaaaatgcatttctctcataccagttaacgggagacccagaactgggcttaaaacgtcacaatgtagttctccctcactgagcgcttcccccgggagtcccacgcggcctcagataaggcagaagattgagaataaacctctccaggagcaacttagcgtaaatcagatcaaaacggaaccagtggattacgagtttaagcctattgtcgtggcatctggaataaattgcagtacgccccttcagaacggcgtgtttacaggaggcgggcctctgcaggccacctccagtccacaaggaatggttcaggctgtggtactgccaactgtggggctggtttctcctatctctataaacctctcagacatccagaatgtgctaaaagtggccgtggacggaaatgttatacgccaggtcctcgagaacaatcaagcgaacctcgccagtaaggagcaggagaccatcaatgctagccctattcagcagggtggccactctgtaatctcggctatttccctacccctggtcgaccaggatggcacaaccaagataattatcaactattctcttgaacagccctcccaactccaagtggtccctcagaatctcaaaaaagaaaaccctgtggctaccaattcctgtaagtctgaaaaactgcctgaagatctcaccgtcaagtctgaaaaggacaaatcctttgaagggggggtcaatgactccacctgtctgctctgtgatgattgccccggcgacataaacgcactgccagagctcaaacattatgacctgaaacaaccaacacagcccccacccctgccagctgctgaggccgagaagccagaatccagcgtcagttcagccaccggagacggcaacctgtcaccctcacagcctccactgaaaaacctgctgtcactgctaaaagcctattatgccctgaacgcccagccatcagcagaagaactgtcaaaaattgctgattcggtgaatttgcccctggacgtcgtcaagaagtggttcgagaagatgcaggctgggcaaatctctgtccagtctagcgagcccagcagtcccgaaccgggaaaagtcaacattccggctaaaaataatgaccagccccagtccgccaacgccaacgagccgcaggacagcacagtcaatctgcaatcaccccttaaaatgacaaacagccccgtcctgccggtggggtccactaccaacggaagtcggagctccaccccatctccatcgcctctcaacctatctagctctaggaacacgcagggctacttgtatacggcagagggagcccaggaggagccccaggtggaacctctggacctctcactgcccaaacagcagggggaattactggagcgcagtacaattacctctgtgtaccagaattctgtgtactccgtccaggaggaacctctgaatctaagctgtgcaaagaaggaaccacagaaagatagctgtgtgacggacagcgaaccagtggttaatgtcataccgccatctgctaaccctatcaacattgcaattcccacagtcactgctcaactgccaaccatcgttgccattgctgaccagaacagcgtgccatgtctgagggcactggccgccaataaacagacaattttaataccccaggtggcatatacatacagtacaaccgtgagccctgcggtccaggagcctccacttaaagttatccaaccaaatgggaatcaggacgaacggcaggacacaagttccgagggcgtgtccaatgtcgaggatcagaacgattccgatagtacgccccctaaaaaaaagatgcgcaagacagagaacgggatgtacgcatgtgatctgtgtgacaagatctttcagaaaagcagctcactgctccgccataagtatgagcacactggaaagagaccccacgaatgtgggatctgcaaaaaagcatttaagcataagcatcaccttattgaacacatgaggctgcattccggcgaaaaaccataccaatgcgataaatgcgggaagcgattcagccactcaggctcttactcccagcacatgaatcataggtactcatattgtaagagggaagcagaagagcgggactccacggaacaggaagaagccgggccagagatcctgtccaacgaacacgtgggggcgagagcttcaccttcccagggagattccgacgaacgagaaagcttgacccgagaggaagatgaggattcagagaaagaggaagaagaagaagataaagagatggaagaactgcaggaagagaaagagtgtgaaaagcctcagggcgatgaggaagaagaagaggaagaagaagaggtcgaggaggaggaggtggaagaggcagagaatgagggcgaggaggctaaaacagaaggcctaatgaaagacgaccgggctgagtcacaagcatctagtcttggccagaaagtgggcgaaagctccgagcaagtgtccgaagaaaaaaccaacgaggcgtag

SEQ ID NO: 311959 - DNA, 2721 bp, Artificial Sequence
  derived and/or modified sequence
atgaccagccacaagagcggccgggaccagagacatgtgacccagagcggctgcaacaggaagttcaagtgcacagaatgtgggaaggccttcaagtacaagcaccacctgaaggagcacctgcgcatccacagcggggagaagccctatgaatgtcccaactgcaagaagcgcttcagccacagcggcagctacagcagccacatcagcagcaagaagtgcatcagcctcatccctgtgaatggccggcccaggacaggcctgaagaccagccagtgcagcagccccagcctgagcgccagccctggcagccccacccggccccagatccggcagaagattgagaacaagcccctgcaggagcagctgtctgtgaaccagatcaagacagagcctgtggactatgagttcaagcccatcgtggtggccagcggcatcaactgcagcacccccctgcagaatggagtcttcaccggcggcggccccctgcaggccaccagcagcccccagggcatggtgcaggccgtggtgctgcccaccgtgggcctggtgagccccatcagcatcaacctgagtgacatccagaatgtgctgaaggtggccgtggatggaaatgtcatccggcaggtgctggagaacaaccaggccaacctggccagcaaggagcaggagaccatcaatgccagccccatccagcagggcggccacagcgtcatcagcgccatcagcctgcccctggtggaccaggacggcaccaccaagatcatcatcaactacagcctggagcagcccagccagctgcaggtggtgccccagaacctgaagaaggaaaatcctgtggccaccaacagctgcaagtctgagaagctgcctgaggacctgactgtgaagtctgagaaggacaagagctttgagggcggcgtgaatgacagcacctgcctgctgtgtgatgactgccctggggacatcaatgccctgcctgagctgaagcactatgacctgaagcagcccacccagcccccacccctgcctgctgctgaggccgagaagccagagagctctgtgtcctctgccactggagatggcaacctgagccccagccagccccccctgaagaacctgctgagcctgctgaaggcctactatgccctgaatgcccagcccagcgctgaggagctgagcaagattgctgacagcgtgaacctgcccctggatgtggtgaagaagtggtttgagaagatgcaggccggccagatctctgtgcagagcagcgagcccagcagccctgagcccgggaaggtgaacatcccagccaagaacaatgaccagccccagagcgccaatgccaatgagccccaggacagcacagtgaacctgcagagccccctgaagatgaccaacagccctgtgctgcctgtgggcagcaccaccaacggcagccgcagcagcacccccagccccagccccctgaacctgagcagcagcaggaacacccagggctacctgtacacagctgagggcgcccaggaggagccccaggtggagcccctggacctgagcctgcccaagcagcagggcgagctgctggagaggagcaccatcacctctgtgtaccagaacagcgtgtacagcgtgcaggaggagcccctgaacctgagctgtgccaagaaggagccccagaaggacagctgtgtgacagacagcgagcctgtggtgaatgtcatcccccccagcgccaaccccatcaacatcgccatccccaccgtgacagcccagctgcccaccatcgtggccatcgctgaccagaacagcgtgccctgcctgcgggccctggccgccaacaagcagaccatcctgatcccccaggtggcctacacctacagcaccaccgtgtccccagctgtgcaggagccccccctgaaggtgatccagcccaacggcaaccaggatgagcggcaggacaccagcagcgagggcgtgtccaatgtggaggaccagaatgacagcgacagcaccccacccaagaagaagatgaggaagacagaaaatggcatgtatgcctgtgacctgtgtgacaagatcttccagaagagcagcagcctgctgcggcacaagtatgagcacacaggcaagaggcctcatgaatgtggcatctgcaagaaggccttcaagcacaagcaccacctgattgagcacatgaggctgcacagcggggagaagccctaccagtgtgacaagtgtgggaagcgcttcagccacagcggcagctacagccagcacatgaaccaccgctacagctactgcaagcgggaggccgaggagcgggacagcacagagcaggaggaggccggccctgagatcctgagcaatgagcacgtgggcgcccgggccagccccagccagggcgacagtgatgagcgggagagcctgacccgggaggaggatgaggacagcgagaaggaggaggaggaggaggacaaggagatggaggagctgcaggaggagaaggaatgtgagaagccccagggagatgaggaggaggaggaggaggaggaggaggtggaggaggaggaggtggaggaggctgaaaatgaaggagaggaggccaagacagagggcctgatgaaggatgacagagctgagagccaggccagcagcctgggccagaaggtgggggagagcagcgagcaggtgtctgaggagaagaccaatgaggcctag

SEQ ID NO: 311960 - DNA, 2721 bp, Artificial Sequence
  derived and/or modified sequence
atgaccagccacaagagcggccgggaccagcggcacgtgacccagagtgggtgcaatcgcaagttcaaatgcacggagtgcggtaaagcctttaagtacaaacaccatctgaaagaacacttacgcatacactcaggggagaagccatacgagtgccctaattgtaagaaacgttttagtcacagcggtagctactcttctcacatctcaagcaaaaaatgcatctctctgatccctgtcaacggtcgcccccggacgggcctcaagactagccagtgtagtagccctagcctgagcgctagtcctgggagcccaacccgaccgcagatccgccagaagatagagaacaagccgttgcaagaacagctttccgtcaatcagattaagacggagcctgttgactacgagttcaagcctattgttgttgcctcgggaataaattgcagcacacccctgcaaaatggagtcttcacaggaggcggtcccctccaggcgaccagtagcccacagggaatggttcaggcggttgtactgccaacagtcggcttagtgagccctatcagcatcaaccttagcgacatccaaaacgtgctaaaagtggcagtcgatgggaacgttataagacaggtcctagaaaacaaccaggcaaacttggctagcaaggaacaggaaaccatcaacgccagtcccatccagcaaggtgggcatagcgtaattagtgcgatcagcctgccgctggtcgatcaggacgggaccactaaaattatcatcaattactctctggaacagccctctcagctgcaggtggtgccccagaacctaaagaaggagaaccccgtcgcaaccaattcatgcaaatctgaaaaactgccagaagatctgactgtgaagtcagagaaggataaatccttcgagggaggggtgaacgatagtacgtgcctgctttgtgacgactgccccggcgatatcaatgctctgccagagctgaaacattacgatctgaagcagccaacccaaccacctcctttgcccgcagccgaggctgaaaaacctgaatcctctgtgtcatctgctacgggagatggcaacctgagtccaagtcagcctcctcttaaaaacttactcagcctactaaaagcatattatgcccttaatgcacaacctagtgcagaggaactgtctaaaattgccgactccgtcaatcttccactggatgtggtcaagaagtggtttgaaaagatgcaggccggacaaattagcgtgcaatcatccgagccttctagccccgagccaggtaaagttaacataccagccaagaacaatgatcagccacagtccgccaatgccaatgagccacaggatagcacagtgaatctccaatctccgcttaagatgacaaacagcccagtcttgccagtggggtccacgacaaatggctctagatcatcaactcccagcccttccccactgaatctgagttccagcaggaacacccagggctatctgtacactgccgagggcgctcaagaagaacctcaggtcgagcccctcgacttatccctgccaaagcagcaaggggagctgctggagaggagcaccatcacttctgtgtaccaaaacagcgtgtacagcgttcaagaagagccactgaacttgtcctgcgccaagaaggagcctcagaaagattcctgcgtgaccgacagcgagcccgtggtcaacgtgatcccaccaagcgcaaacccaattaatattgccattccaactgttactgcacagcttccgaccatagtcgccatcgccgatcagaacagcgtgccctgtctgcgagcactagcagcaaacaaacagactatactcatcccccaggttgcttacacttattcgacaactgtgtcgcctgccgtccaagagcctccactgaaagtaatccagccgaatggcaatcaggacgagaggcaggataccagtagcgagggagtcagtaatgttgaagaccaaaatgacagcgacagcacaccacccaagaaaaagatgagaaaaactgaaaatggcatgtacgcatgtgatctttgcgataaaatattccaaaagagttcatctcttctgcgacacaagtatgagcatactggaaaacggccacatgagtgtggaatttgtaagaaagcctttaagcataaacatcacttaattgagcacatgaggttacatagcggtgagaagccataccaatgtgacaagtgcggcaagaggttcagtcattctggaagttatagccagcacatgaatcatcggtacagctactgcaagagagaggcggaggaaagggacagtaccgaacaggaagaagccggtcctgaaatcctatctaatgagcatgtcggggcaagagcctccccctctcagggagattctgacgagagagaaagtctgacacgcgaagaggacgaagattcggaaaaagaggaagaagaagaagacaaagagatggaggaattacaggaggagaaggagtgtgaaaaaccccagggagatgaagaggaagaagaggaagaagaggaggtagaggaggaggaggtggaggaagccgaaaacgaaggagaggaagctaagaccgaggggctgatgaaggatgaccgcgcagaatctcaagcaagctctctgggacagaaggtgggagagtcgtctgagcaagtgagtgaagagaaaacaaatgaggcttag

SEQ ID NO: 311961 - DNA, 2721 bp, Artificial Sequence
  derived and/or modified sequence
atgacaagccacaagtccggacgagaccagcgccatgttactcagtccggctgcaaccgcaagtttaagtgcacagagtgcggtaaggctttcaagtataagcaccacctgaaggaacacctccgtatccatagcggggaaaagccgtacgaatgtccgaattgtaaaaagagatttagccactccggatcctatagtagccacatctcctctaaaaagtgtattagtctgatccccgtcaatggacgtccgaggacggggctgaaaacaagtcagtgttctagcccttcgttatctgcgagtccagggagcccgacgaggccccaaatccgccagaaaatcgagaacaagcctcttcaagagcagttaagcgtgaatcagatcaagaccgaaccagttgactacgaatttaaacccatagtagtcgcatctggaatcaattgtagtacccctctccagaatggcgtctttaccgggggaggacccctgcaagccacatccagtccacaaggtatggtacaggctgtcgtcctcccgaccgttgggctggttagccctatcagcattaatctatccgacatccagaacgttctcaaggttgcagtggatggcaatgtaattagacaggtgttggaaaataaccaggctaacctagccagcaaagagcaggaaactataaacgcatctcctatacagcaggggggacacagcgtgatcagcgccatctcgctgcctctcgttgatcaggacggcacaacaaaaattattataaactacagcctcgaacagccaagtcagcttcaagttgtgccccagaacctgaaaaaggagaaccccgtcgccacaaactcgtgcaagtccgagaagctcccggaggacctgacagttaaaagcgaaaaagacaaatcatttgaggggggagttaacgactccacgtgcctcttgtgcgacgattgcccaggtgacataaacgctttgccggagctgaagcattatgacctgaagcagccaacacagcccccaccccttccagcagccgaagctgagaagccagagtcttcagtgtcaagcgctactggcgacggcaatttaagtcctagtcagcctccccttaagaacctcctctccctgctgaaggcctactacgctctaaatgcacagccatccgcagaagaactctctaagatagccgactctgtcaacctgccactggacgtggtgaaaaaatggttcgaaaaaatgcaggctggccagatctcagtgcagtcatccgagccctccagtccagaacccggaaaggtcaacatacctgctaaaaataacgatcagcctcaatccgctaacgcaaacgaaccacaagattcaactgttaatctccagtccccactcaaaatgactaatagtcctgtgcttccagttggcagcactactaacggatctcggtcttctactccctccccctcacctcttaacctgtcgagctctcgcaatactcagggctatctgtacacagcagagggcgctcaggaggagcctcaagttgagcccctcgacctgtcgttaccaaagcagcagggcgaactcctcgagcggagtactatcacaagtgtctatcaaaattcggtgtattccgtgcaggaggagcccctcaacctgtcatgcgcgaagaaggagccacagaaggattcttgcgtcaccgatagcgaacctgtcgtaaacgtgatcccgcctagcgccaatcccatcaatattgccatccctacagtaactgcccagctaccaactatagtggctattgctgaccagaatagtgtcccatgcctccgtgctctggccgcaaacaaacagaccattttaataccccaggtggcttatacttacagcactaccgtcagccctgccgtgcaggagcccccacttaaagtgatccagccaaacggcaaccaggacgaaaggcaggatacgagcagcgaaggcgttagcaatgtagaggatcaaaatgactctgactccactccaccgaagaagaaaatgcggaagacagagaatggaatgtatgcctgtgacctgtgcgacaaaattttccagaagtcctcttccctcctgcggcacaagtacgagcacaccggaaaaagacctcatgagtgcggcatatgcaagaaagcttttaaacacaagcaccacctgattgaacatatgaggctgcatagcggggaaaaaccctaccagtgtgataaatgcggaaaacgttttagccacagtggatcgtattcgcaacatatgaaccacagatattcatactgcaagcgtgaggccgaagagagagatagcactgaacaagaggaggccggtccagagatactgtccaacgaacatgtgggcgctagggcgagtcctagtcagggcgattcagatgagagagagtcccttactagggaagaggacgaagactctgaaaaggaagaggaggaggaggacaaggaaatggaggaactgcaagaggaaaaggagtgcgaaaaaccgcagggtgatgaagaggaagaagaggaggaggaagaagttgaggaagaggaagtggaagaagccgagaacgaaggagaggaagcaaagacagagggactgatgaaagatgaccgagcagagagtcaggcatcgtccctgggccagaaggtgggggagtcttcagagcaggtatcagaagagaagaccaatgaagcctag

SEQ ID NO: 311962 - protein, 466 aa, Artificial Sequence
  derived and/or modified sequence
MSTRSVSSSSYRRMFGGPGTASRPSSSRSYVTTSTRTYSLGSALRPSTSRSLYASSPGGVYATRSSAVRLRSSVPGVRLLQDSVDFSLADAINTEFKNTRTNEKVELQELNDRFANYIDKVRFLEQQNKILLAELEQLKGQGKSRLGDLYEEEMRELRRQVDQLTNDKARVEVERDNLAEDIMRLREKLQEEMLQREEAENTLQSFRQDVDNASLARLDLERKVESLQEEIAFLKKLHEEEIQELQAQIQEQHVQIDVDVSKPDLTAALRDVRQQYESVAAKNLQEAEEWYKSKFADLSEAANRNNDALRQAKQESTEYRRQVQSLTCEVDALKGTNESLERQMREMEENFAVEAANYQDTIGRLQDEIQNMKEEMARHLREYQDLLNVKMALDIEIATYRKLLEGEESRISLPLPNFSSLNLRETNLDSLPLVDTHSKRTLLIKTVETRDGQVINETSQHHDDLE

SEQ ID NO: 311963 - protein, 173 aa, Artificial Sequence
  derived and/or modified sequence
GFLVPLWLMRNCFRLQEEMLQREEAENTLQSFRQDVDNASLARLDLERKVESLQEEIAFLKKLHEEEIQELQAQIQEQHVQIDVDVSKPDLTAALRDVRQQYESVAAKNLQEAEEWYKSKFADLSEAANRNNDALRQAKQESTEYRRQVQSLTCEVDALKGTVSTNPAVKEGK

SEQ ID NO: 311964 - protein, 228 aa, Artificial Sequence
  derived and/or modified sequence
MRNCFRLQEEMLQREEAENTLQSFRQDVDNASLARLDLERKVESLQEEIAFLKKLHEEEIQELQAQIQEQHVQIDVDVSKPDLTAALRDVRQQYESVAAKNLQEAEEWYKSKFADLSEAANRNNDALRQAKQESTEYRRQVQSLTCEVDALKGTNESLERQMREMEENFAVEAANYQDTIGRLQDEIQNMKEEMARHLREYQDLLNVKMALDIEIATYRKLLEGEESR

SEQ ID NO: 311965 - protein, 431 aa, Artificial Sequence
  derived and/or modified sequence
MSTRSVSSSSYRRMFGGPGTASRPSSSRSYVTTSTRTYSLGSALRPSTSRSLYASSPGGVYATRSSAVRLRSSVPGVRLLQDSVDFSLADAINTEFKNTRTNEKVELQELNDRFANYIDKVRFLEQQNKILLAELEQLKGQGKSRLGDLYEEEMRELRRQVDQLTNDKARVEVERDNLAEDIMRLREKLQEEMLQREEAENTLQSFRQDVDNASLARLDLERKVESLQEEIAFLKKLHEEEIQELQAQIQEQHVQIDVDVSKPDLTAALRDVRQQYESVAAKNLQEAEEWYKSKFADLSEAANRNNDALRQAKQESTEYRRQVQSLTCEVDALKGTNESLERQMREMEENFAVEAANYQDTIGRLQDEIQNMKEEMARHLREYQDLLNVKMALDIEIATYRKLLEGEESRISLPLPNFSSLNLRGKHFISL

SEQ ID NO: 311966 - protein, 407 aa, Artificial Sequence
  derived and/or modified sequence
MFGGPGTASRPSSSRSYVTTSTRTYSLGSALRPSTSRSLYASSPGGVYATRSSAVRLRSSVPGVRLLQDSVDFSLADAINTEFKNTRTNEKVELQELNDRFANYIDKVRFLEQQNKILLAELEQLKGQGKSRLGDLYEEEMRELRRQVDQLTNDKARVEVERDNLAEDIMRLREKLQEEMLQREEAENTLQSFRQDVDNASLARLDLERKVESLQEEIAFLKKLHEEEIQELQAQIQEQHVQIDVDVSKPDLTAALRDVRQQYESVAAKNLQEAEEWYKSKFADLSEAANRNNDALRQAKQESTEYRRQVQSLTCEVDALKGTNESLERQMREMEENFAVEAANYQDTIGRLQDEIQNMKEEMARHLREYQDLLNVKMALDIEIATYRKLLEGEESRILCLFQTFPP

SEQ ID NO: 311967 - DNA, 522 bp, Artificial Sequence
  derived and/or modified sequence
ggcttcctggtgcccctgtggctgatgagaaactgcttcagactgcaggaggagatgctgcagagagaggaggccgagaacaccctgcagagcttcagacaggacgtggacaacgccagcctggccagactggacctggagagaaaggtggagagcctgcaggaggagatcgccttcctgaagaagctgcacgaggaggagatccaggagctgcaggcccagatccaggagcagcacgtgcagatcgacgtggacgtgagcaagcccgacctgaccgccgccctgagagacgtgagacagcagtacgagagcgtggccgccaagaacctgcaggaggccgaggagtggtacaagagcaagttcgccgacctgagcgaggccgccaacagaaacaacgacgccctgagacaggccaagcaggagagcaccgagtacagaagacaggtgcagagcctgacctgcgaggtggacgccctgaagggcaccgtgagcaccaaccccgccgtgaaggagggcaagtag

SEQ ID NO: 311968 - DNA, 687 bp, Artificial Sequence
  derived and/or modified sequence
atgagaaactgcttcagactgcaggaggagatgctgcagagagaggaggccgagaacaccctgcagagcttcagacaggacgtggacaacgccagcctggccagactggacctggagagaaaggtggagagcctgcaggaggagatcgccttcctgaagaagctgcacgaggaggagatccaggagctgcaggcccagatccaggagcagcacgtgcagatcgacgtggacgtgagcaagcccgacctgaccgccgccctgagagacgtgagacagcagtacgagagcgtggccgccaagaacctgcaggaggccgaggagtggtacaagagcaagttcgccgacctgagcgaggccgccaacagaaacaacgacgccctgagacaggccaagcaggagagcaccgagtacagaagacaggtgcagagcctgacctgcgaggtggacgccctgaagggcaccaacgagagcctggagagacagatgagagagatggaggagaacttcgccgtggaggccgccaactaccaggacaccatcggcagactgcaggacgagatccagaacatgaaggaggagatggccagacacctgagagagtaccaggacctgctgaacgtgaagatggccctggacatcgagatcgccacctacagaaagctgctggagggcgaggagagcagatag

SEQ ID NO: 311969 - DNA, 1296 bp, Artificial Sequence
  derived and/or modified sequence
atgagcaccagaagcgtgagcagcagcagctacagaagaatgttcggcggccccggcaccgccagcagacccagcagcagcagaagctacgtgaccaccagcaccagaacctacagcctgggcagcgccctgagacccagcaccagcagaagcctgtacgccagcagccccggcggcgtgtacgccaccagaagcagcgccgtgagactgagaagcagcgtgcccggcgtgagactgctgcaggacagcgtggacttcagcctggccgacgccatcaacaccgagttcaagaacaccagaaccaacgagaaggtggagctgcaggagctgaacgacagattcgccaactacatcgacaaggtgagattcctggagcagcagaacaagatcctgctggccgagctggagcagctgaagggccagggcaagagcagactgggcgacctgtacgaggaggagatgagagagctgagaagacaggtggaccagctgaccaacgacaaggccagagtggaggtggagagagacaacctggccgaggacatcatgagactgagagagaagctgcaggaggagatgctgcagagagaggaggccgagaacaccctgcagagcttcagacaggacgtggacaacgccagcctggccagactggacctggagagaaaggtggagagcctgcaggaggagatcgccttcctgaagaagctgcacgaggaggagatccaggagctgcaggcccagatccaggagcagcacgtgcagatcgacgtggacgtgagcaagcccgacctgaccgccgccctgagagacgtgagacagcagtacgagagcgtggccgccaagaacctgcaggaggccgaggagtggtacaagagcaagttcgccgacctgagcgaggccgccaacagaaacaacgacgccctgagacaggccaagcaggagagcaccgagtacagaagacaggtgcagagcctgacctgcgaggtggacgccctgaagggcaccaacgagagcctggagagacagatgagagagatggaggagaacttcgccgtggaggccgccaactaccaggacaccatcggcagactgcaggacgagatccagaacatgaaggaggagatggccagacacctgagagagtaccaggacctgctgaacgtgaagatggccctggacatcgagatcgccacctacagaaagctgctggagggcgaggagagcagaatcagcctgcccctgcccaacttcagcagcctgaacctgagaggcaagcacttcatcagcctgtag

SEQ ID NO: 311970 - DNA, 1401 bp, Artificial Sequence
  derived and/or modified sequence
atgagcaccagaagcgtgagcagcagcagctacagaagaatgttcggcggccccggcaccgccagcagacccagcagcagcagaagctacgtgaccaccagcaccagaacctacagcctgggcagcgccctgagacccagcaccagcagaagcctgtacgccagcagccccggcggcgtgtacgccaccagaagcagcgccgtgagactgagaagcagcgtgcccggcgtgagactgctgcaggacagcgtggacttcagcctggccgacgccatcaacaccgagttcaagaacaccagaaccaacgagaaggtggagctgcaggagctgaacgacagattcgccaactacatcgacaaggtgagattcctggagcagcagaacaagatcctgctggccgagctggagcagctgaagggccagggcaagagcagactgggcgacctgtacgaggaggagatgagagagctgagaagacaggtggaccagctgaccaacgacaaggccagagtggaggtggagagagacaacctggccgaggacatcatgagactgagagagaagctgcaggaggagatgctgcagagagaggaggccgagaacaccctgcagagcttcagacaggacgtggacaacgccagcctggccagactggacctggagagaaaggtggagagcctgcaggaggagatcgccttcctgaagaagctgcacgaggaggagatccaggagctgcaggcccagatccaggagcagcacgtgcagatcgacgtggacgtgagcaagcccgacctgaccgccgccctgagagacgtgagacagcagtacgagagcgtggccgccaagaacctgcaggaggccgaggagtggtacaagagcaagttcgccgacctgagcgaggccgccaacagaaacaacgacgccctgagacaggccaagcaggagagcaccgagtacagaagacaggtgcagagcctgacctgcgaggtggacgccctgaagggcaccaacgagagcctggagagacagatgagagagatggaggagaacttcgccgtggaggccgccaactaccaggacaccatcggcagactgcaggacgagatccagaacatgaaggaggagatggccagacacctgagagagtaccaggacctgctgaacgtgaagatggccctggacatcgagatcgccacctacagaaagctgctggagggcgaggagagcagaatcagcctgcccctgcccaacttcagcagcctgaacctgagagagaccaacctggacagcctgcccctggtggacacccacagcaagagaaccctgctgatcaagaccgtggagaccagagacggccaggtgatcaacgagaccagccagcaccacgacgacctggagtag

SEQ ID NO: 311971 - DNA, 1224 bp, Artificial Sequence
  derived and/or modified sequence
atgttcggcggccccggcaccgccagcagacccagcagcagcagaagctacgtgaccaccagcaccagaacctacagcctgggcagcgccctgagacccagcaccagcagaagcctgtacgccagcagccccggcggcgtgtacgccaccagaagcagcgccgtgagactgagaagcagcgtgcccggcgtgagactgctgcaggacagcgtggacttcagcctggccgacgccatcaacaccgagttcaagaacaccagaaccaacgagaaggtggagctgcaggagctgaacgacagattcgccaactacatcgacaaggtgagattcctggagcagcagaacaagatcctgctggccgagctggagcagctgaagggccagggcaagagcagactgggcgacctgtacgaggaggagatgagagagctgagaagacaggtggaccagctgaccaacgacaaggccagagtggaggtggagagagacaacctggccgaggacatcatgagactgagagagaagctgcaggaggagatgctgcagagagaggaggccgagaacaccctgcagagcttcagacaggacgtggacaacgccagcctggccagactggacctggagagaaaggtggagagcctgcaggaggagatcgccttcctgaagaagctgcacgaggaggagatccaggagctgcaggcccagatccaggagcagcacgtgcagatcgacgtggacgtgagcaagcccgacctgaccgccgccctgagagacgtgagacagcagtacgagagcgtggccgccaagaacctgcaggaggccgaggagtggtacaagagcaagttcgccgacctgagcgaggccgccaacagaaacaacgacgccctgagacaggccaagcaggagagcaccgagtacagaagacaggtgcagagcctgacctgcgaggtggacgccctgaagggcaccaacgagagcctggagagacagatgagagagatggaggagaacttcgccgtggaggccgccaactaccaggacaccatcggcagactgcaggacgagatccagaacatgaaggaggagatggccagacacctgagagagtaccaggacctgctgaacgtgaagatggccctggacatcgagatcgccacctacagaaagctgctggagggcgaggagagcagaatcctgtgcctgttccagaccttccccccctag

SEQ ID NO: 311972 - DNA, 522 bp, Artificial Sequence
  derived and/or modified sequence
ggattcctcgttccgctgtggctgatgaggaattgtttcagacttcaagaagaaatgttacagagagaagaggctgagaatacgttacagagcttccgccaagacgtggataacgcatccctcgccaggctggacttagaaaggaaggtcgagtccttacaggaagagatcgcgttcctgaagaagttgcacgaggaagagattcaggaactccaagctcagattcaggaacagcacgtccaaatcgatgtggatgttagcaaacccgatttaactgcggcattgcgcgacgtgaggcagcaatatgagtccgtggcagccaagaatcttcaagaggccgaggaatggtacaagtccaaattcgccgacctctccgaggcagccaatcgtaataacgacgccctcagacaagcgaaacaggaaagtaccgagtatcgccgacaagtgcagagcttgacctgcgaagttgacgcccttaagggcacagtcagcaccaatccagccgttaaagagggaaagtag

SEQ ID NO: 311973 - DNA, 687 bp, Artificial Sequence
  derived and/or modified sequence
atgcgaaactgttttaggctgcaggaggagatgctgcagcgggaagaggcggagaacaccctccagagctttaggcaggacgttgataatgcctccctcgccaggttggatctggaacggaaggttgaaagcctccaggaagagatagcgttcctgaaaaagttgcacgaggaagagatacaagaactccaagctcagatccaggagcaacatgtacagatcgatgtcgacgtgtccaagccagatttgaccgcagcgctgcgggacgtccgtcaacagtatgaatcggtcgcagccaaaaatttgcaggaggccgaggagtggtataagagcaagtttgccgacctaagcgaagcagccaacaggaacaacgacgctctgaggcaggcaaagcaggagtcaactgagtaccggcggcaggtgcagtcccttacttgcgaagttgacgcccttaaaggaactaacgagagcctggaacgccagatgagagagatggaagaaaatttcgccgtggaagccgctaattatcaggataccatcgggagattgcaggatgagatccaaaatatgaaggaggagatggcacgacatctgagggaataccaggatctcctgaacgtaaaaatggcgctcgatatcgaaattgctacataccgcaagctgctggaaggggaggaatcccggtag

SEQ ID NO: 311974 - DNA, 1296 bp, Artificial Sequence
  derived and/or modified sequence
atgagcacgcgcagcgtgagtagctccagttatcgacgtatgttcggtgggccagggaccgccagcagaccttcctcttctaggtcgtacgttacaacaagcacacgcacatattccttgggttccgctctgaggccatctaccagtaggagcctctacgccagtagtccagggggcgtctatgcaacccgttcttctgcagtgagactgagaagttctgtcccgggcgtgagactgctgcaggacagcgtggattttagtttggcggacgccatcaatacggaatttaaaaacactagaactaacgagaaggtcgagctgcaagaactgaatgaccgcttcgctaactacattgataaagtaagatttctcgagcagcagaataaaatactccttgctgagcttgagcagcttaaagggcagggaaaatctcgtttgggcgacttatatgaggaggagatgagagagcttaggaggcaagtggaccaactcacaaatgacaaggcccgggttgaagtggagcgggacaacctggctgaagatataatgcgtctacgcgaaaagctgcaggaggaaatgctccagagggaggaggccgaaaacacgctacaatctttcagacaggacgtggataatgcctcactggcccgcttggacctggagcggaaggtggagagtctgcaagaagaaatcgcatttctcaaaaagctgcatgaagaagaaatccaggagctgcaggctcaaatccaggaacagcatgtgcagattgatgtggatgtctctaagcccgacctgacagctgcacttagagatgtgcgtcagcagtatgaaagcgttgcagcaaaaaatctccaggaagccgaggagtggtacaaatcgaagttcgctgacctatccgaggcagctaatagaaataatgacgcgctaagacaggcgaagcaggagagtacagagtacagaagacaggtgcagtcgctgacgtgtgaagtagatgcactgaaaggtacaaacgagagtctagaacgccagatgcgggagatggaggagaatttcgctgtggaggccgcaaattaccaggacacaatcgggaggcttcaggacgaaatccagaatatgaaggaggagatggccagacacctgagagagtatcaagacttactcaacgttaaaatggccctggacatcgaaattgccacttaccgaaagttgctggagggcgaggagagccgtatctcccttcccctgcctaacttcagttcactgaatcttagaggcaaacactttatcagcttatag

SEQ ID NO: 311975 - DNA, 1401 bp, Artificial Sequence
  derived and/or modified sequence
atgtccactagatccgtgtctagctcttcatacagaagaatgttcggaggcccaggtaccgcatctagacctagtagctcacggtcttatgttaccactagcacaaggacgtactccctgggtagcgccttgagaccctctacctccagatcactctatgcgtcatcccccggaggagtttacgctactcggtcctccgccgtgagactgagatcatccgtcccaggagtccggctgcttcaggacagcgtggactttagcctggccgacgctatcaatactgaatttaagaacacccgcacgaacgagaaggtagagttacaagaactgaatgatcgcttcgcgaactatattgacaaggtccgttttctggaacagcagaacaaaatcctcctggccgagctggaacaacttaaaggccaggggaagtcaaggctgggagacctttacgaggaggagatgagggagctgcgcaggcaggtggaccagctcacaaatgacaaagcacgagttgaagtggaacgggataatctggcggaggatatcatgcggctgagagagaagctgcaagaggagatgctccagcgggaagaagccgagaacaccctccagagctttcggcaggatgtcgataatgccagtcttgctcgactggacctggagcgaaaggtcgagtctcttcaggaggagattgcttttcttaaaaaattgcacgaggaagagattcaggaactacaggctcagatccaggagcagcatgtccagattgacgttgatgtgtctaaacctgatctcacagctgctctgcgcgacgtgaggcagcaatatgaaagtgtagcagccaagaacttgcaagaggccgaggaatggtacaaatcaaaattcgcagatctctccgaagctgcaaaccgtaacaatgacgccttgcgccaggcgaagcaggagtctacagagtatcggcgccaggttcagtcgctgacctgcgaggttgatgctctgaaaggcaccaatgagtctctcgagcgacagatgcgagagatggaagaaaacttcgccgtcgaagccgccaactaccaagatacgatcggaagacttcaggacgagatacaaaatatgaaagaagagatggcccgtcatctgcgagagtaccaagacttattaaatgtcaaaatggctctggatattgaaattgcaacctaccggaagttgctggagggggaggaaagtagaatttcattgcccttaccaaacttctctagcctgaatctgcgtgagacaaatttggactcactgcccctggttgatacccacagcaaaaggacgctgctgatcaagacggtggaaacacgggatggccaggtgatcaacgagactagccagcaccatgatgacttggaatag

SEQ ID NO: 311976 - DNA, 1224 bp, Artificial Sequence
  derived and/or modified sequence
atgttcggagggccaggtactgcttcacgacctagctcttccaggtcctacgtgaccaccagcacaaggacatattctcttggaagtgctctccggccatcaacttctcgatcattatatgcgtcgtcaccgggaggagtctacgccacgcgttcatctgcggtacgattgcgttcctccgttccaggcgtgcggctgcttcaggattccgtggacttttccttggccgatgccattaatacagaattcaaaaacactcgcactaacgaaaaggtggagctgcaggagctaaacgaccgatttgccaattatatagataaggttcggtttctggaacaacaaaacaagattctgttggctgaattggaacagctgaaaggccagggcaagagcaggctaggcgacctttatgaggaggaaatgcgggagctgcggagacaggtcgaccaactaacgaatgataaagctagagtggaggtggaacgagacaatctcgccgaagatattatgcggctcagagaaaagttgcaggaagaaatgctccagagggaagaagctgagaataccctgcaatccttcagacaggatgtggataatgcgtccttggcccggctagacctagagcgcaaggttgagtcgctccaggaagagatagcctttttaaaaaagctccacgaagaggaaatccaggagctgcaggcccagatacaagagcaacatgtccaaattgatgtggatgtaagtaaaccagatctgacagcggctttacgggacgtaagacagcagtatgagtccgtggcagcgaagaatctccaagaagcagaagaatggtataagtcaaagttcgcggacctatccgaggccgccaataggaataatgacgccctccgccaggcaaagcaggaaagcaccgagtatcgaagacaggtgcagtcgctgacatgtgaggtggatgcattgaaaggcaccaatgagtctctagaacgccagatgagagagatggaagaaaactttgctgtggaggccgctaattatcaagatactatcggccgcctgcaggacgagatccagaacatgaaggaggaaatggcacggcacttaagggagtaccaggatctccttaacgtgaagatggctttagatattgagattgccacataccgcaagctgctcgaaggtgaagagagtcgaatcttgtgtctgttccagaccttcccaccttag

SEQ ID NO: 311977 - DNA, 522 bp, Artificial Sequence
  derived and/or modified sequence
ggcttcctggtgcccctgtggctgatgaggaactgcttccggctgcaggaggagatgctgcagcgggaggaggccgagaacaccctgcagagcttccggcaggatgtggacaatgccagcctggcccggctggacctggagaggaaggtggagagcctgcaggaggagatcgccttcctgaagaagctgcacgaggaggagatccaggagctgcaggcccagatccaggagcagcacgtgcagattgatgtggatgtgtccaagccagacctgacagctgccctgagagatgtgcggcagcagtatgagagcgtggccgccaagaacctgcaggaggccgaggagtggtacaagagcaagtttgctgacctgtctgaggccgccaacagaaataatgatgccctgcggcaggccaagcaggagagcacagagtaccgccggcaggtgcagagcctgacctgtgaggtggatgccctgaagggcaccgtgtccaccaacccagctgtgaaggagggcaagtag

SEQ ID NO: 311978 - DNA, 687 bp, Artificial Sequence
  derived and/or modified sequence
atgaggaactgcttccggctgcaggaggagatgctgcagcgggaggaggccgagaacaccctgcagagcttccggcaggatgtggacaatgccagcctggcccggctggacctggagaggaaggtggagagcctgcaggaggagatcgccttcctgaagaagctgcacgaggaggagatccaggagctgcaggcccagatccaggagcagcacgtgcagattgatgtggatgtgtccaagccagacctgacagctgccctgagagatgtgcggcagcagtatgagagcgtggccgccaagaacctgcaggaggccgaggagtggtacaagagcaagtttgctgacctgtctgaggccgccaacagaaataatgatgccctgcggcaggccaagcaggagagcacagagtaccgccggcaggtgcagagcctgacctgtgaggtggatgccctgaagggcaccaatgaaagcctggagcggcagatgagggagatggaggagaactttgctgtggaggccgccaactaccaggacaccatcggccgcctgcaggatgagatccagaacatgaaggaggagatggcccggcacctgcgggagtaccaggacctgctgaatgtgaagatggccctggacattgaaattgccacctacaggaagctgctggagggggaggagagcaggtag

SEQ ID NO: 311979 - DNA, 1296 bp, Artificial Sequence
  derived and/or modified sequence
atgagcaccaggtctgtgagcagcagcagctacagaaggatgtttggaggccctggaacagccagccggcccagcagcagccgctcctatgtgaccaccagcaccaggacctacagcctgggcagcgccctgcggcccagcaccagccgcagcctgtatgccagcagccctggaggagtgtatgccaccaggagcagcgctgtgcggctgcggagctctgtgcctggggtgcggctgctgcaggacagcgtggacttcagcctggctgatgccatcaacacagagttcaagaacaccaggaccaatgagaaggtggagctgcaggagctgaatgacagatttgccaactacatcgacaaggtgcgcttcctggagcagcagaacaagatcctgctggccgagctggagcagctgaagggccagggcaagagccggctgggggacctgtatgaggaggagatgagggagctgcggcggcaggtggaccagctgaccaatgacaaggcccgggtggaggtggagcgggacaacctggccgaggacatcatgaggctgcgggagaagctgcaggaggagatgctgcagcgggaggaggccgagaacaccctgcagagcttccggcaggatgtggacaatgccagcctggcccggctggacctggagaggaaggtggagagcctgcaggaggagatcgccttcctgaagaagctgcacgaggaggagatccaggagctgcaggcccagatccaggagcagcacgtgcagattgatgtggatgtgtccaagccagacctgacagctgccctgagagatgtgcggcagcagtatgagagcgtggccgccaagaacctgcaggaggccgaggagtggtacaagagcaagtttgctgacctgtctgaggccgccaacagaaataatgatgccctgcggcaggccaagcaggagagcacagagtaccgccggcaggtgcagagcctgacctgtgaggtggatgccctgaagggcaccaatgaaagcctggagcggcagatgagggagatggaggagaactttgctgtggaggccgccaactaccaggacaccatcggccgcctgcaggatgagatccagaacatgaaggaggagatggcccggcacctgcgggagtaccaggacctgctgaatgtgaagatggccctggacattgaaattgccacctacaggaagctgctggagggggaggagagccgcatcagcctgcccctgcccaacttcagcagcctgaacctgcggggcaagcacttcatcagcctgtag

SEQ ID NO: 311980 - DNA, 1401 bp, Artificial Sequence
  derived and/or modified sequence
atgagcaccaggtctgtgagcagcagcagctacagaaggatgtttggaggccctggaacagccagccggcccagcagcagccgctcctatgtgaccaccagcaccaggacctacagcctgggcagcgccctgcggcccagcaccagccgcagcctgtatgccagcagccctggaggagtgtatgccaccaggagcagcgctgtgcggctgcggagctctgtgcctggggtgcggctgctgcaggacagcgtggacttcagcctggctgatgccatcaacacagagttcaagaacaccaggaccaatgagaaggtggagctgcaggagctgaatgacagatttgccaactacatcgacaaggtgcgcttcctggagcagcagaacaagatcctgctggccgagctggagcagctgaagggccagggcaagagccggctgggggacctgtatgaggaggagatgagggagctgcggcggcaggtggaccagctgaccaatgacaaggcccgggtggaggtggagcgggacaacctggccgaggacatcatgaggctgcgggagaagctgcaggaggagatgctgcagcgggaggaggccgagaacaccctgcagagcttccggcaggatgtggacaatgccagcctggcccggctggacctggagaggaaggtggagagcctgcaggaggagatcgccttcctgaagaagctgcacgaggaggagatccaggagctgcaggcccagatccaggagcagcacgtgcagattgatgtggatgtgtccaagccagacctgacagctgccctgagagatgtgcggcagcagtatgagagcgtggccgccaagaacctgcaggaggccgaggagtggtacaagagcaagtttgctgacctgtctgaggccgccaacagaaataatgatgccctgcggcaggccaagcaggagagcacagagtaccgccggcaggtgcagagcctgacctgtgaggtggatgccctgaagggcaccaatgaaagcctggagcggcagatgagggagatggaggagaactttgctgtggaggccgccaactaccaggacaccatcggccgcctgcaggatgagatccagaacatgaaggaggagatggcccggcacctgcgggagtaccaggacctgctgaatgtgaagatggccctggacattgaaattgccacctacaggaagctgctggagggggaggagagccgcatcagcctgcccctgcccaacttcagcagcctgaacctgcgggagaccaacctggacagcctgcccctggtggacacccacagcaagaggaccctgctgatcaagacagtggagaccagagatggccaggtgatcaatgagaccagccagcaccatgatgacctggagtag

SEQ ID NO: 311981 - DNA, 1224 bp, Artificial Sequence
  derived and/or modified sequence
atgtttggaggccctggaacagccagccggcccagcagcagccgctcctatgtgaccaccagcaccaggacctacagcctgggcagcgccctgcggcccagcaccagccgcagcctgtatgccagcagccctgggggcgtgtatgccaccaggagcagcgctgtgcggctgcggagctctgtgcctggggtgcggctgctgcaggacagcgtggacttcagcctggctgatgccatcaacacagagttcaagaacaccaggaccaatgagaaggtggagctgcaggagctgaatgacagatttgccaactacatcgacaaggtgcgcttcctggagcagcagaacaagatcctgctggccgagctggagcagctgaagggccagggcaagagccggctgggggacctgtatgaggaggagatgagggagctgcggcggcaggtggaccagctgaccaatgacaaggcccgggtggaggtggagcgggacaacctggccgaggacatcatgaggctgcgggagaagctgcaggaggagatgctgcagcgggaggaggccgagaacaccctgcagagcttccggcaggatgtggacaatgccagcctggcccggctggacctggagaggaaggtggagagcctgcaggaggagatcgccttcctgaagaagctgcacgaggaggagatccaggagctgcaggcccagatccaggagcagcacgtgcagattgatgtggatgtgtccaagccagacctgacagctgccctgagagatgtgcggcagcagtatgaatctgtggccgccaagaacctgcaggaggccgaggagtggtacaagagcaagtttgctgacctgtctgaggccgccaacagaaataatgatgccctgcggcaggccaagcaggagagcacagagtaccgccggcaggtgcagagcctgacctgtgaggtggatgccctgaagggcaccaatgaaagcctggagcggcagatgagggagatggaggagaactttgctgtggaggccgccaactaccaggacaccatcggccgcctgcaggatgagatccagaacatgaaggaggagatggcccggcacctgcgggagtaccaggacctgctgaatgtgaagatggccctggacatcgagatcgccacctacaggaagctgctggagggggaggagagccgcatcctgtgcctcttccagaccttccccccatag

SEQ ID NO: 311982 - DNA, 522 bp, Artificial Sequence
  derived and/or modified sequence
ggcttcctggtgcccctgtggctgatgcggaactgcttccggctgcaagaggagatgcttcagagggaggaggctgagaacacactccagtcttttcgccaggacgtggacaacgctagtttagcgagactcgatctcgaacggaaggtggagtccctccaagaagagattgcattcctgaagaagcttcacgaggaggagatccaagaactgcaagcacagatccaggagcagcacgtccagattgacgttgatgtctcaaagcccgacctgacagctgcactccgggatgtcaggcagcagtacgaaagtgtcgcagcgaagaatctgcaggaagcagaagaatggtataaaagcaagttcgcggatctctccgaagccgctaaccggaacaatgatgcattgagacaggcaaaacaggagtctactgagtaccgcaggcaggtgcagtccctcacatgtgaggtcgatgccctgaagggcactgtcagtaccaatccggctgttaaagagggcaagtag

SEQ ID NO: 311983 - DNA, 687 bp, Artificial Sequence
  derived and/or modified sequence
atgcggaactgcttccggctgcaggaggagatgctgcagcgggaggaagctgaaaataccctccaatcgtttagacaggacgttgataatgctagtttggcgagattggacctagagagaaaagtcgagtcactgcaggaggagatcgcttttctgaagaaacttcacgaggaggagattcaggagctgcaggcgcaaatccaggagcaacatgtgcagatcgatgtggacgtttcaaagccagacctcactgccgcactgagagatgtccggcagcaatacgagtcagttgcagccaagaatctgcaggaggccgaggaatggtataaaagtaaatttgccgacctgagcgaagccgcaaaccggaataacgatgcgctgaggcaggctaaacaggagtccaccgaatacagacggcaggtgcaatctcttacgtgtgaggtggatgctctgaaagggacaaacgagtcgttggaacgccagatgagagagatggaggaaaatttcgccgtggaagctgcgaactatcaagacactatcggacggctccaggatgagatccaaaacatgaaggaggaaatggcacgccatctgcgagagtaccaggacctcttaaatgtcaaaatggccctggatattgagattgccacctaccggaaactgctcgagggggaggaatcacgatag

SEQ ID NO: 311984 - DNA, 1296 bp, Artificial Sequence
  derived and/or modified sequence
atgagcacccggagcgtgagcagcagcagctaccggcggatgttcggtggccctggaaccgccagccgcccttcctcaagccgaagctacgtcactacatccactcgtacttactcactcggctcagctctgcggcctagcacgtcacgtagtctgtatgcctcatcccctggaggcgtctatgctacaaggagcagcgctgttcggctgagatcatctgtgcccggagtgcggcttttgcaggactccgttgactttagcttggcagacgctatcaacaccgagtttaagaacacccggacaaacgagaaagtggaactacaggagctgaacgatcggttcgccaattatattgataaagtccggttcctcgaacaacagaacaagattcttctggcagaactcgagcagctgaaaggccagggcaaaagtaggctgggagatctgtatgaagaagaaatgcgggaacttcgtaggcaagttgaccagctcaccaatgataaggctcgagtcgaagtcgaacgggacaatctcgccgaggacattatgagactccgtgagaaactccaagaagaaatgctccagagagaggaggctgagaacaccctgcaatcatttcggcaggatgttgataatgcttccctcgcccggctagatttagaaaggaaagtggagtcactgcaggaggaaatagccttcctgaagaagttgcacgaagaagaaattcaggaactccaggcccagatccaggaacagcacgtgcaaattgatgtggacgtctcaaagcctgatttaaccgctgctctacgcgatgtaagacaacaatacgaatccgtagcagcaaagaatctccaggaagcagaagagtggtacaaaagtaaatttgccgacctctcggaggccgctaacagaaataacgacgcactccggcaggcaaagcaggaatcaactgagtaccggaggcaggttcagagtctgacctgtgaggtagacgccctcaagggcactaacgaatctctggaaaggcagatgcgagaaatggaggagaatttcgcggtggaggccgctaattatcaggataccattgggcgcctgcaggacgagatccagaatatgaaagaggagatggcacggcaccttcgagaatatcaggatttgcttaacgtaaaaatggctctcgacatcgaaattgccacatacagaaagctgctcgaaggtgaagagtcccgaatttctctgcccctgccgaattttagctctctcaaccttcgagggaaacactttatcagcctttag

SEQ ID NO: 311985 - DNA, 1401 bp, Artificial Sequence
  derived and/or modified sequence
atgagcacccggagcgtgagcagcagcagctaccggcggatgttcggcggtcccggcactgcaagcaggccaagcagtagcaggagttatgttaccacgtctacacggacatatagtctgggctctgctctgcggccctcaacttcccggtcactgtatgcgtctagccccgggggggtttatgcaacccgttcatccgccgtgaggctccgaagtagcgtaccaggcgttcggctgttacaggactcagttgatttctctctcgccgacgcgataaacactgagtttaaaaacacaaggactaatgaaaaggtagaactgcaagagctaaacgataggttcgccaactatatcgacaaagtgcgcttcctagagcagcagaacaagattcttctggcggaacttgagcaactaaaaggtcagggaaaatccagactgggagacttgtacgaagaggagatgagagagctgcgtcggcaggtggatcaactcactaatgataaggcaagagtcgaggtggaaagggataaccttgcagaggatataatgagactgcgcgagaagctacaagaagagatgctgcagcgcgaggaagctgaaaacacactccagtctttccgacaagacgtcgacaacgctagcctggcccgtctggacctagagcggaaggtcgagtcactgcaggaggaaattgctttcctgaaaaaactgcatgaagaggagatccaggaactgcaagctcagatccaggagcagcatgtgcaaatcgacgtggacgtttcaaagccagacttaacagccgccctccgcgatgtacggcagcagtacgagtctgtcgccgccaagaatcttcaggaagccgaagagtggtataaatcaaagtttgcagacctgagtgaggcagccaaccgcaataatgacgctctccgacaggctaagcaggaaagcaccgagtatcgcaggcaggttcagtccttgacctgtgaagtcgacgcgctcaaaggcacgaacgagagcctcgagaggcaaatgcgggagatggaagaaaactttgctgtcgaagcagccaactaccaggacaccatcggaaggctgcaagacgagatccagaatatgaaagaagagatggcgagacatttacgagaataccaggatttgctgaatgtcaagatggccttggacatcgagatcgcgacctaccgtaaactgttggagggcgaggagtcacggatttctctgcctctgcctaacttcagctccctgaacctaagagagactaatctggactccctccccctggtggacacccactccaagcggacactattgatcaagactgtagagaccagggacggacaggtaattaatgagacgtcacagcaccacgacgatctagaatag

SEQ ID NO: 311986 - DNA, 1224 bp, Artificial Sequence
  derived and/or modified sequence
atgttcggcggccccggcaccgccagccggcccagcagcagccggtcctatgtgacaacctccacacgtacctacagccttgggtccgccctacgcccgtcaacctctcgaagtctgtatgccagcagccccggcggcgtgtacgccacacgatcatccgccgtaagacttcgctcgagcgtgccaggagttcgcctgctgcaggattccgtcgacttttcattggccgatgctatcaatacggaattcaagaatactcgcacaaacgagaaagttgaactgcaagaactcaacgatcgtttcgctaactacatcgataaagttcgattcctcgagcagcagaataagattctgctggctgaattagaacaattgaagggacagggcaagtcccgactgggagacctctacgaagaggagatgcgggagctgaggaggcaggttgaccagctcacaaacgacaaggcacgcgtcgaggtggagcgcgataatctggccgaagacattatgcgtctgcgggagaagctccaagaagagatgttgcagagagaggaggccgaaaacacactccaaagtttccgacaggacgtcgataacgcatccctagcccgtcttgatctggagcgcaaggtggagagcctgcaggaggagatagccttcttgaagaagctgcatgaggaggaaatacaggaactgcaggcgcagattcaggagcagcacgtgcagatcgatgttgatgtgtcgaagccagatttgacagccgccctgcgggacgttagacaacagtacgaatccgtcgccgctaagaatcttcaggaagccgaagagtggtataaatccaaatttgctgacttgagcgaagccgctaacagaaataacgacgccctgcgacaggcaaagcaggagagcaccgagtacaggcgacaggttcagtccctgacttgtgaagtagatgccttgaaaggaacgaatgaatccctagagcggcagatgagggaaatggaggaaaatttcgcagtggaagcagccaactaccaggatactattggtcgactgcaagatgagatccagaatatgaaagaggagatggctaggcacctaagggagtaccaggatctattaaacgtgaagatggcgctggatatcgaaatcgcaacatatcgcaaactgctggaaggagaggaatctcgaatcttgtgcctctttcagactttccccccctag

SEQ ID NO: 311987 - DNA, 522 bp, Artificial Sequence
  derived and/or modified sequence
ggcttccttgtgcccctctggctgatgcggaactgcttccgtttgcaagaagagatgctccagcgagaggaggctgagaatacccttcagagcttccggcaggacgtggacaatgcttcactcgctcgcctagaccttgagcgcaaggttgaatctttacaagaggagatcgcctttctcaagaaattacatgaggaagagattcaggaacttcaggcgcaaatccaggaacagcacgtgcagattgacgtagatgtctcgaaacctgatctgaccgccgctttgcgagatgtgaggcagcagtacgagtcagtcgctgcaaaaaacctccaagaagccgaagaatggtacaagtccaaattcgccgacctgtcagaagccgctaataggaacaacgacgctctacgccaggccaagcaggaaagcacggaatacaggaggcaagttcaatcgttgacatgcgaagtagatgctcttaaagggaccgtcagcaccaacccggcagtcaaggagggtaaatag

SEQ ID NO: 311988 - DNA, 687 bp, Artificial Sequence
  derived and/or modified sequence
atgaggaactgctttaggttgcaggaagagatgctccagagggaagaggctgaaaatacactgcagagttttagacaggacgttgacaacgccagcttagcgagattggacctcgagaggaaggtcgaaagcctccaggaagaaatcgcttttctcaaaaaactccacgaagaagaaatccaagaactgcaagcacagatacaggagcagcatgttcaaatcgacgtcgatgtgtccaagccggacctcaccgccgcacttagagacgtgcggcagcagtacgagagcgttgctgccaaaaacctgcaagaggctgaggagtggtacaagagcaagtttgccgacctgagtgaagccgcaaatcggaataacgatgctctacggcaggccaagcaggagagcaccgaataccggagacaagtgcagtctctgacatgcgaggtcgacgctctgaaaggcactaacgagtcactagaacggcaaatgagagaaatggaggaaaacttcgcagtcgaggccgctaattaccaggacactatcggccgactgcaagacgagatccagaacatgaaggaggagatggctagacatctccgcgaataccaggatttgctcaacgtgaaaatggcacttgatatcgaaatcgccacttatcgtaagctgctggagggcgaggaatccaggtag

SEQ ID NO: 311989 - DNA, 1296 bp, Artificial Sequence
  derived and/or modified sequence
atgtccacccggagtgtgtcaagctcctcttatcgacgcatgtttgggggaccgggaacagctagccgtccaagtagttctcgcagctacgtgactacatctacaaggacctactcactgggttccgccctgcgaccctctacctcccggtcactgtacgccagctccccgggtggcgtctacgccacgagatcctctgctgtccggttgagatcttccgtacctggagtcagactgctgcaggattccgtcgacttcagcctggccgacgccatcaatacagaatttaagaatacccgtaccaacgaaaaggtggagctgcaagagttgaatgacaggtttgctaactacattgataaagttcgattcctggagcaacagaataaaatcctgttagcagagttggagcagctcaaaggacaaggcaagtcacggctcggagatttatacgaagaagaaatgcgagaactccggagacaggttgaccagcttacaaatgacaaggcccgagtggaagttgagcgggacaatttggctgaagacatcatgcggcttcgggaaaaactgcaggaagagatgttacaacgcgaggaggctgaaaatacactgcagtctttcaggcaggatgtggacaacgcatccttggcaagattggacctggaaaggaaggtcgaatcgctgcaggaagaaatcgcctttctgaaaaagcttcatgaggaagaaattcaggagttacaagctcagatacaggagcagcatgttcaaatcgatgtggacgtatctaagccagacctcactgccgctctgagagacgttaggcagcagtatgagtcagtggcagctaagaacctccaggaggccgaggaatggtacaagtctaaattcgctgacctgagtgaggcagctaaccgtaataacgatgcgcttcgtcaggcgaagcaagaaagtacggaataccgtcgtcaggtgcaatccctcacttgcgaggtcgatgccctcaagggcaccaacgagagtcttgagagacagatgcgtgagatggaggagaacttcgcagtcgaggccgctaactaccaagatacaatcggtcgcttacaagatgaaattcaaaacatgaaagaggaaatggcccgacacctgcgggaatatcaggatcttcttaacgtaaagatggccctcgacattgagatcgcgacctaccggaaactgctcgagggcgaggagtctcggatctctctaccgttgcctaatttctcttcgttaaatttgcgtggcaagcattttatttccttgtag

SEQ ID NO: 311990 - DNA, 1401 bp, Artificial Sequence
  derived and/or modified sequence
atgtctacaagaagcgtatcctcttcatcttacagacggatgttcggcggacctggcacagcttcgcgtccctcatccagtaggtcatacgttacgacatcaactaggacatactccctggggtccgcactgcgcccatccacctcacggtcactgtacgcttcctcccccggaggtgtgtatgcaacacgttcttcggccgtccggctgagatcgtccgtccccggagttaggctcttgcaggacagcgtcgatttctcccttgctgatgctatcaacaccgagttcaaaaatacccggacaaatgaaaaagtcgagctccaggaactgaacgataggttcgccaattatattgacaaagtaaggtttctcgagcagcagaataaaatcctactggctgagcttgaacaattaaagggccaggggaagtcccgactcggcgacctgtacgaagaggagatgagggagctgaggcggcaagttgatcagcttaccaacgataaggcaagggtggaggtggaacgagacaacttggctgaggatattatgaggctgcgagaaaagctgcaagaagaaatgcttcaaagggaggaggctgagaacacacttcagagctttagacaggacgtcgacaatgcctccttggctcgactggatctggaacgcaaggtcgaatccctgcaggaggagatcgcattcctcaagaagctacatgaggaggaaattcaggagctccaggcgcagattcaagaacagcacgttcaaatcgacgtcgacgtcagcaagccagacctgaccgcagccctccgtgatgtacgtcagcagtacgagtctgtagcagctaagaatttgcaggaggctgaggagtggtacaagtcaaaattcgccgacctgtcagaggccgctaatcgcaacaatgacgcgttgcgacaagcgaaacaggaatccactgagtatcggagacaggttcagagtcttacttgtgaggtggacgcgctgaaaggaactaacgaaagtctcgagcgccagatgcgggagatggaggaaaactttgccgtggaggccgctaactaccaagacacaataggcaggctccaggacgaaattcagaacatgaaagaggagatggcgcgtcacctgcgcgaatatcaggatctgttgaacgtcaagatggccctcgacatcgagattgcgacatatcgcaaactgctcgaaggcgaggagtcacgaatctctcttcctctgccaaatttctcttccctgaacctcagagagaccaacctagattctctgccacttgttgatactcacagtaagcgcacactgctgatcaaaactgtggagacccgagatggccaagttataaacgaaacttcacaacatcatgatgatctggagtag

SEQ ID NO: 311991 - DNA, 1224 bp, Artificial Sequence
  derived and/or modified sequence
atgtttggaggcccaggcaccgcctcaagacccagtagttcccgctcttatgtcaccacaagcacacgaacctattctttgggttcagcacttaggcccagcacttctcggtctctctacgcgtcctctccaggcggtgtatatgctacaaggtcctccgcagttagactccgctcaagtgtccccggtgtgagactgctccaggattcagtggacttttccctcgccgatgcgatcaatactgagttcaagaacacacgcactaatgaaaaagtggagctgcaggaattaaatgatcgctttgctaattacatcgacaaggtgcgtttccttgagcagcagaacaaaattctcctggctgaattagagcagctgaagggccaaggtaaatcaagactgggtgacttgtatgaggaggaaatgcgggaactgcggaggcaagtagaccaacttacaaacgacaaagcaagagtcgaggtggagcgagacaaccttgcggaggacatcatgcggctgcgcgagaaactacaggaggagatgctgcagcgggaggaggccgagaatacgcttcagtctttccggcaggacgtggataatgccagccttgcacggcttgaccttgaaagaaaggtggaaagcctccaggaagagattgcatttctgaaaaaactccatgaagaagagattcaggaactccaagctcagatccaggaacaacacgtgcagatcgatgtggacgtctcaaagccagacctcactgctgctttaagggatgtgcgacagcagtatgagagtgtagccgctaaaaacctgcaagaggccgaagaatggtataaatcgaagtttgctgatttatccgaagctgcaaatagaaataatgacgctctgcgccaggccaagcaggagagtaccgagtacaggagacaagtgcagtccctaacgtgcgaagtagacgctctgaagggtactaacgagagcctggaacgtcagatgagagaaatggaggagaactttgcggtcgaggccgctaactaccaagataccatcggcaggttacaggacgagattcaaaacatgaaagaggaaatggcccgtcacctgcgggagtaccaggatctgctcaatgtgaaaatggccttagatatcgaaatagccacatatcggaaactccttgagggtgaggagtcacgcatattgtgtctgtttcagacattccccccatag

SEQ ID NO: 311992 - DNA, 1868 bp, Artificial Sequence
  derived and/or modified sequence
ctctgccactctcgctccgaggtccccgcgccagagacgcagccgcgctcccaccacccacacccaccgcgccctcgttcgcctcttctccgggagccagtccgcgccaccgccgccgcccaggccatcgccaccctccgcagccatgtccaccaggtccgtgtcctcgtcctcctaccgcaggatgttcggcggcccgggcaccgcgagccggccgagctccagccggagctacgtgactacgtccacccgcacctacagcctgggcagcgcgctgcgccccagcaccagccgcagcctctacgcctcgtccccgggcggcgtgtatgccacgcgctcctctgccgtgcgcctgcggagcagcgtgcccggggtgcggctcctgcaggactcggtggacttctcgctggccgacgccatcaacaccgagttcaagaacacccgcaccaacgagaaggtggagctgcaggagctgaatgaccgcttcgccaactacatcgacaaggtgcgcttcctggagcagcagaataagatcctgctggccgagctcgagcagctcaagggccaaggcaagtcgcgcctgggggacctctacgaggaggagatgcgggagctgcgccggcaggtggaccagctaaccaacgacaaagcccgcgtcgaggtggagcgcgacaacctggccgaggacatcatgcgcctccgggagaaattgcaggaggagatgcttcagagagaggaagccgaaaacaccctgcaatctttcagacaggatgttgacaatgcgtctctggcacgtcttgaccttgaacgcaaagtggaatctttgcaagaagagattgcctttttgaagaaactccacgaagaggaaatccaggagctgcaggctcagattcaggaacagcatgtccaaatcgatgtggatgtttccaagcctgacctcacggctgccctgcgtgacgtacgtcagcaatatgaaagtgtggctgccaagaacctgcaggaggcagaagaatggtacaaatccaagtttgctgacctctctgaggctgccaaccggaacaatgacgccctgcgccaggcaaagcaggagtccactgagtaccggagacaggtgcagtccctcacctgtgaagtggatgcccttaaaggaaccaatgagtccctggaacgccagatgcgtgaaatggaagagaactttgccgttgaagctgctaactaccaagacactattggccgcctgcaggatgagattcagaatatgaaggaggaaatggctcgtcaccttcgtgaataccaagacctgctcaatgttaagatggcccttgacattgagattgccacctacaggaagctgctggaaggcgaggagagcaggatttctctgcctcttccaaacttttcctccctgaacctgagggaaactaatctggattcactccctctggttgatacccactcaaaaaggacacttctgattaagacggttgaaactagagatggacaggttatcaacgaaacttctcagcatcacgatgaccttgaataaaaattgcacacactcagtgcagcaatatattaccagcaagaataaaaaagaaatccatatcttaaagaaacagctttcaagtgcctttctgcagtttttcaggagcgcaagatagatttggaataggaataagctctagttcttaacaaccgacactcctacaagatttagaaaaaagtttacaacataatctagtttacagaaaaatcttgtgctagaatactttttaaaaggtattttgaataccattaaaactgcttttttttttccagcaagtatccaaccaacttggttctgcttcaataaatctttggaaaaactc

SEQ ID NO: 311993 - DNA, 753 bp, Artificial Sequence
  derived and/or modified sequence
ggtttcctcgttcccctttggttaatgcgcaactgtttcagattgcaggaggagatgcttcagagagaggaagccgaaaacaccctgcaatctttcagacaggatgttgacaatgcgtctctggcacgtcttgaccttgaacgcaaagtggaatctttgcaagaagagattgcctttttgaagaaactccacgaagaggaaatccaggagctgcaggctcagattcaggaacagcatgtccaaatcgatgtggatgtttccaagcctgacctcacggctgccctgcgtgacgtacgtcagcaatatgaaagtgtggctgccaagaacctgcaggaggcagaagaatggtacaaatccaagtttgctgacctctctgaggctgccaaccggaacaatgacgccctgcgccaggcaaagcaggagtccactgagtaccggagacaggtgcagtccctcacctgtgaagtggatgcccttaaaggaaccgtgagtaccaaccctgcagtaaaagagggaaaataatgacccattctgctgactaggctcatgatgatacctgaacaaaatgttgagtgagtaaaaatgtatatcataatgcaaagaaaatgagttatcaagacagactcaaaagggacttcatggaactcttgaaggttttagcttgcctatatcattgcttctaatatgaaggacttggtactcgcattctccacctaaaattagagtggtcgccatttgccgctaatggaaatt

SEQ ID NO: 311994 - DNA, 2666 bp, Artificial Sequence
  derived and/or modified sequence
aagtagctgggcctcgggagggggctggagggagaggggaacgcccccccggcccccgcgagagctgccacgcccttggggatgtggccggggggaggcctgccagggagacagcggagagcggggctgtggctgtggtggcgcagccccgcccagaacccagaccttgcagttcgcatttcctcctctgtccccacacattgcccaaggacgctccgtttcaagttacagatttcttaaaactaccactttgtgtgcagttgaaggcccttgggcacaatgagagccagtcctccaaactttcagaaagtttcctgccccttctggcaggctgccaatcaccgggcgggagaaggaaggaggggaaggcggtggagggagcgagacaaagggatggtccctcgggggcggggatggcggggctgtcctgtaggtctgtgcggccaccgtgattgcccctctgcgcggtgcccgaagtcccgctgaaacctgccgagggcagcaggtctgaaagctgcaggcgctagttgcgcggaggtggcgcagctgctctggaggcgcagagcgaatacgtggtgtttgggtgtggccgccccgcccctggcggtttcctcgttcccctttggttaatgcgcaactgtttcagattgcaggaggagatgcttcagagagaggaagccgaaaacaccctgcaatctttcagacaggatgttgacaatgcgtctctggcacgtcttgaccttgaacgcaaagtggaatctttgcaagaagagattgcctttttgaagaaactccacgaagaggaaatccaggagctgcaggctcagattcaggaacagcatgtccaaatcgatgtggatgtttccaagcctgacctcacggctgccctgcgtgacgtacgtcagcaatatgaaagtgtggctgccaagaacctgcaggaggcagaagaatggtacaaatccaagtttgctgacctctctgaggctgccaaccggaacaatgacgccctgcgccaggcaaagcaggagtccactgagtaccggagacaggtgcagtccctcacctgtgaagtggatgcccttaaaggaaccaatgagtccctggaacgccagatgcgtgaaatggaagagaactttgccgttgaagctgctaactaccaagacactattggccgcctgcaggatgagattcagaatatgaaggaggaaatggctcgtcaccttcgtgaataccaagacctgctcaatgttaagatggcccttgacattgagattgccacctacaggaagctgctggaaggcgaggagagcaggtagggaactcagacttggatgcgtgaactaatggtgaccatttgttaggccctgtgccactgggctctaagcagtgtcacatttaatctttagaaagtttctttgaggtaactgctttccactttttgtagaggaggaatttgaattgagagagagtaagtgacttgctgaaaaagggttaatcaacagcagagctgggatttgaacccataactctgtcaaagcctccactcctaactcctgttcatgctcctgtggagaaaatgcttgtagtaacatattttaaatgtactaacaagaccagtcatgggaaaatgtttctgagacaaatctctagtttatgatttaaaacagtacgttttcttacgtgacgaaaacaaaaagtgtgttaatttgttcccagtggttgaagttatttgccaacaattttactgtttctcttcatctgtttataggatttctctgcctcttccaaacttttcctccctgaacctgaggggtaagcattttatttccctttaggaaaaacgtcagctgcttgtaaccactgtgtttatgtcaaagcattcattttttttaggatatctgaaaaaatgccatataagagaaaactctataaaacatctataattttcgaacccaagtacactcttgcattctatgctttaagttaaatgcaaactcctttttccttcttcctgctgcaagtactatctcatcctgatgctcaagagtgtcagggcctgggtttccaaacagagactaccctaaaattatttggcgagtagtactttacacaattgcctctcccccacaaatcataattgtttcagtaaaatggttacttggtttttccaagaaaaaactcgtttttactcatttttggcctgtttgtttatttagaaactaatctggattcactccctctggttgatacccactcaaaaaggacacttctgattaagacggttgaaactagagatggacaggttatcaacgaaacttctcagcatcacgatgaccttgaataaaaattgcacacactcagtgcagcaatatattaccagcaagaataaaaaagaaatccatatcttaaagaaacagctttcaagtgcctttctgcagtttttcaggagcgcaagatagatttggaataggaataagctctagttcttaacaaccgacactcctacaagatttagaaaaaagtttacaacataatctagtttacagaaaaatcttgtgctagaatactttttaaaaggtattttgaataccattaaaactgcttttttttttccagcaagtatccaaccaacttggttctgcttcaataaatctttggaaaaactc

SEQ ID NO: 311995 - DNA, 2272 bp, Artificial Sequence
  derived and/or modified sequence
ctctgccactctcgctccgaggtccccgcgccagagacgcagccgcgctcccaccacccacacccaccgcgccctcgttcgcctcttctccgggagccagtccgcgccaccgccgccgcccaggccatcgccaccctccgcagccatgtccaccaggtccgtgtcctcgtcctcctaccgcaggatgttcggcggcccgggcaccgcgagccggccgagctccagccggagctacgtgactacgtccacccgcacctacagcctgggcagcgcgctgcgccccagcaccagccgcagcctctacgcctcgtccccgggcggcgtgtatgccacgcgctcctctgccgtgcgcctgcggagcagcgtgcccggggtgcggctcctgcaggactcggtggacttctcgctggccgacgccatcaacaccgagttcaagaacacccgcaccaacgagaaggtggagctgcaggagctgaatgaccgcttcgccaactacatcgacaaggtgcgcttcctggagcagcagaataagatcctgctggccgagctcgagcagctcaagggccaaggcaagtcgcgcctgggggacctctacgaggaggagatgcgggagctgcgccggcaggtggaccagctaaccaacgacaaagcccgcgtcgaggtggagcgcgacaacctggccgaggacatcatgcgcctccgggagaaattgcaggaggagatgcttcagagagaggaagccgaaaacaccctgcaatctttcagacaggatgttgacaatgcgtctctggcacgtcttgaccttgaacgcaaagtggaatctttgcaagaagagattgcctttttgaagaaactccacgaagaggaaatccaggagctgcaggctcagattcaggaacagcatgtccaaatcgatgtggatgtttccaagcctgacctcacggctgccctgcgtgacgtacgtcagcaatatgaaagtgtggctgccaagaacctgcaggaggcagaagaatggtacaaatccaagtttgctgacctctctgaggctgccaaccggaacaatgacgccctgcgccaggcaaagcaggagtccactgagtaccggagacaggtgcagtccctcacctgtgaagtggatgcccttaaaggaaccaatgagtccctggaacgccagatgcgtgaaatggaagagaactttgccgttgaagctgctaactaccaagacactattggccgcctgcaggatgagattcagaatatgaaggaggaaatggctcgtcaccttcgtgaataccaagacctgctcaatgttaagatggcccttgacattgagattgccacctacaggaagctgctggaaggcgaggagagcaggatttctctgcctcttccaaacttttcctccctgaacctgaggggtaagcattttatttccctttaggaaaaacgtcagctgcttgtaaccactgtgtttatgtcaaagcattcattttttttaggatatctgaaaaaatgccatataagagaaaactctataaaacatctataattttcgaacccaagtacactcttgcattctatgctttaagttaaatgcaaactcctttttccttcttcctgctgcaagtactatctcatcctgatgctcaagagtgtcagggcctgggtttccaaacagagactaccctaaaattatttggcgagtagtactttacacaattgcctctcccccacaaatcataattgtttcagtaaaatggttacttggtttttccaagaaaaaactcgtttttactcatttttggcctgtttgtttatttagaaactaatctggattcactccctctggttgatacccactcaaaaaggacacttctgattaagacggttgaaactagagatggacaggttatcaacgaaacttctcagcatcacgatgaccttgaataaaaattgcacacactcagtgcagcaatatattaccagcaagaataaaaaagaaatccatatcttaaagaaacagctttcaagtgcctttctgcagtttttcaggagcgcaagatagatttggaataggaataagctctagttcttaacaaccgacactcctacaagatttagaaaaaagtttacaacataatctagtttacagaaaaatcttgtgctagaatactttttaaaaggtattttgaataccattaaaactgcttttttttttccagcaagtatccaaccaacttggttctgcttcaataaatctttggaaaaactc

SEQ ID NO: 311996 - DNA, 2128 bp, Artificial Sequence
  derived and/or modified sequence
gcctctccaaaggctgcagaagtttcttgctaacaaaaagtccgcacattcgagcaaagacaggctttagcgagttattaaaaacttaggggcgctcttgtcccccacagggcccgaccgcacacagcaaggcgatggcccagctgtaagttggtagcactgagaactagcagcgcgcgcggagcccgctgagacttgaatcaatctggtctaacggtttcccctaaaccgctaggagccctcaatcggcgggacagcagggcgcgtcctctgccactctcgctccgaggtccccgcgccagagacgcagccgcgctcccaccacccacacccaccgcgccctcgttcgcctcttctccgggagccagtccgcgccaccgccgccgcccaggccatcgccaccctccgcagccatgtccaccaggtccgtgtcctcgtcctcctaccgcaggatgttcggcggcccgggcaccgcgagccggccgagctccagccggagctacgtgactacgtccacccgcacctacagcctgggcagcgcgctgcgccccagcaccagccgcagcctctacgcctcgtccccgggcggcgtgtatgccacgcgctcctctgccgtgcgcctgcggagcagcgtgcccggggtgcggctcctgcaggactcggtggacttctcgctggccgacgccatcaacaccgagttcaagaacacccgcaccaacgagaaggtggagctgcaggagctgaatgaccgcttcgccaactacatcgacaaggtgcgcttcctggagcagcagaataagatcctgctggccgagctcgagcagctcaagggccaaggcaagtcgcgcctgggggacctctacgaggaggagatgcgggagctgcgccggcaggtggaccagctaaccaacgacaaagcccgcgtcgaggtggagcgcgacaacctggccgaggacatcatgcgcctccgggagaaattgcaggaggagatgcttcagagagaggaagccgaaaacaccctgcaatctttcagacaggatgttgacaatgcgtctctggcacgtcttgaccttgaacgcaaagtggaatctttgcaagaagagattgcctttttgaagaaactccacgaagaggaaatccaggagctgcaggctcagattcaggaacagcatgtccaaatcgatgtggatgtttccaagcctgacctcacggctgccctgcgtgacgtacgtcagcaatatgaaagtgtggctgccaagaacctgcaggaggcagaagaatggtacaaatccaagtttgctgacctctctgaggctgccaaccggaacaatgacgccctgcgccaggcaaagcaggagtccactgagtaccggagacaggtgcagtccctcacctgtgaagtggatgcccttaaaggaaccaatgagtccctggaacgccagatgcgtgaaatggaagagaactttgccgttgaagctgctaactaccaagacactattggccgcctgcaggatgagattcagaatatgaaggaggaaatggctcgtcaccttcgtgaataccaagacctgctcaatgttaagatggcccttgacattgagattgccacctacaggaagctgctggaaggcgaggagagcaggatttctctgcctcttccaaacttttcctccctgaacctgagggaaactaatctggattcactccctctggttgatacccactcaaaaaggacacttctgattaagacggttgaaactagagatggacaggttatcaacgaaacttctcagcatcacgatgaccttgaataaaaattgcacacactcagtgcagcaatatattaccagcaagaataaaaaagaaatccatatcttaaagaaacagctttcaagtgcctttctgcagtttttcaggagcgcaagatagatttggaataggaataagctctagttcttaacaaccgacactcctacaagatttagaaaaaagtttacaacataatctagtttacagaaaaatcttgtgctagaatactttttaaaaggtattttgaataccattaaaactgcttttttttttccagcaagtatccaaccaacttggttctgcttcaataaatctttgg

SEQ ID NO: 311997 - DNA, 1819 bp, Artificial Sequence
  derived and/or modified sequence
ctctgccactctcgctccgaggtccccgcgccagagacgcagccgcgctcccaccacccacacccaccgcgccctcgttcgcctcttctccgggagccagtccgcgccaccgccgccgcccaggccatcgccaccctccgcaggatgttcggcggcccgggcaccgcgagccggccgagctccagccggagctacgtgactacgtccacccgcacctacagcctgggcagcgcgctgcgccccagcaccagccgcagcctctacgcctcgtccccgggcggcgtgtatgccacgcgctcctctgccgtgcgcctgcggagcagcgtgcccggggtgcggctcctgcaggactcggtggacttctcgctggccgacgccatcaacaccgagttcaagaacacccgcaccaacgagaaggtggagctgcaggagctgaatgaccgcttcgccaactacatcgacaaggtgcgcttcctggagcagcagaataagatcctgctggccgagctcgagcagctcaagggccaaggcaagtcgcgcctgggggacctctacgaggaggagatgcgggagctgcgccggcaggtggaccagctaaccaacgacaaagcccgcgtcgaggtggagcgcgacaacctggccgaggacatcatgcgcctccgggagaaattgcaggaggagatgcttcagagagaggaagccgaaaacaccctgcaatctttcagacaggatgttgacaatgcgtctctggcacgtcttgaccttgaacgcaaagtggaatctttgcaagaagagattgcctttttgaagaaactccacgaagaggaaatccaggagctgcaggctcagattcaggaacagcatgtccaaatcgatgtggatgtttccaagcctgacctcacggctgccctgcgtgacgtacgtcagcaatatgaaagtgtggctgccaagaacctgcaggaggcagaagaatggtacaaatccaagtttgctgacctctctgaggctgccaaccggaacaatgacgccctgcgccaggcaaagcaggagtccactgagtaccggagacaggtgcagtccctcacctgtgaagtggatgcccttaaaggaaccaatgagtccctggaacgccagatgcgtgaaatggaagagaactttgccgttgaagctgctaactaccaagacactattggccgcctgcaggatgagattcagaatatgaaggaggaaatggctcgtcaccttcgtgaataccaagacctgctcaatgttaagatggcccttgacattgagattgccacctacaggaagctgctggaaggcgaggagagcaggattctctgcctcttccaaacttttcctccctgaacctgagggaaactaatctggattcactccctctggttgatacccactcaaaaaggacacttctgattaagacggttgaaactagagatggacaggttatcaacgaaacttctcagcatcacgatgaccttgaataaaaattgcacacactcagtgcagcaatatattaccagcaagaataaaaaagaaatccatatcttaaagaaacagctttcaagtgcctttctgcagtttttcaggagcgcaagatagatttggaataggaataagctctagttcttaacaaccgacactcctacaagatttagaaaaaagtttacaacataatctagtttacagaaaaatcttgtgctagaatactttttaaaaggtattttgaataccattaaaactgcttttttttttccagcaagtatccaaccaacttggttctgcttcaataaatctttgg

SEQ ID NO: 311998 - DNA, 1401 bp, Artificial Sequence
  derived and/or modified sequence
atgtcgacacggagcgtgtcatcaagctcatatcgtagaatgtttggtggtcccggtaccgcctccaggccttcctcaagtagatcctacgtcacaacctctactaggacctactctcttggttcagctttgaggccctcaacctcgagaagtctttatgcctccagccctgggggcgtatacgcaactaggagttctgcagtccggcttaggagttctgtgcccggtgtgcggctcctacaggattccgtcgacttcagcttagccgacgctatcaatacagaatttaaaaacacacggaccaatgagaaagtggagttgcaggaactgaacgatcggtttgcaaattatatcgacaaggtgcggtttttggagcagcagaacaaaatccttctcgccgagctggagcagttgaaaggtcagggcaaatcccgtttgggtgacctgtatgaggaagagatgcgggaactccgaagacaagtggaccaattgaccaacgacaaggcccgggtagaagtggagagagacaaccttgcagaggacatcatgcgcctccgagaaaagctgcaggaagagatgttacaacgggaggaggctgagaacaccctccagtcatttcggcaagacgttgataacgcgtctctggcgcgactggatcttgaaaggaaggtcgaatccctgcaagaggaaatagcattcctgaaaaagctccatgaagaagagatccaggagcttcaggcccaaattcaggagcagcatgtgcagattgatgtggacgtgtccaagcccgatcttactgccgctcttcgggatgtccgtcagcagtatgaaagcgtggccgctaagaaccttcaggaagctgaagaatggtacaagtctaagtttgcagatcttagcgaagccgcgaacagaaacaatgatgcgctcagacaggctaaacaagaatccaccgagtaccgtagacaagtgcaaagcctgacctgtgaggtggatgccctcaaaggcacaaacgaatccttagagcgccaaatgagggagatggaagaaaacttcgccgtggaagccgccaactatcaggataccattggccgacttcaagatgaaatccagaatatgaaggaagaaatggcacggcatctgcgagaatatcaagacctgctgaatgtgaagatggccctcgatattgagatcgccacttatagaaaactgctcgaaggagaggagagccgcatatcattgccactgcccaacttttcgtcacttaacctgcgggagacaaacttagattctctgcccctggtggatactcatagtaaacgtactctgctgatcaaaaccgttgaaactagggatgggcaggtaattaatgagacaagtcaacatcatgatgatctggaatag

SEQ ID NO: 311999 - DNA, 1401 bp, Artificial Sequence
  derived and/or modified sequence
atgagcacccggagcgtgagcagcagcagctaccggcggatgttcggcgggcctggtacggcaagtagaccctccagttcccgaagctacgtgacaaccagtacccggacgtattccctgggaagtgcacttagaccctcgacgtctcggtccctgtatgccagttcacctggtggggtgtacgccaccagaagctcagccgtgcgtttgagatcatccgtccccggggtgaggttattacaggactctgttgatttcagtctcgcagatgccataaatactgagtttaagaacactcgtacgaatgagaaggtggagctccaagaactgaacgatcgcttcgccaattacatagataaggtgagatttctcgaacagcagaataaaatacttttggctgaactggagcaactgaagggacagggcaagagtcgtctgggcgatctttatgaagaggagatgagggaactgaggaggcaggtggatcagctcactaacgataaagcaagagtggaagtcgaaagagataatttggcggaagacataatgaggctgagggagaaactgcaggaagaaatgctgcagcgagaggaggcagagaacacgctgcagagcttcaggcaggatgtggacaatgcctccctggcaaggctcgatctcgagcgcaaggtggagagtctgcaggaggagatcgctttcctgaagaagctacacgaggaagagatccaggaactccaggctcagatccaagaacaacacgtacaaatcgatgtggacgtgagcaagcctgatttaaccgccgccctccgagacgtcaggcagcagtatgagtccgtagccgccaaaaacttacaggaggccgaagaatggtacaagtctaagtttgctgacctgagcgaggcggccaatcgcaacaatgatgcgctgaggcaagcaaaacaagaatcgactgagtatcgtcgacaggtgcaaagcctgacctgcgaagttgacgccctgaagggcacaaacgaatccttggagagacaaatgagagagatggaagagaactttgctgtggaggccgccaactatcaagatacgatcggccggctgcaggatgaaattcagaacatgaaagaggagatggccagacacctgagagaatatcaggacctcctgaatgtgaagatggcactggacatcgagatcgctacttaccgaaaattgctggaaggggaagagtccagaatttccctcccactgcctaacttttcgtctttgaatctgagagagacaaacctggattctctgcctcttgtggatacccattctaaacgcacattgctgattaagacagtggaaactcgagacggacaggtgatcaacgagacctctcaacaccatgatgatcttgagtag

SEQ ID NO: 312000 - DNA, 1401 bp, Artificial Sequence
  derived and/or modified sequence
atgagcacaagatcagtcagctcttcgagctaccggaggatgttcggcggtccaggaaccgcctcccggccatcgtcctccagatcatatgtaacaacttcaacgaggacctactccctcgggagtgcactgagacctagtacgagccggtcactgtatgcctcctcccctggcggtgtgtatgcgacacgaagcagcgccgtcaggctgcggagttctgtccctggagtgcgtctgttgcaggactccgttgactttagtcttgccgacgcgattaatactgaatttaaaaacacccggacaaatgaaaaggtcgaactgcaggaactcaacgacaggttcgctaactatatcgacaaggtccgcttcctggagcagcagaacaagatccttctcgctgagctggaacagctgaagggccagggcaagtctcgtctcggagatctttatgaggaagagatgcgggagctcaggcgacaggtggatcagctgactaacgacaaagccagagttgaggtcgaacgcgataacctagccgaagacatcatgcgacttagagagaagctgcaggaagagatgcttcagcgcgaggaagccgagaacacactgcagtcatttcggcaggacgtcgataacgcgagtctggccagattggatcttgagaggaaagtggaaagtctgcaggaggagatcgcctttttgaaaaagctccatgaagaggaaatccaggaattacaggcacagatccaggagcaacacgtccagattgatgtggacgtctctaaacccgatctgaccgctgcacttagagatgtacggcaacaatatgaaagcgtagccgctaagaacttacaagaagctgaggagtggtacaagtcaaagtttgcagacttgtctgaggcagctaatagaaacaacgacgcactgcgtcaggctaaacaggagtccacagaatacaggagacaagtgcagagcttgacttgtgaggttgacgcgctcaagggaactaatgaatccttagagagacaaatgcgcgaaatggaggagaattttgctgtcgaagccgctaattatcaggacaccattggaagactgcaggacgaaatccagaatatgaaagaggaaatggccagacacctgagggagtaccaggatctactcaacgtcaaaatggccctggacatcgaaattgctacctaccgcaaactactcgagggagaggaaagtaggatttccttacccctgcccaactttagttctttaaatctgcgggaaaccaacttggacagcctgcctctggtcgatactcatagcaagaggaccctgttgattaaaaccgtcgagacacgcgacggccaagttattaatgagacttctcagcatcacgacgacctggagtag

SEQ ID NO: 312001 - protein, 567 aa, Artificial Sequence
  derived and/or modified sequence
MQCCGLVHRRRVRVSYGSADSYTSRPSDSDVSLEEDREAVRREAERQAQAQLEKAKTKPVAFAVRTNVSYSAAHEDDVPVPGMAISFEAKDFLHVKEKFNNDWWIGRLVKEGCEIGFIPSPVKLENMRLQHEQRAKQGKFYSSKSGGNSSSSLGDIVPSSRKSTPPSSAKQKQKSTEHTPPYDVVPSMRPVVLVGPSLKGYEVTDMMQKALFDFLKHRFEGRISITRVTADISLAKRSVLNNPSKHAIIERSNTRSSLAEVQSEIERIFELARTLQLVVLDADTINHPAQLSKTSLAPIIVYVKISSPKVLQRLIKSRGKSQAKHLNVQMVAADKLAQCPPELFDVILDENQLEDACEHLADYLEAYWKATHPPSSSLPNPLLSRTLATSSLPLSPTLASNSQGSQGDQRTDRSAPIRSASQAEEEPSVEPVKKSQHRSSSSAPHHNHRSGTSRGLSRQETFDSETQESRDSAYVEPKEDYSHDHVDHYASHRDHNHRDETHGSSDHRHRESRHRSRDVDREQDHNECNKQRSRHKSKDRYCEKDGEVISKKRNEAGEWNRDVYIRQ

SEQ ID NO: 312002 - DNA, 1704 bp, Artificial Sequence
  derived and/or modified sequence
atgcaatgttgtggcctcgtgcaccgtagaagagtcagagtaagttatggcagcgctgattcctacacctcccgcccttctgatagtgacgtttctttggaggaggacagagaggcagtacgacgggaagccgaacggcaggctcaggcccaacttgaaaaagcgaaaacaaaacctgtggcattcgctgttaggactaacgtatcatactccgcagctcatgaggacgatgtgcccgtccctggcatggccatttctttcgaagcaaaagacttcctacacgttaaagagaagtttaacaacgactggtggatcggcagacttgttaaagaggggtgtgagatcggttttatccccagtccagtgaaattggaaaacatgcggcttcagcatgagcagcgggctaagcagggcaagttctattcatcgaaatccggggggaatagtagtagctccttaggagacattgttccatcctctcgaaagtcgacccctccctcctccgcgaagcagaaacagaagagtactgaacacactccgccttatgatgtcgtcccaagcatgagaccggtcgtgttagtgggaccttcacttaagggctatgaagtgactgacatgatgcagaaagccctcttcgatttcctcaagcatcgatttgaaggacggatcagtattaccagggtaaccgccgacataagcctcgcaaagcgttccgtgctgaacaacccctcaaaacacgcaattatcgagagatccaatacacgctctagcttggctgaagtccagtccgagatcgagagaattttcgagctggccagaactctgcagctcgtggtgctggatgcggatacgattaatcacccagcacagcttagcaaaacgtcccttgctcccatcatcgtttacgtaaagatcagctcccctaaggtgctgcagcggcttattaaatcgagaggaaagtcccaggctaaacacttaaacgttcagatggttgcggcagataagctggctcagtgtcctcccgagctctttgacgtaattctggatgaaaaccagttggaggacgcctgtgaacatctagcggactatctcgaggcctattggaaagctacccacccaccctctagctccctgcccaacccattactctctcggactctcgcaacgtcctccttgcctctttctcccaccctggcttctaacagccaaggatcccagggggatcaacgcacagatcgatctgccccgatccgatccgcctcacaggccgaggaggagccatcagtggagccggtgaagaagtcccagcaccggtcttctagctctgccccccaccacaaccatcgctctggcacgagtagggggctgagccgtcaggaaaccttcgacagcgagacccaggagtctcgcgatagcgcttatgttgagcctaaagaggattactcgcacgaccatgtcgatcattatgcgtcccaccgagaccataatcaccgcgatgagacgcatggctcaagcgaccaccgtcacagagagagtagacatcggtcaagggatgtcgaccgggagcaggatcataatgaatgcaataaacagaggtcccggcacaagagtaaagacagatactgcgaaaaagatggtgaggtcattagcaagaaacggaacgaggctggagaatggaatagggatgtgtatatacgacaatag

SEQ ID NO: 312003 - DNA, 1704 bp, Artificial Sequence
  derived and/or modified sequence
atgcagtgctgcggcctggtgcacagaagaagagtgcgggtgtcctatggcagcgctgacagctacaccagccggcccagcgacagtgatgtgtccctggaggaggaccgggaggccgtgagaagagaggccgagcggcaggcccaggcccagctggagaaggccaagaccaagcctgtggcctttgctgtgaggaccaacgtgtcctacagcgctgcccatgaagatgatgtgcctgtgcccggcatggccatcagctttgaggccaaggacttcctgcacgtgaaggagaagttcaacaatgactggtggattggccgcctggtgaaggagggctgtgaaattggcttcatccccagccctgtgaagctggagaacatgaggctgcagcacgagcagagggccaagcagggcaagttctacagcagcaagagcggcggcaacagcagcagcagcctgggggacatcgtgcccagcagcaggaagagcaccccacccagcagcgccaagcagaagcagaagagcacagagcacaccccaccctatgatgtggtgcccagcatgaggcctgtggtgctggtgggccccagcctgaagggctatgaggtgacagacatgatgcagaaggccctgtttgacttcctgaagcacagatttgagggccgcatcagcatcaccagggtgacagctgacatcagcctggccaagaggtctgtgctgaacaaccccagcaagcacgccatcatcgagaggagcaacaccaggagcagcctggccgaggtgcagagcgagattgagcgcatctttgagctggcccggaccctgcagctggtggtgctggatgctgacaccatcaaccacccagcccagctgagcaagaccagcctggcccccatcatcgtgtatgtgaagatcagcagccccaaggtgctgcagaggctcatcaagagccggggcaagagccaggccaagcacctgaatgtgcagatggtggccgctgacaagctggcccagtgccccccagagctgtttgatgtgatcctggatgagaaccagctggaggatgcctgtgagcacctggccgactacctggaggcctactggaaggccacccacccccccagcagcagcctgcccaaccccctgctgagcaggaccctggccaccagcagcctgcccctgagccccaccctggccagcaacagccagggcagccagggcgaccagaggacagacagaagtgcccccatccgcagcgccagccaggccgaggaggagcccagcgtggagcctgtgaagaagagccagcacaggagcagcagcagcgccccccaccacaaccacaggagcggcaccagccggggcctgagccggcaggagacctttgacagcgagacccaggagagccgggacagcgcctacgtggagcccaaggaggactacagccatgaccacgtggaccactacgccagccaccgggaccacaaccacagagatgagacccacggcagcagtgaccaccgccaccgggagagccgccacaggagcagagatgtggaccgggagcaggaccacaatgaatgcaacaagcagaggagccgccacaagagcaaggaccgctactgtgagaaggatggagaggtgatcagcaagaagagaaatgaggccggggagtggaacagagatgtgtacatccggcagtag

SEQ ID NO: 312004 - DNA, 1704 bp, Artificial Sequence
  derived and/or modified sequence
atgcagtgctgcggcctggtgcaccggcggcgggtgcgggtgagctatggatccgccgactcttacacatccagaccgagcgactcggacgttagtctcgaggaggatcgcgaggcagtgagacgtgaggctgaacgccaagcccaggcacaactggagaaggctaagacaaagcccgtcgccttcgctgtacggacgaacgttagttacagtgccgcacatgaggacgacgtccccgtgccaggaatggcaatatcttttgaagccaaggactttcttcacgtcaaagagaagtttaataatgactggtggatcggtagactggttaaggagggctgtgaaatcggcttcatccccagcccggtgaaattagaaaacatgaggctccagcacgagcaacgtgcaaagcagggcaaattttattcctctaaatccggaggcaattccagttcttccctgggtgacattgtgcccagctctcgtaagtctacaccgccaagctccgcaaagcagaagcagaagtctacggaacacacacccccttatgacgttgttcccagtatgagaccagtggttctagtgggcccgtccttgaaagggtatgaggtgacagacatgatgcagaaagctcttttcgacttcctcaaacaccgttttgagggaagaattagtatcactcgagtcactgccgacatcagtttggccaaacgttctgtgctgaataacccatccaaacacgccattatcgagaggtctaataccagatcttctctggccgaggtccagagcgagattgagagaatttttgaactcgctcggactctgcagctggtcgttctggacgccgacactattaaccatcctgcccagctctctaagaccagtctggctcctattattgtttacgttaagatcagcagccctaaggtgctccaaaggcttataaagagccgcgggaagagccaggctaaacaccttaatgtacagatggtcgccgctgacaagctggcccagtgcccccccgagttgtttgatgtgatactcgatgagaaccagcttgaagacgcctgcgagcacttggccgactatctcgaagcatattggaaagcaacacatccaccgagtagtagcttgccaaatcccctactttcccggacactagctacaagttcattgcctttgtctcctacacttgcgtccaatagccaagggagtcaaggcgatcagcggactgatcggtccgccccaatccggagcgcttcacaggccgaagaggaaccctccgtggaaccggtgaaaaaaagccaacatcggtccagctcaagtgcaccacatcataatcaccgcagcgggacaagccggggcctgagccgacaggaaacatttgacagcgaaactcaggaatcccgcgactccgcctatgtcgagcccaaagaggactacagccacgatcacgtggatcattacgcgagtcatcgagatcacaatcatcgtgacgagacacacggttccagtgaccaccgccacagggaatccagacaccgtagccgcgacgtcgatcgtgaacaagaccataatgagtgcaataagcagcgcagtcgacataaatcgaaagaccgctattgtgagaaagacggcgaggtgatatctaagaaacgaaacgaagccggcgagtggaatcgtgacgtctacatcagacagtag

SEQ ID NO: 312005 - DNA, 1704 bp, Artificial Sequence
  derived and/or modified sequence
atgcagtgttgtggcttagtgcacagacgaagagtgagggtatcttacggttctgctgacagctatacctctagaccctcggacagcgacgtgagcctggaggaagatagggaagctgtaaggcgcgaggcagagcgacaagcccaggcccagttagaaaaggccaaaactaagcctgttgcattcgctgttaggacaaacgtttcatacagtgccgcacacgaggatgacgtgcccgtccccggaatggcaatctcattcgaagcaaaagactttttgcacgttaaagaaaagttcaacaacgattggtggataggaagactggtaaaagagggatgtgagattgggtttatacccagccctgtgaaactggagaacatgcgacttcagcacgaacagcgggcaaaacagggtaaattttacagttctaagagcggcggtaatagcagcagcagcctcggggacatcgtgccaagtagcaggaagtctacccccccatcatcggccaaacaaaaacagaagtctactgagcataccccaccttacgacgttgttcctagcatgcgcccagtggtgctggtcggccctagcctgaagggctacgaggtgacggatatgatgcagaaagcccttttcgatttcctcaaacaccgattcgaaggtcggatctcaatcacccgcgtgacagccgatatcagcctggctaaacgaagcgtccttaataatccctctaagcatgccatcatcgaaaggtctaatacaaggtcgtccctggcagaagtacagtctgagatcgaaaggatcttcgagctcgcaaggactctacagctcgtagtccttgacgccgacaccataaatcaccccgcacaactgagtaagacctcactggccccaattatcgtctatgttaaaatttcatcgccgaaagttttacagaggctcatcaagtccagagggaagtcacaggcgaaacacctgaacgtgcagatggtggccgcagataagctggcgcaatgcccgcctgaacttttcgatgtgattctggatgaaaaccagctggaggatgcgtgtgagcacctcgccgattatttggaggcgtactggaaagcaacgcaccctccaagcagctcgttacctaatccattgctgtcacggacacttgcaaccagttctctccctctcagccccactttagcttcaaactcccaaggctcacagggagatcagcggaccgaccgttctgctccaatccggtccgctagtcaggccgaggaagagccttcagtcgaacctgtgaagaaaagtcagcatcgaagttcttcaagtgccccacaccataatcatcgctccggcactagccgcggtctcagcaggcaggagacattcgattcagagacccaggaaagcagggattcagcatacgtggagcccaaggaggattacagccatgaccatgtggaccactatgcttcgcaccgcgaccataaccaccgcgacgaaactcatggtagctctgaccatcgccatcgggaatcacgtcatagaagcagggacgtcgatcgggaacaggatcataatgagtgcaacaagcagcggtctcggcataagtccaaggaccgctactgtgaaaaagatggcgaggtgatctcaaaaaagcgtaatgaagccggagaatggaaccgtgacgtctatattaggcagtag

SEQ ID NO: 312006 - DNA, 3116 bp, Artificial Sequence
  derived and/or modified sequence
cccctcttcatgcagtgctgcgggctggtgcatcgccggcgagtacgggtgtcctatggttcggcagactcctacactagccgtccatccgattccgatgtatctctggaggaggaccgggaggcagtgcgcagagaagcggagcggcaggcccaggcacagttggaaaaagcaaagacaaagcccgttgcatttgcggttcggacaaatgtcagctacagtgcggcccatgaagatgatgttccagtgcctggcatggccatctcattcgaagcaaaagattttctgcatgttaaggaaaaatttaacaatgactggtggatagggcgattggtaaaagaaggctgtgaaatcggattcattccaagcccagtcaaactagaaaacatgaggctgcagcatgaacagagagccaagcaagggaaattctactccagtaaatcaggaggaaattcatcatccagtttgggtgacatagtacctagttccagaaaatcaacacctccatcatctgctaagcagaagcagaaatcgacagagcacactcctccgtatgatgtggtaccttccatgcgaccagtggtcctagtgggcccttctctgaagggctacgaggtcacagatatgatgcaaaaagcgctgtttgattttttaaaacacagatttgaagggcggatatccatcacaagggtcaccgctgacatctcgcttgccaaacgctcggtattaaacaatcccagtaagcacgcaataatagaaagatccaacacaaggtcaagcttagcggaagttcagagtgaaatcgaaaggatttttgaacttgcaagaacattgcagttggtggtccttgacgcggatacaattaatcatccagctcaactcagtaaaacctccttggcccctattatagtatatgtaaagatttcttctcctaaggttttacaaaggttaataaaatctcgagggaaatctcaagctaaacacctcaacgtccagatggtagcagctgataaactggctcagtgtcctccagagctgttcgatgtgatcttggatgagaaccagcttgaggatgcctgtgagcaccttgccgactatctggaggcctactggaaggccacccatcctcccagcagtagcctccccaaccctctccttagccgtacattagccacttcaagtctgcctcttagccccaccctagcctctaattcacagggttctcaaggtgatcagaggactgatcgctccgctcctatccgttctgcttcccaagctgaagaagaacctagtgtggaaccagtcaagaaatcccagcaccgctcttcctcctcagccccacaccacaaccatcgcagtgggacaagtcgcggcctctccaggcaagagacatttgactcggaaacccaggagagtcgagactctgcctacgtagagccaaaggaagattattcccatgaccacgtggaccactatgcctcacaccgtgaccacaaccacagagacgagacccacgggagcagtgaccacagacacagggagtcccggcaccgttcccgggacgtggatcgagagcaggaccacaacgagtgcaacaagcagcgcagccgtcataaatccaaggatcgctactgtgaaaaggatggagaagtgatatcaaaaaaacggaatgaggctggggagtggaacagggatgtttacatccgccaatgagttttgcccgtttgtgtttttttttttttttttttgaagtcttgtataactaacagcatccccaaaacaaagtctttggggtctacactgcaatcatatgtgatctgtcttgtaatattttgtattattgctgttgcttgaatagcaatagcatggatagagtattgagatactttttcttttgtaagtgctacataaattggcctggtatggctgcagtcctccggttgcatactggactcttcaaaaactgttttgggtagctgccacttgaacaaaatctgttgccacccaggtgatgttagtgttttaagaaatgtagttgatgtatccaacaagccagaatcagcacagataaaaagtggaatttcttgtttctccagatttttaatacgttaatacgcaggcatctgatttgcatattcattcatggaccactgtttcttgcttgtacctctggctgactaaatttggggacagattcagtcttgccttacacaaaggggatcataaagttagaatctattttctatgtactagtactgtgtactgtatagacagtttgtaaatgttatttctgcaaacaaacaccttcttattatatatataatatatatatatatcagtttgatcacactattttagagtcttaatgccaagtcagcagatttgctttatgaattacagggactagaaatgcccacattcaggaaatttgtaataacattgtctagacacctatcctcattctagtagaaagtgtgtacatactgtaaatatgtgtgattgcttgacttgaaaaggtttgaattctgaatgttataccatccttgtaagtaagtttgtaatttccaccataaattatggtaaatataaaactccagaggttgttctactccatacagttcacactgattgtgacacattcttagtagctagtgtctgttctagtcactgcactggagtctacgagccggaactcgctatatgcacgtgtgtgtgtccgtatgtaagaaagtgtgcaccgagtgactgaatggttgagatgaattggaatgctgaagactaacgaagaaactagagactgatatcgagcattctgcccacctcgctctgtatttaattaattgtgctatatgttgctttaacaacccattgagcagtcagggaatgtgagtaagcttgctgccaaaggtaactaggaaagcattcatctgctgcctccttgtttttgctcctagagagtgaaaatacaggcaattttactgtgagtgtttcactggaaatgtacaatctttgtgtgttagagtatttgttttagtaagaaatgtttacacagcttgtggaattatttcgtgggaaaataaatttttataacttctcccacttcaatttctaacctt

SEQ ID NO: 312007 - DNA, 1704 bp, Artificial Sequence
  derived and/or modified sequence
atgcagtgctgcggcctggtgcacagaagaagagtgagagtgagctacggcagcgccgacagctacaccagcagacccagcgacagcgacgtgagcctggaggaggacagagaggccgtgagaagagaggccgagagacaggcccaggcccagctggagaaggccaagaccaagcccgtggccttcgccgtgagaaccaacgtgagctacagcgccgcccacgaggacgacgtgcccgtgcccggcatggccatcagcttcgaggccaaggacttcctgcacgtgaaggagaagttcaacaacgactggtggatcggcagactggtgaaggagggctgcgagatcggcttcatccccagccccgtgaagctggagaacatgagactgcagcacgagcagagagccaagcagggcaagttctacagcagcaagagcggcggcaacagcagcagcagcctgggcgacatcgtgcccagcagcagaaagagcaccccccccagcagcgccaagcagaagcagaagagcaccgagcacacccccccctacgacgtggtgcccagcatgagacccgtggtgctggtgggccccagcctgaagggctacgaggtgaccgacatgatgcagaaggccctgttcgacttcctgaagcacagattcgagggcagaatcagcatcaccagagtgaccgccgacatcagcctggccaagagaagcgtgctgaacaaccccagcaagcacgccatcatcgagagaagcaacaccagaagcagcctggccgaggtgcagagcgagatcgagagaatcttcgagctggccagaaccctgcagctggtggtgctggacgccgacaccatcaaccaccccgcccagctgagcaagaccagcctggcccccatcatcgtgtacgtgaagatcagcagccccaaggtgctgcagagactgatcaagagcagaggcaagagccaggccaagcacctgaacgtgcagatggtggccgccgacaagctggcccagtgcccccccgagctgttcgacgtgatcctggacgagaaccagctggaggacgcctgcgagcacctggccgactacctggaggcctactggaaggccacccacccccccagcagcagcctgcccaaccccctgctgagcagaaccctggccaccagcagcctgcccctgagccccaccctggccagcaacagccagggcagccagggcgaccagagaaccgacagaagcgcccccatcagaagcgccagccaggccgaggaggagcccagcgtggagcccgtgaagaagagccagcacagaagcagcagcagcgccccccaccacaaccacagaagcggcaccagcagaggcctgagcagacaggagaccttcgacagcgagacccaggagagcagagacagcgcctacgtggagcccaaggaggactacagccacgaccacgtggaccactacgccagccacagagaccacaaccacagagacgagacccacggcagcagcgaccacagacacagagagagcagacacagaagcagagacgtggacagagagcaggaccacaacgagtgcaacaagcagagaagcagacacaagagcaaggacagatactgcgagaaggacggcgaggtgatcagcaagaagagaaacgaggccggcgagtggaacagagacgtgtacatcagacagtag

SEQ ID NO: 312008 - DNA, 3087 bp, Artificial Sequence
  derived and/or modified sequence
cggggccgaggcgcgaggaggtgaggctggagcgcggccccctcgccttccctgttcccaggcaagctcccaaggcccgggcggcggggccgtcccgcgggccagccagatggcgacgtggcggttccccgcccgccgcgaccccaactccgggacgcacgctgcggacgcctatcctcccccaggccgctgacccgcctccctgcccggccggctcccgccgcggaggatatggaatattatcttgtaaaatggaaaggatggccagattctacaaatacttgggaacctttgcaaaatctgaagtgcccgttactgcttcagcaattctctaatgacaagcataattatttatctcaggtaaagaaaggcaaagcaataactccaaaagacaataacaaaactttgaaacctgccattgctgagtacattgtgaagaaggctaaacaaaggatagctctgcagagatggcaagatgaactcaacagaagaaagaatcataaaggaatgatatttgttgaaaatactgttgatttagagggcccaccttcagacttctattacattaacgaatacaaaccagctcctggaatcagcttagtcaatgaagctacctttggttgttcatgcacagattgcttctttcaaaaatgttgtcctgctgaagctggagttcttttggcttataataaaaaccaacaaattaaaatcccacctggtactcccatctatgaatgcaactcaaggtgtcagtgtggtcctgattgtcccaataggattgtacaaaaaggcacacagtattcgctttgcatctttcgaactagcaatggacgtggctggggtgtaaagacccttgtgaagattaaaagaatgagttttgtcatggaatatgttggagaggtaatcacaagtgaagaagctgaaagacgaggacagttctatgacaacaagggaatcacgtatctctttgatctggactatgagtctgatgaattcacagtggatgcggctcgatacggcaatgtgtctcattttgtgaatcacagctgtgacccaaatcttcaggtgttcaatgttttcattgataacctcgatactcgtcttccccgaatagcattgttttccacaagaaccataaatgctggagaagagctgacttttgattatcaaatgaaaggttctggagatatatcttcagattctattgaccacagcccagccaaaaagagggtcagaacagtatgtaaatgtggagctgtgacttgcagaggttacctcaactgaactttttcaggaaatagagctgatgattataatatttttttcctaatgttaacatttttaaaaatacatatttgggactcttattatcaaggttctacctatgttaatttacaattcatgtttcaagacatttgccaaatgtattaccgatgcctctgaaaagggggtcactgggtctcatagactgatatgaagtcgacatatttatagtgcttagagaccaaactaatggaaggcagactatttacagcttagtatatgtgtacttaagtctatgtgaacagagaaatgcctcccgtagtgtttgaaagcgttaagctgataatgtaattaacaactgctgagagatcaaagattcaacttgccatacacctcaaattcggagaaacagttaatttgggcaaatctacagttctgtttttgctactctattgtcattcctgtttaatactcactgtacttgtatttgagacaaataggtgatactgaattttatactgttttctacttttccattaaaacattggcacctcaatgataaagaaatttaaggtataaaattaaatgtaaaaattaatttcagcttcatttcgtatttcgaagcaatctagactgttgtgatgagtgtatgtctgaacctgtaattcttaaaagacttcttaatcttctagaagaaaaatctccgaagagctctctctagaagtccaaaatggctagccattatgcttctttgaaaggacatgataatgggaccaggatggttttttggagtaccaagcaaggggaatggagcactttaagggcgcctgttagtaacatgaattggaaatctgtgtcgagtacctctgatctaaacggtaaaacaagctgcctggagagcagctgtacctaacaatactgtaatgtacattaacattacagcctctcaatttcaggcaggtgtaacagttcctttccaccagatttaatatttttatacttcctgcaggttcttcttaaaaagtaatctatatttttgaactgatacttgttttatacataaattttttttagatgtgataaagctaaacttggccaaagtgtgtgcctgaattattagacctttttattagtcaacctacgaagactaaaatagaatatattagttttcaagggagtgggaggcttccaacatagtattgaatctcaggaaaaactattctttcatgtctgattctgagatttctaattgtgttgtgaaaatgataaatgcagcaaatctagctttcagtattcctaatttttacctaagctcattgctccaggctttgattacctaaaataagcttggataaaattgaaccaacttcaagaatgcagcacttcttaatctttagctctttcttgggagaagctagactttattcattatattgctatgacaacttcactctttcataatatataggataaattgtttacatgattggaccctcagattctgttaaccaaaattgcagaatggggggccaggcctgtgtggtggctcacacctgtgatcccagcactttgggaggctgaggtaggaggatcacgtgaggtcgggagttcaagaccagcctggccatcatggtgaaaccctgtctctactgaaaatacaaaaattagccgggcgtggtggcacacgcctgtagtcccagctactcaggaggctgaggcaggagaatcacttgaattcaggaggcggaggttgcagtgagccaagatcataccactgcactgcagcctgagtgacacagtaagactgtctccaaaaaaaaaaaa

SEQ ID NO: 312009 - protein, 182 aa, Artificial Sequence
  derived and/or modified sequence
LPELKDAVLDQYSMWGNKFGVLLFLYSVLLTKGIENIKNEIEDASEPLIDPVYGHGSQSLINLLLTGHAVSNVWDGDRECSGMKLLGIHEQAAVGFLTLMEALRYCKVGSYLKSPKFPIWIVGSETHLTVFFAKDMALVAPEAPSEQARRVFQTYDPEDNGFIPDSLLEDVMKALDLVSDPE

SEQ ID NO: 312010 - protein, 164 aa, Artificial Sequence
  derived and/or modified sequence
MKRFPAKKRSFRSLPELKDAVLDQYSMWGNKFGVLLFLYSVLLTKGIENIKNEIEDASEPLIDPVYGHGSQSLINLLLTGHAVSNVWDGDRECSGMKLLGIHEQAAVGFLTLMEALRYCKVGSYLKSPKFPIWIVGSETHLTVFFAKDMALVAPEAPSEQARRV

SEQ ID NO: 312011 - DNA, 549 bp, Artificial Sequence
  derived and/or modified sequence
ttgcccgagctgaaggatgccgtacttgatcagtactcaatgtggggcaataagtttggggtactgctctttttgtacagtgtcttgctcaccaagggtatagaaaatatcaagaacgagatcgaggacgcttcagaacccctgatcgaccctgtgtacggccacggtagtcagagcctgataaacctcttacttacgggtcacgcagtgagcaatgtctgggacggcgaccgggaatgctcaggtatgaaactgctgggcattcatgaacaggctgccgtcgggttcctgacactcatggaagccctgcggtattgcaaggtcggctcttacttaaaatctccaaagttcccaatttggattgttggatccgaaactcatttgacggtgttttttgccaaagatatggccttggttgcgccagaggcaccttctgagcaggcacgtagggtcttccagacttacgaccccgaggacaatggctttattcccgactctctgctggaggatgtcatgaaggcactggacctggtgagcgatcccgaatag

SEQ ID NO: 312012 - DNA, 495 bp, Artificial Sequence
  derived and/or modified sequence
atgaagcggttcccagcaaaaaagcgatccttccgtagccttccggagctgaaggacgccgtgctcgatcagtactccatgtggggcaataaattcggtgtgctcctgttcctctactcagtgctcctgaccaaaggcatagaaaacattaagaacgaaatcgaagacgcaagcgagcccctgattgaccctgtttacggtcacggcagccagagcttgatcaacctccttctgactggtcatgctgtttctaacgtatgggacggcgatcgggaatgtagtggtatgaaactactcggaattcatgaacaagcagccgtcggatttttgaccctgatggaggcactaaggtactgtaaagtcgggtcttacctgaaaagccccaagttccccatatggatcgtaggttctgagacacatctcacagtgttcttcgcaaaagatatggccctcgtagcacccgaagcacctagcgaacaagctcggagagtgtag

SEQ ID NO: 312013 - DNA, 549 bp, Artificial Sequence
  derived and/or modified sequence
ctgcctgagctgaaggatgctgtgctggaccagtacagcatgtggggcaacaagtttggagtgctgctcttcctgtacagcgtgctgctgaccaagggcatcgagaacatcaagaatgaaattgaagatgccagcgagcccctgattgatcctgtgtatggccacggcagccagagcctcatcaacctgctgctgaccggccatgctgtgtccaatgtgtgggatggagacagagaatgttctggcatgaagctgctgggcatccacgagcaggccgctgtgggcttcctgaccctgatggaggccctgcgctactgcaaggtgggcagctacctgaagagccccaagttccccatctggatcgtgggcagcgagacccacctgactgtgttctttgccaaggacatggccctggtggcccctgaggcccccagcgagcaggcccggcgggtcttccagacctatgaccctgaggacaatggcttcatcccagacagcctgctggaggatgtgatgaaggccctggacctggtgtctgaccctgagtag

SEQ ID NO: 312014 - DNA, 495 bp, Artificial Sequence
  derived and/or modified sequence
atgaagcgcttccctgccaagaagaggagcttccgcagcctgcctgagctgaaggatgctgtgctggaccagtacagcatgtggggcaacaagtttggagtgctgctcttcctgtacagcgtgctgctgaccaagggcatcgagaacatcaagaatgaaattgaagatgccagcgagcccctgattgatcctgtgtatggccacggcagccagagcctcatcaacctgctgctgactggacatgctgtgtccaatgtgtgggatggagaccgggagtgcagcggcatgaagctgctgggcatccacgagcaggccgctgtgggcttcctgaccctgatggaggccctgcgctactgcaaggtgggcagctacctgaagagccccaagttccccatctggatcgtgggcagcgagacccacctgaccgtcttctttgccaaggacatggccctggtggcccctgaggcccccagcgagcaggcccggcgggtgtag

SEQ ID NO: 312015 - DNA, 549 bp, Artificial Sequence
  derived and/or modified sequence
ctgcccgagctgaaggacgccgtgctggaccagtacagcatgtggggcaacaagttcggggttctgttatttctctattccgtccttctgactaagggcatcgagaatataaagaacgagatcgaggatgcaagcgaacctctgatcgaccctgtttatggccatgggtcacaaagcttaatcaatcttcttctcactgggcacgccgtaagcaacgtctgggatggtgacagggagtgcagcggaatgaagcttctgggaattcacgagcaggccgccgtaggtttcctgacgctcatggaggctctccgctactgcaaagtgggttcttacctcaagagtcccaaattcccaatttggatcgttggatctgagactcatctcacagtctttttcgccaaggacatggctcttgtcgccccagaggctccatcagagcaggcccgtcgcgtgttccagacctatgatcccgaagataatgggttcatccccgacagtctcctggaggacgttatgaaagcactggacttggtaagcgacccagaatag

SEQ ID NO: 312016 - DNA, 495 bp, Artificial Sequence
  derived and/or modified sequence
atgaagcggttccccgccaagaagcggagcttccggagcctgcccgagctcaaggacgccgtcctggaccaatactctatgtgggggaataaattcggcgtacttctatttctttattccgtgctcttgacgaaagggatagaaaacatcaaaaatgaaatagaggatgcctccgagccgttgatcgatccagtgtacggccacggatcccagagcctcattaatctcctgttaactggacatgcagtgagtaatgtctgggatggggaccgagagtgttccgggatgaaattgctcggtattcacgaacaagccgctgtgggcttccttactctcatggaggcactgaggtattgcaaggtgggtagttacctcaaaagccccaaattccccatttggattgtgggatccgagacacatctgacagtgttcttcgcaaaagacatggctcttgtagctcctgaagctccttctgagcaggcaagacgtgtctag

SEQ ID NO: 312017 - DNA, 549 bp, Artificial Sequence
  derived and/or modified sequence
ctgcccgaactgaaggacgccgtgctcgatcagtattctatgtgggggaataaattcggcgtcctgctctttctgtactcagtgttgctcaccaaggggatcgagaatattaaaaacgaaattgaagacgccagcgaacctcttattgatcccgtgtatggacatggtagccagtcacttataaacctgctccttaccggccatgcggtgagtaacgtgtgggacggcgaccgcgagtgcagtggtatgaaactgttgggaatccacgagcaggccgcagtaggctttctgaccctgatggaggcccttagatattgtaaagtcggaagctacttgaaaagtccaaagttccccatctggatcgtggggtctgagacacatctgactgtattcttcgccaaggatatggcactggtggcacccgaggccccatcagaacaggcacgccgagtttttcagacctatgatcccgaggacaatggtttcataccagattccctcctggaggatgtgatgaaggctctggaccttgtatctgacccagaatag

SEQ ID NO: 312018 - DNA, 495 bp, Artificial Sequence
  derived and/or modified sequence
atgaagaggtttcctgccaaaaaacggtcgttcagaagccttcccgagttgaaggacgcagtgttagatcaatacagtatgtggggcaataagttcggcgtcttattgtttctgtacagcgtgctccttacgaagggaattgaaaatattaagaatgaaatcgaagacgcatctgagcccctgattgatcccgtttatggacacggcagtcaaagccttattaacctgttgctcaccgggcatgcagtctcaaacgtgtgggacggggaccgtgaatgctcgggcatgaagttgctaggcatacacgagcaggcagctgttggtttcctgacactaatggaggctctccggtattgcaaagttggcagctacctaaaaagccccaaattccccatttggatcgtgggaagcgagacccatcttactgtgtttttcgcaaaggatatggctctcgtggcacctgaggcaccgagtgaacaagccaggagagtttag

SEQ ID NO: 312019 - DNA, 967 bp, Artificial Sequence
  derived and/or modified sequence
ttaccagaattaaaagatgctgtcttggaccagtattcaatgtggggaaataaatttggagtattgctttttctgtattctgtattactgacaaagggcattgaaaacataaaaaacgaaattgaagatgcaagtgaacccttgatagatcctgtatatggacatggcagccaaagtttaattaatctcctgctgacgggacatgctgtttctaatgtatgggatggtgatagagagtgctcaggaatgaaacttcttggtatacatgaacaagcagcagtaggatttttaacactaatggaagctttaagatactgtaaggttggttcttacttgaaatctccaaaattccctatttggattgttggcagtgagactcacctcaccgtattttttgccaaggatatggctttagttgcccctgaagctccttcagaacaagccagaagagtttttcaaacctacgacccagaagataatggattcatacccgattcacttctggaagatgtgatgaaagcattggaccttgtttcagatcctgaatagtaagctaaataggaagtgttatttagccaactcaaaaagattcgattaagtttaagacatattgtacattttttgcctttttaaaaatctatatctgcatatatgaagcatagcaatctatgtaaggcaaagattaagaaatcgaactaatccaatattatagcagacttgacatacttaaattgagtttcctttcccacccagcaattactgtcctgctttttaaaaaatgctaaaagtgtctttctataaactttaaaaagtttctctgcaaacacttccccacgtcttaaaattttatgtgacattagtatcttcagtaaagtaatgacggttctgtgtagatggtgctagttgccctgcttaaataaccagcaggcctctgactttccctcttaaataaagatgatcaaagata

SEQ ID NO: 312020 - DNA, 618 bp, Artificial Sequence
  derived and/or modified sequence
ctgccttggctgtcgaagagcttggctttgagcgatttcatgcattaattcaaaggccactctattctttaaataactgtatattattgaagaatttactgatgccagacagttcacctaagagatgaagaggttccctgccaaaaaaagatcgttcagaagtttaccagaattaaaagatgctgtcttggaccagtattcaatgtggggaaataaatttggagtattgctttttctgtattctgtattactgacaaagggcattgaaaacataaaaaacgaaattgaagatgcaagtgaacccttgatagatcctgtatatggacatggcagccaaagtttaattaatctcctgctgacgggacatgctgtttctaatgtatgggatggtgatagagagtgctcaggaatgaaacttcttggtatacatgaacaagcagcagtaggatttttaacactaatggaagctttaagatactgtaaggttggttcttacttgaaatctccaaaattccctatttggattgttggcagtgagactcacctcaccgtattttttgccaaggatatggctttagttgcccctgaagctccttcagaacaagccagaagagtttt

SEQ ID NO: 312021 - DNA, 549 bp, Artificial Sequence
  derived and/or modified sequence
ctgcccgagctgaaggacgccgtgctggaccagtacagcatgtggggcaacaagttcggcgtgctgctgttcctgtacagcgtgctgctgaccaagggcatcgagaacatcaagaacgagatcgaggacgccagcgagcccctgatcgaccccgtgtacggccacggcagccagagcctgatcaacctgctgctgaccggccacgccgtgagcaacgtgtgggacggcgacagagagtgcagcggcatgaagctgctgggcatccacgagcaggccgccgtgggcttcctgaccctgatggaggccctgagatactgcaaggtgggcagctacctgaagagccccaagttccccatctggatcgtgggcagcgagacccacctgaccgtgttcttcgccaaggacatggccctggtggcccccgaggcccccagcgagcaggccagaagagtgttccagacctacgaccccgaggacaacggcttcatccccgacagcctgctggaggacgtgatgaaggccctggacctggtgagcgaccccgagtag

SEQ ID NO: 312022 - DNA, 495 bp, Artificial Sequence
  derived and/or modified sequence
atgaagagattccccgccaagaagagaagcttcagaagcctgcccgagctgaaggacgccgtgctggaccagtacagcatgtggggcaacaagttcggcgtgctgctgttcctgtacagcgtgctgctgaccaagggcatcgagaacatcaagaacgagatcgaggacgccagcgagcccctgatcgaccccgtgtacggccacggcagccagagcctgatcaacctgctgctgaccggccacgccgtgagcaacgtgtgggacggcgacagagagtgcagcggcatgaagctgctgggcatccacgagcaggccgccgtgggcttcctgaccctgatggaggccctgagatactgcaaggtgggcagctacctgaagagccccaagttccccatctggatcgtgggcagcgagacccacctgaccgtgttcttcgccaaggacatggccctggtggcccccgaggcccccagcgagcaggccagaagagtgtag

SEQ ID NO: 312023 - DNA, 958 bp, Artificial Sequence
  derived and/or modified sequence
aattccaagctggtggatcttgagagaaaattccaaggcttgcagcagactgttgacaaaaaggtttgcagcagcaatccttgccagaatggtggaacctgcctcaatctgcatgattcctttttttgtatctgtcccccacagtggaagggtcctctctgctcagctgatgttaacgaatgtgagatttactcaggaacacccttgagctgccagaatggaggcacatgtgttaatacaatgggaagttacagaaatccttgctctaacatccccaaggaaccggaagaaggctcccgtgattggcacagagagtaagcatggcctggtgcaaaaggagctgaagacttaggaagagccggagcattgaaggggagccactgaatggccttaagtagaaaaggggacaccccaccacaccagtgtccccagctgtactctttccatgtattagcaagctcatagttttgggtaaagagagctttattcaatgctatgtcaaaatgtgaccataacgaggtcaaagattaaactgaggttcaatgaatgaagtaactctctctgaccacagtcatcattatcagtacagctctatcttctcttctgacttattctgtcaagtgacttgtccacagaattctcctgctcagctcaggcatcactttctgcaggaaactttcccttccctttttaagcagagtgaggcatctcagggcctctatgttcccatcatgctctagggatatccatcgtcaaagctttgctgatgccacacacattgtctttctaaaaacgaagtccaaaaaattaaggcagatcaatgccaaacttacttttgtacagttctttgaagtcaccttttaaactagacagtgtctttccttatagtttggctggtctcttttattttgtgatttttaaaagattaataaataaattctgctatagaatgaacaaa

SEQ ID NO: 312024 - protein, 88 aa, Artificial Sequence
  derived and/or modified sequence
STGNELAIRFKTDLSINGRGFNASWQAVTGGCGGIFQAPSGEIHSPNYPSPYRSNTDCSWVIRVDRNHRVLLNFTDFDLEPQDSCIMV

SEQ ID NO: 312025 - protein, 464 aa, Artificial Sequence
  derived and/or modified sequence
MSHSWNVLWLTFCSDSNGMYDKNLNCVWIIIAPVNKVIHLTFNTFALEAASTRQRCLYDYVKLYDGDSENANLAGTFCGSTVPAPFISSGNFLTVQFISDLTLEREGFNATYTIMDMPCGGTYNATWTPQNISSPNSSDPDVPFSICTWVIDSPPHQQVKITVWALQLTSQDCTQNYLQLQDSPQGHGNSRFQFCGRNASAVPVFYSSMSTAMVIFKSGVVNRNSRMSFTYQIADCNRDYHKAFGNLRSPGWPDNYDNDKDCTVTLTAPQNHTISLFFHSLGIENSVECRNDFLEVRNGSNSNSPLLGKYCGTLLPNPVFSQNNELYLRFKSDSVTSDRGYEIIWTSSPSGCGGTLYGDRGSFTSPGYPGTYPNNTYCEWVLVAPAGRLVTINFYFISIDDPGDCVQNYLTLYDGPNASSPSSGPYCGGDTSIAPFVASSNQVFIKFHADYARRPSAFRLTWDS

SEQ ID NO: 312026 - DNA, 1395 bp, Artificial Sequence
  derived and/or modified sequence
atgtctcattcgtggaatgttctgtggctaaccttttgctccgattcaaatggcatgtatgataagaacctaaactgtgtttggatcatcatagcccctgtgaacaaggtgattcatctgaccttcaataccttcgccctggaggcagctagtaccaggcagcggtgtctatatgattacgtcaaactgtacgacggcgactctgaaaacgcaaatctggccggaaccttctgcggaagtactgtgccggctcccttcatcagttcgggcaactttctcacagtgcaattcataagcgacctgaccttagagagagagggctttaacgctacctatacaattatggatatgccttgtggtggcacttataatgccacatggacgccccagaacatttccagtccaaactcaagcgaccctgacgtccccttctctatctgtacatgggtcattgattccccccctcaccaacaggtaaaaatcaccgtgtgggcgctgcagctcacttctcaggattgtacacagaattatctacagttacaggactcccctcagggccacgggaacagccgttttcagttctgtggtaggaatgcttccgctgtgcctgtattttactcaagcatgtcaacagcaatggttatcttcaagagtggggtagtcaatcgcaatagccggatgtctttcacatatcagattgccgattgcaacagggattaccataaggctttcggtaacttgcgctcacctggctggccagacaactatgacaatgacaaggattgcaccgtgactctcacagcgccacagaaccacactatcagcctgtttttccactcactagggatagaaaattctgtagaatgcagaaacgatttcttggaagttcggaatggctccaattccaattcccccctgttggggaaatactgtggtacactgctgcctaaccctgtgttcagccaaaacaatgaactgtacttaaggttcaagtcagattcggtcacttccgatcgcgggtacgaaataatctggacatcctcaccttcaggttgcggcgggactctctacggcgatcgaggaagctttacctcacctggatatcccggtacgtatccaaacaatacatactgtgaatgggtgttagtggcgccggcgggccgacttgtcacaatcaatttttattttattagcatcgatgaccctggcgactgtgtgcagaattacctgacattatacgacggccctaacgctagcagtccgtcctctggaccctattgcggtggagacacatctatagcgcctttcgtcgcctcttccaaccaagtctttattaaattccatgcggactatgcccggcggccatccgcatttcgcctgacctgggacagctag

SEQ ID NO: 312027 - DNA, 1395 bp, Artificial Sequence
  derived and/or modified sequence
atgagccacagctggaatgtgctgtggctgaccttctgcagcgacagcaatggcatgtatgacaagaacctgaactgtgtgtggatcatcatcgcccctgtgaacaaggtgatccacctgaccttcaacacctttgccctggaggccgccagcacccggcagcgctgcctgtatgactatgtgaagctgtatgatggagacagtgaaaatgccaacctggccggcaccttctgtggcagcacagtgcctgcccccttcatcagcagcggcaacttcctgactgtgcagttcatcagtgacctgaccctggagcgggagggcttcaatgccacctacaccatcatggacatgccctgtggcggcacctacaatgccacctggaccccccagaacatcagcagccccaacagcagtgaccctgatgtgcccttcagcatctgcacctgggtgattgacagccccccccaccagcaggtgaagatcaccgtgtgggccctgcagctgaccagccaggactgcacccagaactacctgcagctgcaggacagcccccagggccacggcaacagccgcttccagttctgtggcagaaatgccagcgctgtgcctgtgttctacagctccatgagcacagccatggtgatcttcaagagcggcgtggtgaacagaaacagcaggatgtccttcacctaccagattgctgactgcaacagagactaccacaaggccttcggcaacctgcggagccctggctggccagacaactatgacaatgacaaggactgcaccgtgaccctgacagccccccagaaccacaccatcagcctcttcttccacagcctgggcatcgagaacagcgtggagtgcagaaatgacttcctggaggtgagaaatggcagcaacagcaacagccccctgctgggcaagtactgcggcaccctgctgcccaaccctgtgttcagccagaacaatgagctgtacctgcgcttcaagagtgacagcgtgaccagtgaccggggctatgagatcatctggaccagcagccccagcggctgcggcggcaccctgtatggagaccggggcagcttcaccagccctggctacccaggcacctaccccaacaacacctactgtgagtgggtgctggtggccccagctggccgcctggtgaccatcaacttctacttcatcagcattgatgaccccggggactgtgtgcagaactacctgaccctgtatgatggccccaatgccagcagccccagcagcggcccctactgcggcggggacaccagcatcgccccctttgtggccagcagcaaccaggtgttcatcaagttccacgccgactatgcccggcggcccagcgccttccggctgacctgggacagctag

SEQ ID NO: 312028 - DNA, 1395 bp, Artificial Sequence
  derived and/or modified sequence
atgagccacagctggaacgtgctgtggctgaccttctgcagcgacagcaatggcatgtacgataagaacctgaattgtgtgtggatcattatcgccccagtgaataaggtcattcacctgaccttcaacactttcgccctcgaggccgccagcaccagacaaagatgcctgtacgattacgtgaagctttacgatggggattcagagaacgccaatctggccgggactttttgtggctctacagtccccgccccttttatttcatctggaaattttctgactgtccagttcatctctgacctgacccttgaacgggagggcttcaatgcgacttatacaatcatggacatgccctgtggcgggacatataatgcaacctggacaccacagaatatatcatcccccaactcgtccgaccctgatgtccccttctcaatctgtacctgggtaattgatagccctccccaccagcaggtgaaaatcactgtctgggccctccagctgacatcacaggactgtacccagaactacctccagttacaagacagtccacagggacatggaaattcccgtttccagttttgcggtagaaatgcctcagccgtgcccgtcttctactcatcaatgtctacagccatggtaatattcaagtcgggcgttgtcaacagaaactccagaatgagctttacttatcagatagccgattgcaaccgcgactatcacaaggcctttggcaaccttaggagccctggatggccggacaactacgacaacgacaaagactgtacagtcaccctaaccgctcctcagaaccacaccatctctctgttcttccattctctgggcattgagaatagtgtcgagtgtcgcaatgacttccttgaggtgagaaacggatccaattcaaactcaccactgctgggcaaatactgcggaacactgctgccaaaccctgtattttcacaaaataacgagttatatttgcgttttaaatccgacagtgtcacgtccgataggggttatgaaatcatctggacttcttcgccatctggctgcggtggcacgctgtacggggacagaggatcatttacttcaccaggctatcctggaacttatcccaataatacatactgcgagtgggtgctcgtggctcctgcgggccggcttgtcactatcaatttctacttcatcagcatcgatgaccccggggactgcgtacagaactacttgaccctttatgatggccccaatgcatcttccccatccagtggcccatactgcggcggtgacaccagcatagcacctttcgtggccagctccaaccaggtgttcattaagttccatgccgattacgccaggagaccctccgcgtttcggctcacctgggacagttag

SEQ ID NO: 312029 - DNA, 1395 bp, Artificial Sequence
  derived and/or modified sequence
atgtcccactcgtggaacgtgctctggctgactttctgtagtgactccaatgggatgtatgataagaatctgaattgcgtttggatcattatcgcccctgtgaataaggtgattcatttgacgttcaacaccttcgccctcgaggccgctagcacaagacaacgctgtctgtacgactatgtgaaactctacgacggggactctgagaatgccaaccttgctgggacgttctgcggctctacagtccccgcaccattcatctcttcaggcaacttcctgacagtgcagttcatttccgatctgacactggagcgcgaaggctttaatgcaacctatacgattatggacatgccctgtgggggtacgtacaacgctacgtggacgccccagaatatttcctcgcccaatagcagcgatcctgatgtaccttttagcatctgcacctgggtgattgacagcccgccacaccaacaggttaagatcactgtgtgggctctgcagttaacctctcaggactgcacacaaaactatctgcagctccaggatagccctcagggacacggtaattctaggtttcagttttgcggacgtaacgctagcgcagtccccgtcttttactcctccatgagtaccgctatggtcatctttaagtcaggagtagtgaatcggaatagcagaatgtctttcacttaccagatcgctgactgcaacagggattatcataaggcttttgggaaccttaggtctcccggttggcctgacaactacgataatgacaaggactgcacggtgaccctgaccgcgccacagaatcacactatttccctctttttccatagccttggtatcgagaatagcgtggagtgcagaaatgacttcttggaagtaaggaacggatcgaactccaactcacccttgctggggaaatactgcggtactctcttaccaaatcctgtcttctcccagaataatgagctgtacctgcgtttcaaatccgattctgtgacctcggatagaggatacgaaattatttggacgtcctccccgtctggttgtggcggtacactgtacggcgatcgtggatctttcacgagccccggatatcccggaacgtacccaaataacacgtattgtgaatgggtgctggtggcccctgctggcagactggtgaccattaacttctactttatctccatagatgatcctggagactgtgtccagaactatctgacgctatatgatggccctaatgccagttctccttcttcaggcccttattgcgggggagatacgtctatcgcccctttcgttgccagcagcaatcaggtgtttataaagtttcatgccgattacgctcggcgtcctagtgcgtttaggctgacttgggattcttag

SEQ ID NO: 312030 - DNA, 599 bp, Artificial Sequence
  derived and/or modified sequence
agcactggaaatgagctagcaattcgattcaagaccgacttgtccataaatgggagaggcttcaatgcgtcatggcaagcagtcactggaggttgtggtgggattttccaggctcccagtggagagattcattctccaaattaccccagtccttataggagcaacacagactgttcttgggtcattcgggttgacagaaatcatcgtgttctcttgaacttcactgactttgatcttgaaccacaagactcttgtattatggtttaatcatacttggtcggacgtcagacagatggggtttgtatattggctctgcactgctaagcgtgtgattgggcaagtcatgtatgttttcagagctcagttttccctgctgcaaagtggaactgtaagaatcaaatgtaaacaaatgtatttaagtacctatcagtgtctggttcagataagtatttgctgctattcctaatttttctattacaatgactcctgcttctattactattaacgctatgttaaagatcttaaggaatcttttaaaaaaattttctccctgagcaagatgaaacttagtaaacaagataaaaaatccagtagaaaaa

SEQ ID NO: 312031 - DNA, 1841 bp, Artificial Sequence
  derived and/or modified sequence
agtagttgcaatgagtcacagctggaacgtcctgtggttaacattctgctctgattcgaatggaatgtatgacaagaatttaaactgtgtatggatcataattgcacctgtaaacaaagtaattcacctcaccttcaatacatttgctctggaggcagcaagtactaggcaaagatgcctttatgattatgtaaagttatatgatggggatagtgaaaatgcgaacttggctggaacgttttgtggttccacagtacctgctccttttatctcttctggtaacttccttacggttcaattcatcagtgacttaacattagagagggaaggatttaatgctacatacaccatcatggacatgccttgtggtggaacatacaatgcaacttggaccccacaaaatatttcatcacccaattcatcagacccagatgtcccattttccatctgtacttgggtcattgattcccctccgcatcagcaggtcaagataactgtgtgggcattacagctgacctcgcaagactgcacgcagaattacttacagcttcaggactcaccgcagggtcacggaaattcaagatttcagttctgtggcagaaatgcttcggctgtgccagtgttttattcttctatgagtactgcaatggtcattttcaaatctggagttgtaaacagaaactctagaatgagtttcacctatcagattgcagattgcaacagagactatcacaaggcatttggcaacctgagaagccctggatggccagataactacgacaatgacaaggattgcaccgttactctcacagccccccagaaccacaccatttccctcttttttcattcacttggcatcgagaactcagttgaatgcagaaacgatttcttggaggtgagaaatggaagtaacagcaattcaccattactgggcaagtactgtggaactctgctgccaaaccctgtcttctctcaaaataatgaactatacctacgatttaagagtgatagtgtaacttctgatcgtggatatgaaatcatctggacttcatcaccctctggatgtggtggaactctttatggagacagaggctcattcaccagccccggctatccaggcacatacccaaacaacacgtactgcgagtgggtccttgttgctcctgctggaaggcttgtcaccatcaacttctacttcatcagcattgacgatccaggagactgtgtccagaactatctcacactctatgatgggcccaacgccagctctccatcctctggaccatactgcggaggcgacaccagcatagctcccttcgtggcttcctcaaatcaggtcttcataaaatttcatgctgattatgcacggcgtccatccgcattccgattaacttgggacagctaagtgggtaacaactcgtgttcactcagcactttccctctgcagcacgctggacagcactctgccatcctgatacatgacccctgctgatgccacagagaataagctgaacttgtatggtttttcaccaaaccatggatagaatcaatatttgtaggccaggcgtggtggctcacccccctgtattctcagcactttgggaggccgaggcaggttgatcacctgaggtcaggagtttgagactagcctggccagcatggtgaaacctcatctctctaacaatataataattagccaggcgtggtggtgggtgcctgtaattccagccactcgagaggctgaggcaggagaattgcttgaacccaggaggcagaggttgcagtgagctaagatcacaccactacactccagcctgggcgagacggcaagactccatctc

SEQ ID NO: 312032 - DNA, 1395 bp, Artificial Sequence
  derived and/or modified sequence
atgagccacagctggaacgtgctgtggctgaccttctgcagcgacagcaacggcatgtacgacaagaacctgaactgcgtgtggatcatcatcgcccccgtgaacaaggtgatccacctgaccttcaacaccttcgccctggaggccgccagcaccagacagagatgcctgtacgactacgtgaagctgtacgacggcgacagcgagaacgccaacctggccggcaccttctgcggcagcaccgtgcccgcccccttcatcagcagcggcaacttcctgaccgtgcagttcatcagcgacctgaccctggagagagagggcttcaacgccacctacaccatcatggacatgccctgcggcggcacctacaacgccacctggaccccccagaacatcagcagccccaacagcagcgaccccgacgtgcccttcagcatctgcacctgggtgatcgacagccccccccaccagcaggtgaagatcaccgtgtgggccctgcagctgaccagccaggactgcacccagaactacctgcagctgcaggacagcccccagggccacggcaacagcagattccagttctgcggcagaaacgccagcgccgtgcccgtgttctacagcagcatgagcaccgccatggtgatcttcaagagcggcgtggtgaacagaaacagcagaatgagcttcacctaccagatcgccgactgcaacagagactaccacaaggccttcggcaacctgagaagccccggctggcccgacaactacgacaacgacaaggactgcaccgtgaccctgaccgccccccagaaccacaccatcagcctgttcttccacagcctgggcatcgagaacagcgtggagtgcagaaacgacttcctggaggtgagaaacggcagcaacagcaacagccccctgctgggcaagtactgcggcaccctgctgcccaaccccgtgttcagccagaacaacgagctgtacctgagattcaagagcgacagcgtgaccagcgacagaggctacgagatcatctggaccagcagccccagcggctgcggcggcaccctgtacggcgacagaggcagcttcaccagccccggctaccccggcacctaccccaacaacacctactgcgagtgggtgctggtggcccccgccggcagactggtgaccatcaacttctacttcatcagcatcgacgaccccggcgactgcgtgcagaactacctgaccctgtacgacggccccaacgccagcagccccagcagcggcccctactgcggcggcgacaccagcatcgcccccttcgtggccagcagcaaccaggtgttcatcaagttccacgccgactacgccagaagacccagcgccttcagactgacctgggacagctag

SEQ ID NO: 312033 - DNA, 1284 bp, Artificial Sequence
  derived and/or modified sequence
attgtttgctctggcttctgtgccggatgaggtcattcagttgcatacagttcctgctttcagaagttgctagagtgtttctctttgaacttgaactgtggctcttttgatatccagaaagagagttctttgtggggatggttaattcttgttttgggtgcttttcttcaccgctctaaggaactaccacagtcagaaggtgcattcttactgcgatctttttatttgctaccttgggcttaaggagcctgcctatatctactgaggtgaggttaggtcagtctctgtaaccgttcgtcacttaggccttgatgggtgacatggatggggatgacttcctgggctaactcttctcttgctaaaggatgatttttcaccaccttgaatgcccatgattaaaacataaacaagaaaatagatatctgaggagaatgcagttgaaactaattttgtggatagagaaactgttggaactgctttacaaagtattttaacagcccacctgaggatattgaccataaggactcatatctcattacaagaagcatcatggccgagccagactacatagaagatgacaatcctgaactcattaggcctcagaaactgatcaatcctgtaaaaacctcccggaaccatcaagatcttcacagagaacttcttatgaatcaaaaaaggggtcttgctcctcagaacaaaccagaattgcagaaggtgatggaaaaaagaaaacgagaccaagtaataaagcagaaggaagaagaagcacagaagaagaaatctgacttggaaatagagctattaaaacggcagcagaagttggagcagcttgaacttgagaagcagaaattgcaagaagagcaagaaaatgcccccgagtttgtgaaggtgaaaggcaatctcaggagaacaggccaagaagtcgcccaagcccaggagtcctaggctgaggctgcaccaagacctcgtgtgtcaccccacagagctgtctgtgggtgccttctcaatctcagggcaaaagcccctggagaatatttcagccagcagagaattttgacttgcagtaggatttggtttgattttcctacgatctgggtggatgccttgcctgtgacagttgcagttcctattcgccaaatgaagggcagtgccccgcacgtaagttggaatgatggacctgtgttcagagacttaacagaaccaacaagcaaaacaagtgagaacaggaaaaaggaagaggacactggaatcaattcttgagagttgcactacttggtttttctt

SEQ ID NO: 312034 - DNA, 587 bp, Artificial Sequence
  derived and/or modified sequence
gtaacatcctggggagctctgaagctgagatttcataaagatcagacagcccacctgaggatattgaccataaggactcatatctcattacaagaagcatcatggccgagccagactacatagaagatgacaatcctgaactcattaggcctcagaaactgatcaatcctgtaaaaacctcccggaaccatcaagatcttcacagagaacttcttatgaatcaaaaaaggggtcttgctcctcagaacaaaccagaattgcagaaggtgatggaaaaaagaaaacgagaccaagtaataaagcagaaggaagaagaagcacagaagaagaaatctgacttggaaatagagctattaaaacggcagcagaagttggagcagcttgaacttgagaagcagaaattgcaagaagagcaagaaaatgcccccgagtttgtgaaggtgaaaggcaatctcaggagaacaggccaagaagtcgcccaagcccaggagtcctaggctgaggctgcaccaagacctcgtgtgtcaccccacagagctgtctgtgggtgccttctcaatctcagggcaaaagcccctggagaatat

SEQ ID NO: 312035 - DNA, 692 bp, Artificial Sequence
  derived and/or modified sequence
gtttctctttgaacttgaactgtggctcttttgatatccagaaagagagttctttgtggggatggttaattcttgttttgggtgcttttcttcaccgctctaaggaactaccacagtcagaagacagcccacctgaggatattgaccataaggactcatatctcattacaagaagcatcatggccgagccagactacatagaagatgacaatcctgaactcattaggcctcagaaactgatcaatcctgtaaaaacctcccggaaccatcaagatcttcacagagaacttcttatgaatcaaaaaaggggtcttgctcctcagaacaaaccagaattgcagaaggtgatggaaaaaagaaaacgagaccaagtaataaagcagaaggaagaagaagcacagaagaagaaatctgacttggaaatagagctattaaaacggcagcagaagttggagcagcttgaacttgagaagcagaaattgcaagaagagcaagaaaatgcccccgagtttgtgaaggtgaaaggcaatctcaggagaacaggccaagaagtcgcccaagcccaggagtcctaggctgaggctgcaccaagacctcgtgtgtcaccccacagagctgtctgtgggtgccttctcaatctcagggcaaaagcccctggagaatatttcagccagcagagaattttgacttgc

SEQ ID NO: 312036 - DNA, 1052 bp, Artificial Sequence
  derived and/or modified sequence
agaagttgctagagtgtttctctttgaacttgaactgtggctcttttgatatccagaaagagagttctttgtggggatggttaattcttgttttgggtgcttttcttcaccgctctaaggaactaccacagtcagaaggtgcattcttactgcgatctttttatttgctaccttgggcttaaggagcctgcctatatctactgagacagcccacctgaggatattgaccataaggactcatatctcattacaagaagcatcatggccgagccagactacatagaagatgacaatcctgaactcattaggcctcagaaactgatcaatcctgtaaaaacctcccggaaccatcaagatcttcacagagaacttcttatgaatcaaaaaaggggtcttgctcctcagaacaaaccagaattgcagaaggtgatggaaaaaagaaaacgagaccaagtaataaagcagaaggaagaagaagcacagaagaagaaatctgacttggaaatagagctattaaaacggcagcagaagttggagcagcttgaacttgagaagcagaaattgcaagaagagcaagaaaatgcccccgagtttgtgaaggtgaaaggcaatctcaggagaacaggccaagaagtcgcccaagcccaggagtcctaggctgaggctgcaccaagacctcgtgtgtcaccccacagagctgtctgtgggtgccttctcaatctcagggcaaaagcccctggagaatatttcagccagcagagaattttgacttgcagtaggatttggtttgattttcctacgatctgggtggatgccttgcctgtgacagttgcagttcctattcgccaaatgaagggcagtgccccgcacgtaagttggaatgatggacctgtgttcagagacttaacagaaccaacaagcaaaacaagtgagaacaggaaaaaggaagaggacactggaatcaattcttgagagttgcactacttggtttttcttccattccaagtttcgtgggacccagagccttttttcttttaaaagctaaaaaacaa

SEQ ID NO: 312037 - DNA, 2374 bp, Artificial Sequence
  derived and/or modified sequence
gcggggccgcggggagcgagagccgccctgcgccggactggcttgcgggccgggccgccgcccccggagccgccctcgcgccgcctcgggccgccgccgagcagtcgggccgctgggcgccgccgcgggcgccgggagcgagctgggagggagccgcgcgcctttgtgcgcgcgccgaggagaatgcagttgaaactaattttgtggatagagaaactgttggaactgctttacaaagtattttaacagcccacctgaggatattgaccataaggactcatatctcattacaagaagcatcatggccgagccagactacatagaagatgacaatcctgaactcattaggcctcagaaactgatcaatcctgtaaaaacctcccggaaccatcaagatcttcacagagaacttcttatgaatcaaaaaaggggtcttgctcctcagaacaaaccagaattgcagaaggtgatggaaaaaagaaaacgagaccaagtaataaagcagaaggaagaagaagcacagaagaagaaatctgacttggaaatagagctattaaaacggcagcagaagttggagcagcttgaacttgagaagcagaaattgcaagaagagcaagaaaatgcccccgagtttgtgaaggtgaaaggcaatctcaggagaacaggccaagaagtcgcccaagcccaggagtcctaggctgaggctgcaccaagacctcgtgtgtcaccccacagagctgtctgtgggtgccttctcaatctcagggcaaaagcccctggagaatatttcagccagcagagaattttgacttgcagtaggatttggtttgattttcctacgatctgggtggatgccttgcctgtgacagttgcagttcctattcgccaaatgaagggcagtgccccgcacgtaagttggaatgatggacctgtgttcagagacttaacagaaccaacaagcaaaacaagtgagaacaggaaaaaggaagaggacactggaatcaattcttgagagttgcactacttggtttttcttccattccaagtttcgtgggacccagagccttttttcttttaaaagctaaaaaacaagtgtttaattcctctttttgttatctgttagataattgagatcacctagaaatgcgtttaatctgttcactcactgtaaattttgaggacccagaattgtcttgtttaatttatactttcacccctgttgcagttaacaccagagaaggaacgtgaatgtcgagcacagccactacccttgttggcacttaatttagaaatagggtgagaagtttaaaagcccatcttgattttattttcattccttttggttctctgtgtaataatagcaggctacatagtgacattccagttccaagaaggtacatcctgtccattcattaattgctttgattactaggagggtttctgttcagttttgtttttaaatgtcttgctgatctagttctttcagatggaataaccttccagtcccttagagagtggaactagtccatataacccagcttcagtagcaaaagtagaagccgccacatcttttcatttctccaagaggagagtggggaaggttcccatgaccagctgggcagtcaggatttctctaggcattctaatgtgaaataagtgtagactgctgtcaaggaggcttcatcagaagatgtatagcatttgaatgtctaatgataatgcatatcattagaatccaagctttgaaaatttctgattaatgctcatgtatttctttatctttgtttttccttgtgaagaaagactttcaccactgtctgagtgatgatgctgttgataaggatgatgtcgatgactactatattgcatctctcaggaacagctgatgggaagggaggggctgctgagttcccttgttctagctagcagcacgctcctcagagagggggccgagttacagacagcagccgcattctcatgcaaaattagttttaaactgctagtgtgggcatcggtaccttttgcctgggtgataccgaagaattgttgaggatttagtatgctccgtagagacagttcagccagtcatttctgcattggagagacttctcatactttctttgaagactcatagaaagctggatctagagcttttgaatccttaattagcacagtagaaattagctttctatgggaatgctttagtgttagcagttgacaattaggcccatattcaatctgaatgggaacaaaagtaaatgcaatgataatatactgctagttagagaaacatgttagttgattatacctgaaatggattatttatctcatcagcaagtattatttgaataaaatgagaaatgcttaagaaaaa

SEQ ID NO: 312038 - DNA, 3316 bp, Artificial Sequence
  derived and/or modified sequence
ggcccccgggggcttctgggagtgcctgccttcgcagctggagagagccctcctcaggggctgtctctgccttcccttcttcccatgtgtatctggggcagctgaggcagggctaggagaagagcccaggttcctcctgccacctccaagcgatgaagcagccctgggccaactccagcattctcgtgtgaactgcagaggagccctgcgcttccagctacttgcagccagacagcccacctgaggatattgaccataaggactcatatctcattacaagaagcatcatggccgagccagactacatagaagatgacaatcctgaactcattaggcctcagaaactgatcaatcctgtaaaaacctcccggaaccatcaagatcttcacagagaacttcttatgaatcaaaaaaggggtcttgctcctcagaacaaaccagaattgcagaaggtgatggaaaaaagaaaacgagaccaagtaataaagcagaaggaagaagaagcacagaagaagaaatctgacttggaaatagagctattaaaacggcagcagaagttggagcagcttgaacttgagaagcagaaattgcaagaagagcaagaaaatgcccccgagtttgtgaaggtgaaaggcaatctcaggagaacaggccaagaagtcgcccaagcccaggagtcctaggctgaggctgcaccaagacctcgtgtgtcaccccacagagctgtctgtgggtgccttctcaatctcagggcaaaagcccctggagaatatttcagccagcagagaattttgacttgcagtaggatttggtttgattttcctacgatctgggtggatgccttgcctgtgacagttgcagttcctattcgccaaatgaagggcagtgccccgcacgtaagttggaatgatggacctgtgttcagagacttaacagaaccaacaagcaaaacaagtgagaacaggaaaaaggaagaggacactggaatcaattcttgagagttgcactacttggtttttcttccattccaagtttcgtgggacccagagccttttttcttttaaaagctaaaaaacaagtgtttaattcctctttttgttatctgttagataattgagatcacctagaaatgcgtttaatctgttcactcactgtaaattttgaggacccagaattgtcttgtttaatttatactttcacccctgttgcagttaacaccagagaaggaacgtgaatgtcgagcacagccactacccttgttggcacttaatttagaaatagggtgagaagtttaaaagcccatcttgattttattttcattccttttggttctctgtgtaataatagcaggctacatagtgacattccagttccaagaaggtacatcctgtccattcattaattgctttgattactaggagggtttctgttcagttttgtttttaaatgtcttgctgatctagttctttcagatggaataaccttccagtcccttagagagtggaactagtccatataacccagcttcagtagcaaaagtagaagccgccacatcttttcatttctccaagaggagagtggggaaggttcccatgaccagctgggcagtcaggatttctctaggcattctaatgtgaaataagtgtagactgctgtcaaggaggcttcatcagaagatgtatagcatttgaatgtctaatgataatgcatatcattagaatccaagctttgaaaatttctgattaatgctcatgtatttctttatctttgtttttccttgtgaagaaagactttcaccactgtctgagtgatgatgctgttgataaggatgatgtcgatgactactatattgcatctctcaggaacagctgatgggaagggaggggctgctgagttcccttgttctagctagcagcacgctcctcagagagggggccgagttacagacagcagccgcattctcatgcaaaattagttttaaactgctagtgtgggcatcggtaccttttgcctgggtgataccgaagaattgttgaggatttagtatgctccgtagagacagttcagccagtcatttctgcattggagagacttctcatactttctttgaagactcatagaaagctggatctagagcttttgaatccttaattagcacagtagaaattagctttctatgggaatgctttagtgttagcagttgacaattaggcccatattcaatctgaatgggaacaaaagtaaatgcaatgataatatactgctagttagagaaacatgttagttgattatacctgaaatggattatttatctcatcagcaagtattatttgaataaaatgagaaatgcttaagaaaaattgttgctctacagtaatttggtttcgaagaatggaatggtaactattttttcccatcgttcttttgagagaaggaagtgtgatgactgatgatcttgaaaagcccatttctgattgcacgttgactggaattctttctttgtgtctgtggactagcgatgctgtttgtaaaatgaagattcgggactggctcatatctttttatctaactagatgtcagatcttgaaatctgtattctcgaagcaattctgccacttgatcgtattcacaggggccctggtaggctcctttagaaggaccatttctgttcctagagcttaactagaattcattcttcactgaaaaaaaaaaaagttacttaagaaagcatttctttcctaatctcactcaaatctgcagaattatttgtaattagtaatacaaaatctggccaaaaggagacttgtaaatagcgtaaagtggtgtcttatgctaaacggtggaatgtataggcagagaagctctttgaagttgtcagatgagctgggctcacaagcctgattcaaacaggctgtcggtctcctctcaccccttaatactgtgcagcccaaactcctaggactcttgaacatctgagcagttttgtgctttgagccactttttgacaaaaatggctccatttttccacagcgtggttttcttaaaatagtttaatgttttatagtctcatagtagtagtgttgctttctaagctataacagtcgactttattcttctactctgaaaaatcttgacttgtttgagtgtatataatatatataaagggagccttaatggattggttttcataatttaatattttttgtatttgctcttgtataattgtttttaacggaaagtattaaagaattgagggtggaattcttagaaccaaagttattcttaataaaaatcaccacatgcttggaccatgcaa

SEQ ID NO: 312039 - DNA, 458 bp, Artificial Sequence
  derived and/or modified sequence
aatgtgtgttagctgtggacttagaaaaaggaggccaccagaacaagctggaatcttggacagggagaatgcagttgaaactaattttgtggatagagaaactgttggaactgctttacaaagtattttaacagcccacctgaggatattgaccataaggactcatatctcattacaagaagcatcatggccgagccagactacatagaagatgacaatcctgaactcattaggcctcagaaactgatcaatcctgtaaaaacctcccggaaccatcaagatcttcacagagaacttcttatgaatcaaaaaaggggtcttgctcctcagaacaaaccagaattgcagaaggtgatggaaaaaagaaaacgagaccaagtaataaagcagaaggaagaagaagcacagaagaagaaatctgacttggaaatagagctattaaaacggcagcagaagtt

SEQ ID NO: 312040 - DNA, 834 bp, Artificial Sequence
  derived and/or modified sequence
attcagttgcatacagttcctgctttcagaagttgctagagtgtttctctttgaacttgaactgtggctcttttgatatccagaaagagagttctttgtggggatggttaattcttgttttgggtgcttttcttcaccgctctaaggaactaccacagtcagaaggtgcattcttactgcgatctttttatttgctaccttgggcttaaggagcctgcctatatctactgaggtgaggttaggtcagtctctgtaaccgttcgtcacttaggccttgatgggtgacatggatggggatgacttcctgggctaactcttctcttgctaaaggatgatttttcaccaccttgaatgcccatgattaaaacataaacaagaaaatagatatctgagacagcccacctgaggatattgaccataaggactcatatctcattacaagaagcatcatggccgagccagactacatagaagatgacaatcctgaactcattaggcctcagaaactgatcaatcctgtaaaaacctcccggaaccatcaagatcttcacagagaacttcttatgaatcaaaaaaggggtcttgctcctcagaacaaaccagaattgcagaaggtgatggaaaaaagaaaacgagaccaagtaataaagcagaaggaagaagaagcacagaagaagaaatctgacttggaaatagagctattaaaacggcagcagaagttggagcagcttgaacttgagaagcagaaattgcaagaagagcaagaaaatgcccccgagtttgtgaaggtgaaaggcaatctcaggagaacaggccaagaagtcgcccaagccc

SEQ ID NO: 312041 - DNA, 625 bp, Artificial Sequence
  derived and/or modified sequence
acccagggctggagagtctgcgtgcatatttgcttacaagtagaggagctgatttttgtacagacaagtacatttcaccagtgctgccagcacgttctcttggtctggaaggagaatgcagttgaaactaattttgtggatagagaaactgttggaactgctttacaaagtattttaacagcccacctgaggatattgaccataaggactcatatctcattacaagaagcatcatggccgagccagactacatagaagatgacaatcctgaactcattaggcctcagaaactgatcaatcctgtaaaaacctcccggaaccatcaagatcttcacagagaacttcttatgaatcaaaaaaggggtcttgctcctcagaacaaaccagaattgcagaaggtgatggaaaaaagaaaacgagaccaagtaataaagcagaaggaagaagaagcacagaagaagaaatctgacttggaaatagagctattaaaacggcagcagaagttggagcagcttgaacttgagaagcagaaattgcaagaagagcaagaaaatgcccccgagtttgtgaaggtgaaaggcaatctcaggagaacaggccaagaagtcgcccaagcccaggagtc

SEQ ID NO: 312042 - DNA, 2633 bp, Artificial Sequence
  derived and/or modified sequence
gcgccggactggcttgcgggccgggccgccgcccccggagccgccctcgcgccgcctcgggccgccgccgagcagtcgggccgctgggcgccgccgcgggcgccgggagcgagctgggagggagccgcgcgcctttgtgcgcgcgccgagacagcccacctgaggatattgaccataaggactcatatctcattacaagaagcatcatggccgagccagactacatagaagatgacaatcctgaactcattaggcctcagaaactgatcaatcctgtaaaaacctcccggaaccatcaagatcttcacagagaacttcttatgaatcaaaaaaggggtcttgctcctcagaacaaaccagaattgcagaaggtgatggaaaaaagaaaacgagaccaagtaataaagcagaaggaagaagaagcacagaagaagaaatctgacttggaaatagagctattaaaacggcagcagaagttggagcagcttgaacttgagaagcagaaattgcaagaagagcaagaaaatgcccccgagtttgtgaaggtgaaaggcaatctcaggagaacaggccaagaagtcgcccaagcccaggagtcctaggctgaggctgcaccaagacctcgtgtgtcaccccacagagctgtctgtgggtgccttctcaatctcagggcaaaagcccctggagaatatttcagccagcagagaattttgacttgcagtaggatttggtttgattttcctacgatctgggtggatgccttgcctgtgacagttgcagttcctattcgccaaatgaagggcagtgccccgcacgtaagttggaatgatggacctgtgttcagagacttaacagaaccaacaagcaaaacaagtgagaacaggaaaaaggaagaggacactggaatcaattcttgagagttgcactacttggtttttcttccattccaagtttcgtgggacccagagccttttttcttttaaaagctaaaaaacaagtgtttaattcctctttttgttatctgttagataattgagatcacctagaaatgcgtttaatctgttcactcactgtaaattttgaggacccagaattgtcttgtttaatttatactttcacccctgttgcagttaacaccagagaaggaacgtgaatgtcgagcacagccactacccttgttggcacttaatttagaaatagggtgagaagtttaaaagcccatcttgattttattttcattccttttggttctctgtgtaataatagcaggctacatagtgacattccagttccaagaaggtacatcctgtccattcattaattgctttgattactaggagggtttctgttcagttttgtttttaaatgtcttgctgatctagttctttcagatggaataaccttccagtcccttagagagtggaactagtccatataacccagcttcagtagcaaaagtagaagccgccacatcttttcatttctccaagaggagagtggggaaggttcccatgaccagctgggcagtcaggatttctctaggcattctaatgtgaaataagtgtagactgctgtcaaggaggcttcatcagaagatgtatagcatttgaatgtctaatgataatgcatatcattagaatccaagctttgaaaatttctgattaatgctcatgtatttctttatctttgtttttccttgtgaagaaagactttcaccactgtctgagtgatgatgctgttgataaggatgatgtcgatgactactatattgcatctctcaggaacagctgatgggaagggaggggctgctgagttcccttgttctagctagcagcacgctcctcagagagggggccgagttacagacagcagccgcattctcatgcaaaattagttttaaactgctagtgtgggcatcggtaccttttgcctgggtgataccgaagaattgttgaggatttagtatgctccgtagagacagttcagccagtcatttctgcattggagagacttctcatactttctttgaagactcatagaaagctggatctagagcttttgaatccttaattagcacagtagaaattagctttctatgggaatgctttagtgttagcagttgacaattaggcccatattcaatctgaatgggaacaaaagtaaatgcaatgataatatactgctagttagagaaacatgttagttgattatacctgaaatggattatttatctcatcagcaagtattatttgaataaaatgagaaatgcttaagaaaaattgttgctctacagtaatttggtttcgaagaatggaatggtaactattttttcccatcgttcttttgagagaaggaagtgtgatgactgatgatcttgaaaagcccatttctgattgcacgttgactggaattctttctttgtgtctgtggactagcgatgctgtttgtaaaatgaagattcgggactggctcatatctttttatctaactagatgtcagatcttgaaatctgtattctcgaagcaattctgccacttgatcgtattcacaggggccctggtaggctcctttagaaggaccatttctgttcctagagcttaactagaattcattcttcactgaaaaaaaaaaaa

SEQ ID NO: 312043 - DNA, 475 bp, Artificial Sequence
  derived and/or modified sequence
gtgcttttcttcaccgctctaaggaactaccacagtcagaaggagaatgcagttgaaactaattttgtggatagagaaactgttggaactgctttacaaagtattttactctttcaagatcaaatgaagacagaattgttcaaagcgtgggttgacctcccctactcagtttttggctccttttggaaatctgatgtctgcccttctaagcgtaagacagcccacctgaggatattgaccataaggactcatatctcattacaagaagcatcatggccgagccagactacatagaagatgacaatcctgaactcattaggcctcagaaactgatcaatcctgtaaaaacctcccggaaccatcaagatcttcacagagaacttcttatgaatcaaaaaaggggtcttgctcctcagaacaaaccagaattgcagaaggtgatggaaaaaagaaaacgagaccaagtaataaagca

SEQ ID NO: 312044 - DNA, 583 bp, Artificial Sequence
  derived and/or modified sequence
attgagaagggaatgtgcttggtctgtcttctctctctgcttcgtcacctgccagtcctgagggccccaggcagcagtgcagctttaatgtggattcctatggatcagaggtgtcctagggctcacgttgttattctgcattgcacttgcagccaggagaatgcagttgaaactaattttgtggatagagaaactgttggaactgctttacaaagtattttaacagcccacctgaggatattgaccataaggactcatatctcattacaagaagcatcatggccgagccagactacatagaagatgacaatcctgaactcattaggcctcagaaactgatcaatcctgtaaaaacctcccggaaccatcaagatcttcacagagaacttcttatgaatcaaaaaaggggtcttgctcctcagaacaaaccagaattgcagaaggtgatggaaaaaagaaaacgagaccaagtaataaagcagaaggaagaagaagcacagaagaagaaatctgacttggaaatagagctattaaaacggcagcagaagttggagcagcttgaacttgagaagcagaaattgca

SEQ ID NO: 312045 - DNA, 790 bp, Artificial Sequence
  derived and/or modified sequence
atatcgagtattgagaagggaatgtgcttggtctgtcttctctctctgcttcgtcacctgccagtcctgagggccccaggcagcagtgcagctttaatgtggattcctatggatcagaggtgtcctagggctcacgttgttattctgcattgcacttgcagccagacagcccacctgaggatattgaccataaggactcatatctcattacaagaagcatcatggccgagccagactacatagaagatgacaatcctgaactcattaggcctcagaaactgatcaatcctgtaaaaacctcccggaaccatcaagatcttcacagagaacttcttatgaatcaaaaaaggggtcttgctcctcagaacaaaccagaattgcagaaggtgatggaaaaaagaaaacgagaccaagtaataaagcagaaggaagaagaagcacagaagaagaaatctgacttggaaatagagctattaaaacggcagcagaagttggagcagcttgaacttgagaagcagaaattgcaagaagagcaagaaaatgcccccgagtttgtgaaggtgaaaggcaatctcaggagaacaggccaagaagtcgcccaagcccaggagtcctaggctgaggctgcaccaagacctcgtgtgtcaccccacagagctgtctgtgggtgccttctcaatctcagggcaaaagcccctggagaatatttcagccagcagagaattttgacttgcagtaggatttggtttgattttcctacgatctgggtggatgccttgcctgtgacagt

SEQ ID NO: 312046 - DNA, 570 bp, Artificial Sequence
  derived and/or modified sequence
atatttgcttacaagtagaggagctgatttttgtacagacaagtacatttcaccagtgctgccagcacgttctcttggtctggaagacagcccacctgaggatattgaccataaggactcatatctcattacaagaagcatcatggccgagccagactacatagaagatgacaatcctgaactcattaggcctcagaaactgatcaatcctgtaaaaacctcccggaaccatcaagatcttcacagagaacttcttatgaatcaaaaaaggggtcttgctcctcagaacaaaccagaattgcagaaggtgatggaaaaaagaaaacgagaccaagtaataaagcagaaggaagaagaagcacagaagaagaaatctgacttggaaatagagctattaaaacggcagcagaagttggagcagcttgaacttgagaagcagaaattgcaagaagagcaagaaaatgcccccgagtttgtgaaggtgaaaggcaatctcaggagaacaggccaagaagtcgcccaagcccaggagtcctaggctgaggctgcaccaagacctcgtgtgtcacc

SEQ ID NO: 312047 - DNA, 549 bp, Artificial Sequence
  derived and/or modified sequence
aactgtggctcttttgatatccagaaagagagttctttgtggggatggttaattcttgttttgggtgcttttcttcaccgctctaaggaactaccacagtcagaaggtgcattcttactgcgatctttttatttgctaccttgggcttaaggagcctgcctatatctactgaggagaatgcagttgaaactaattttgtggatagagaaactgttggaactgctttacaaagtattttaacagcccacctgaggatattgaccataaggactcatatctcattacaagaagcatcatggccgagccagactacatagaagatgacaatcctgaactcattaggcctcagaaactgatcaatcctgtaaaaacctcccggaaccatcaagatcttcacagagaacttcttatgaatcaaaaaaggggtcttgctcctcagaacaaaccagaattgcagaaggtgatggaaaaaagaaaacgagaccaagtaataaagcagaaggaagaagaagcacagaagaagaaatctgacttggaaatagagctatt

SEQ ID NO: 312048 - DNA, 552 bp, Artificial Sequence
  derived and/or modified sequence
gcttttcttcaccgctctaaggaactaccacagtcagaaggtgcattcttactgcgatctttttatttgctaccttgggcttaaggagcctgcctatatctactgagccagagaatcctggtcaagccctgaacagtccagaaactctgaggagaatgcagttgaaactaattttgtggatagagaaactgttggaactgctttacaaagtattttaacagcccacctgaggatattgaccataaggactcatatctcattacaagaagcatcatggccgagccagactacatagaagatgacaatcctgaactcattaggcctcagaaactgatcaatcctgtaaaaacctcccggaaccatcaagatcttcacagagaacttcttatgaatcaaaaaaggggtcttgctcctcagaacaaaccagaattgcagaaggtgatggaaaaaagaaaacgagaccaagtaataaagcagaaggaagaagaagcacagaagaagaaatctgacttggaaatagagctattaaaacggcagcagaagttggagcag

SEQ ID NO: 312049 - DNA, 559 bp, Artificial Sequence
  derived and/or modified sequence
acttgtggctgagcagaggtgtatgtagtgcatttaggattttgccgaggagcacgtttttccatgggacagtgtgttgatatcaggctggctgtgatgggttccctgagtcaccctctgcgagacagcccacctgaggatattgaccataaggactcatatctcattacaagaagcatcatggccgagccagactacatagaagatgacaatcctgaactcattaggcctcagaaactgatcaatcctgtaaaaacctcccggaaccatcaagatcttcacagagaacttcttatgaatcaaaaaaggggtcttgctcctcagaacaaaccagaattgcagaaggtgatggaaaaaagaaaacgagaccaagtaataaagcagaaggaagaagaagcacagaagaagaaatctgacttggaaatagagctattaaaacggcagcagaagttggagcagcttgaacttgagaagcagaaattgcaagaagagcaagaaaatgcccccgagtttgtgaaggtgaaaggcaatctcaggagaacaggccaagaagtcgccc

SEQ ID NO: 312050 - DNA, 561 bp, Artificial Sequence
  derived and/or modified sequence
ctgcaagtttagcactggcctgtcctgattagtgaggacctctgattgcctaggccagggctcaggagaatgcagttgaaactaattttgtggatagagaaactgttggaactgctttacaaagtattttaacagcccacctgaggatattgaccataaggactcatatctcattacaagaagcatcatggccgagccagactacatagaagatgacaatcctgaactcattaggcctcagaaactgatcaatcctgtaaaaacctcccggaaccatcaagatcttcacagagaacttcttatgaatcaaaaaaggggtcttgctcctcagaacaaaccagaattgcagaaggtgatggaaaaaagaaaacgagaccaagtaataaagcagaaggaagaagaagcacagaagaagaaatctgacttggaaatagagctattaaaacggcagcagaagttggagcagcttgaacttgagaagcagaaattgcaagaagagcaagaaaatgcccccgagtttgtgaaggtgaaaggcaatctcaggagaacaggccaagaagt

SEQ ID NO: 312051 - DNA, 697 bp, Artificial Sequence
  derived and/or modified sequence
attcgtgggggaggtgtgtttgtggagtaaggcagtgggagggtagaggaaaaggagataaagaaaaagcccatttctaactctctgaacaggcgaggccagcttatctgagatgcctgtgatcaggagaatgcagttgaaactaattttgtggatagagaaactgttggaactgctttacaaagtattttaacagcccacctgaggatattgaccataaggactcatatctcattacaagaagcatcatggccgagccagactacatagaagatgacaatcctgaactcattaggcctcagaaactgatcaatcctgtaaaaacctcccggaaccatcaagatcttcacagagaacttcttatgaatcaaaaaaggggtcttgctcctcagaacaaaccagaattgcagaaggtgatggaaaaaagaaaacgagaccaagtaataaagcagaaggaagaagaagcacagaagaagaaatctgacttggaaatagagctattaaaacggcagcagaagttggagcagcttgaacttgagaagcagaaattgcaagaagagcaagaaaatgcccccgagtttgtgaaggtgaaaggcaatctcaggagaacaggccaagaagtcgcccaagcccaggagtcctaggctgaggctgcaccaagacctcgtgtgtcaccccacagagctgtctgtgggtg

SEQ ID NO: 312052 - DNA, 83 bp, Artificial Sequence
  derived and/or modified sequence
gcaaaagaaacaatcagtagagtaaacagacaactcatagaatgcaagaaaatcatcgcaatctgtacatccaacaaagggct

SEQ ID NO: 312053 - DNA, 4872 bp, Artificial Sequence
  derived and/or modified sequence
cagcgggaggcggagcgagtccaaaatggcggctctcaggctggcgcgctccgtgctgctggggctttgaggtggtcgccgggggtccgggggaccctttccccgccgcggaagccctagaggatgaatcggggaccctgctaaggtctggcggcggggctggagagcagtggcagcaagggctgcggtggcgtccacgcagcgggatgtgcgagagttactccaggtcgttgttgagggtctcggtggcgcagatctgccaggcgctgggctgggactcggtgcagctcagcgcctgccacctcctcacggacgtgctgcagcgctatctgcagcagctgggccggggctgccatcggtactctgagctctatggccgaacagacccaattttggatgatgttggtgaagctttccagctgatgggggttagtctacatgaactagaagactatattcacaacattgagcctgtcaccttcccacaccaaattccgtcatttcctgttagcaagaacaatgtacttcagtttcctcaacctggaagtaaagatgcagaggaaagaaaagaatacattcctgattacctgccacccattgtgtcttctcaagaagaagaagaagaagagcaggtgcccactgatggaggcacatcagcagaagccatgcaggttcccttggaagaagatgatgaattggaggaggaagaaattattaatgatgagaatttcctgggcaagagaccactggatagtcctgaagctgaagaactgccagccatgaagcggcctcggctattaagcactaaaggggacacgctagatgttgtgttattggaagctcgagagccactcagctcaataaatactcaaaagatcccaccaatgctttctccagtccatgtacaggacagtacagacttggcacctccctcacccgagccgccaatgttggctccagttgcaaaatcacaaatgccaactgcaaaaccattagaaacaaagtcatttacacctaaaacaaagactaaaactagctctccaggacagaagactaaatcacctaaaaccgcccagtcaccagcaatggtcggaagtcctattcgatcaccaaaaactgtatccaaagaaaagaaatcacctggacgttccaagagccccaagagtcccaagagccccaaggtcacgactcacattccccaaacacctgtgagacctgaaacgcccaacaggactccttcagctacactcagtgaaaaaatcagtaaagagactatccaggtaaaacaaatacagacaccccctgatgctgggaaactgaacagtgagaatcagccgaaaaaggctgtggtagcagataaaacgattgaggcctctatcgatgctgtgattgcacgagcctgtgctgagcgagagccagatcctttcgaattttcttctggatcggaatctgaaggagacatttttactagccctaagagaatttcaggcccggagtgtactactcccaaagcttccacttccgcgaacaatttcacaaagtcaggatccactcctctgcctctttccggtggaacctcaagttccgataactcatggacaatggatgcctccattgatgaggttgtacgtaaagcaaaactgggaacaccttcaaatatgccccccaactttccttatatctcttctccgtcagtgtctcctcccactcccgaacctctccacaaggtgtatgaggagaaaaccaagctgccttcctccgtggaggtaaagaagaagttgaaaaaggaactaaagactaaaatgaaaaagaaagaaaagcagagagatagggagagggaaaaagacaagaacaaggacaaaagtaaggagaaggataaagtgaaagagaaagagaaagacaaggaaactggcagggaaacaaagtatccctggaaggaatttcttaaagaggaagaggcagatccctacaagtttaaaatcaaagaatttgaagatgttgatcccaaagtgaaattgaaagatggacttgtgaggaaggagaaagagaagcataaagataagaagaaagatagagagaaaggcaagaaagataaagataagagagagaaagaaaaagtgaaagataaaggcagagaagataagatgaaagccccagcacccccactggtgttgcccccaaaagagttggccctgcccttgttcagccctgccacagcctccagggtcccagccatgctgccatctttgttgccagtgcttccggaaaaactgtttgaggagaaagagaaggtgaaggagaaagaaaagaaaaaggacaaaaaggagaagaagaaaaagaaggaaaaagagaaggagaagaaggagaaggaaagagagaaagagaagagagagcgagagaagagagaaaaagagaaggagaaacacaagcatgaaaaaataaaagtggaaccagtcgctctggccccgagtccagttatccccagattaactctccgagtcggtgctggccaagacaagattgtcatcagcaaggtggtccctgcccccgaggccaagccggcgccctcgcagaacaggccgaagaccccaccgccggcccccgcgcccgcccccggccccatgctcgtcagccctgcgcccgtgccgctgccgctgctcgcccaggccgccgcgggccctgccctgctgccctccccgggtcccgccgcctccggggccagtgccaaagcccccgtgcgcagcgtggtgactgagacggtcagcacctacgtgatccgagatgagtggggcaatcagatctggatctgccctgggtgtaacaagcctgacgatgggagtcccatgattgggtgtgacgactgcgatgactggtaccactggccctgtgttggaatcatgactgcacccccagaagagatgcagtggttctgccccaagtgtgcgaacaagaagaaggacaaaaagcacaagaagaggaagcatcgagcccactgacgactcccgaggggctggaccaagcggggtcagcccgggcttcttccctggcgcctctggaagggagctggtgcaagtctgccgtcacatccacccccagatgcctgtggataaagaacccaggaggactgaggctggaacacaccgcgcacctggattgttcactcccgagccgccttggcctgtggctccgtggcagtgcgacagaaggaaactcaagcagaggcgtggcctgggggctgcccctcctccacttctctaataccagtgacaagtattattaataaagagcgtacatcttcccttttgatttcctttattctctccagggccttttcattgaggtattagatgagaagataatgtacaaactgcctcaactgtaatttaaggatgatagagtctgtatacagttttcagcccctttccctctatagtaagataatcagaataacataaaagaaaactccagttggagtaccggtaaatatttttgtgataagaatatatgaagcttccctccttcccccgtttttagtactaacatgtaaaatgttcaggcttttgtgaaataccttatattttttaagaaaaaggtttctatcatgtcctgtttgcttttgtgcaaattatttttgtttaatgtattttatatcttcgttgcattctaattttgcccttctttaaactgctggagtctcttctcactgcttgtacatttcatcaacttgtataaaaactcttcagactaaaagattgcccctaatgtaaataataaatatttatgaagtagttattttttaaatttttatcgtgtttaattctggctttctctgaaatccactgtgatttcagccaggtctgtaatgacgctggacagaaacaaggctagagaaaaagccatcgttcaaagaaatttcccttgagctcagcctgcgcagtgcccggaaacatggtggggaaagggcccgagcagttggaaggaaaacaaggcaatttaaatttagagtttatgacttgaagttgttttgtttgttgtctattttgtttttgtaaatttctttgacagacttttactaaaaggacatgtagtttccatgaaagtaaaaaaaaaaaacaacaaaaaacccacatatactgtagcattttgtctttatattgttttatttctacaaatctgttcattaatattgtgctttaaggctgaaatgaagtatattatgaatttttttaagaaaactcatcaaatttcagggtatcacaaaactttattatattattatactgcccactatttattatatgttatagatgtctgagaggtaaaccaaatattttatttttaatgttaaaaaaacatcaaatttaactttattagcatattttagcaactttgggataaatacggacttttacttgattttgaaataatcccagtgtaggcccatgtgctggatctgttggatgctagaatatgggctttgaacctaatacaaatatattactagaaaatgtgatttttttaaatgccaagtaaattgatattagtgtatgaattagtcatattttaaaacattatgtggttagagaaatgcggttttctgccatgaatgttaagttgcaaatcagtggaaatggagtcgacctcttcggagcacagggtgtcattgccctcgttgttcaagaggccagaatttttctatccccgctaagaaacaaagcatctatgttgagatatgtgtttttttgtttgattaatttgagatcattctaaatactttatacaatattttcacatgcacaaaaatgcgcgttagtggtttttggagaggggtgaggggtgggggaagtgcaaaataaagattattggctattt

SEQ ID NO: 312054 - DNA, 1021 bp, Artificial Sequence
  derived and/or modified sequence
ctcaggctggcgcgctccgtgctgctggggctttgaggtggtcgccgggggtccgggggaccctttccccgccgcggaagccctagaggatgaatcggggaccctgctaaggtctggcggcggggctggagagcagtggcagcaagggctgcggtggcgtccacgcagcgggatgtgcgagagttactccaggtcgttgttgagggtctcggtggcgcagatctgccaggcgctgggctgggactcggtgcagctcagcgcctgccacctcctcacggacgtgctgcagcgctatctgcagcagctgggccggggctgccatcggtactctgagctctatggccgaacagacccaattttggatgatgttggtgaagctttccagctgatgggggttagtctacatgaactagaagactatattcacaacattgagcctgtcaccttcccacaccaaattccgtcatttcctgttagcaagaacaatgtacttcagtttcctcaacctggaagtaaagatgcagaggaaagaaaagaatacattcctgattacctgccacccattgtgtcttctcaagaagaagaagaagaagagcaggtgcccactgatggaggcacatcagcagaagccatgcaggttcccttggaagaagatgatgaattggaggaggaagaaattattaatgatgagaatttcctgggcaagagaccactggatagtcctgaagctgaagaactgccagccatgaagcggcctcggctattaagcactaaaggggacacgctagatgttgtgttattggaagctcgagagccactcagctcaataaatactcaaaagatcccaccaatgctttctccagtccatgtacaggacagtacagacttggcacctccctcacccgagccgccaatgttggctccagttgcaaaatcacaaatgccaactgcaaaaccattagaaacaaagtcatttacacctaaaacaaagactaaaaaaaaaaaaaaaaaaaaaaagagt

SEQ ID NO: 312055 - DNA, 3903 bp, Artificial Sequence
  derived and/or modified sequence
atttcaacactacacttgcacaatgtctttgaaaccaagagtagtagattttgatgaaacatggaacaaacttttgacgacaataaaagccgtggtcatgttggaatacgtcgaaagagcaacatggaatgaccgtttctcagatatctatgctttatgtgtggcctatcctgaaccccttggagaaagactttatacagaaactaagatttttttggaaaatcatgttcggcatttgcataagagagttttggagtcagaagaacaagtacttgttatgtatcataggtactgggaagaatacagcaagggtgcagactatatggactgcttatataggtatctcaacacccagtttattaaaaagaataaattaacagaagcggaccttcagtatggctatggtggtgtagatatgaatgaaccacttatggaaataggagagctagcattggatatgtggaggaaattgatggttgaaccacttcaggccatccttatccgaatgctgctccgagaaatcaaaaatgatcgtggtggagaagacccaaaccagaaagtaatccatggggttattaactcctttgttcatgttgaacagtataagaaaaaattccccttaaagttttatcaggaaatttttgagtctccctttctgactgaaacaggagagtattacaaacaagaagcttcaaatttattacaagaatcaaactgctcacagtatatggaaaaggttctaggtagattaaaagatgaagaaattcgatgtcgaaaatacctacatccaagttcatatactaaggtgattcatgaatgtcaacaacgaatggtagcagaccacttacagtttttacatgcagaatgtcataatataattcgacaagagaaaaaaaatgacatggcaaatatgtacgtcttactccgtgctgtgtccactggtttacctcatatgattcaggagctgcaaaaccacatccatgatgagggccttcgagcaaccagcaaccttactcaggaaaacatgccaacactatttgtggagtcagttttggaagtgcatggtaaatttgttcagcttatcaacactgttttgaatggtgatcagcattttatgagtgcgttggataaggcccttacgtcagttgtaaattacagagaacctaagtctgtttgcaaagcacctgaactgcttgctaagtactgtgacaacttactgaagaagtcagcgaaagggatgacagagaatgaagtggaagacaggctcacgagcttcatcacagtgttcaaatacattgatgacaaggacgtctttcaaaagttctacgcaagaatgctggcaaaacgtttaattcatgggttatccatgtctatggactctgaagaagccatgatcaacaaattaaagcaagcctgtggttatgagtttaccagcaagctacatcggatgtatacagatatgagtgtcagcgctgatctcaacaataagttcaacaattttatcaaaaaccaagacacagtaatagatttgggaattagttttcaaatatatgttctacaggctggtgcgtggcctcttactcaggctccttcatctacgtttgcaattccccaggaattagaaaaaagtgtacagatgtttgaattattttatagccaacatttcagtggaaggaaacttacatggttacattatctgtgtacaggtgaagttaaaatgaactatttgggcaaaccatatgtagccatggttacaacataccaaatggcagttcttcttgcctttaacaacagtgaaactgtcagttataaagagcttcaggacagcactcagatgaatgaaaaggaactgacaaaaacaatcaaatcattacttgatgtgaaaatgattaaccatgattcagaaaaggaagatattgatgcagaatcttcgttttcattaaatatgaactttagcagtaaaagaacaaaatttaaaattactacatcaatgcagaaagacacaccacaagtgattagccagtcaagagctaggtttaatcccagtatcagcatgattaagaagtgtattgaagttctgatagacaaacaatacatagaacgcagccaggcgtcggcagatgaatacagctacgtcgcgtgatgtcgctctcctccagcgtggtgtgagaagatcattgccatcaccatttggtgtgttcctgtgggaaaaagcaggactgtgcctccataatttggtcatttggcagcccctgttttctgctgtttacaacatcaccagtgccacgtcatgagcgtcaaagaaaatgcctagagatatttcaagctcatgtcattatgacatttcttaaaactttattaaaagaatgagtgaagtattgctgaaaagtggaaattcggttgggtaccatgctttttctccccttcacgtttgcagttgatgtgtctttttttttttttttaatgtatcttaaaggacataaaatttaaaaacttaaatattgtaatatgacagataacctaataattgtatctacattaaaatgacaaacatgatactgctgcttgtcaaataaaaaaaaaataaagaaatagaatgccttttttatgtggatggagtatcaggttgaccacaaaatatattgactcaaagcagctaatgcatctttagttgcgtttttatctgaatggtttaattcacttgtactcctatttaaatcctacatgaaaaatgtctagattattgttcttgactgcataggactgcattcagcataaagaatgctttatttttatggattagatatattggatctaaacattttgaatcttgaagatgtaattccatcagcagtttctggtggtgtgctactccacagacatcgcagagtgtgagcaggatgcttggtgacctcaagtctggcacagagagagcttttcattcaaaagttgtctttcttcggttgcataatccattaattctagcatagactagtaccctagctctgtggccttccctgagtcttaggaaatctatgataccaacatattccttctatatgcctcccctacctgttacccttacaaccctcctccaacagtttagatactagagtcactctcatcaatcacagatgtgcttagcaatgcataacctaaatacttttttaaaaaagaaaattgtacattgtactgggtgccacatatataaatcccattattttgtttattttatatatatatatatatataatatatatatatatatatctcaacagcagtgttaagagtactgcgatctattatcatatttattgtctatccacaccatcaccaccaccaccacacccctcctccctcaacatacaatttttctttattttaaaaaaaataagagacggggtttcgccatgtttcccaggctagtctggaacttctggcctcaagcaatcctatctctgtctcccaaagtgctgggattacaagcatgagccactgcatccatccaacacaaaatttttaaaatcggaatattttaaagcaaatcacacaaattatttcacttataatacttcagtaaggcctttaaaaaatccacagtgatattattactcctaacaaaaacaataattacttagtatcatctaatatgtggttcatatttaaatttgttgttttgagatgggtcttacaattggtttattcaattgcattttttctaactcgtgtctcaagtgttttaaaaatctactgaacttataatgacttatataatgtatttctcattttacctttcttccaaaagaggaaataatggcaaaccatataatattgtacattcactgtcaaaaagcaaacccttgttttgataacttgttgattgataaaagttttccaaattga

SEQ ID NO: 312056 - protein, 706 aa, Artificial Sequence
  derived and/or modified sequence
MSLKPRVVDFDETWNKLLTTIKAVVMLEYVERATWNDRFSDIYALCVAYPEPLGERLYTETKIFLENHVRHLHKRVLESEEQVLVMYHRYWEEYSKGADYMDCLYRYLNTQFIKKNKLTEADLQYGYGGVDMNEPLMEIGELALDMWRKLMVEPLQAILIRMLLREIKNDRGGEDPNQKVIHGVINSFVHVEQYKKKFPLKFYQEIFESPFLTETGEYYKQEASNLLQESNCSQYMEKVLGRLKDEEIRCRKYLHPSSYTKVIHECQQRMVADHLQFLHAECHNIIRQEKKNDMANMYVLLRAVSTGLPHMIQELQNHIHDEGLRATSNLTQENMPTLFVESVLEVHGKFVQLINTVLNGDQHFMSALDKALTSVVNYREPKSVCKAPELLAKYCDNLLKKSAKGMTENEVEDRLTSFITVFKYIDDKDVFQKFYARMLAKRLIHGLSMSMDSEEAMINKLKQACGYEFTSKLHRMYTDMSVSADLNNKFNNFIKNQDTVIDLGISFQIYVLQAGAWPLTQAPSSTFAIPQELEKSVQMFELFYSQHFSGRKLTWLHYLCTGEVKMNYLGKPYVAMVTTYQMAVLLAFNNSETVSYKELQDSTQMNEKELTKTIKSLLDVKMINHDSEKEDIDAESSFSLNMNFSSKRTKFKITTSMQKDTPQVISQSRARFNPSISMIKKCIEVLIDKQYIERSQASADEYSYVA

SEQ ID NO: 312057 - protein, 745 aa, Artificial Sequence
  derived and/or modified sequence
MSLKPRVVDFDETWNKLLTTIKAVVMLEYVERATWNDRFSDIYALCVAYPEPLGERLYTETKIFLENHVRHLHKRVLESEEQVLVMYHRYWEEYSKGADYMDCLYRYLNTQFIKKNKLTEADLQYGYGGVDMNEPLMEIGELALDMWRKLMVEPLQAILIRMLLREIKNDRGGEDPNQKVIHGVINSFVHVEQYKKKFPLKFYQEIFESPFLTETGEYYKQEASNLLQESNCSQYMEKVLGRLKDEEIRCRKYLHPSSYTKVIHECQQRMVADHLQFLHAECHNIIRQEKKNDMANMYVLLRAVSTGLPHMIQELQNHIHDEGLRATSNLTQENMPTLFVESVLEVHGKFVQLINTVLNGDQHFMSALDKALTSVVNYREPKSVCKAPELLAKYCDNLLKKSAKGMTENEVEDRLTSFITVFKYIDDKDVFQKFYARMLAKRLIHGLSMSMDSEEAMINKLKQACGYEFTSKLHRMYTDMSVSADLNNKFNNFIKNQDTVIDLGISFQIYVLQAGAWPLTQAPSSTFAIPQELEKSVQMFELFYSQHFSGRKLTWLHYLCTGEVKMNYLGKPYVAMVTTYQMAVLLAFNNSETVSYKELQDSTQMNEKELTKTIKSLLDVKMINHDSEKEDIDAESSFSLNMNFSSKRTKFKITTSMQKDTPQEMEQTRSAVDEDRKMYLQAAIVRIMKARKVLRHNALIQEVISQSRARFNPSISMIKKCIEVLIDKQYIERSQASADEYSYVA

SEQ ID NO: 312058 - protein, 688 aa, Artificial Sequence
  derived and/or modified sequence
MLYVWPILNPLEKDFIQKLRFFWKIMFGICIRYWEEYSKGADYMDCLYRYLNTQFIKKNKLTEADLQYGYGGVDMNEPLMEIGELALDMWRKLMVEPLQAILIRMLLREIKNDRGGEDPNQKVIHGVINSFVHVEQYKKKFPLKFYQEIFESPFLTETGEYYKQEASNLLQESNCSQYMEKVLGRLKDEEIRCRKYLHPSSYTKVIHECQQRMVADHLQFLHAECHNIIRQEKKNDMANMYVLLRAVSTGLPHMIQELQNHIHDEGLRATSNLTQENMPTLFVESVLEVHGKFVQLINTVLNGDQHFMSALDKALTSVVNYREPKSVCKAPELLAKYCDNLLKKSAKGMTENEVEDRLTSFITVFKYIDDKDVFQKFYARMLAKRLIHGLSMSMDSEEAMINKLKQACGYEFTSKLHRMYTDMSVSADLNNKFNNFIKNQDTVIDLGISFQIYVLQAGAWPLTQAPSSTFAIPQELEKSVQMFELFYSQHFSGRKLTWLHYLCTGEVKMNYLGKPYVAMVTTYQMAVLLAFNNSETVSYKELQDSTQMNEKELTKTIKSLLDVKMINHDSEKEDIDAESSFSLNMNFSSKRTKFKITTSMQKDTPQEMEQTRSAVDEDRKMYLQAAIVRIMKARKVLRHNALIQEVISQSRARFNPSISMIKKCIEVLIDKQYIERSQASADEYSYVA

SEQ ID NO: 312059 - DNA, 2121 bp, Artificial Sequence
  derived and/or modified sequence
atgagcctgaagcccagagtggtggacttcgacgagacctggaacaagctgctgaccaccatcaaggccgtggtgatgctggagtacgtggagagagccacctggaacgacagattcagcgacatctacgccctgtgcgtggcctaccccgagcccctgggcgagagactgtacaccgagaccaagatcttcctggagaaccacgtgagacacctgcacaagagagtgctggagagcgaggagcaggtgctggtgatgtaccacagatactgggaggagtacagcaagggcgccgactacatggactgcctgtacagatacctgaacacccagttcatcaagaagaacaagctgaccgaggccgacctgcagtacggctacggcggcgtggacatgaacgagcccctgatggagatcggcgagctggccctggacatgtggagaaagctgatggtggagcccctgcaggccatcctgatcagaatgctgctgagagagatcaagaacgacagaggcggcgaggaccccaaccagaaggtgatccacggcgtgatcaacagcttcgtgcacgtggagcagtacaagaagaagttccccctgaagttctaccaggagatcttcgagagccccttcctgaccgagaccggcgagtactacaagcaggaggccagcaacctgctgcaggagagcaactgcagccagtacatggagaaggtgctgggcagactgaaggacgaggagatcagatgcagaaagtacctgcaccccagcagctacaccaaggtgatccacgagtgccagcagagaatggtggccgaccacctgcagttcctgcacgccgagtgccacaacatcatcagacaggagaagaagaacgacatggccaacatgtacgtgctgctgagagccgtgagcaccggcctgccccacatgatccaggagctgcagaaccacatccacgacgagggcctgagagccaccagcaacctgacccaggagaacatgcccaccctgttcgtggagagcgtgctggaggtgcacggcaagttcgtgcagctgatcaacaccgtgctgaacggcgaccagcacttcatgagcgccctggacaaggccctgaccagcgtggtgaactacagagagcccaagagcgtgtgcaaggcccccgagctgctggccaagtactgcgacaacctgctgaagaagagcgccaagggcatgaccgagaacgaggtggaggacagactgaccagcttcatcaccgtgttcaagtacatcgacgacaaggacgtgttccagaagttctacgccagaatgctggccaagagactgatccacggcctgagcatgagcatggacagcgaggaggccatgatcaacaagctgaagcaggcctgcggctacgagttcaccagcaagctgcacagaatgtacaccgacatgagcgtgagcgccgacctgaacaacaagttcaacaacttcatcaagaaccaggacaccgtgatcgacctgggcatcagcttccagatctacgtgctgcaggccggcgcctggcccctgacccaggcccccagcagcaccttcgccatcccccaggagctggagaagagcgtgcagatgttcgagctgttctacagccagcacttcagcggcagaaagctgacctggctgcactacctgtgcaccggcgaggtgaagatgaactacctgggcaagccctacgtggccatggtgaccacctaccagatggccgtgctgctggccttcaacaacagcgagaccgtgagctacaaggagctgcaggacagcacccagatgaacgagaaggagctgaccaagaccatcaagagcctgctggacgtgaagatgatcaaccacgacagcgagaaggaggacatcgacgccgagagcagcttcagcctgaacatgaacttcagcagcaagagaaccaagttcaagatcaccaccagcatgcagaaggacaccccccaggtgatcagccagagcagagccagattcaaccccagcatcagcatgatcaagaagtgcatcgaggtgctgatcgacaagcagtacatcgagagaagccaggccagcgccgacgagtacagctacgtggcctag

SEQ ID NO: 312060 - DNA, 2238 bp, Artificial Sequence
  derived and/or modified sequence
atgagcctgaagcccagagtggtggacttcgacgagacctggaacaagctgctgaccaccatcaaggccgtggtgatgctggagtacgtggagagagccacctggaacgacagattcagcgacatctacgccctgtgcgtggcctaccccgagcccctgggcgagagactgtacaccgagaccaagatcttcctggagaaccacgtgagacacctgcacaagagagtgctggagagcgaggagcaggtgctggtgatgtaccacagatactgggaggagtacagcaagggcgccgactacatggactgcctgtacagatacctgaacacccagttcatcaagaagaacaagctgaccgaggccgacctgcagtacggctacggcggcgtggacatgaacgagcccctgatggagatcggcgagctggccctggacatgtggagaaagctgatggtggagcccctgcaggccatcctgatcagaatgctgctgagagagatcaagaacgacagaggcggcgaggaccccaaccagaaggtgatccacggcgtgatcaacagcttcgtgcacgtggagcagtacaagaagaagttccccctgaagttctaccaggagatcttcgagagccccttcctgaccgagaccggcgagtactacaagcaggaggccagcaacctgctgcaggagagcaactgcagccagtacatggagaaggtgctgggcagactgaaggacgaggagatcagatgcagaaagtacctgcaccccagcagctacaccaaggtgatccacgagtgccagcagagaatggtggccgaccacctgcagttcctgcacgccgagtgccacaacatcatcagacaggagaagaagaacgacatggccaacatgtacgtgctgctgagagccgtgagcaccggcctgccccacatgatccaggagctgcagaaccacatccacgacgagggcctgagagccaccagcaacctgacccaggagaacatgcccaccctgttcgtggagagcgtgctggaggtgcacggcaagttcgtgcagctgatcaacaccgtgctgaacggcgaccagcacttcatgagcgccctggacaaggccctgaccagcgtggtgaactacagagagcccaagagcgtgtgcaaggcccccgagctgctggccaagtactgcgacaacctgctgaagaagagcgccaagggcatgaccgagaacgaggtggaggacagactgaccagcttcatcaccgtgttcaagtacatcgacgacaaggacgtgttccagaagttctacgccagaatgctggccaagagactgatccacggcctgagcatgagcatggacagcgaggaggccatgatcaacaagctgaagcaggcctgcggctacgagttcaccagcaagctgcacagaatgtacaccgacatgagcgtgagcgccgacctgaacaacaagttcaacaacttcatcaagaaccaggacaccgtgatcgacctgggcatcagcttccagatctacgtgctgcaggccggcgcctggcccctgacccaggcccccagcagcaccttcgccatcccccaggagctggagaagagcgtgcagatgttcgagctgttctacagccagcacttcagcggcagaaagctgacctggctgcactacctgtgcaccggcgaggtgaagatgaactacctgggcaagccctacgtggccatggtgaccacctaccagatggccgtgctgctggccttcaacaacagcgagaccgtgagctacaaggagctgcaggacagcacccagatgaacgagaaggagctgaccaagaccatcaagagcctgctggacgtgaagatgatcaaccacgacagcgagaaggaggacatcgacgccgagagcagcttcagcctgaacatgaacttcagcagcaagagaaccaagttcaagatcaccaccagcatgcagaaggacaccccccaggagatggagcagaccagaagcgccgtggacgaggacagaaagatgtacctgcaggccgccatcgtgagaatcatgaaggccagaaaggtgctgagacacaacgccctgatccaggaggtgatcagccagagcagagccagattcaaccccagcatcagcatgatcaagaagtgcatcgaggtgctgatcgacaagcagtacatcgagagaagccaggccagcgccgacgagtacagctacgtggcctag

SEQ ID NO: 312061 - DNA, 2067 bp, Artificial Sequence
  derived and/or modified sequence
atgctgtacgtgtggcccatcctgaaccccctggagaaggacttcatccagaagctgagattcttctggaagatcatgttcggcatctgcatcagatactgggaggagtacagcaagggcgccgactacatggactgcctgtacagatacctgaacacccagttcatcaagaagaacaagctgaccgaggccgacctgcagtacggctacggcggcgtggacatgaacgagcccctgatggagatcggcgagctggccctggacatgtggagaaagctgatggtggagcccctgcaggccatcctgatcagaatgctgctgagagagatcaagaacgacagaggcggcgaggaccccaaccagaaggtgatccacggcgtgatcaacagcttcgtgcacgtggagcagtacaagaagaagttccccctgaagttctaccaggagatcttcgagagccccttcctgaccgagaccggcgagtactacaagcaggaggccagcaacctgctgcaggagagcaactgcagccagtacatggagaaggtgctgggcagactgaaggacgaggagatcagatgcagaaagtacctgcaccccagcagctacaccaaggtgatccacgagtgccagcagagaatggtggccgaccacctgcagttcctgcacgccgagtgccacaacatcatcagacaggagaagaagaacgacatggccaacatgtacgtgctgctgagagccgtgagcaccggcctgccccacatgatccaggagctgcagaaccacatccacgacgagggcctgagagccaccagcaacctgacccaggagaacatgcccaccctgttcgtggagagcgtgctggaggtgcacggcaagttcgtgcagctgatcaacaccgtgctgaacggcgaccagcacttcatgagcgccctggacaaggccctgaccagcgtggtgaactacagagagcccaagagcgtgtgcaaggcccccgagctgctggccaagtactgcgacaacctgctgaagaagagcgccaagggcatgaccgagaacgaggtggaggacagactgaccagcttcatcaccgtgttcaagtacatcgacgacaaggacgtgttccagaagttctacgccagaatgctggccaagagactgatccacggcctgagcatgagcatggacagcgaggaggccatgatcaacaagctgaagcaggcctgcggctacgagttcaccagcaagctgcacagaatgtacaccgacatgagcgtgagcgccgacctgaacaacaagttcaacaacttcatcaagaaccaggacaccgtgatcgacctgggcatcagcttccagatctacgtgctgcaggccggcgcctggcccctgacccaggcccccagcagcaccttcgccatcccccaggagctggagaagagcgtgcagatgttcgagctgttctacagccagcacttcagcggcagaaagctgacctggctgcactacctgtgcaccggcgaggtgaagatgaactacctgggcaagccctacgtggccatggtgaccacctaccagatggccgtgctgctggccttcaacaacagcgagaccgtgagctacaaggagctgcaggacagcacccagatgaacgagaaggagctgaccaagaccatcaagagcctgctggacgtgaagatgatcaaccacgacagcgagaaggaggacatcgacgccgagagcagcttcagcctgaacatgaacttcagcagcaagagaaccaagttcaagatcaccaccagcatgcagaaggacaccccccaggagatggagcagaccagaagcgccgtggacgaggacagaaagatgtacctgcaggccgccatcgtgagaatcatgaaggccagaaaggtgctgagacacaacgccctgatccaggaggtgatcagccagagcagagccagattcaaccccagcatcagcatgatcaagaagtgcatcgaggtgctgatcgacaagcagtacatcgagagaagccaggccagcgccgacgagtacagctacgtggcctag

SEQ ID NO: 312062 - DNA, 651 bp, Artificial Sequence
  derived and/or modified sequence
atgagcctgaagcccagagtggtggacttcgacgagacctggaacaagctgctgaccaccatcaaggccgtggtgatgctggagtacgtggagagagccacctggaacgacagattcagcgacatctacgccctgtgcgtggcctaccccgagcccctgggcgagagactgtacaccgagaccaagatcttcctggagaaccacgtgagacacctgcacaagagagtgctggagagcgaggagcaggtgctggtgatgtaccacagatactgggaggagtacagcaagggcgccgactacatggactgcctgtacagatacctgaacacccagttcatcaagaagaacaagctgaccgaggccgacctgcagtacggctacggcggcgtggacatgaacgagcccctgatggagatcggcgagctggccctggacatgtggagaaagctgatggtggagcccctgcaggccatcctgatcagaatgctgctgagagagatcaagaacgacagaggcggcgaggaccccaaccagaaggtgatccacggcgtgatcaacagcttcgtgcacgtggagcagtacaagaagaagttccccctgaagttctaccaggagatcttcgagagccccttcctgaccgagaccggctag

SEQ ID NO: 312063 - DNA, 4189 bp, Artificial Sequence
  derived and/or modified sequence
attgctttccgggtggcgggggggatttggcagcagcggaagaaggagaccggagggtgtgtgttgggcaaagccggaggcagaggaggacgattgttttacggatcccgtgatcggcccgtccttctcccctttccccccctccctaccgcccctgtcccgccggggagcggcggcggccttggactttgctgtctttcctcgcggagacagatttcaacactacacttgcacaatgtctttgaaaccaagagtagtagattttgatgaaacatggaacaaacttttgacgacaataaaagccgtggtcatgttggaatacgtcgaaagagcaacatggaatgaccgtttctcagatatctatgctttatgtgtggcctatcctgaaccccttggagaaagactttatacagaaactaagatttttttggaaaatcatgttcggcatttgcataaggtactgggaagaatacagcaagggtgcagactatatggactgcttatataggtatctcaacacccagtttattaaaaagaataaattaacagaagcggaccttcagtatggctatggtggtgtagatatgaatgaaccacttatggaaataggagagctagcattggatatgtggaggaaattgatggttgaaccacttcaggccatccttatccgaatgctgctccgagaaatcaaaaatgatcgtggtggagaagacccaaaccagaaagtaatccatggggttattaactcctttgttcatgttgaacagtataagaaaaaattccccttaaagttttatcaggaaatttttgagtctccctttctgactgaaacaggagagtattacaaacaagaagcttcaaatttattacaagaatcaaactgctcacagtatatggaaaaggttctaggtagattaaaagatgaagaaattcgatgtcgaaaatacctacatccaagttcatatactaaggtgattcatgaatgtcaacaacgaatggtagcagaccacttacagtttttacatgcagaatgtcataatataattcgacaagagaaaaaaaatgacatggcaaatatgtacgtcttactccgtgctgtgtccactggtttacctcatatgattcaggagctgcaaaaccacatccatgatgagggccttcgagcaaccagcaaccttactcaggaaaacatgccaacactatttgtggagtcagttttggaagtgcatggtaaatttgttcagcttatcaacactgttttgaatggtgatcagcattttatgagtgcgttggataaggcccttacgtcagttgtaaattacagagaacctaagtctgtttgcaaagcacctgaactgcttgctaagtactgtgacaacttactgaagaagtcagcgaaagggatgacagagaatgaagtggaagacaggctcacgagcttcatcacagtgttcaaatacattgatgacaaggacgtctttcaaaagttctacgcaagaatgctggcaaaacgtttaattcatgggttatccatgtctatggactctgaagaagccatgatcaacaaattaaagcaagcctgtggttatgagtttaccagcaagctacatcggatgtatacagatatgagtgtcagcgctgatctcaacaataagttcaacaattttatcaaaaaccaagacacagtaatagatttgggaattagttttcaaatatatgttctacaggctggtgcgtggcctcttactcaggctccttcatctacgtttgcaattccccaggaattagaaaaaagtgtacagatgtttgaattattttatagccaacatttcagtggaaggaaacttacatggttacattatctgtgtacaggtgaagttaaaatgaactatttgggcaaaccatatgtagccatggttacaacataccaaatggcagttcttcttgcctttaacaacagtgaaactgtcagttataaagagcttcaggacagcactcagatgaatgaaaaggaactgacaaaaacaatcaaatcattacttgatgtgaaaatgattaaccatgattcagaaaaggaagatattgatgcagaatcttcgttttcattaaatatgaactttagcagtaaaagaacaaaatttaaaattactacatcaatgcagaaagacacaccacaagaaatggagcagactagaagtgcagttgatgaggaccggaaaatgtatctccaagctgctatagttcgtatcatgaaagcacgaaaagtgcttcggcacaatgcccttattcaagaggtgattagccagtcaagagctaggtttaatcccagtatcagcatgattaagaagtgtattgaagttctgatagacaaacaatacatagaacgcagccaggcgtcggcagatgaatacagctacgtcgcgtgatgtcgctctcctccagcgtggtgtgagaagatcattgccatcaccatttggtgtgttcctgtgggaaaaagcaggactgtgcctccataatttggtcatttggcagcccctgttttctgctgtttacaacatcaccagtgccacgtcatgagcgtcaaagaaaatgcctagagatatttcaagctcatgtcattatgacatttcttaaaactttattaaaagaatgagtgaagtattgctgaaaagtggaaattcggttgggtaccatgctttttctccccttcacgtttgcagttgatgtgtctttttttttttttttaatgtatcttaaaggacataaaatttaaaaacttaaatattgtaatatgacagataacctaataattgtatctacattaaaatgacaaacatgatactgctgcttgtcaaataaaaaaaaaataaagaaatagaatgccttttttatgtggatggagtatcaggttgaccacaaaatatattgactcaaagcagctaatgcatctttagttgcgtttttatctgaatggtttaattcacttgtactcctatttaaatcctacatgaaaaatgtctagattattgttcttgactgcataggactgcattcagcataaagaatgctttatttttatggattagatatattggatctaaacattttgaatcttgaagatgtaattccatcagcagtttctggtggtgtgctactccacagacatcgcagagtgtgagcaggatgcttggtgacctcaagtctggcacagagagagcttttcattcaaaagttgtctttcttcggttgcataatccattaattctagcatagactagtaccctagctctgtggccttccctgagtcttaggaaatctatgataccaacatattccttctatatgcctcccctacctgttacccttacaaccctcctccaacagtttagatactagagtcactctcatcaatcacagatgtgcttagcaatgcataacctaaatacttttttaaaaaagaaaattgtacattgtactgggtgccacatatataaatcccattattttgtttattttatatatatatatatatataatatatatatatatatatctcaacagcagtgttaagagtactgcgatctattatcatatttattgtctatccacaccatcaccaccaccaccacacccctcctccctcaacatacaatttttctttattttaaaaaaaataagagacggggtttcgccatgtttcccaggctagtctggaacttctggcctcaagcaatcctatctctgtctcccaaagtgctgggattacaagcatgagccactgcatccatccaacacaaaatttttaaaatcggaatattttaaagcaaatcacacaaattatttcacttataatacttcagtaaggcctttaaaaaatccacagtgatattattactcctaacaaaaacaataattacttagtatcatctaatatgtggttcatatttaaatttgttgttttgagatgggtcttacaattggtttattcaattgcattttttctaactcgtgtctcaagtgttttaaaaatctactgaacttataatgacttatataatgtatttctcattttacctttcttccaaaagaggaaataatggcaaaccatataatattgtacattcactgtcaaaaagcaaacccttgttttgataacttgttgattgataaaagttttccaaattga

SEQ ID NO: 312064 - DNA, 2121 bp, Artificial Sequence
  derived and/or modified sequence
atgagcctgaagccccgggtggtggatttcgacgagacttggaataagctgctcacaaccatcaaggcggtggttatgcttgaatatgtcgagagggccacctggaatgatcggttcagcgacatctacgccctgtgtgtggcatatccagaaccgttgggggaacggttgtatacagagactaagatctttttggagaatcacgtgagacatttgcacaaacgggtgctagagagtgaagaacaggttctggtgatgtaccacaggtactgggaggagtattctaagggggctgactatatggactgcctctacaggtacttgaacacacagtttataaagaaaaataaacttacagaggctgatctgcagtatggatacggtggcgttgatatgaacgagcctctgatggagatcggcgagctcgcacttgacatgtggcgcaaactgatggtagagcccctgcaggccattctcattcgtatgttgctgagagaaatcaagaatgatcgaggaggagaggatcccaatcaaaaagtcattcatggtgtgattaatagctttgtacatgtggagcagtacaagaagaaatttcccctgaaattttatcaagagatcttcgagtctcccttcctgaccgagacaggtgagtactacaaacaggaagctagcaacctcttgcaggagagtaattgttcccaatacatggaaaaggtgcttggaagactgaaagacgaagaaatccgatgtaggaagtacctgcatccgagtagctacactaaggttattcatgagtgtcagcaaaggatggttgccgaccatctccagtttctccacgcagaatgtcataatatcatccgccaggagaaaaagaacgatatggccaatatgtatgtactgctgcgagccgtctctaccgggctgccccatatgatccaggaactacagaaccatatccatgatgagggactaagggctacttccaatctcacccaagaaaacatgccaactctgttcgtggaatctgtgctggaggttcacggcaaatttgtacagttaataaatacagtgctgaacggagaccagcatttcatgagcgccctggataaggcattgacaagcgtggttaactatcgggagcccaagtctgtatgtaaggcgccagaactgttggcaaaatactgcgacaatttgctgaaaaaatccgctaagggcatgactgaaaatgaggtcgaagacagactgacttcattcataacggtctttaagtatatagacgataaggacgtctttcagaaattctacgcgcgtatgctcgcgaagcgattaattcacgggttaagcatgagcatggattccgaggaggccatgatcaataaacttaagcaggcttgcggttacgagtttacttcgaagttgcaccgcatgtacaccgatatgagcgtgtccgcagatcttaataataagttcaataattttatcaaaaaccaggatacagtgatcgatctcggcatcagcttccaaatctacgtgctccaggctggagcctggcccctcacccaggctccttcctccacctttgcaattcctcaggaattggagaagtccgtgcaaatgtttgaactgttctactcccagcacttcagtgggaggaaacttacatggcttcactacttatgtacaggcgaggtgaaaatgaactacctcggcaagccttatgtcgccatggtgacgacctatcagatggcggtcctgctagcatttaacaacagcgagaccgtgtcatataaggagctacaggactccacgcaaatgaatgaaaaagagctcaccaagaccatcaagtctctgctggacgttaagatgataaaccatgactctgaaaaggaggatatagacgccgagtccagcttctcactgaacatgaatttctccagcaagcgaacgaagttcaagatcaccacttctatgcagaaagacactccccaagtgattagtcagagtcgggcccggttcaaccctagcatcagcatgatcaaaaaatgcatcgaggtactcatcgacaaacaatatattgagcgcagccaagctagcgcggatgagtactcctatgtcgcgtag

SEQ ID NO: 312065 - DNA, 2121 bp, Artificial Sequence
  derived and/or modified sequence
atgtctctgaaacccagggtcgtcgattttgacgaaacatggaataagctgctgacaactatcaaggcggtggttatgctggagtacgtcgagagggcaacttggaacgacagattctccgacatctatgccctgtgcgtagcctatccagaacccttgggtgagaggctatataccgagactaaaatcttcctcgagaatcatgtcagacacctgcacaagcgcgtgttggagagcgaagagcaagtgttggtgatgtatcatagatattgggaggagtattccaagggcgccgactatatggactgcctgtacagatacttgaatactcagtttatcaagaaaaataaactgacagaagcagacctacagtacggatacgggggcgtggatatgaacgagccgctgatggagatcggagaactggccctggatatgtggcggaaactgatggtagaacctctgcaggcgattttgatacgtatgttgttacgcgagatcaagaacgatcggggtggtgaggatcccaatcagaaggtgatacacggggtcataaactctttcgtacacgtggagcagtacaaaaaaaagttccccctgaagttctatcaagaaattttcgagtcccctttcctgaccgaaacaggagaatattacaagcaggaagcttccaatctgttacaggagtctaattgttctcagtacatggaaaaggttttagggagactgaaagatgaagagattaggtgtaggaagtacctgcatccatcttcttacacaaaggtgatacatgaatgccaacagaggatggtggccgatcatctgcagtttttgcatgccgaatgtcacaatattatcaggcaggaaaagaaaaacgatatggccaatatgtacgtgctgctccgagcagtgtccacaggtctgccccacatgatacaggaactgcaaaatcacatccacgatgaaggcctgagagcgacgtccaaccttacacaggagaatatgcccacactgtttgtggagagcgtcctcgaagtgcacgggaaatttgtgcagctcattaataccgtgctgaatggggaccagcatttcatgtccgcattagataaagctttgacctccgttgtgaactatcgggagcctaagtctgtgtgtaaggcaccagagttactcgcaaagtattgcgataacctgttaaaaaagtctgctaagggtatgactgaaaatgaggtcgaagacaggcttacctctttcatcactgtattcaagtatatagatgataaggacgtgttccagaaattttatgccagaatgttggccaaacgtctcatccacggactcagcatgagtatggatagtgaagaagctatgatcaacaagctaaagcaggcctgcgggtatgagttcacgagcaagctgcacaggatgtacacggacatgagtgtcagtgctgacctgaacaataaatttaataattttattaaaaaccaggataccgtgattgacttaggaatttcctttcagatttatgtgctccaagccggggcgtggccacttacccaggcgcctagcagtactttcgcgattccccaagaacttgagaaaagtgtgcaaatgtttgaactgttctatagccagcacttcagtggccggaaacttacctggctgcactacctatgtaccggcgaggtaaagatgaattacctcggtaagccgtatgtggccatggtgactacataccagatggcagttctgctggcctttaacaactcggagacggtttcctacaaggaacttcaagactcaacacagatgaatgaaaaagaactgacaaaaaccatcaagtctcttctggatgttaaaatgatcaaccacgattcggagaaggaggacattgacgccgaatcatcattcagtctgaacatgaacttctcctctaaacgtacaaaatttaagatcaccacaagcatgcagaaggatacccctcaagtgatctcacaaagcagagcgaggttcaatccatcgatttcgatgatcaaaaagtgcattgaggtgctgatcgataaacaatacatcgagcgtagtcaggcctccgcagacgaatactcttatgtggcctag

SEQ ID NO: 312066 - DNA, 2238 bp, Artificial Sequence
  derived and/or modified sequence
atgagccttaaaccgcgggtggtcgatttcgatgaaacatggaataaactattaactactatcaaagccgttgtgatgctggagtatgtcgagcgggcgacatggaacgatcgcttttcagatatctatgccttgtgtgtagcctacccagaaccgttgggtgaacgcctgtatactgagactaagatattcctcgagaatcacgtgaggcatctgcacaagagagtcctggagagcgaagaacaggttctcgttatgtatcataggtattgggaggaatattctaagggcgcggactatatggattgtctttatcgctatctgaatactcaatttatcaaaaagaataaacttaccgaggccgacctccaatatgggtatggcggcgtggacatgaacgaaccattgatggagatcggagagctggccctggacatgtggcgaaagttgatggtggagcctctccaggccattctgatccggatgcttttgcgagagatcaagaatgatcgtggcggagaggatcccaatcagaaggtgatacatggggttattaattcgttcgtgcatgttgaacagtataaaaagaagtttccactgaaattctaccaagagatttttgaaagcccatttctgactgagaccggggaatattacaagcaagaagccagcaaccttctccaagaatctaattgcagtcagtacatggagaaggttctaggtcgcctcaaggacgaggagattaggtgtcgcaagtatctgcatccgtctagttacaccaaagttatccacgagtgccaacagcgaatggtggctgatcacctacagtttctgcacgcggagtgccacaacataatcaggcaggaaaagaagaacgatatggccaacatgtacgtccttctccgcgccgtatcaactggtctgccccatatgatccaagagctgcagaatcacatccatgacgaaggtctgcgtgcaacctcaaaccttacacaggaaaatatgccgactctcttcgtggagtccgtcctagaggtgcacggtaaattcgtacaactgattaatactgtcctgaacggtgatcaacatttcatgtccgcgcttgacaaagctctaacctcggtagtcaactatagagagccaaagtccgtttgcaaagctcccgagcttctcgcgaagtattgcgacaatttgttaaagaaatctgccaaggggatgacagaaaatgaagtggaggaccgcctgacctcattcattactgtctttaaatatatcgatgataaggacgttttccagaaattttatgcgagaatgttggcgaaacgactgattcatggcctcagcatgtcaatggacagtgaggaagctatgataaacaagctaaagcaagcgtgcggatacgagtttacaagtaagctgcaccgaatgtacactgacatgtctgtgtcggcagacctgaacaacaagttcaataatttcattaaaaatcaggacaccgtcatcgacttggggataagttttcagatctacgtgcttcaagcaggggcatggcccttgacacaagccccttctagcacatttgccattccacaggagctcgaaaagtcagtgcagatgttcgagctgttctacagccagcactttagcggtcgaaagcttacatggctccactacctgtgtactggagaggtcaaaatgaattatctgggcaaaccgtatgtggccatggtgaccacatatcaaatggccgtgttactggcatttaacaactcggaaactgtaagctataaggagttgcaggattctacacagatgaatgaaaaggagctcacgaagactatcaaaagcctgctagacgtgaagatgatcaaccacgattctgagaaggaggacattgacgccgagagctccttttcactgaatatgaacttttccagtaaacgtacaaaatttaagattacaacatccatgcagaaggacaccccgcaggagatggaacagacccggtctgccgtagatgaggatagaaagatgtacctccaggctgccatagttcgcattatgaaggctagaaaagtgctcaggcacaacgccctgattcaggaggtgatatcccagtctagagcaaggtttaacccctctatctcaatgatcaagaagtgcattgaagttctgatcgataagcagtatattgagagaagtcaggcaagcgctgacgagtactcctatgtcgcctag

SEQ ID NO: 312067 - DNA, 2238 bp, Artificial Sequence
  derived and/or modified sequence
atgagtctcaagccccgggttgtggacttcgacgaaacttggaacaaactgctaaccaccataaaggccgtggttatgctcgaatacgtggaacgggccacatggaacgaccgctttagtgacatctatgcactgtgcgtagcatatccagagccactgggcgagcggttgtacacagagacaaagattttcttggagaaccatgtgaggcatctgcataagagagtgctagaatcagaggaacaggtgctggtgatgtaccaccgatactgggaggaatacagcaagggagcagattacatggattgcttgtaccgttaccttaatactcagttcatcaaaaaaaataaattgaccgaggcggatctgcagtacggatatggcggagtcgatatgaatgagcctctgatggaaattggggaactggccttagatatgtggcgcaaactcatggtggagcctctgcaggccatcctcattcgtatgctgctgcgggagatcaaaaatgaccggggcggagaagatccgaaccaaaaggtgattcatggagtgatcaattcttttgttcacgtcgaacagtataaaaagaagtttccgctgaagttctatcaggagatttttgaatcccctttcctcacagagacaggcgagtactataaacaagaagcgtcaaacttgctacaggaatctaactgctcccagtacatggagaaggtgctgggccggctcaaggacgaggagattagatgccggaagtaccttcatccttcatcctatacgaaggttatccacgagtgccaacagaggatggtggccgatcacttgcagttcctgcatgcagaatgtcataacataattaggcaagagaagaagaatgatatggctaatatgtatgtcctcctgagggcagtgtccacaggcctgccgcatatgatacaggagctgcagaaccatatccatgacgagggcttgcgcgctacctctaacctgacacaggagaacatgcccaccctgtttgtggaatctgtcctggaggttcacggcaaattcgtgcagctgatcaacaccgtgttgaatggcgatcaacacttcatgtctgctctggataaagctctcacatctgtggtgaactatagagagcccaaatccgtgtgcaaggcaccggagctacttgccaaatattgtgacaacctcctgaaaaagtctgccaaagggatgaccgaaaatgaggtagaggatcgccttacatcctttatcaccgtgtttaaatacatcgatgacaaggatgttttccaaaaattctacgcccggatgctcgccaaaaggctgattcacggactctcgatgtccatggattcagaagaagccatgatcaacaaactgaagcaggcgtgtggctacgaatttacttccaagctacataggatgtatactgacatgtctgtgagcgccgacttgaataataaatttaacaatttcataaagaatcaggacactgtgattgacctgggaatcagctttcaaatctatgtattacaggctggggcgtggcctcttacccaggcgccttcctcaacatttgccataccccaggaacttgagaaaagcgtgcagatgttcgagctcttttactcccagcacttttccggcaggaaacttacatggttgcactacctctgcacaggcgaagtgaagatgaactatctcggcaagccatatgtggccatggtaaccacctaccagatggctgttttgcttgcctttaataactcagagacagtgtcatataaggagctgcaggacagtactcagatgaatgagaaggaactgaccaagactatcaagtccctgctggacgtgaaaatgatcaaccacgattcagagaaggaagacatagacgccgaatcctctttcagtctcaatatgaacttcagctctaaaagaactaaattcaaaatcacaacctccatgcaaaaagataccccacaggaaatggagcagacgcggtctgccgtcgatgaagacagaaagatgtacctgcaagcggcgatcgtgaggatcatgaaggctcgcaaagtgttgagacacaatgcgctgattcaggaggttatctcgcaaagtagagccagattcaatccatccatctccatgatcaaaaagtgtatcgaagttctgatagacaaacaatatatcgagcgctctcaagcatccgctgacgaatattcgtacgtggcctag

SEQ ID NO: 312068 - DNA, 2238 bp, Artificial Sequence
  derived and/or modified sequence
atgtccctgaaacctagagttgtcgatttcgatgagacatggaataagctgctgaccacgataaaagccgtagtgatgctggagtatgttgaacgcgctacatggaacgaccgtttcagcgacatttacgccctgtgtgtggcctatccggagcctcttggcgaaaggctgtataccgagactaaaatttttctcgagaatcacgtgagacatctgcataaaagggttttggagtcagaagagcaggtgctggtgatgtatcacagatactgggaggagtacagtaaaggggccgactatatggactgcctgtacagatacctgaacacccagttcatcaagaagaacaaactgaccgaagctgatctccagtacggatacggcggagtggacatgaacgaacctttaatggaaataggagagttggcactcgacatgtggagaaagctcatggtcgagcccctgcaggctatcttgatcaggatgctccttagggagatcaagaatgaccgagggggcgaagatcctaatcagaaggtgatccacggagtgattaatagttttgtgcacgtggaacagtacaagaaaaagtttcccctcaagttttaccaagagatcttcgagtctccgtttctgaccgagaccggggaatattacaaacaagaggctagcaatctcctgcaggagtcgaactgctcccagtacatggagaaagtcctcgggcgactgaaagatgaggagatcaggtgtaggaagtatctccatccctcgtcctataccaaggtgattcatgagtgtcagcaacgcatggtggcagaccacctgcagttcctgcacgctgagtgtcataacataattaggcaagaaaagaagaacgacatggccaacatgtacgtgctcctacgagcagtttcaacagggttacctcacatgatccaagagttgcagaaccatattcatgatgaggggttgcgggccacatcgaatctcacacaagagaacatgcctacactattcgtggaatcagtcctagaggtgcacgggaagtttgttcaactgatcaataccgtgctgaacggggaccagcattttatgtcagcgctggataaagcactcacctctgttgttaactatcgcgagcctaaaagtgtgtgcaaagcccccgagcttttagcaaagtactgcgacaacctcttaaagaagagcgcgaagggcatgaccgagaatgaggttgaagacagactgacctcttttatcactgtgttcaagtacatcgatgataaagacgtttttcaaaaattctacgcgaggatgcttgccaagagactcattcacggcctgtccatgagtatggatagtgaggaggcaatgattaataagctgaagcaagcctgcggctacgagtttacttccaagctgcatcgcatgtatacggacatgtccgtgtccgctgacctgaataacaagtttaataattttattaagaatcaggacacagtgattgatttgggtataagcttccagatttacgtcctgcaggcaggggcctggccactgacccaggcgccgagctctaccttcgccataccgcaagagctggagaaaagtgtccagatgtttgagctcttttattctcagcacttctctggtcgcaaattgacttggctccactacctgtgtaccggcgaggtgaaaatgaactacctcggcaaaccctacgtggctatggttacaacctatcagatggccgtgttgttggcattcaacaactcagaaaccgttagttacaaggaattgcaggacagcacccagatgaacgagaaagaactgaccaaaaccataaaatctttgctggacgttaagatgatcaatcatgactcagagaaggaggatatagatgccgaaagctcattctctctaaatatgaatttcagcagcaagagaactaagtttaaaatcactacctccatgcagaaggatacaccacaagagatggagcagacccggtctgcagtggatgaggaccggaagatgtatttgcaggctgccatcgtccgcattatgaaggccagaaaggtgctccggcacaacgcattgatccaagaagttataagccagagcagggccagattcaatccttcaatttccatgattaagaagtgcattgaggtcttaattgataagcagtatatcgagaggagccaggcttccgcagacgagtacagttacgtggcctag

SEQ ID NO: 312069 - DNA, 2067 bp, Artificial Sequence
  derived and/or modified sequence
atgctgtacgtctggccaatcctgaatccattggagaaggactttatccaaaagctgaggttcttctggaagattatgttcggcatctgcatccggtactgggaagaatactcaaaaggcgcagactatatggattgcttgtaccggtacctgaacacacagtttatcaaaaagaataaactcacagaggccgatcttcagtatggttatggaggagtcgatatgaacgagcctctgatggagatcggggagttggctctggacatgtggagaaagctgatggtggaacctctgcaagctattctaatcaggatgctactccgggaaatcaagaatgatagagggggtgaggaccctaaccagaaggtaatacatggcgtgatcaacagtttcgtccatgtggagcagtacaagaaaaagtttcctttaaagttctatcaagagattttcgagtccccattcctgaccgagaccggtgagtattataaacaggaggccagcaatctattgcaagaaagtaactgcagccagtatatggagaaggtgctgggtaggctcaaggatgaggagataaggtgccgcaagtacctgcaccccagctcatatacgaaagtcatccacgaatgtcagcagcgtatggtggccgatcatctgcaatttttacacgccgaatgtcataatattataaggcaagagaagaagaacgacatggccaacatgtatgttctgttgagagcggtgtctactgggttgcctcacatgatccaggagttgcagaaccatatccacgatgaggggctaagagccaccagtaatcttacccaggagaacatgccaacattgttcgtggagagcgtccttgaggtgcacgggaaatttgtgcagctcatcaataccgtcctcaacggcgaccagcattttatgtcagctctggataaggccctgacctctgtagtgaattatcgtgaaccaaagagtgtatgtaaggctcccgaattgctggcaaagtattgtgataacttactcaaaaagagtgccaagggcatgacagaaaatgaggtggaggatcgcctcacaagtttcattacagtatttaagtatatcgatgacaaggacgttttccaaaagttctacgcaagaatgctggccaaaaggctcatccacgggttatctatgtctatggattcagaggaagccatgatcaataaactaaagcaggcctgtggatatgaatttacatcgaaactccacagaatgtacacagatatgtcggtctccgccgacctgaacaataagttcaacaattttattaagaaccaggataccgtgattgacctcgggatctcatttcaaatatatgttctacaggccggagcatggccccttacacaggccccgtcctcgacatttgctattccgcaagaactggagaagagtgtgcaaatgtttgaactcttttatagtcagcactttagcggtcgaaaattgacctggttgcactatctgtgcactggcgaggttaaaatgaattacttaggtaagccctatgtagcaatggtgacaacctaccaaatggccgttctgctcgcattcaataacagcgaaaccgtttcttataaggaactgcaggattccacacagatgaacgaaaaggagctcaccaaaacaatcaagtctttactggacgtgaagatgattaatcatgattcagagaaggaggacatagatgccgagagctctttctccctaaacatgaactttagcagcaagcgcaccaaattcaaaattacgacaagtatgcagaaggatacacctcaggaaatggaacagacaagaagcgctgtcgacgaggacagaaaaatgtacctgcaagctgccatcgttcggattatgaaagcacgcaaggtcctaagacataacgccctgatccaggaagtgatatctcagagtcgggctcggttcaacccctcaatttcaatgatcaagaaatgtatcgaggtgctaattgataagcaatacattgaacgctcgcaggcttccgccgatgaatatagttacgttgcctag

SEQ ID NO: 312070 - DNA, 651 bp, Artificial Sequence
  derived and/or modified sequence
atgtcccttaaacctcgcgtcgtggattttgacgaaacatggaataaattgctgacaactatcaaggcggtggttatgctggaatacgtggagagagcaacttggaacgacaggttttccgacatctacgccctttgtgtggcttatccagaaccactcggagagaggctgtataccgaaactaaaatattcctggaaaaccatgtgcgccaccttcacaagcgggtcctggaaagtgaggaacaggtcttagtcatgtatcatcgatattgggaagaatattccaagggggcagattacatggattgtctctatagatacctgaatactcagtttattaaaaaaaacaaattaaccgaagctgaccttcagtatggatacgggggggtggacatgaacgagccccttatggagattggggagttggcccttgatatgtggaggaagctgatggtcgagcctctgcaggctattctcatccgcatgctgttacgcgaaattaagaatgatcgcggcggagaggacccaaaccagaaagtcattcacggggtgattaattcctttgtgcacgttgagcagtataagaagaaatttcccctgaaattttaccaagagattttcgaatcacccttcctgacagagacgggatag

SEQ ID NO: 312071 - DNA, 2121 bp, Artificial Sequence
  derived and/or modified sequence
atgagcctgaagccccgggtggtggactttgatgagacctggaacaagctgctgaccaccatcaaggctgtggtgatgctggagtatgtggagcgggccacctggaatgaccgcttcagtgacatctatgccctgtgtgtggcctacccagagcccctgggggagcggctgtacacagagaccaagatcttcctggagaaccacgtgcgccacctgcacaagagggtgctggagagcgaggagcaggtgctggtgatgtaccaccgctactgggaggagtacagcaaaggagctgactacatggactgcctgtaccgctacctgaacacccagttcatcaagaagaacaagctgacagaagctgacctgcagtatggctatggaggagtggacatgaatgagcccctgatggagattggagagctggccctggacatgtggaggaagctgatggtggagcccctgcaggccatcctgatccgcatgctgctgcgggagatcaagaatgaccggggcggggaggaccccaaccagaaggtgatccacggcgtcatcaacagctttgtgcacgtggagcagtacaagaagaagttccccctgaagttctaccaggagatctttgagagccccttcctgacagaaacaggagagtactacaagcaggaggccagcaacctgctgcaggagagcaactgcagccagtacatggagaaggtgctgggccgcctgaaggatgaggagatccgctgcaggaagtacctgcaccccagcagctacaccaaggtgattcatgagtgccagcagaggatggtggccgaccacctgcagttcctgcacgccgagtgccacaacatcatccggcaggagaagaagaatgacatggccaacatgtatgtgctgctgcgggctgtgtccacaggcctgccccacatgatccaggagctgcagaaccacatccatgatgagggcctgcgggccaccagcaacctgacccaggagaacatgcccaccctgtttgtggagagcgtgctggaggtgcacggcaagtttgtgcagctgatcaacacagtgctgaatggagaccagcacttcatgtctgccctggacaaggccctgacctctgtggtgaactaccgggagcccaagtctgtgtgcaaggcccctgagctgctggccaagtactgtgacaacctgctgaagaagagcgccaagggcatgacagaaaatgaggtggaggaccggctgaccagcttcatcaccgtcttcaagtacattgatgacaaggatgtgttccagaagttctacgccaggatgctggccaagaggctcatccacggcctgtccatgtccatggattctgaggaggccatgatcaacaagctgaagcaggcctgtggctatgagttcaccagcaagctgcacaggatgtacacagacatgtctgtgtctgctgacctgaacaacaagttcaacaacttcatcaagaaccaggacacagtgattgacctgggcatctccttccagatctacgtgctgcaggccggggcctggcccctgacccaggcccccagcagcacctttgccatcccccaggagctggagaagtctgtgcagatgtttgagctgttctacagccagcacttcagcggcaggaagctgacctggctgcactacctgtgcacaggagaggtgaagatgaactacctgggcaagccctacgtggccatggtgaccacctaccagatggctgtgctgctggccttcaacaacagcgagaccgtgtcctacaaggagctgcaggacagcacccagatgaatgagaaggagctgaccaagaccatcaagagcctgctggatgtgaagatgatcaaccatgattctgagaaggaggacattgatgctgagagcagcttcagcctgaacatgaacttcagcagcaagaggaccaagttcaagatcaccacctccatgcagaaggacaccccccaggtgatcagccagagccgggcccgcttcaaccccagcatctccatgatcaagaagtgcatcgaggtgctgattgacaagcagtacatcgagaggagccaggccagcgcagatgagtacagctatgtggcctag

SEQ ID NO: 312072 - DNA, 2238 bp, Artificial Sequence
  derived and/or modified sequence
atgagcctgaagccccgggtggtggactttgatgagacctggaacaagctgctgaccaccatcaaggctgtggtgatgctggagtatgtggagcgggccacctggaatgaccgcttcagtgacatctatgccctgtgtgtggcctacccagagcccctgggggagcggctgtacacagagaccaagatcttcctggagaaccacgtgcgccacctgcacaagagggtgctggagagcgaggagcaggtgctggtgatgtaccaccgctactgggaggagtacagcaaaggagctgactacatggactgcctgtaccgctacctgaacacccagttcatcaagaagaacaagctgacagaagctgacctgcagtatggctatggaggagtggacatgaatgagcccctgatggagattggagagctggccctggacatgtggaggaagctgatggtggagcccctgcaggccatcctgatccgcatgctgctgcgggagatcaagaatgaccggggcggggaggaccccaaccagaaggtgatccacggcgtcatcaacagctttgtgcacgtggagcagtacaagaagaagttccccctgaagttctaccaggagatctttgagagccccttcctgacagaaacaggagagtactacaagcaggaggccagcaacctgctgcaggagagcaactgcagccagtacatggagaaggtgctgggccgcctgaaggatgaggagatccgctgcaggaagtacctgcaccccagcagctacaccaaggtgattcatgagtgccagcagaggatggtggccgaccacctgcagttcctgcacgccgagtgccacaacatcatccggcaggagaagaagaatgacatggccaacatgtatgtgctgctgcgggctgtgtccacaggcctgccccacatgatccaggagctgcagaaccacatccatgatgagggcctgcgggccaccagcaacctgacccaggagaacatgcccaccctgtttgtggagagcgtgctggaggtgcacggcaagtttgtgcagctgatcaacacagtgctgaatggagaccagcacttcatgtctgccctggacaaggccctgacctctgtggtgaactaccgggagcccaagtctgtgtgcaaggcccctgagctgctggccaagtactgtgacaacctgctgaagaagagcgccaagggcatgacagaaaatgaggtggaggaccggctgaccagcttcatcaccgtcttcaagtacattgatgacaaggatgtgttccagaagttctacgccaggatgctggccaagaggctcatccacggcctgtccatgtccatggattctgaggaggccatgatcaacaagctgaagcaggcctgtggctatgagttcaccagcaagctgcacaggatgtacacagacatgtctgtgtctgctgacctgaacaacaagttcaacaacttcatcaagaaccaggacacagtgattgacctgggcatctccttccagatctacgtgctgcaggccggggcctggcccctgacccaggcccccagcagcacctttgccatcccccaggagctggagaagtctgtgcagatgtttgagctgttctacagccagcacttcagcggcaggaagctgacctggctgcactacctgtgcacaggagaggtgaagatgaactacctgggcaagccctacgtggccatggtgaccacctaccagatggctgtgctgctggccttcaacaacagcgagaccgtgtcctacaaggagctgcaggacagcacccagatgaatgagaaggagctgaccaagaccatcaagagcctgctggatgtgaagatgatcaaccatgattctgagaaggaggacattgatgctgagagcagcttcagcctgaacatgaacttcagcagcaagaggaccaagttcaagatcaccacctccatgcagaaggacaccccccaggagatggagcagaccaggtctgctgtggatgaggacaggaagatgtacctgcaggccgccatcgtgcgcatcatgaaggccaggaaggtgctgcggcacaatgccctgatccaggaggtgatcagccagagccgggcccgcttcaaccccagcatctccatgatcaagaagtgcatcgaggtgctgattgacaagcagtacatcgagaggagccaggccagcgcagatgagtacagctatgtggcctag

SEQ ID NO: 312073 - DNA, 2067 bp, Artificial Sequence
  derived and/or modified sequence
atgctgtatgtgtggcccatcctgaaccccctggagaaggacttcatccagaagctgcgcttcttctggaagatcatgtttggcatctgcatccgctactgggaggagtacagcaaaggagctgactacatggactgcctgtaccgctacctgaacacccagttcatcaagaagaacaagctgacagaggccgacctgcagtatggctacggcggcgtggacatgaatgagcccctgatggagatcggggagctggccctggacatgtggaggaagctgatggtggagcccctgcaggccatcctgatccgcatgctgctgcgggagatcaagaatgacagaggaggagaggaccccaaccagaaggtgattcatggagtcatcaacagctttgtgcacgtggagcagtacaagaagaagttccccctgaagttctaccaggagatctttgagagccccttcctgacagagaccggggagtactacaagcaggaggccagcaacctgctgcaggagagcaactgcagccagtacatggagaaggtgctgggccgcctgaaggatgaggagatccgctgcaggaagtacctgcaccccagcagctacaccaaggtgattcatgagtgccagcagaggatggtggccgaccacctgcagttcctgcatgctgagtgccacaacatcatccggcaggagaagaagaatgacatggccaacatgtatgtgctgctgcgggctgtgtccacaggcctgccccacatgatccaggagctgcagaaccacatccatgatgagggcctgcgggccaccagcaacctgacccaggagaacatgcccaccctgtttgtggagagcgtgctggaggtgcacggcaagtttgtgcagctgatcaacacagtgctgaatggagaccagcacttcatgtctgccctggacaaggccctgacctctgtggtgaactaccgggagcccaagtctgtgtgcaaggcccctgagctgctggccaagtactgtgacaacctgctgaagaagagcgccaagggcatgacagaaaatgaggtggaggaccggctgaccagcttcatcaccgtcttcaagtacattgatgacaaggatgtgttccagaagttctacgccaggatgctggccaagaggctcatccacggcctgtccatgtccatggacagcgaggaggccatgatcaacaagctgaagcaggcctgtggctatgagttcaccagcaagctgcacaggatgtacacagacatgtctgtgtctgctgacctgaacaacaagttcaacaacttcatcaagaaccaggacaccgtcatcgacctgggcatctccttccagatctacgtgctgcaggccggggcctggcccctgacccaggcccccagcagcacctttgccatcccccaggagctggagaagtctgtgcagatgtttgagctgttctacagccagcacttcagcggcaggaagctgacctggctgcactacctgtgcaccggggaggtgaagatgaactacctgggcaagccctacgtggccatggtgaccacctaccagatggctgtgctgctggccttcaacaacagcgagaccgtgtcctacaaggagctgcaggacagcacccagatgaatgagaaggagctgaccaagaccatcaagagcctgctggatgtgaagatgatcaaccacgacagcgagaaggaggacattgatgctgagagcagcttcagcctgaacatgaacttcagcagcaagaggaccaagttcaagatcaccacctccatgcagaaggacaccccccaggagatggagcagaccaggtctgctgtggatgaggacaggaagatgtacctgcaggccgccatcgtgcgcatcatgaaggccaggaaggtgctgcggcacaatgccctgatccaggaggtgatcagccagagccgggcccgcttcaaccccagcatctccatgatcaagaagtgcatcgaggtgctgattgacaagcagtacatcgagaggagccaggccagcgcagatgagtacagctatgtggcctag

SEQ ID NO: 312074 - DNA, 651 bp, Artificial Sequence
  derived and/or modified sequence
atgagcctgaagccccgggtggtggactttgatgagacctggaacaagctgctgaccaccatcaaggctgtggtgatgctggagtatgtggagcgggccacctggaatgaccgcttcagtgacatctatgccctgtgtgtggcctacccagagcccctgggggagcggctgtacacagagaccaagatcttcctggagaaccacgtgcgccacctgcacaagagggtgctggagagcgaggagcaggtgctggtgatgtaccaccgctactgggaggagtacagcaaaggagctgactacatggactgcctgtaccgctacctgaacacccagttcatcaagaagaacaagctgacagaagctgacctgcagtatggctatggaggagtggacatgaatgagcccctgatggagattggagagctggccctggacatgtggaggaagctgatggtggagcccctgcaggccatcctgatccgcatgctgctgcgggagatcaagaatgaccggggcggggaggaccccaaccagaaggtgatccacggcgtcatcaacagctttgtgcacgtggagcagtacaagaagaagttccccctgaagttctaccaggagatctttgagagccccttcctgacagaaacaggatag

SEQ ID NO: 312075 - DNA, 2121 bp, Artificial Sequence
  derived and/or modified sequence
atgagcctgaagccccgggtggtggacttcgacgagacctggaacaagcttctaacaactataaaggcagtggttatgctggagtacgtagagagagccacatggaacgaccgcttctctgacatctacgccctttgtgtggcataccccgagccactaggagagaggctctacactgaaactaaaatctttctggagaatcatgtgcgacacctccataaaagagtactggaatcagaagaacaagtcttggtaatgtaccacaggtactgggaggagtactctaaaggagctgactacatggattgcctgtacagatatttgaacacacagttcattaaaaaaaacaagctgaccgaggccgacttgcagtacggctatggtggtgtggatatgaatgagcctctgatggaaatcggcgaactggccctggacatgtggaggaagcttatggtggaaccactccaagcaatccttatccgaatgctcctcagagagataaagaacgacagggggggggaagatcccaatcagaaagtaatccacggagttatcaatagttttgtccacgtcgagcaatacaagaaaaaattccctctgaaattctaccaggagatctttgagtctccattcctcaccgagaccggagagtattataagcaggaggctagcaacctactgcaagagtcaaattgctcccaatacatggagaaggttcttggacgcttgaaagacgaagagatcaggtgccggaagtacttacacccctcatcctatacaaaagtgatccatgagtgccaacagaggatggttgcggaccatctgcagtttttgcatgctgaatgccacaacattataagacaggagaagaaaaacgacatggccaacatgtacgtgctccttcgggcggtgtccactggcctcccacatatgatccaggagctgcagaatcacatccacgatgaagggctccgagctacaagtaatttgacccaggaaaatatgcctacgctctttgtcgagtccgtgctggaggtccacggcaagttcgtgcaacttattaacactgtcctgaatggcgatcagcatttcatgtctgccctcgataaggccttaacatccgtagtgaactaccgtgagccgaagtccgtgtgcaaggcccccgagctgcttgccaaatactgcgataatctgcttaaaaagtcagcaaagggcatgaccgaaaacgaagttgaggatcgcctgacaagttttataactgtgttcaaatacattgatgacaaggacgtgtttcaaaagttctacgcacgcatgttggctaagcgcctcatccacggcttaagcatgtccatggacagtgaggaggcaatgatcaataagctgaagcaggcatgcgggtatgaatttacctctaaattgcataggatgtacactgatatgtccgtgagtgccgacctgaataacaagttcaacaacttcattaagaaccaggacaccgtcattgacctcggtataagcttccagatttatgttcttcaggcaggagcatggcccctaacacaggcgccctccagtacttttgccattccacaggagttggagaaatcagtgcagatgttcgaattgttctattcacaacacttttcaggtaggaagcttacatggttgcactacctgtgcacgggagaagttaagatgaattacctgggaaaaccctatgtggcaatggtaacaacataccagatggctgtgctcctcgccttcaacaatagcgaaaccgtgtcttacaaggaactacaggattctacgcagatgaatgagaaggagctgacaaagacaatcaaaagcctgctggacgttaaaatgattaaccacgactccgaaaaagaagacatcgatgctgagagctcattctccctgaatatgaatttctcaagcaaacggaccaaattcaaaatcactacctccatgcagaaagacacgccccaggtgatcagccaatctcgggccaggtttaacccatccattagtatgattaaaaagtgcatcgaggtactgatcgacaaacaatacatagagagaagccaagcaagcgccgatgagtattcgtatgtcgcgtag

SEQ ID NO: 312076 - DNA, 2121 bp, Artificial Sequence
  derived and/or modified sequence
atgagcctgaagccccgggtggtggacttcgacgagacctggaacaagctgctgactacaatcaaggccgtcgtcatgttagagtatgtggagagagctacctggaacgacaggttctccgatatttatgcactttgcgtagcttaccccgagcctttgggcgagaggctgtacaccgagaccaagatttttctcgaaaaccacgtccgacatctgcacaaaagagtccttgaaagtgaagagcaggtcctggtcatgtaccacaggtactgggaggagtattccaagggcgctgattatatggattgcctgtaccgatatctgaacactcaatttatcaagaaaaacaaacttactgaggccgatctgcagtacgggtacggtggagtggatatgaacgagcccctgatggaaataggggagctggccctggatatgtggagaaaacttatggtggagccattgcaggccattttgattagaatgttactgcgggagattaagaatgacagaggtggcgaggatcctaatcagaaggtgattcatggagttataaacagcttcgtgcatgtggaacaatacaagaagaagttccctctgaagttctaccaagaaattttcgaaagtccctttttaaccgagactggcgaatactataagcaggaagcttctaacctcctgcaggagagcaattgcagccagtacatggaaaaagtgttgggaagactcaaagacgaggagataaggtgcagaaagtatttgcacccatctagctacacaaaggttatccacgaatgccaacagcgtatggtggcggaccatctccaattcctgcacgctgaatgccataatatcatccggcaagagaaaaagaacgacatggcgaatatgtacgtacttctccgtgcagtaagcactggcttgccacatatgattcaggagctgcaaaaccatatccacgacgaagggctgagagctacaagcaaccttacgcaggaaaacatgccaaccctcttcgtcgaatccgtgctcgaagtccacggcaaattcgtgcaactgataaataccgtgcttaacggcgatcagcactttatgagcgcactggataaagcccttaccagcgttgttaactatagggaacccaagagcgtgtgtaaggcgcccgagctactggcaaagtactgtgataatcttctgaaaaaatccgccaagggcatgactgaaaacgaggttgaagataggctgacgagcttcattactgtgtttaagtatatcgacgataaagacgtgttccagaaattctatgctcgcatgcttgccaaaaggttgatccacggattatctatgagtatggattctgaagaggcgatgatcaacaaacttaagcaggcttgcgggtacgagttcacctccaaacttcatagaatgtatacggatatgtctgtcagcgctgaccttaacaataaatttaataattttataaagaatcaagacacagttattgatctggggatctcttttcagatttacgttctgcaggctggtgcctggcccctgacacaggctcctagcagcacattcgcaattccccaggagctggagaagtcagtacagatgttcgagttgttttattctcaacacttcagcggtagaaagctgacctggcttcattatttatgtacgggggaagtaaagatgaactatctgggaaagccttacgtagccatggtgaccacttatcagatggcagtgctgctggcatttaacaacagtgaaaccgtgagctataaggaactccaagactcaacccagatgaacgaaaaagagttgactaagaccattaagagtttgctcgacgtcaaaatgatcaaccacgactcggagaaggaggacatcgacgcggaatcatcattcagtctgaatatgaacttctctagcaaacggactaaattcaagatcactacctccatgcagaaggacacacctcaggtgatctcccaatcccgagcccgcttcaatccttccatttctatgattaaaaagtgtatagaggtgctgatcgacaagcagtacatcgaacggagtcaggcttccgccgacgagtactcctacgtggcatag

SEQ ID NO: 312077 - DNA, 2238 bp, Artificial Sequence
  derived and/or modified sequence
atgagcctgaagccccgggtggtggacttcgacgagacctggaacaagctgctgaccaccataaaggccgtggtaatgcttgaatatgtcgagagggctacctggaacgataggttttcagacatctatgcgctgtgcgtggcttaccccgagccactcggtgagagactgtataccgagactaagatattcctagaaaatcacgtccgccatctccacaagagggtacttgaaagcgaggagcaagtcttagtgatgtaccacagatactgggaggagtactctaaaggcgcagattatatggactgcctctatcgttatctgaatactcaattcatcaagaaaaacaagcttactgaggcggatctccagtatggatacggcggcgtcgatatgaatgaacccctgatggagataggtgagctggctcttgacatgtggcgaaagctgatggtcgaacccctgcaggccatcctaattaggatgctgcttcgtgaaattaagaatgaccggggcggcgaggaccccaaccagaaagtgattcacggtgttatcaattccttcgttcatgtcgagcagtacaagaagaaattcccactgaaattttaccaggaaatcttcgaatccccgttcctgacagagaccggggaatactacaaacaggaggcttctaacctcctgcaggaaagtaattgttcccagtatatggaaaaggtgttagggcggttgaaggatgaagagatccgctgtcgcaagtatctccatcccagctcttacacgaaagttatacacgagtgccagcaacgaatggtggccgaccacttacagttcttgcacgccgagtgtcataacattatacgtcaagagaaaaagaacgatatggccaatatgtatgtcttactgagggccgtctctactggactgccccacatgatccaggagctgcaaaatcatattcacgatgaaggattacgtgccactagcaacctgacgcaggagaacatgccaacgcttttcgtcgagtctgttctcgaagttcacggaaaattcgtgcagctgatcaacactgtcttgaacggggaccaacacttcatgagcgccttggacaaggctttaacttccgtggtcaattatcgggaaccaaagtccgtgtgcaaggctcccgagttgctggctaaatactgcgacaacctgttaaaaaaatccgcaaaagggatgaccgaaaacgaggtcgaggataggctgacaagctttattactgtgttcaagtacattgatgataaagatgtgttccagaagttttatgctagaatgcttgcgaagcggctaattcatggcctctctatgtctatggatagcgaggaggcgatgattaacaaactgaagcaggcctgcggatatgaatttaccagtaagctgcacaggatgtacaccgatatgtcggtgtccgctgatcttaacaacaagtttaataatttcataaaaaaccaggacaccgtcatcgacctggggatcagttttcagatttacgtgctccaggcaggcgcctggccacttacccaggcaccctccagcactttcgcaattcctcaggaacttgaaaagagcgttcaaatgtttgaactgttctattctcaacatttcagcggccgtaagttgacctggcttcattatctgtgtacgggggaagtgaagatgaactacctgggcaagccctatgtggccatggtgacaacctaccaaatggctgtgctcctggctttcaacaattctgaaacagtaagttacaaggagctgcaggactccactcagatgaatgagaaagaactgactaaaacaattaagagcctactcgatgtgaaaatgatcaaccacgattcagaaaaggaagacattgatgccgagagttcgtttagccttaatatgaactttagctctaaacgaaccaaatttaagataaccacttccatgcagaaggacacaccgcaggaaatggagcaaactcgatcagccgttgatgaagaccgcaaaatgtatctccaggctgctatcgtgcggatcatgaaagctcgcaaggtgcttaggcataacgccctgatccaggaagttatttcacaaagtagagccaggtttaacccttctataagtatgatcaagaagtgcattgaggttcttattgacaaacaatatatagaacgaagccaagcctcagccgatgagtattcctatgtggcgtag

SEQ ID NO: 312078 - DNA, 2238 bp, Artificial Sequence
  derived and/or modified sequence
atgagcctgaagccccgggtggtggacttcgacgagacctggaacaaactgttaaccaccatcaaggctgtggtgatgctcgagtacgtcgagcgagcgacctggaatgatcggttctcggatatttacgctctctgtgtggcataccccgagccattaggcgaaagactgtacacggaaaccaagattttccttgaaaaccacgtacgccacctacacaaacgggtattggagtccgaggaacaggtgctggtgatgtaccacaggtattgggaagagtacagcaagggcgctgattatatggattgtctgtaccgatacctgaatacccagttcattaagaagaacaagctgaccgaagcagacctgcagtatggatacggaggagtggatatgaatgagccgctcatggaaatcggtgaactcgccctagatatgtggagaaagctgatggtggaacccctccaggccatcctcattcggatgctgttaagagagatcaaaaatgatcggggcggggaggaccccaatcaaaaggtgatccacggggtgatcaacagcttcgtccatgtggagcaatataaaaaaaagtttcccctgaagttttatcaggaaatctttgaatctccttttctcactgagactggagaatactataagcaggaggcgtcaaatctgttgcaggagtcaaattgtagccaatacatggaaaaggtcctggggcgcttgaaagacgaggagattagatgcagaaaatacctgcatccttcgagctataccaaggtcatccatgagtgccaacagagaatggtcgccgaccacttgcaatttctacatgccgaatgtcacaacatcatcaggcaggagaagaagaatgatatggcgaatatgtatgtcctgctacgcgcagtgtctaccgggctcccacacatgatccaggagctgcagaatcacattcatgacgaagggctgcgcgccacttccaacctgacacaggaaaacatgcctaccctgtttgtggagagcgtgctagaagtgcatgggaagtttgtgcagctgattaataccgttttgaacggagaccaacacttcatgtctgcactagacaaggcactgacctcagtagtcaactatcgagagccaaaaagcgtttgtaaggctccagaactactcgcgaaatattgtgacaatctgttaaaaaagtccgccaaaggcatgactgagaatgaggttgaggaccggctcacctccttcataactgtttttaaatatatcgacgacaaggatgtctttcaaaagttctacgccaggatgctggccaagcggttaatccacggactgtctatgagcatggactctgaagaagcgatgatcaataagctcaagcaagcatgcggctatgagtttacctctaaactccaccgaatgtatactgacatgtcagtctctgcagatcttaataacaaattcaacaactttatcaagaatcaggataccgtcatcgaccttggcatatcttttcagatctatgtgctgcaggctggggcttggccgctgacacaagctccttcctctacgttcgccatccctcaggaacttgagaagtcagtccagatgttcgaacttttttacagccagcactttagtggaaggaagttgacctggctgcactacctgtgcactggtgaagtcaaaatgaactatcttgggaagccctacgtggccatggttaccacctatcagatggccgtcctgttggcctttaataactctgagacggtctcgtataaggaactgcaggatagtacccagatgaatgaaaaagaactgaccaaaaccatcaaaagtctgctcgatgttaagatgatcaaccatgattctgagaaagaggacattgatgccgagtcatcattctccctgaatatgaatttcagctccaagcgcaccaagttcaagattacgacctccatgcagaaagacacccctcaagagatggaacaaaccagatctgcggtggatgaagatcggaagatgtatcttcaggctgcaattgtgaggatcatgaaagcacgcaaagtgctgaggcacaacgcacttatccaggaagtgatttcacaatccagggcacggttcaacccctctatcagtatgatcaaaaagtgtatcgaggtactgatagacaaacagtacattgaacgatcccaggcctccgctgatgaatacagctacgtcgcctag

SEQ ID NO: 312079 - DNA, 2238 bp, Artificial Sequence
  derived and/or modified sequence
atgagcctgaagccccgggtggtggacttcgacgagacctggaacaaactgttgaccactatcaaagccgtcgtgatgctcgagtatgtagagcgcgctacttggaacgatagattcagcgacatctatgcattgtgcgtcgcctaccccgaaccactaggcgagaggttgtacactgaaaccaaaatctttctcgaaaaccatgtgcggcacctgcacaagcgggtgctggaatcagaagaacaggttctggttatgtaccaccgctactgggaggaatatagtaaaggtgcagattatatggattgcctgtatcgctacctgaatacccagttcatcaagaaaaataaactgacagaggctgacttgcaatacgggtacgggggggttgacatgaacgaaccactcatggaaattggggaactggccctggatatgtggagaaaactaatggtggaaccactgcaggccattctgattaggatgcttctccgcgagataaaaaacgatcgaggtggcgaagatcccaaccagaaggttatccatggggtgattaatagctttgtgcatgtggagcaatacaagaaaaagtttccattgaaattctatcaagagatcttcgagagtccattcttaactgagaccggggaatactataaacaagaggcctcaaacttactgcaggagtctaattgctctcagtacatggaaaaggttctgggacggctgaaagatgaagagattaggtgcagaaaatatctgcaccctagttcttatactaaagtgattcacgagtgccaacagagaatggtggctgatcatttgcaatttctccacgcagagtgccacaacatcatcaggcaggaaaaaaaaaatgacatggccaatatgtatgtcctgctgcgtgcagtgagtacagggctgcctcatatgatccaggaactccaaaatcatatccatgacgaaggcttgcgggctaccagcaatttgacacaagagaacatgccaactctgtttgtggagtccgtgctggaggtgcatggtaagttcgtgcagcttatcaacactgttttaaacggcgaccagcactttatgtccgccctagataaagccctcacctccgtcgtgaattacagagaaccgaagagcgtctgcaaggcgcccgaactgctggcaaagtactgtgataatcttcttaaaaaaagcgcaaaaggtatgacggagaacgaggtagaggaccgcctgacttcctttatcacagtgtttaagtatatcgacgataaagacgttttccagaagttttacgccaggatgctcgccaaacgtttgatccacggcctgtccatgtctatggactctgaagaagccatgatcaataagctgaagcaggcctgcggctacgagttcacttctaaactgcacagaatgtatacagacatgagcgtgagtgcagatttgaataataaattcaataacttcattaagaaccaggatacggtcatcgaccttgggatttcctttcagatctacgtgctccaggcaggggcttggcccctgacccaggcaccatcttccacattcgctatcccgcaggaactggagaaatctgtacagatgtttgagctattttactcccaacacttcagtggtcgcaaattgacttggctgcactatctgtgcactggcgaggtcaagatgaactatttagggaagccgtatgtcgccatggttaccacataccagatggctgtgctgcttgctttcaacaatagtgagactgtttcctacaaagagctccaggatagtacccagatgaacgagaaagaacttacaaaaacaattaagtctctgttggatgtcaaaatgatcaaccacgattcagagaaagaagatatagatgctgaatcttcctttagtcttaacatgaatttctcttcgaaacgcaccaagttcaagataaccacgtctatgcagaaagacacaccacaggagatggaacaaaccaggtcggccgtggacgaagatagaaagatgtatctccaggcagccatcgtgcggattatgaaggcgcgaaaagtcttaaggcacaatgccttaatccaggaagtcatcagccagagtcgagctcggtttaatccaagtatatcaatgatcaaaaagtgcattgaagtgctgatagacaagcagtacatagaacgctcccaggcatcagctgacgagtatagctacgtggcctag

SEQ ID NO: 312080 - DNA, 2067 bp, Artificial Sequence
  derived and/or modified sequence
atgctgtacgtgtggcccatcctgaaccccctggagaaggacttcatacagaaactgcgttttttttggaaaataatgttcggcatctgcattagatactgggaagaatacagcaagggcgcagattatatggattgcttgtaccgctaccttaacacccagtttatcaagaaaaataaactcacagaggccgacctgcagtacgggtacgggggcgttgatatgaacgaacccctgatggaaattggcgaactagccctggacatgtggcgaaagcttatggttgaaccactacaggcaatcttgatccggatgctgctgcgtgagattaaaaacgaccgtggtggggaggaccccaatcagaaagtgatccacggcgtcatcaactccttcgttcatgtcgagcagtacaagaaaaaattcccactcaagttttaccaggagatcttcgagtccccgtttttgacagagacaggagaatattataaacaggaggcctccaatctgttgcaggagagcaactgttcccagtatatggagaaagtgctgggccggttgaaagatgaagagattcgatgccgaaaatacttgcatccttctagctatactaaagtgattcacgaatgtcagcagcgaatggtggccgaccacctgcagtttctgcacgccgagtgccataacatcattagacaagagaagaaaaatgacatggccaacatgtatgtgcttctgagggcagtctcgacaggactcccccacatgattcaggaactgcagaatcacatccacgatgaaggcttacgcgctacatcaaaccttacacaagaaaacatgcctacattgttcgtggaatccgtgctggaggtgcacggaaaatttgtccagttgataaacaccgtgctgaatggtgaccaacactttatgagcgccctggacaaagctctgactagcgtagtgaactatcgagagcctaaatccgtgtgtaaggcacccgagctgctggccaagtattgtgataatctcctcaagaagagcgctaaaggcatgacagagaacgaggttgaggatcgtcttacttcatttatcacagtgtttaagtacattgatgacaaggatgtgttccaaaagttttacgctcggatgcttgccaagcgactgatacacggtctctcaatgagtatggactccgaagaggccatgataaacaaacttaaacaagcctgcgggtatgagtttacttcaaaactgcaccgaatgtacacggacatgagcgtcagcgctgacctgaacaacaagtttaacaacttcatcaaaaaccaggacactgttattgacctcggcatcagcttccagatatatgtcctgcaagccggagcgtggccgctcacccaagccccgagttctacttttgctatcccccaagaactcgaaaaatcagtccagatgtttgaactcttttactctcaacatttctccggccggaagctaacatggctccactacttgtgtactggtgaagtcaagatgaattacttgggcaaaccatacgtcgccatggtaaccacttatcagatggcagtgctgcttgctttcaataatagtgagacagtgtcttataaggagcttcaggattccacacagatgaacgagaaagaacttacaaagacaatcaagagtcttcttgatgttaagatgattaaccatgattctgagaaagaagatattgatgcagagtcgagcttctccctgaacatgaacttcagttctaaaagaaccaaattcaaaattactaccagcatgcagaaagacacacctcaggaaatggagcagacaaggtcggccgtggacgaagatagaaagatgtacttacaggcagcgatcgtgaggataatgaaggcccggaaagtcctgcgccacaacgcccttatccaagaagtgatctcacagagcagggcgaggttcaacccttctatctcaatgatcaaaaaatgtatcgaggtcctcatcgacaagcagtacatcgagagatctcaggccagcgccgacgagtactcttatgtggcatag

SEQ ID NO: 312081 - DNA, 651 bp, Artificial Sequence
  derived and/or modified sequence
atgagcctgaagccccgggtggtggacttcgacgagacctggaacaagttacttaccactatcaaagccgttgtgatgctcgagtacgtggagagggccacctggaatgaccggtttagcgatatctacgccctatgcgtggcataccctgaacctctgggggagcggctgtacaccgagacaaagatctttctggaaaaccatgtacgacacctacataaacgggtcctcgagtctgaggagcaggtgctggtgatgtaccatcggtactgggaggagtattccaagggagccgactacatggattgcctgtacagatatctgaacacccagtttattaaaaaaaacaagctaaccgaagccgacctgcagtatggctacggaggggtcgatatgaacgaaccgttaatggaaatcggggaacttgccttggacatgtggcgcaaattgatggtggaacccctgcaggctatcttgattaggatgctactgcgcgagataaagaatgaccgaggaggtgaggacccaaaccaaaaggtcatccacggagtaataaacagctttgtgcatgtggagcaatacaagaaaaagtttccactgaagttctaccaggaaatttttgagagtccgttcttgactgagacaggttag

SEQ ID NO: 312082 - DNA, 2121 bp, Artificial Sequence
  derived and/or modified sequence
atgagtctaaagccccgagtagtcgacttcgatgaaacttggaataaactcctgacaacaatcaaagccgtggtgatgctggaatatgtcgagcgggctacttggaatgacagattcagtgacatttacgccttatgcgtcgcatatcccgaacctctgggtgagagactgtatacagaaactaaaatcttccttgaaaaccatgtcaggcatcttcacaaacgagttttggagtctgaagaacaggtgcttgttatgtatcatcggtactgggaagagtactccaaaggcgctgattacatggactgcctatacaggtacttaaacactcagtttataaagaaaaacaaactcactgaggccgatctgcagtacggctatggcggagtggatatgaatgagcctctgatggagataggggagctcgcattagatatgtggcgtaagctcatggtcgaaccattacaggctatcttgatccggatgctcctgagagagattaagaacgatcgcggtggcgaggacccaaatcaaaaagtgattcacggagtcattaactcttttgtgcacgtagaacaatacaagaagaagttccccctgaaattctaccaggaaatcttcgaatcaccctttctgactgagacaggcgagtactataaacaggaagccagtaatcttctgcaggaaagcaactgcagtcagtacatggagaaagtacttggcagattgaaagacgaggaaatcaggtgccggaagtatcttcatccctcatcttacacgaaagttattcacgaatgccagcagaggatggtagccgatcacctgcagttcctccacgcagaatgccataatataattagacaagagaagaaaaacgatatggccaatatgtacgttctattgcgtgcagtttccaccggactcccccacatgattcaagagctccagaaccacatccacgatgaggggctgagagccaccagtaacttgacccaagaaaatatgccaactcttttcgtggagagcgtacttgaagtacatgggaaattcgtgcaattaatcaatacggtactgaatggagatcagcacttcatgtctgctttagataaggctctgacctccgtggtcaattaccgcgagcccaaatccgtctgtaaggcacctgaactgctggcaaaatattgtgacaacctgctcaagaaatcggctaagggaatgacagagaatgaagtagaggatagattaacgtctttcatcaccgtatttaagtacatagatgataaagacgtgttccagaaattttatgcaagaatgcttgccaaacggctaatccatggcctctcaatgagtatggatagtgaggaagccatgattaacaagcttaaacaagcatgtggatatgagtttacatcaaagcttcatcgtatgtacactgacatgtccgttagtgccgatctcaacaacaaatttaacaatttcatcaaaaaccaggatacagtgatcgaccttggcattagctttcagatctacgtgcttcaggcaggtgcatggcccttaacccaggctccctcttccacattcgccatccctcaggaactcgagaagtctgtgcagatgtttgagctgttttactctcagcacttctctggtagaaagctcacttggcttcactatttatgcactggcgaagtcaagatgaactatctggggaaaccctacgtcgccatggtaacgacataccaaatggctgtactcctggcgttcaataacagcgaaacagtgtcttacaaggaactgcaggactcgacccagatgaacgaaaaagagcttactaagactatcaagtccctgttagacgtaaagatgatcaatcatgatagcgagaaggaagacattgacgctgagagctctttttcactcaacatgaatttcagcagtaagcgcacaaagttcaagattactacctctatgcagaaagataccccccaggttatctctcaaagtcgcgctcggtttaacccttcaatcagcatgataaagaagtgcatcgaagtgctcattgacaagcagtatattgaaagaagtcaggcctccgccgacgagtacagctacgtggcctag

SEQ ID NO: 312083 - DNA, 2121 bp, Artificial Sequence
  derived and/or modified sequence
atgagcctgaaacctcgcgtcgtggatttcgatgaaacctggaataagctgctcactacaatcaaggcagtcgtgatgctggagtatgtggaaagggctacctggaatgatagatttagcgatatctatgcgctgtgcgtagcctatccagaaccactgggcgaaaggctctacactgaaaccaaaattttcctggagaatcatgttcggcatttgcacaaacgggtgctggagagtgaggagcaggtgttggttatgtatcataggtattgggaggagtactcaaagggagctgattatatggactgcctgtaccgatacctcaatacccagtttattaagaaaaataagctgacagaggcagacctgcaatacgggtatgggggagtggacatgaacgaaccactgatggagatcggagaattagccttagacatgtggaggaagcttatggtggaacctcttcaggctatactaatccggatgctgctgcgcgagatcaagaacgatcggggtggggaggatcccaatcaaaaggtgatacacggggtgatcaacagtttcgtgcacgtggagcagtacaaaaaaaagtttcctctgaagttttatcaggaaattttcgagtcacccttcctgactgaaaccggagagtattataagcaggaggccagcaatctgttgcaagagtctaactgctcacaatatatggaaaaagttcttggcaggctgaaagatgaagagatccggtgccgaaaatacctccacccatcctcttataccaaagtgatccacgaatgccagcagaggatggtcgctgatcacttgcagttcctccatgccgagtgccataacatcatacgtcaggagaagaagaatgacatggccaacatgtacgtgctcttaagggctgtctccacgggcctgccgcacatgatccaggagctgcagaatcacatccacgacgaaggtctgagagccacttccaatctgacacaagaaaatatgcctaccctgttcgttgagagtgtgctcgaagtacacgggaagttcgtccaactgattaatacggtgctgaatggcgatcagcactttatgtctgcgttagataaagcacttacatccgtggtgaactacagggagccaaagagcgtttgcaaagcaccagagttgctggcaaagtattgcgataacctcctgaagaagagtgctaagggaatgaccgagaatgaggtggaagataggctaacctcattcataactgtgttcaaatatattgatgataaagatgtctttcagaaattctatgctcgcatgctggctaaaagactcattcatggcttgtctatgtccatggactctgaggaggccatgattaacaagctaaaacaggcttgcgggtacgagttcacatctaaattacacagaatgtataccgacatgtccgtcagtgccgatttgaacaacaagtttaacaattttattaagaaccaggataccgtgattgacctgggcatttcctttcagatttatgtactccaggctggagcttggccgctgacgcaggcaccttcttccacttttgcaattccccaggagttggaaaaaagcgtgcaaatgttcgaactgttctattcacaacatttttctggtcgtaaattaacttggttgcattacttatgcaccggtgaagtgaaaatgaactatctgggcaaaccctatgtggccatggtgaccacctatcagatggccgtcctcctggcgttcaacaatagtgagacagtgagttacaaagaacttcaagactccacccaaatgaatgagaaggaactgacgaagaccataaaatcactactggacgtgaagatgattaatcatgattcagaaaaagaagacattgatgcagagagctcgttctcgctgaatatgaacttcagctcaaagaggacgaagttcaagattactacaagcatgcagaaggacaccccgcaggtgatcagtcagtctcgggctaggtttaatccatctatatctatgatcaagaagtgcattgaggtcctgatcgacaagcaatacatagagcgctcccaggcaagcgccgacgagtactcatacgttgcatag

SEQ ID NO: 312084 - DNA, 2238 bp, Artificial Sequence
  derived and/or modified sequence
atgagcctcaaaccccgagtggtcgattttgacgaaacttggaacaaactgctgacaacaattaaggctgtggttatgcttgaatacgtggagcgcgctacctggaatgaccggttttccgatatttacgccttatgtgtcgcttaccctgaacctctgggagaaaggctgtatactgagacgaaaatcttcctcgaaaaccacgtgcgccatctccataagagggtgctcgaatctgaggagcaagtgctggttatgtaccatagatattgggaagaatacagcaaaggagcagattacatggattgtctatacaggtacctgaatactcagtttatcaaaaaaaataaactaaccgaggccgacttacaatacggttacgggggagtggacatgaacgaacctctgatggagataggagagctggctctggacatgtggcgcaagctgatggttgagcctctgcaagcgattctgatccgaatgctccttcgcgagattaagaacgataggggaggcgaggaccctaatcagaaggtcattcacggcgttatcaactcattcgtccatgtagagcagtacaagaagaagtttcccttaaaattttatcaagagatctttgaatctccttttttaaccgagactggagagtactataaacaggaggctagcaacctcctgcaggagtccaactgttcccaatatatggagaaagttcttggacgactgaaagatgaggagattaggtgcagaaagtacctacatcccagcagctacaccaaagtgatccacgagtgtcagcagcgcatggtggcagaccacttgcagtttctgcatgccgaatgccacaatatcattaggcaggaaaaaaaaaatgacatggccaatatgtatgtgctactgcgcgctgtctctaccggcctcccacacatgatccaagagctccagaatcatatacatgatgaggggctgagagctaccagtaacctgactcaggaaaatatgcccacacttttcgtggagtcagtcctggaagtccacggcaagttcgtccaattgatcaacaccgtcttgaacggggatcagcattttatgtctgcgctggataaggctttgacatcagtcgtgaattatcgcgaacctaaaagtgtgtgcaaggcccctgagctgctggccaaatattgtgacaacctcctaaagaagtctgcgaaggggatgacagaaaatgaggtggaggaccggctgacatccttcattactgtattcaaatatatagatgacaaagacgtgtttcagaaattttatgcaagaatgctggccaaacgactgatacatggcctgtcaatgtccatggattcagaggaggcaatgatcaataagttgaagcaggcttgcggatatgagtttacttctaagctgcacagaatgtatactgatatgtctgtctccgcagatctgaacaacaagtttaataatttcataaagaatcaggataccgtgattgacttgggaatttccttccagatatacgttctgcaggctggcgcatggccactcacacaggctccgtcaagcacttttgctatcccacaggaacttgaaaagtctgtgcagatgttcgagctattctactctcagcatttctctggtcgaaagctaacctggctccactacctttgcacaggcgaggtgaaaatgaactatttgggcaagccttatgtggccatggtcacaacctaccagatggccgtgctactggcatttaataatagcgagacagtttcctacaaagaactgcaagactctacccagatgaatgagaaggaactgactaagaccattaaatctctcctggacgtgaaaatgatcaaccatgactccgagaaagaggatatcgatgccgagtccagcttttctctgaacatgaatttctcgtctaagaggaccaaattcaagatcacaacctcgatgcaaaaggacactccacaagagatggagcaaactagatcagctgtggacgaggacaggaaaatgtatttgcaagctgccatcgttagaatcatgaaggcgagaaaggtgttgcgccacaatgcattaatacaggaggtaatatcccagtcccgggcaagatttaaccccagcatctctatgatcaagaaatgcatagaggttctcattgacaaacagtacatagagagatcccaggcgtcagcggatgaatattcttatgtggcctag

SEQ ID NO: 312085 - DNA, 2238 bp, Artificial Sequence
  derived and/or modified sequence
atgagtctgaaaccaagagtagtcgattttgatgaaacatggaataaactgctgacaactataaaggcagtggttatgctcgaatatgtggaacgggctacctggaacgacaggttctcggacatctatgccctgtgcgtagcttaccccgagccactaggggagaggctgtacacggagacaaagattttcctggaaaatcacgtgaggcacctccataaacgtgtgcttgaatccgaagagcaggtattggtgatgtaccacagatactgggaggagtactccaaaggcgcagattatatggactgtctctatcgctacctgaacacccagtttataaaaaaaaacaaactgaccgaggcggatctgcagtatggatatggaggagtggacatgaacgaaccgctcatggagattggcgagctggccttggacatgtggcgtaagctgatggtagaaccattacaggccattctcatcaggatgctgctgagagagattaaaaatgatcgagggggagaagacccaaaccaaaaggtgatccacggagtgatcaacagctttgtccatgttgaacagtacaagaaaaagttccctctaaaattttatcaggagattttcgaatcaccatttctcacagagactggcgagtattacaagcaagaagcaagtaatctgcttcaggagtcaaattgttctcaatatatggagaaggtgctgggtcgactgaaggacgaagagattcgctgcaggaaatatctgcacccttccagctatacgaaagtgatacacgaatgtcaacagaggatggtggccgatcacctccagtttcttcatgcagaatgccataatatcatccggcaggaaaaaaaaaacgacatggcaaatatgtacgtcctcctcagggctgtctccacaggacttcctcacatgatccaggagttgcagaaccatattcatgatgagggtcttagagccacgtctaacttaactcaggagaacatgcctacattgttcgtcgagtcggtgttggaggtccatggcaaatttgtgcagctgatcaacacggtgcttaatggtgaccaacacttcatgagtgcattagacaaggctctgacaagcgtcgtcaactacagagagccgaaatcagtctgcaaagcacctgagcttctggcaaaatattgtgacaacttactgaaaaaaagcgccaagggaatgactgagaacgaagtcgaggacagactgacctcctttatcactgtgttcaaatacatcgacgataaggatgtattccaaaagttctacgcacgaatgctcgccaagcgccttattcacggtttgagcatgtcaatggattccgaagaggccatgatcaataagctaaagcaggcttgcggctacgaattcacctcaaagctgcataggatgtatactgatatgtccgttagtgctgacctgaacaataagtttaacaatttcattaagaaccaagacacagtaatcgaccttggaatttcattccagatatatgtcctgcaggctggcgcttggccacttacccaggcgccaagcagcacctttgccataccgcaggagctggagaagtccgttcagatgttcgaactcttctacagccagcatttcagcggaagaaagctaacatggctccattacctctgtaccggcgaagtgaaaatgaactacttagggaaaccatatgtggcaatggtgacaacctatcagatggctgtgctgctggcattcaataatagcgagacagtatcctataaggagttgcaggactctacacagatgaacgagaaagaactgacgaaaactatcaagtctctgctggacgtgaaaatgatcaaccacgattctgaaaaagaagatattgacgctgaaagcagcttttctctgaacatgaatttcagttcaaaacggaccaagtttaagatcaccacctcaatgcagaaggataccccgcaggagatggaacaaaccaggtccgcagttgatgaggatcgcaagatgtatctgcaggccgcaatagtgaggattatgaaggcacggaaagttttgaggcataatgcactcattcaggaagttatttcccaatcccgggctaggttcaatccttcaattagtatgataaaaaagtgtattgaagttctgatcgataaacagtatattgagcgatcccaggcaagcgcggatgagtatagttacgtagcgtag

SEQ ID NO: 312086 - DNA, 2238 bp, Artificial Sequence
  derived and/or modified sequence
atgtctctcaagccgcgtgtcgtggactttgacgagacctggaacaagttactgacgacgattaaagctgttgtgatgctggagtatgtggagcgggcaacttggaacgatcgattctctgacatttacgcattatgtgtggcctatcctgagcccctcggcgaaaggctctataccgaaacaaaaattttcctggagaatcatgtgcgtcatcttcacaaacgagtcctggaatctgaagaacaggtcctcgtgatgtaccaccgttattgggaggagtatagcaaaggcgctgattacatggactgcctgtatcgatacttgaatacccagttcatcaagaaaaataagctcacggaggctgatctacagtacggctatgggggtgttgacatgaacgaacccctgatggaaatcggtgaactggcgctggatatgtggagaaaactgatggtcgaaccactccaagcaatcctgatccgtatgctactacgggagataaagaacgaccggggaggcgaagaccccaatcagaaagtgattcacggagtgattaacagtttcgtccatgtcgagcagtataaaaagaagtttccactgaagttctatcaagagatcttcgagtccccctttttgacagagacaggcgaatattacaagcaggaggcgagtaatctgcttcaggagagcaactgttcccagtacatggagaaggtgttggggagactgaaggacgaggaaatccgttgccggaaatacctccacccgtcttcttatactaaggttattcatgagtgccagcaaagaatggttgccgaccacctccagtttctgcacgcagagtgccacaacataatccgacaggagaagaagaacgatatggccaatatgtacgtgttactccgagcggtctccaccgggctgcctcatatgatacaggagctgcagaatcacatccacgacgagggcttaagggccacttcgaatttaacacaggaaaacatgccaaccctctttgtggagtctgttttggaggtccatggtaaattcgttcaactcatcaatacagtgctcaatggggatcagcattttatgagtgctctcgacaaggctctcacatctgttgttaactacagggagcccaagagcgtgtgtaaggcccctgaactcctcgcaaaatactgcgacaatctacttaagaagtctgcgaagggcatgacagagaacgaagtagaagatagacttactagctttatcacagtatttaagtacatcgacgataaggatgtgttccagaagttctatgccagaatgctcgcaaaacgcctcattcacggcctgtctatgtctatggattctgaggaggcaatgattaacaagctgaaacaggcctgcggttatgagttcacaagcaagcttcaccgcatgtacactgatatgtctgtgagcgccgacctgaacaacaaattcaataattttatcaaaaaccaggatacggtgatcgacctcggcatttcgtttcagatatacgtgctacaggcaggcgcttggccactgacacaggcaccaagctcaacgttcgcaatcccccaagaattggaaaaatccgtccagatgtttgagttgttctactcccagcatttctctggacgtaaactaacctggctgcactatctgtgtacaggagaagtgaagatgaactatttaggcaagccatacgtagccatggtcaccacttaccagatggccgtacttctcgcctttaacaactccgagacagtctcttataaagaactgcaggatagcacccagatgaacgaaaaggagctcacaaagaccattaaatctttgctggacgtgaaaatgatcaaccatgattctgagaaagaggacatcgacgctgaatcgtcattctctctcaacatgaatttctcttccaaacggacaaaattcaagatcactacgtcaatgcagaaagataccccacaagagatggagcagacaaggtctgcagtggacgaagacaggaaaatgtacctccaggctgcaatcgtgcgaatcatgaaagctcggaaggtcctgcgtcataacgccctgatccaagaagtcatttctcagtccagggctcgcttcaacccttctatctccatgattaaaaagtgtattgaggtgctgatcgacaaacagtacatagaaaggagccaggcttcagcagacgagtattcatacgttgcttag

SEQ ID NO: 312087 - DNA, 2067 bp, Artificial Sequence
  derived and/or modified sequence
atgctgtatgtttggccaatcctgaatcctctcgaaaaggatttcatccagaaactcaggttcttctggaagatcatgtttggcatatgcatcaggtactgggaagagtactctaaaggcgctgattatatggactgcttatacaggtatctgaatactcagttcataaaaaagaataaactgactgaggccgacctgcagtatggatacggcggtgtggacatgaacgaacctctcatggagatcggcgaactggccctggacatgtggcggaaacttatggtggaacctttgcaggcaatcctcattaggatgttgttgcgcgaaatcaagaatgatcgcggaggtgaggatcccaaccagaaggtgatccacggcgtcatcaactcattcgtccacgtggagcagtacaaaaaaaagttcccgctgaaattctatcaggaaatctttgaatcaccttttctgactgagaccggggagtactacaagcaagaagctagtaacctgctccaagagtcaaattgtagccagtacatggagaaggtcctggggaggctcaaagatgaggaaattcgttgccggaaatacctgcacccaagtagttataccaaagtgatccacgaatgccagcagaggatggtggctgaccatttacagttccttcacgccgagtgccacaacataattaggcaagagaaaaagaacgacatggccaatatgtacgttttactgagagccgtcagtaccggtctgccccatatgatccaggagctgcagaaccatattcatgatgaaggtctgcgcgctacttctaacctcactcaagagaatatgccgacacttttcgtcgagagcgtgcttgaagtgcacggcaagttcgtccagcttatcaatacggtgcttaacggcgaccagcactttatgtccgccttagataaagccctgaccagtgtcgtgaactaccgggaaccaaagagcgtctgcaaagcacctgaactgctcgctaaatactgcgacaatctgttgaagaaatccgcgaaaggtatgacagagaacgaagtggaagacagacttacttccttcattacagtttttaaatacattgacgacaaggatgtttttcaaaagttctacgctcgcatgttggctaaacgactgatccacggcctgtcgatgagcatggattcagaagaagcaatgatcaataagttaaaacaggcatgcggatacgagttcacttcaaagctacacagaatgtacacagacatgtcagtgagcgctgacctgaataacaagtttaataatttcatcaagaaccaagatacagtgatcgatctcggtatctcttttcagatttatgtgctgcaggcaggcgcatggcccctcacacaggcccctagtagtaccttcgcgattcctcaagagctggaaaagagtgtgcagatgttcgagctcttctacagccagcatttcagcggtagaaagcttacttggctccattacctctgtaccggagaggtgaagatgaactatctggggaagccctacgtggccatggttacaacatatcaaatggcggtgctcctcgccttcaataattcggagaccgtttcctataaggaactgcaggatagcacccaaatgaacgaaaaggaactgactaagactataaaatccttactcgacgtaaagatgatcaaccacgactcagagaaagaggacattgatgctgagtcttctttcagcctgaacatgaatttctcttctaaacggactaagttcaagatcacaacatctatgcaaaaggataccccacaggagatggagcaaactaggtccgcagttgacgaagaccggaaaatgtacctgcaggcggctatagtgaggatcatgaaagcgagaaaggtgctccggcataatgccctaatccaggaggtgatcagccagtcacgggctaggttcaatccatctatctctatgatcaagaagtgtatcgaggtactgattgataaacaatatattgagcgtagtcaggcgtccgcggacgagtactcttacgtagcctag

SEQ ID NO: 312088 - DNA, 651 bp, Artificial Sequence
  derived and/or modified sequence
atgagtttgaagccaagagtggttgactttgacgagacttggaacaagctgctgaccactatcaaggctgtagtaatgctggaatacgtcgaacgtgccacctggaacgatcgcttctcagacatctatgcactatgcgttgcatacccagagcctctgggggaacggctttatacagagactaaaattttcctcgaaaatcatgtgcgacatctccacaaaagggttcttgagtccgaggagcaggttctggtgatgtatcaccgctactgggaagagtactctaagggcgcagattatatggactgtctctatcgctacttaaatacccagttcatcaagaagaataaactgaccgaggctgaccttcagtacggatacggtggggtagacatgaacgagcctctgatggagataggcgaactcgcactagacatgtggcggaagctgatggttgagcctcttcaggccattcttattcggatgttactgcgcgaaatcaaaaacgataggggtggggaggatcctaaccagaaagtgatccatggcgtcatcaattcctttgtgcatgttgaacagtataaaaagaagtttccacttaaattttaccaggaaatattcgaaagtccgtttctcaccgagacaggctag

SEQ ID NO: 312089 - protein, 404 aa, Artificial Sequence
  derived and/or modified sequence
MNEEQAVSKVDGILSNCGIEKESDLCVLNLIRYTATTKCSPSVDPERVLWSLRDHPLLPEAEACVRQHLPDLYAAAGGVNIWALVAAVVLLSSSVNDIQRLLFCLRRPSSTVTMPDVTETLYCIAVLLYAMREKGINISNRIHYNIFYCLYLQENSCTQATKVKEEPSVWPGKKTIQLTHEQQLILNHKMEPLQVVKIMAFAGTGKTSTLVKYAEKWSQSRFLYVTFNKSIAKQAERVFPSNVICKTFHSMAYGHIGRKYQSKKKLNLFKLTPFMVNSVLAEGKGGFIRAKLVCKTLENFFASADEELTIDHVPIWCKNSQGQRVMVEQSEKLNGVLEASRLWDNMRKLGECTEEAHQMTHDGYLKLWQLSKPSLASFDAIFVDEAQAGARHGAHCGEHRTAPA

SEQ ID NO: 312090 - DNA, 1215 bp, Artificial Sequence
  derived and/or modified sequence
atgaacgaagagcaggcagtgtccaaggttgatggaattttgtccaattgtgggatcgaaaaggagtctgatttgtgcgtgctgaatctcatcaggtatacagcaactaccaagtgtagtccctccgtcgacccagagagggtcctttggtccttgagagatcatccacttctgccagaggccgaagcctgtgtacgtcagcacctacctgatctttatgccgccgcaggcggcgtgaacatctgggcactggtggcagcagttgtgctgctgtcctcaagcgtgaacgacattcagcgtctgctgttttgccttcgccgcccttcatccaccgttacaatgcccgacgtgactgaaacactgtattgtatagcagttctcctgtacgcgatgagagaaaaggggattaatatctccaatcgcattcactacaacattttttactgcttatacctccaggagaattcatgcacacaggctaccaaggtgaaggaggagccgtcagtgtggccgggaaagaagacaattcaacttacgcacgaacagcaacttattttgaaccacaagatggaacccctgcaggtcgtcaaaataatggccttcgctggaacaggtaaaactagcacattagtgaagtatgccgagaagtggagccagagtcggtttttatacgtgaccttcaacaaatccattgcgaagcaggccgaaagggtgtttcctagcaacgttatctgtaagacctttcactctatggcctatggacacattggaagaaaatatcagagtaaaaaaaagttgaacctttttaaactgacgccgtttatggtgaatagcgtactcgctgaaggtaagggtggcttcatacgggctaaactggtatgcaaaaccctcgaaaacttctttgcctccgcagacgaggaactgacgatcgatcacgtgcccatttggtgtaagaattctcagggtcagcgggtcatggtggagcaaagcgaaaagctgaatggcgtcttggaggcatcccgactttgggataacatgaggaaactgggtgaatgtaccgaggaagcacatcagatgacgcatgatggctacttgaagctatggcaattgagtaagccttctctggccagtttcgatgccatctttgtggacgaggcccaggccggagccaggcatggggcccattgcggagagcatcggaccgcaccagcctag

SEQ ID NO: 312091 - DNA, 1215 bp, Artificial Sequence
  derived and/or modified sequence
atgaatgaggagcaggccgtgtctaaggtggacgggatcctgtctaattgtggtattgaaaaggagtctgacctgtgtgttctgaaccttatccggtatacagcgacaacgaagtgcagtccatcagtcgacccagaacgagtgctttggtccttgcgagaccatccactgctgcccgaggccgaggcctgtgtacggcagcatctgccagacctgtatgccgccgctggcggggtgaatatttgggccctggtcgccgccgtcgtgctgctcagtagcagtgtgaacgacatccagagactgttgttctgccttcggaggccgtcctcaaccgtcacaatgcccgacgtcactgagacattgtactgtatcgctgtgctgctgtacgccatgagagagaaagggatcaacatcagtaacaggatacattacaatattttttattgtctgtaccttcaggagaatagctgcacccaggccaccaaagtgaaagaagagccctccgtgtggcccggaaagaagacaatccagcttacccacgagcagcagctaatcctgaaccacaagatggagcccctgcaggtggtgaagattatggccttcgccgggaccggcaagacgagcacgctcgtgaagtatgccgaaaagtggagtcagagtcggttcttgtacgtgacctttaacaagtctatcgccaagcaggcagagcgcgtgttcccctccaacgtcatttgcaaaactttccattccatggcatacgggcacattggtagaaagtatcagagcaagaaaaagctgaatctgttcaagctgacccccttcatggtgaactctgttttagccgagggtaaaggcggctttatcagggcaaaactggtgtgcaagactttggaaaatttcttcgcatcagccgatgaggaacttactatcgaccacgtgcctatttggtgcaaaaattcccaaggccagagagtaatggtggagcagtccgagaagctcaacggagtgctggaggcatccaggctgtgggataatatgcggaagctgggcgaatgtacggaagaggcgcatcagatgacacacgacggctacctcaaactatggcagctcagtaagccttccctggcttcgtttgatgccatctttgtcgacgaagctcaggccggcgcacggcacggcgcccattgcggcgagcaccgtactgctcctgcctag

SEQ ID NO: 312092 - DNA, 1215 bp, Artificial Sequence
  derived and/or modified sequence
atgaatgaggagcaggccgtgtccaaggtggatggcatcctgagcaactgtggcatcgagaaggagagtgacctgtgtgtgctgaacctgatccgctacacagccaccaccaagtgcagccccagcgtggaccctgagcgggtgctgtggagcctgcgggaccaccccctgctgcctgaggccgaggcctgtgtgcggcagcacctgcctgacctgtatgctgctgctgggggcgtgaacatctgggccctggtggccgctgtggtgctgctgagcagctctgtgaatgacatccagaggctgctcttctgcctgcggcggcccagcagcacagtgaccatgccagatgtgacagagaccctgtactgcatcgctgtgctgctgtatgccatgagggagaagggcatcaacatcagcaaccgcatccactacaacatcttctactgcctgtacctgcaggagaacagctgcacccaggccaccaaggtgaaggaggagcccagcgtgtggccaggcaagaagaccatccagctgacccatgagcagcagctgatcctgaaccacaagatggagcccctgcaggtggtgaagatcatggcctttgctggcaccgggaagaccagcaccctggtgaagtatgcagagaagtggagccagagccgcttcctgtatgtgaccttcaacaagagcatcgccaagcaggccgagagggtcttccccagcaatgtcatctgcaagaccttccacagcatggcctacggccacatcggcaggaagtaccagagcaagaagaagctgaacctcttcaagctgacccccttcatggtgaacagcgtgctggccgagggcaagggcggcttcatccgggccaagctggtgtgcaagaccctggagaacttctttgccagcgcagatgaggagctgaccatcgaccacgtgcccatctggtgcaagaacagccagggccagagggtgatggtggagcagagcgagaagctgaatggagtgctggaggccagccggctgtgggacaacatgaggaagctgggagaatgtacagaggaggcccaccagatgacccatgatggctacctgaagctgtggcagctgagcaagcccagcctggccagctttgatgccatctttgtggatgaggcccaggccggggcccggcacggggcccactgtggggagcacaggacagccccagcctag

SEQ ID NO: 312093 - DNA, 1215 bp, Artificial Sequence
  derived and/or modified sequence
atgaacgaggagcaggccgtgagcaaggtggacggcatcctgagcaactgcggaattgagaaggaatcggatctttgtgttctcaaccttattagatacacagccacaactaagtgttccccctcggtggaccccgagcgtgtgctttggtcccttagggaccacccactgctccctgaggccgaggcctgcgtgcgtcagcacctgcctgacctgtatgcagcggctggcggtgtgaacatttgggcactggttgcagcggttgtactgctatcctcttcggtgaacgatatccaaaggttgctattttgcttgaggcggccatccagcacagttaccatgcccgacgttacagagactctgtattgtatcgctgtactgctgtacgctatgagagagaaggggatcaacatcagcaatcgcattcactacaacattttctattgtctgtacctgcaggaaaattcgtgtacacaggcaaccaaggtgaaggaagagccatccgtgtggcccggcaagaaaaccatacagttgacgcatgagcagcagctcatcttaaaccacaaaatggaacccttgcaggttgtcaaaatcatggcctttgccggcacaggcaagaccagcaccctcgtgaagtacgctgaaaaatggtcacagtctaggttcttgtatgtgacctttaacaagtcgatcgcgaagcaagctgaacgggtattcccatccaacgtaatctgcaagacttttcattctatggcttacggtcacattggtaggaagtaccagtccaaaaaaaagttgaacctttttaagctaacaccctttatggtaaattcagtcctggccgagggcaagggtgggtttatacgagccaaactcgtgtgcaagacattggagaatttcttcgcatccgccgacgaagagcttaccatagatcatgtaccgatctggtgtaaaaattctcagggccagcgcgtcatggtggagcagtccgagaaattaaacggagttctggaggcgtcccgcctgtgggataatatgagaaagttgggagagtgcaccgaggaggctcaccagatgacccacgacggatacctgaaattgtggcagctgagtaagccgagtttggcaagtttcgacgctatcttcgtagacgaggcgcaagccggtgctcgacatggcgcccactgtggtgagcatagaaccgctcccgcatag

SEQ ID NO: 312094 - DNA, 1215 bp, Artificial Sequence
  derived and/or modified sequence
atgaacgaggagcaggccgtgagcaaggtggacggcatcctgagcaactgtggcattgagaaggagtcagatttatgtgtgttaaatctcatcagatatactgccactacaaaatgtagcccaagcgtcgacccagaacgtgtcctttggagccttagagaccatccacttttgcccgaagccgaagcctgtgtgcggcagcacctacccgacctgtacgcagctgcaggcggcgttaacatctgggccttggtggctgcagtggtgctcctgtctagcagcgttaatgacatccaacggctgctgttctgcctccggaggccatcaagcacggtaacgatgcccgacgttactgagacactatattgcatagcggtcctgctgtatgccatgagggaaaaggggatcaacatatctaacagaatacattataacattttctactgtctctacctccaggagaattcttgcacccaggccactaaagtcaaagaggaaccctccgtgtggccaggaaagaagacaatccagcttacccatgagcagcagctgattctgaaccacaaaatggaaccactacaggtagtgaaaataatggcttttgcgggtactgggaagactagcacactcgtcaagtacgccgaaaagtggagtcagagccgctttctctacgtcacctttaacaaatcgatcgccaagcaggcggaacgagtgttcccctcgaacgtgatatgcaagacgtttcactctatggcgtacgggcatattgggcgaaagtaccagtcgaaaaagaaactgaacttgttcaagttgactcccttcatggtcaattctgtgcttgccgaaggtaagggcggatttatacgtgccaaactggtttgtaagactctagagaatttttttgcttctgccgatgaggaactcaccattgaccacgtgcctatctggtgcaaaaatagccaggggcaaagagtgatggtcgagcagagcgaaaagctcaacggggtgttggaagcttctaggctgtgggataatatgaggaagctgggagagtgcacggaggaggcgcatcagatgactcatgacggttatctcaagctgtggcagttgagcaaaccctccctggcctcatttgacgctatctttgtcgatgaagcccaggccggcgcccgacacggggctcactgtggcgaacacaggaccgccccggcctag

SEQ ID NO: 312095 - DNA, 1215 bp, Artificial Sequence
  derived and/or modified sequence
atgaatgaggaacaggcagtatccaaggtggacggcatcttaagcaattgcggcattgaaaaggaatccgatctctgtgtcctgaacttaattaggtacactgcaacaacgaagtgttcccccagtgtcgaccccgagcgggtgctctggtcattgagggaccatccactccttccagaagctgaagcatgcgtcagacagcaccttccggacttgtacgcagcagccggaggagtaaacatatgggcacttgtggccgctgtggtccttctgagcagttctgtcaacgacatccagaggttattgttttgtctccggcgaccctcttctaccgttaccatgcccgacgtgactgagacactctactgcatcgcggtgctgctttacgcgatgcgcgagaaggggataaacatctccaaccggatacactataacatcttttactgtctatatcttcaagagaactcctgtacgcaggctacaaaggtcaaagaggagccaagcgtctggcctggaaagaaaaccatccagctcacacatgagcagcagctcatcctgaatcataaaatggaaccccttcaagtggtcaagatcatggcttttgctgggaccggaaaaacttctacactggttaagtacgcggagaaatggtcgcagagcagattcctttatgtgaccttcaacaagagtattgcaaagcaggccgaacgggtgtttccatccaacgtcatttgcaagactttccattctatggcctacggccatatcggacgtaagtaccaaagtaagaaaaaactaaacctttttaagctgaccccattcatggtcaatagcgtcctcgcagagggcaaaggaggattcatcagggcaaagctggtgtgcaagactctcgagaacttttttgccagtgcagacgaggaactaactatagaccatgtccctatttggtgcaaaaattctcagggccagcgagtgatggttgaacagagcgagaagctcaacggcgtcctggaggccagccgtttgtgggacaacatgcgaaagctgggtgagtgcaccgaggaggctcatcaaatgacccacgatggctacctgaaactgtggcaactgtccaagccatcccttgcctctttcgacgccatctttgtggatgaagcacaagccggagccagacacggagctcactgcggtgaacataggaccgccccagcgtag

SEQ ID NO: 312096 - DNA, 1215 bp, Artificial Sequence
  derived and/or modified sequence
atgaatgaggagcaggccgtgtccaaggtcgacggcattctgtctaactgtggaatcgaaaaagaatctgacctatgtgtgctgaatcttattcggtacaccgctacaaccaagtgttcgcccagcgttgatcccgagcgcgtgttatggtccctgagagatcacccattactgccggaggcggaggcctgcgtcagacagcatctgccagacctttacgccgcagctggcggtgtgaatatctgggcactggtggccgcagtggtactgctgtcttcttctgtgaacgacatccagagactgttattctgtctgaggcgaccatcttctacagtcaccatgcctgatgtaaccgagaccttgtactgcatcgctgtattactctacgcaatgagggagaaaggtattaacatcagtaaccggattcattataacatcttttactgcctgtacctgcaggaaaacagctgcactcaggccaccaaggtcaaagaggaaccctctgtgtggcctgggaaaaaaactattcagctgacacacgaacagcagttgatcctgaatcacaaaatggagccgctgcaagtcgtgaaaataatggcgttcgccggaactggaaaaactagcaccctcgtgaaatatgcggaaaagtggtcacaatcccggtttctctacgttacatttaataaaagcatagcgaagcaggctgagcgggtatttccatcaaacgtaatctgcaaaacatttcattccatggcgtacggtcatatcggcagaaagtatcagtctaagaaaaaattgaacctctttaagctgacacctttcatggtcaactctgtgctagcggaggggaaaggcggtttcatccgcgcaaaattggtgtgtaagacactggaaaatttcttcgcctcagcggacgaggagctgactattgaccacgtaccaatctggtgcaagaatagtcagggtcagagggtgatggtcgaacagtctgagaaactgaacggcgttctcgaagcttcacgtctttgggacaatatgagaaagctaggcgaatgtaccgaagaggcgcatcaaatgactcacgacgggtatttaaagttatggcaactgtccaagccaagcttagcaagctttgacgcaatctttgttgacgaagctcaggcaggggctagacacggcgctcattgtggcgaacaccgaacagcacctgcctag

SEQ ID NO: 312097 - DNA, 1215 bp, Artificial Sequence
  derived and/or modified sequence
atgaacgaggagcaggccgtgagcaaggtggacggcatcctgagcaactgcggcatcgagaaggagagcgacctgtgcgtgctgaacctgatcagatacaccgccaccaccaagtgcagccccagcgtggaccccgagagagtgctgtggagcctgagagaccaccccctgctgcccgaggccgaggcctgcgtgagacagcacctgcccgacctgtacgccgccgccggcggcgtgaacatctgggccctggtggccgccgtggtgctgctgagcagcagcgtgaacgacatccagagactgctgttctgcctgagaagacccagcagcaccgtgaccatgcccgacgtgaccgagaccctgtactgcatcgccgtgctgctgtacgccatgagagagaagggcatcaacatcagcaacagaatccactacaacatcttctactgcctgtacctgcaggagaacagctgcacccaggccaccaaggtgaaggaggagcccagcgtgtggcccggcaagaagaccatccagctgacccacgagcagcagctgatcctgaaccacaagatggagcccctgcaggtggtgaagatcatggccttcgccggcaccggcaagaccagcaccctggtgaagtacgccgagaagtggagccagagcagattcctgtacgtgaccttcaacaagagcatcgccaagcaggccgagagagtgttccccagcaacgtgatctgcaagaccttccacagcatggcctacggccacatcggcagaaagtaccagagcaagaagaagctgaacctgttcaagctgacccccttcatggtgaacagcgtgctggccgagggcaagggcggcttcatcagagccaagctggtgtgcaagaccctggagaacttcttcgccagcgccgacgaggagctgaccatcgaccacgtgcccatctggtgcaagaacagccagggccagagagtgatggtggagcagagcgagaagctgaacggcgtgctggaggccagcagactgtgggacaacatgagaaagctgggcgagtgcaccgaggaggcccaccagatgacccacgacggctacctgaagctgtggcagctgagcaagcccagcctggccagcttcgacgccatcttcgtggacgaggcccaggccggcgccagacacggcgcccactgcggcgagcacagaaccgcccccgcctag

SEQ ID NO: 312098 - protein, 236 aa, Artificial Sequence
  derived and/or modified sequence
VDLGLLRFVTAVGTQGAISKETKKKYYVKTYKIDVSSNGEDWITIKEGNKPVLFQGNTNPTDVVVAVFPKPLITRFVRIKPATWETGISMRFEVYGCKITDYPCSGMLGMVSGLISDSQITSSNQGDRNWMPENIRLVTSRSGWALPPAPHSYINEWLQIDLGEEKIVRGIIIQGGKHRENKVFMRKFKIGYSNNGSDWKMIMDDSKRKAKVRAGDWEEVIPYVLDFNQGPLAFSR

SEQ ID NO: 312099 - DNA, 1926 bp, Artificial Sequence
  derived and/or modified sequence
atggagagaggcctgcccctgctgtgcgccgtgctggccctggtgctggcccccgccggcgccttcagaaacgacaagtgcggcgacaccatcaagatcgagagccccggctacctgaccagccccggctacccccacagctaccaccccagcgagaagtgcgagtggctgatccaggcccccgacccctaccagagaatcatgatcaacttcaacccccacttcgacctggaggacagagactgcaagtacgactacgtggaggtgttcgacggcgagaacgagaacggccacttcagaggcaagttctgcggcaagatcgcccccccccccgtggtgagcagcggccccttcctgttcatcaagttcgtgagcgactacgagacccacggcgccggcttcagcatcagatacgagatcttcaagagaggccccgagtgcagccagaactacaccacccccagcggcgtgatcaagagccccggcttccccgagaagtaccccaacagcctggagtgcacctacatcgtgttcgtgcccaagatgagcgagatcatcctggagttcgagagcttcgacctggagcccgacagcaacccccccggcggcatgttctgcagatacgacagactggagatctgggacggcttccccgacgtgggcccccacatcggcagatactgcggccagaagacccccggcagaatcagaagcagcagcggcatcctgagcatggtgttctacaccgacagcgccatcgccaaggagggcttcagcgccaactacagcgtgctgcagagcagcgtgagcgaggacttcaagtgcatggaggccctgggcatggagagcggcgagatccacagcgaccagatcaccgccagcagccagtacagcaccaactggagcgccgagagaagcagactgaactaccccgagaacggctggacccccggcgaggacagctacagagagtggatccaggtggacctgggcctgctgagattcgtgaccgccgtgggcacccagggcgccatcagcaaggagaccaagaagaagtactacgtgaagacctacaagatcgacgtgagcagcaacggcgaggactggatcaccatcaaggagggcaacaagcccgtgctgttccagggcaacaccaaccccaccgacgtggtggtggccgtgttccccaagcccctgatcaccagattcgtgagaatcaagcccgccacctgggagaccggcatcagcatgagattcgaggtgtacggctgcaagatcaccgactacccctgcagcggcatgctgggcatggtgagcggcctgatcagcgacagccagatcaccagcagcaaccagggcgacagaaactggatgcccgagaacatcagactggtgaccagcagaagcggctgggccctgccccccgccccccacagctacatcaacgagtggctgcagatcgacctgggcgaggagaagatcgtgagaggcatcatcatccagggcggcaagcacagagagaacaaggtgttcatgagaaagttcaagatcggctacagcaacaacggcagcgactggaagatgatcatggacgacagcaagagaaaggccaagagcttcgagggcaacaacaactacgacacccccgagctgagaaccttccccgccctgagcaccagattcatcagaatctaccccgagagagccacccacggcggcctgggcctgagaatggagctgctgggctgcgaggtggagggcaccatcaacaccgaccaggagtgcccctgcgccagagccctggccaaggacgccaagaagaagaagagatgggccgacagcacccactgcagatgcgtgagaagcatccacggcgagatgtggagcagcggcaagggcgtgtgcagcctggacgccaacctgtag

SEQ ID NO: 312100 - DNA, 1926 bp, Artificial Sequence
  derived and/or modified sequence
atggaacgtggcctacctctcctgtgtgcggtgcttgctcttgtgctagcacctgccggagcctttcgcaatgacaaatgcggcgacactattaagatagagagcccgggctacctgacttctcccggttacccacattcctaccatccatcggagaagtgcgaatggcttattcaggcccccgatccttatcagaggatcatgatcaactttaacccccactttgacctggaggatagagactgtaagtatgactacgtagaggttttcgacggcgagaatgagaatggccattttcgcggaaaattctgcgggaaaattgcgccaccgcctgtggtgtcttccggccccttcctcttcattaaattcgttagcgactatgagacccatggcgcggggtttagcattcggtacgaaatttttaaacgcggaccagaatgctcacaaaattacaccacaccatcaggcgtgataaaaagcccagggttcccggagaagtaccccaatagcttagagtgcacttacatcgtgttcgtccctaagatgagcgagatcattctggaatttgagagttttgacctggagccagacagcaatccccctggcggcatgttctgtagatacgacagactcgagatttgggatggcttccctgatgtaggcccgcacatcggccgttactgtggtcagaagacccccggaagaatcagaagtagcagtggaatcctgagcatggtgttctatacagacagcgccatagccaaagaagggttctccgctaactatagcgtcctccagtcaagcgtgagtgaggatttcaagtgtatggaggccctgggaatggaaagtggcgaaattcactccgaccaaattacagcatcatctcagtactctacaaattggagcgccgaacgcagtcgtctgaactaccccgagaacggttggacaccgggggaagatagctaccgggaatggatccaagtagacctcggcctgctgcgctttgttaccgctgtcgggactcagggggccatttccaaggagacgaagaagaaatactatgtaaagacctataaaatagacgtgagcagcaacggcgaagactggattacaatcaaggagggaaataagcccgtactgtttcaaggcaatacaaatcccaccgatgttgtcgtagccgtcttccctaaacccctgatcaccagatttgtgcggatcaagcccgccacctgggaaaccggaatttcaatgagattcgaagtttacggctgcaagatcaccgactacccatgttcaggaatgctcggcatggtctctgggttaataagcgattcgcagatcacatcctccaaccagggcgacagaaattggatgcctgagaacatccgcctggtcacgtcacgttccggttgggcgctaccccccgctcctcatagctatattaacgagtggctgcagatagatctcggggaagagaaaattgtacggggcattatcatccagggcggcaagcacagagaaaacaaagttttcatgcgcaagttcaaaattggatacagcaataatggttctgactggaaaatgattatggatgattctaaacgcaaggcaaaatcattcgaaggcaacaacaattatgatacacccgagctccgcacgttccctgctctgagcacaaggttcatccggatttacccagagcgagctacacatggggggctaggcttgcgcatggaactgctgggatgcgaagttgagggtacaataaacaccgaccaggagtgtccatgtgcaagagccttagcaaaagacgctaagaagaaaaagcggtgggccgattccacccactgtagatgtgtacgatctatacacggggagatgtggagcagtggcaaaggtgtctgttcattggatgccaatctctag

SEQ ID NO: 312101 - DNA, 1926 bp, Artificial Sequence
  derived and/or modified sequence
atggagcggggcctgcccctgctgtgtgctgtgctggccctggtgctggccccagctggggccttcagaaatgacaagtgtggggacaccatcaagattgagagccctggctacctgaccagccctggctacccccacagctaccaccccagcgagaagtgtgagtggctgatccaggccccagacccctaccagaggatcatgatcaacttcaacccccactttgacctggaggaccgggactgcaagtatgactatgtggaggtgtttgatggagaaaatgaaaatggccacttccggggcaagttctgtgggaagatcgcccctcctcctgtggtgagcagcggccccttcctgttcatcaagtttgtgtctgactatgagacccacggggccggcttcagcatccgctatgagatcttcaagaggggccctgagtgcagccagaactacaccaccccatctggagtcatcaagagccctggcttccctgagaagtaccccaacagcctggagtgcacctacatcgtgtttgtgcccaagatgtctgagatcatcctggagtttgagagctttgacctggagccagacagcaaccccccaggcggcatgttctgccgctatgaccggctggagatctgggatggcttcccagatgtgggcccccacatcggccgctactgcggccagaagaccccaggccgcatccgcagcagcagcggcatcctgtccatggtgttctacacagattctgccatcgccaaggagggcttcagcgccaactacagcgtgctgcagagctctgtgtctgaggacttcaagtgcatggaggccctgggcatggagagcggggagatccacagcgaccagatcacagccagcagccagtacagcaccaactggagcgctgagaggagccggctgaactacccagaaaatggctggaccccaggagaagattcctaccgggagtggatccaggtggacctgggcctgctgcgctttgtgacagctgtgggcacccagggcgccatcagcaaggagaccaagaagaagtactacgtgaagacctacaagattgatgtgagcagcaatggagaggactggatcaccatcaaggagggcaacaagcctgtgctcttccagggcaacaccaaccccacagatgtggtggtggccgtgttccccaagcccctcatcaccaggtttgtgcgcatcaagccagccacctgggagaccggcatctccatgagatttgaggtgtatggctgcaagatcacagactacccctgcagcggcatgctgggcatggtgtctggcctcatcagtgacagccagatcaccagcagcaaccagggcgacaggaactggatgcctgagaacatccggctggtgaccagccgcagcggctgggccctgcccccagccccccacagctacatcaatgagtggctgcagattgacctgggggaggagaagatcgtgcggggcatcatcatccagggcggcaagcaccgggagaacaaggtgttcatgaggaagttcaagattggctacagcaacaacggcagtgactggaagatgatcatggatgacagcaagaggaaggccaagagctttgagggcaacaacaactatgacaccccagagctgcggaccttccctgccctgagcacccgcttcatccgcatctacccagagcgggccacccatggaggcctgggcctgaggatggagctgctgggctgtgaggtggagggcaccatcaacacagaccaggagtgcccctgtgcccgggccctggccaaggatgccaagaagaagaagcgctgggccgacagcacccactgccgctgtgtgcgcagcatccacggggagatgtggagcagcggcaagggcgtgtgcagcctggatgccaacctgtag

SEQ ID NO: 312102 - DNA, 1926 bp, Artificial Sequence
  derived and/or modified sequence
atggagcggggcctgcccctgctgtgcgccgtgctggccctggtgcttgcccctgcgggggctttccgaaacgacaagtgcggcgacaccatcaagatcgaaagtcctggatacctaacatcccccgggtacccccatagttatcatccctccgagaaatgtgaatggcttatccaggcaccagatccttaccagaggatcatgatcaatttcaacccccacttcgatctcgaggaccgagattgcaagtacgactacgtagaggtcttcgatggagaaaatgaaaatgggcacttccgggggaagttttgcgggaagatcgcccctccccctgtggttagttcaggtccctttctctttatcaagttcgtatccgattatgaaacacacggcgctgggttctccatcaggtatgagatcttcaagcggggcccagaatgcagtcagaattatactactcctagcggggtgattaagtcccccggctttccggaaaaatatcctaactctcttgaatgcacgtacatcgtgttcgtgcccaaaatgtcagaaattatcctggagtttgaatcctttgacctggaacccgacagcaatcctccaggcggcatgttttgtaggtatgaccgtctggagatttgggacggattcccagatgtggggccacacattgggcggtattgtggtcaaaagacccccggtcgcattagatcttcgtccggtatcctgtcaatggtgttttacactgactctgctatcgctaaggaggggttctcagctaattattccgtacttcagtccagtgtaagtgaggattttaagtgtatggaggccctcggaatggagagtggtgagattcactccgatcaaatcaccgcaagcagtcagtattcaaccaattggagtgccgaacggtcgcgactgaattatccggaaaacggctggacccctggcgaggacagctatcgcgagtggatccaggtcgacctggggctgctgagatttgtaacggccgtgggaacacagggcgctattagcaaggagactaaaaagaaatattacgtcaagacttacaaaattgacgtgtcctccaatggtgaggattggatcactatcaaagagggaaataagccggtgctgttccaaggcaacaccaatcccacggacgtggtggtggccgtattccctaagcccctaattaccaggtttgtgcgaatcaagcccgccacctgggaaaccgggatctcaatgcgctttgaggtctacggctgtaagataactgattatccctgttccggcatgctaggcatggttagcggcctgatttcagactcacaaatcacctcttctaatcagggcgatcggaactggatgccggagaacattagattggttacctctagatcagggtgggctctgccccctgcaccgcattcttatataaatgagtggctacaaatcgatctgggagaggagaagattgtgcgtgggatcataatccagggtggtaagcatcgggagaacaaggtgtttatgcgcaagtttaagatcggctacagtaacaacggatccgactggaagatgattatggatgacagcaagcggaaggcaaaatcatttgaaggaaacaacaattacgacaccccagagctcagaacatttcctgctctgtccacccgtttcatccgaatttaccccgaaagggccacacacggaggtcttgggctccggatggagctattgggctgtgaggtcgaggggaccattaacaccgatcaagaatgcccctgcgctcgtgccctcgccaaagacgcgaagaagaagaagagatgggcagatagcacccattgtcgctgcgtgagaagcatccacggagagatgtggtcttctggcaaaggcgtttgttccctggacgcaaacctgtag

SEQ ID NO: 312103 - DNA, 2804 bp, Artificial Sequence
  derived and/or modified sequence
cttttctccaagacgggctgaggattgtacagctctaggcggagttggggctcttcggatcgcttagattctcctctttgctgcatttccccccacgtcctcgttctcccgcgtctgcctgcggacccggagaagggagaatggagagggggctgccgctcctctgcgccgtgctcgccctcgtcctcgccccggccggcgcttttcgcaacgataaatgtggcgatactataaaaattgaaagccccgggtaccttacatctcctggttatcctcattcttatcacccaagtgaaaaatgcgaatggctgattcaggctccggacccataccagagaattatgatcaacttcaaccctcacttcgatttggaggacagagactgcaagtatgactacgtggaagtcttcgatggagaaaatgaaaatggacattttaggggaaagttctgtggaaagatagcccctcctcctgttgtgtcttcagggccatttctttttatcaaatttgtctctgactacgaaacacatggtgcaggattttccatacgttatgaaattttcaagagaggtcctgaatgttcccagaactacacaacacctagtggagtgataaagtcccccggattccctgaaaaatatcccaacagccttgaatgcacttatattgtctttgtgccaaagatgtcagagattatcctggaatttgaaagctttgacctggagcctgactcaaatcctccaggggggatgttctgtcgctacgaccggctagaaatctgggatggattccctgatgttggccctcacattgggcgttactgtggacagaaaacaccaggtcgaatccgatcctcatcgggcattctctccatggttttttacaccgacagcgcgatagcaaaagaaggtttctcagcaaactacagtgtcttgcagagcagtgtctcagaagatttcaaatgtatggaagctctgggcatggaatcaggagaaattcattctgaccagatcacagcttcttcccagtatagcaccaactggtctgcagagcgctcccgcctgaactaccctgagaatgggtggactcccggagaggattcctaccgagagtggatacaggtagacttgggccttctgcgctttgtcacggctgtcgggacacagggcgccatttcaaaagaaaccaagaagaaatattatgtcaagacttacaagatcgacgttagctccaacggggaagactggatcaccataaaagaaggaaacaaacctgttctctttcagggaaacaccaaccccacagatgttgtggttgcagtattccccaaaccactgataactcgatttgtccgaatcaagcctgcaacttgggaaactggcatatctatgagatttgaagtatacggttgcaagataacagattatccttgctctggaatgttgggtatggtgtctggacttatttctgactcccagatcacatcatccaaccaaggggacagaaactggatgcctgaaaacatccgcctggtaaccagtcgctctggctgggcacttccacccgcacctcattcctacatcaatgagtggctccaaatagacctgggggaggagaagatcgtgaggggcatcatcattcagggtgggaagcaccgagagaacaaggtgttcatgaggaagttcaagatcgggtacagcaacaacggctcggactggaagatgatcatggatgacagcaaacgcaaggcgaagtcttttgagggcaacaacaactatgatacacctgagctgcggacttttccagctctctccacgcgattcatcaggatctaccccgagagagccactcatggcggactggggctcagaatggagctgctgggctgtgaagtggaaggcactatcaacacagaccaagaatgtccatgtgccagggctttggcaaaggatgccaagaaaaagaagagatgggcagactccactcactgcagatgcgttcgttcaattcacggagaaatgtggtcatctggaaaaggagtctgctccctggatgcgaatctgtagcctggattctggaaggcgatgctgatttaggaggtggagtgaatggagaattgaaaagacagcctggtggcagttttgaaagcacgcttgcaaaaattgtaatgagaacatgatgacagtgaaagagatctgacctaactgactccatcttgcttctaacctccaagctgtccttgttcattcctgggcataggccaaactaactttaggaggaacttatagtttaactttgaaacaaagacaatgacagctctttcccaaaacaaacccccttcctgcctggggactagattgccttcgcaagactaacaaattagccacaaaattggaaattatggtttagggggaaaaaaatgaaattatggtttaggggtcatgcagctggaggctgcaagactctgaacctccccaaattgcttctgggaataatgtcactgttgtaaaacctgagatcagtgcttcagatattttccagaccctgtacttgatggatcagctggcaccacccagatcgataaactggctcatcctgtcttgtgtccctcaccagaaactgactcagcacaagaggacacctttgactccctgtgatttcacctcagacctgaccaatgagcacctgccccttttcaacccctgctcaacaaattacccttcaaaacctaaaccccaagtaataatagaacccccatctcccatacagttgtctctgcatgaattaaactctttctctattgc

SEQ ID NO: 312104 - DNA, 1110 bp, Artificial Sequence
  derived and/or modified sequence
atggagagggggctgccgctcctctgcgccgtgctcgccctcgtcctcgccccggccggcgcttttcgcaacgataaatgtggcgatactataaaaattgaaagccccgggtaccttacatctcctggttatcctcattcttatcacccaagtgaaaaatgcgaatggctgattcaggctccggacccataccagagaattatgatcaacttcaaccctcacttcgatttggaggacagagactgcaagtatgactacgtggaagtcttcgatggagaaaatgaaaatggacattttaggggaaagttctgtggaaagatagcccctcctcctgttgtgtcttcagggccatttctttttatcaaatttgtctctgactacgaaacacatggtgcaggattttccatacgttatgaaattttcaagagaggtcctgaatgttcccagaactacacaacacctagtggagtgataaagtcccccggattccctgaaaaatatcccaacagccttgaatgcacttatattgtctttgtgccaaagatgtcagagattatcctggaatttgaaagctttgacctggagcctgactcaaatcctccaggggggatgttctgtcgctacgaccggctagaaatctgggatggattccctgatgttggccctcacattgggcgttactgtggacagaaaacaccaggtcgaatccgatcctcatcgggcattctctccatggttttttacaccgacagcgcgatagcaaaagaaggtttctcagcaaactacagtgtcttgcagagcagtgtctcagaagatttcaaatgtatggaagctctgggcatggaatcaggagaaattcattctgaccagatcacagcttcttcccagtatagcaccaactggtctgcagagcgctcccgcctgaactaccctgagaatgggtggactcccggagaggattcctaccgagagtggatacaggatgcaaaatacagactccgtgtatcagtggtgcgatcaaaatcttcctcttcaagcacatcattagaacccaggccattaagctcattgaaactgagtttcttttcctataaaataaaaataacgtag

SEQ ID NO: 312105 - DNA, 1926 bp, Artificial Sequence
  derived and/or modified sequence
atggaaagaggtctgccacttctgtgtgcagttctggcactggttctggctccagctggcgctttccggaacgacaaatgcggggatactatcaagattgaaagccctggctacctgacctctccaggatacccacactcataccatccatctgaaaagtgcgagtggttgattcaagcgccagacccctatcagcggatcatgataaatttcaatccacattttgatctagaggatagggactgtaagtatgactacgtggaagtttttgacggcgagaacgaaaacggccacttcagggggaaattttgtgggaaaatcgcccctccacccgtcgtgtccagcggcccttttttattcatcaagttcgtctctgactatgagacgcacggggctgggttctccattcgatacgaaatttttaagcgcggtccagaatgctctcagaattacacaacaccttccggcgttatcaaaagccctggtttcccagagaagtatcctaatagccttgagtgtacttatatagtgttcgtacccaagatgtcagaaatcatactggagttcgaatcatttgacctagagccagactcaaatcccccaggcggtatgttctgtcggtatgataggctggaaatatgggacggattcccagacgtgggacctcacatcggccgatattgtggacagaaaacccccggacgcataaggagctccagcggtatcctgagcatggtcttctacactgatagcgcgatcgccaaagaaggcttctctgcaaactactctgtactccagagctccgtaagtgaagatttcaagtgtatggaagccttgggtatggaaagcggggaaatccatagcgatcaaattacagcctccagtcagtatagcactaattggagtgctgaacggagcaggctgaattatccagaaaatggctggactcccggagaagatagttaccgcgagtggattcaggttgacctgggcctgttgagatttgtcacggccgtgggaactcagggcgctatatcgaaagaaacaaagaaaaaatattatgtaaagacctataagattgacgtctcgtctaacggcgaggattggattacgatcaaagagggtaataaacctgttctgttccagggtaacaccaaccctactgatgtcgtggtggcagtgttcccgaaacccctgattacaaggtttgtgagaatcaaaccggcaacctgggaaaccggcatttccatgcggtttgaagtttacgggtgcaaaatcacagactacccatgtagtggtatgctgggtatggtgtcagggttgatttctgacagtcaaatcacaagctctaaccagggggaccgaaactggatgcccgagaacatacgcctggtgacgagcagatctgggtgggcactccccccagccccacatagctatattaacgaatggctacagatcgacttaggggaggagaagatagttcgcggaatcattattcagggtggcaagcacagagagaataaggtattcatgcgcaagtttaaaattggatactctaataatggtagcgactggaagatgatcatggacgacagcaagcggaaagccaaatcttttgagggaaacaacaattacgacacacctgagctgagaaccttccccgcattgtctactagatttatccgtatctatcccgagagggccacgcacggtggcctgggtttgcggatggaattgcttggatgcgaagtggaaggcactattaatactgaccaagagtgcccatgcgcccgagctttggcaaaagacgctaagaaaaaaaagcgttgggctgattcaactcactgccgctgcgtgaggtcgattcatggcgagatgtggagtagtgggaagggcgtttgtagtctagatgccaacctttag

SEQ ID NO: 312106 - DNA, 1944 bp, Artificial Sequence
  derived and/or modified sequence
gacggactccggcggaatggggggtgtggctgctccgccagggtccccagggtgggagagcggctccgcggccaccgatgcccggaccccctctgtcttctgctagacatgctcttcctctcggtgagttgttttgctgtcgtcgcgggccggattcgtgaccttagtcacgccccgggggaggaggaaggagccgggccgcttcgatctgtgtggcctggatagggcagggcaaaggggaactgacccgcttcgctcccgggcctcctccttttggggcatgttgatccgcggctgcgctccatgttccagtttcatgcaggctcttgggaaagctggtgctgctgctgcctgattcccgccgacagaccttgggaccggggccaacactggcagctggagatggcggacacgagatccgtgcacgagactaggtttgaggcggccgtgaaggtgatccagagtttgccgaagaatgggatgcttggagttcactgggtgatatgaccaaagaggaagccatgattgcatatgttgaagaaatgaaaaagattattgaaactatgccaatgactgagaaagttgaagaattgctgcgtgtcataggtccattttatgaaattgtcgaggacaaaaagagtggcaggagttctgatataacctcagatcttggtaatgttctcacttctactccaaacgccaaaaccgttaatggtaaagctgaaagcagtgacagtggagccgagtctgaggaagaagaggcccaagaagaagtgaaaggagcagaacaaagtgataatgatataaatgatgatcatgttgaagatgttacaggaattcagcatttgacaagcgattcagacagtgaagtttactgtgattctatggaacaatttggacaagaagagtctttagacagctttacgtccaacaatggaccatttcagtattacttgggtggtcattccagtcaacccatggaaaattctggatttcgtgaagatattcaagtacctcctggaaatggcaacattgggaatatgcaggtggttgcagttgaaggaaaaggtgaagtcaagcatggaggagaagatggcaggaataacagcggagcaccacaccgggagaagcgaggcggagaaactgacgaattctctaatgttagaagaggaagaggacataggatgcaacacttgagcgaaggaaccaagggccggcaggtgggaagtggaggtgatggggagcgctggggctccgacagagggtcccgaggcagcctcaatgagcagatcgccctcgtgctgatgagactgcaggaggacatgcagaatgtccttcagagactgcagaaactggaaacgctgactgctttgcaggcaaaatcatcaacatcaacattgcagactgctcctcagcccacctcacagagaccatcttggtggcccttcgagatgtctcctggtgtgctaacgtttgccatcatatggccttttattgcacagtggttggtgtatttatactatcaaagaaggagaagaaaactgaactgaggaaaatggtgttttcctcaagaagactactggaactggatgacctcagaatgaactggattgtggtgttcacaagaaaatcttagtttgtgatgattacattgctttttgttgtccagtagtttagtttgtgtacatatatacacatatatattttgcactacacaaacgataacattttaaggactaatattgctgatacttgaataatcaatctctactaggttataagtagtatacacagatttaccctgcccttgaacttgaaggacattaaattattaatgatcatttggtaacatgtttacctgattatcttccatagagtaacataagctgcttttcaaaggtaccattgtgataatgagatcaaatttataagttattattttta

SEQ ID NO: 312107 - DNA, 1318 bp, Artificial Sequence
  derived and/or modified sequence
agggcgatgttgacagacagacagaggggcggatgcagcctacctcctgggcagtgagctgcggtctgaggcccctgcccagctggaaaccacagggaggggaagggaggggaggagaggagaggagaggaaccgtcatggggccttggagtcgagtcagggttgccaaatgccagatgctggtcacctgcttctttatcttgctgctgggcctctctgtggccaccatggtgactcttacctacttcggggcccactttgctgtcatccgccgagcgtccctggagaagaacccgtaccaggctgtgcaccaatgggccttctctgcggggttgagcctggtgggcctcctgactctgggagccgtgctgagcgctgcagccaccgtgagggaggcccagggcctcatggcagggggcttcctgtgcttctccctggcgttctgcgcacaggtgcaggtggtgttctggagactccacagccccacccaggtggaggacgccatgctggacacctacgacctggtatatgagcaggcgatgaaaggtacgtcccacgtccggcggcaggagctggcggccatccaggacgtgtttctgtgctgtgggaagaagtctcctttcagccgtctggggagcacagaggctgacctgtgtcagggagaggaggcggcgagagaggactgccttcagggcatccggagcttcctgaggacacaccagcaggtcgcctccagcctgaccagcatcggcctggccctcacggtgtccgccttgctcttcagctccttcctgtggtttgccatccgctgtggctgcagcttggaccgcaagggcaaatacaccctgaccccacgagcatgtggccgccagccccaggagcccagcctcttgagatgctcccagggtggacccacacattgtctccactccgaagcagttgctattggtccaagaggatgctcgggtagtcttcggtggctgcaggagagcgatgctgcgcctctgcccctctcctgccacctggctgcccacagagctctccagggcagaagtcgcggtgggctcagtgggtgccctgagcggggtctctcagactgacgtcaggccttggtgggctgcactctcacctggaggctccggggaagcatctgcctccaggaccattcaggctgttgacaagtcaactcctcatggctgtaggactgaggttcccaagtccttgtccctggtcctgtggtccctccaccttcaaaccagcaatggtgcattgagcaaattgtggtcaaatatacatcacatcaaatttaccatcttaa

SEQ ID NO: 312108 - protein, 253 aa, Artificial Sequence
  derived and/or modified sequence
MGPWSRVRVAKCQMLVTCFFILLLGLSVATMVTLTYFGAHFAVIRRASLEKNPYQAVHQWAFSAGLSLVGLLTLGAVLSAAATVREAQGLMAGGFLCFSLAFCAQVQVVFWRLHSPTQVEDAMLDTYDLVYEQAMKGTSHVRRQELAAIQDVFLCCGKKSPFSRLGSTEADLCQGEEAAREDCLQGIRSFLRTHQQVASSLTSIGLALTVSALLFSSFLWFAIRCGCSLDRKGKYTLTPRSPGQKSRWAQWVP

SEQ ID NO: 312109 - DNA, 762 bp, Artificial Sequence
  derived and/or modified sequence
atgggcccctggagcagagtgagagtggccaagtgccagatgctggtgacctgcttcttcatcctgctgctgggcctgagcgtggccaccatggtgaccctgacctacttcggcgcccacttcgccgtgatcagaagagccagcctggagaagaacccctaccaggccgtgcaccagtgggccttcagcgccggcctgagcctggtgggcctgctgaccctgggcgccgtgctgagcgccgccgccaccgtgagagaggcccagggcctgatggccggcggcttcctgtgcttcagcctggccttctgcgcccaggtgcaggtggtgttctggagactgcacagccccacccaggtggaggacgccatgctggacacctacgacctggtgtacgagcaggccatgaagggcaccagccacgtgagaagacaggagctggccgccatccaggacgtgttcctgtgctgcggcaagaagagccccttcagcagactgggcagcaccgaggccgacctgtgccagggcgaggaggccgccagagaggactgcctgcagggcatcagaagcttcctgagaacccaccagcaggtggccagcagcctgaccagcatcggcctggccctgaccgtgagcgccctgctgttcagcagcttcctgtggttcgccatcagatgcggctgcagcctggacagaaagggcaagtacaccctgacccccagaagccccggccagaagagcagatgggcccagtgggtgccctag

SEQ ID NO: 312110 - DNA, 762 bp, Artificial Sequence
  derived and/or modified sequence
atggggccttggagccgcgtccgggtcgccaagtgccagatgctggtgacctgtttttttattctgctactggggctgtccgtcgctaccatggtgacgctcacttacttcggggcacatttcgctgttatccgaagggcctctctggagaagaatccctaccaggctgtgcaccagtgggccttctccgcaggtctgtcactagttgggcttctcacactgggcgcagtgcttagtgccgcagccactgtcagggaagcccagggcctgatggcgggaggctttctctgcttctcccttgctttttgcgctcaagtgcaggtggttttttggcgcctccacagcccgacccaggtggaagatgcgatgttagacacttacgatctggtgtatgaacaggccatgaaaggaacaagtcacgtacggcgacaggaactggcggctattcaggacgtgtttctctgttgcggcaagaaatcacccttctcacggctgggatcgaccgaagctgatctctgccaaggggaggaagcggctcgggaggactgcttgcaggggattagaagcttcttaaggacgcaccagcaagttgcttccagtttaacctctataggcctcgctctgacagtgtcagctttgttattctcaagtttcctctggttcgccattaggtgtggctgctctttggaccgcaaaggaaaatacaccttgactcctcgaagccctggccagaagtccaggtgggcccaatgggtgccctag

SEQ ID NO: 312111 - DNA, 762 bp, Artificial Sequence
  derived and/or modified sequence
atgggcccctggagccgggtgcgggtggccaagtgccagatgctggtgacctgcttcttcatcctgctgctgggcctgtctgtggccaccatggtgaccctgacctactttggagcccactttgctgtgatcagaagagccagcctggagaagaacccctaccaggccgtgcaccagtgggccttctctgctggcctgagcctggtgggcctgctgaccctgggcgctgtgctgtctgctgctgccaccgtgcgggaggcccagggcctgatggccggcggcttcctgtgcttcagcctggccttctgtgcccaggtgcaggtggtgttctggaggctgcacagccccacccaggtggaggatgccatgctggacacctatgacctggtgtatgagcaggccatgaagggcaccagccacgtgcggcggcaggagctggccgccatccaggatgtgttcctgtgctgcggcaagaagagccccttcagccggctgggcagcacagaggccgacctgtgccagggcgaggaggccgcccgggaggactgcctgcagggcatccgctccttcctgcggacccaccagcaggtggccagcagcctgaccagcatcggcctggccctgactgtgtctgccctgctcttcagcagcttcctgtggtttgccatccgctgtggctgcagcctggacaggaagggcaagtacaccctgacccccaggagccctggccagaagagccgctgggcccagtgggtgccctag

SEQ ID NO: 312112 - DNA, 762 bp, Artificial Sequence
  derived and/or modified sequence
atgggcccctggagccgggtgcgggtggccaagtgccagatgctggtcacctgcttcttcatactactgctggggttgtctgtggctacaatggtcacccttacctactttggggcgcattttgctgtaattcgcagggcctctttggagaagaacccttaccaggccgtgcatcagtgggccttctctgccggtctgtcactcgttggcctccttacactgggcgcagttttgtccgccgccgcaactgttcgcgaggcccaaggcctcatggccggcggattcctctgcttcagccttgctttctgtgcccaggtgcaggtcgtgttttggaggttacactctccaacacaggtagaagatgcgatgcttgatacatatgatcttgtgtacgaacaggcaatgaaggggacttcccatgtgagacgacaggaactggccgcaattcaggacgtcttcctgtgttgtggtaaaaagagcccattttctcgtctggggtccaccgaagccgatttgtgccagggggaggaggctgcacgtgaagattgtctgcaggggatccgctcatttctgcggacccaccaacaggtggcatcatcgcttacatccatcgggcttgccctcactgtcagcgctctcctcttcagctcattcctctggtttgccattcggtgtggatgttctcttgaccgtaaggggaagtatactctgactcctagatcccctggacaaaaaagtaggtgggcccagtgggtgccctag

SEQ ID NO: 312113 - DNA, 762 bp, Artificial Sequence
  derived and/or modified sequence
atgggaccttggtcaagggtgcgcgtggccaagtgtcagatgcttgttacatgctttttcattctgctcttgggcctgagtgttgctacgatggtgacactgacatactttggcgctcactttgccgtgattcgcagggcaagcctagagaaaaacccgtaccaagctgtacatcagtgggccttttcggctggattgtccctagttggccttctgaccctgggcgcagtactcagtgcagctgctacagtgcgtgaagcccagggcttgatggccggtggattcctgtgctttagtcttgcattctgtgctcaggtacaagtggtattctggcggctgcactctcctactcaggtggaagacgctatgctggacacttatgatctcgtgtatgagcaggcaatgaaaggaacgtctcatgtgcgccgacaagagttagcagctatccaggacgtgttcctgtgctgcggaaaaaagagtccgtttagtaggttggggtccaccgaggctgatctgtgtcagggcgaggaggccgcacgcgaagactgcctgcagggaatacggagttttctgcgtactcatcagcaggtggcgagttccctgacctcaattggcctcgctttaaccgtgtcggctctactcttttcttcgtttctctggttcgccattcggtgtggctgcagcctggatcgcaagggtaagtatacgctcactccacggtccccgggacagaagagcagatgggcacagtgggtaccttag

SEQ ID NO: 312114 - DNA, 999 bp, Artificial Sequence
  derived and/or modified sequence
atggggccttggagtcgagtcagggttgccaaatgccagatgctggtcacctgcttctttatcttgctgctgggcctctctgtggccaccatggtgactcttacctacttcggggcccactttgctgtcatccgccgagcgtccctggagaagaacccgtaccaggctgtgcaccaatgggccttctctgcggggttgagcctggtgggcctcctgactctgggagccgtgctgagcgctgcagccaccgtgagggaggcccagggcctcatggcagggggcttcctgtgcttctccctggcgttctgcgcacaggtgcaggtggtgttctggagactccacagccccacccaggtggaggacgccatgctggacacctacgacctggtatatgagcaggcgatgaaaggtacgtcccacgtccggcggcaggagctggcggccatccaggacgtgtttctgtgctgtgggaagaagtctcctttcagccgtctggggagcacagaggctgacctgtgtcagggagaggaggcggcgagagaggactgccttcagggcatccggagcttcctgaggacacaccagcaggtcgcctccagcctgaccagcatcggcctggccctcacggtgtccgccttgctcttcagctccttcctgtggtttgccatccgctgtggctgcagcttggaccgcaagggcaaatacaccctgaccccacgctctccagggcagaagtcgcggtgggctcagtgggtgccctgagcggggtctctcagactgacgtcaggccttggtgggctgcactctcacctggaggctccggggaagcatctgcctccaggaccattcaggctgttgacaagtcaactcctcatggctgtaggactgaggttcccaagtccttgtccctggtcctgtggtccctccaccttcaaaccagcaatggtgcattgagcaaattgtggtcaaatatacatcacatcaaatttaccatcttaa

SEQ ID NO: 312115 - protein, 1215 aa, Artificial Sequence
  derived and/or modified sequence
MASQVLVYPPYVYQTQSSAFCSVKKLKVEPSSCVFQERNYPRTYVNGRNFGNSHPPTKGSAFQTKIPFNRPRGHNFSLQTSAVVLKNTAGATKVIAAQAQQAHVQAPQIGAWRNRLHFLEGPQRCGLKRKSEELDNHSSAMQIVDELSILPAMLQTNMGNPVTVVTATTGSKQNCTTGEGDYQLVQHEVLCSMKNTYEVLDFLGRGTFGQVVKCWKRGTNEIVAIKILKNHPSYARQGQIEVSILARLSTENADEYNFVRAYECFQHRNHTCLVFEMLEQNLYDFLKQNKFSPLPLKVIRPILQQVATALKKLKSLGLIHADLKPENIMLVDPVRQPYRVKVIDFGSASHVSKTVCSTYLQSRYYRAPEIILGLPFCEAIDMWSLGCVIAELFLGWPLYPGALEYDQIRYISQTQGLPGEQLLNVGTKSTRFFCKETDMSHSGWRLKTLEEHEAETGMKSKEARKYIFNSLDDVAHVNTVMDLEGSDLLAEKADRREFVSLLKKMLLIDADLRITPAETLNHPFVNMKHLLDFPHSNHVKSCFHIMDICKSHLNSCDTNNHNKTSLLRPVASSSTATLTANFTKIGTLRSQALTTSAHSVVHHGIPLQAGTAQFGCGDAFQQTLIICPPAIQGIPATHGKPTSYSIRVDNTVPLVTQAPAVQPLQIRPGVLSQTWSGRTQQMLVPAWQQVTPLAPATTTLTSESVAGSHRLGDWGKMISCSNHYNSVMPQPLLTNQITLSAPQPVSVGIAHVVWPQPATTKKNKQCQNRGILVKLMEWEPGREEINAFSWSNSLQNTNIPHSAFISPKIINGKDVEEVSCIETQDNQNSEGEARNCCETSIRQDSDSSVSDKQRQTIIIADSPSPAVSVITISSDTDEEETSQRHSLRECKGSLDCEACQSTLNIDRMCSLSSPDSTLSTSSSGQSSPSPCKRPNSMSDEEQESSCDTVDGSPTSDSSGHDSPFAESTFVEDTHENTELVSSADTETKPAVCSVVVPPVELENGLNADEHMANTDSICQPLIKGRSAPGRLNQPSAVGTRQQKLTSAFQQQHLNFSQVQHFGSGHQEWNGNFGHRRQQAYIPTSVTSNPFTLSHGSPNHTAVHAHLAGNTHLGGQPTLLPYPSSATLSSAAPVAHLLASPCTSRPMLQHPTYNISHPSGIVHQVPVGLNPRLLPSPTIHQTQYKPIFPPHSYIAASPAYTGFPLSPTKLSQYPYM

SEQ ID NO: 312116 - protein, 76 aa, Artificial Sequence
  derived and/or modified sequence
MASQVLVYPPYVYQTQSSAFCSVKKLKVEPSSCVFQERNYPRTYVNGRNFGNSHPPTKGSAFQTKIPFNRPRGHNF

SEQ ID NO: 312117 - DNA, 3648 bp, Artificial Sequence
  derived and/or modified sequence
atggcgtcgcaagtgctggtatatccaccctacgtttatcagactcagtcctcagctttctgcagtgttaaaaaactcaaggttgagcccagtagttgcgtgttccaagaacgaaactacccacgcacgtacgtgaacggccgaaacttcggtaatagtcacccccccactaaggggtctgcttttcaaactaaaatccctttcaacagaccacggggccacaatttctcccttcaaaccagcgcggtcgtgctgaagaacacagcaggcgcaaccaaggtcatcgcagcacaggctcagcaggctcacgtgcaggcacctcaaattggcgcctggcgaaaccggttgcatttcctggagggccctcagcggtgtggcctgaaacgaaagtccgaagagctggataaccattcctctgccatgcaaattgtggacgagctatctatccttcctgccatgctacaaacaaacatgggcaacccggtgactgtagtcaccgccaccacagggtcgaaacagaactgcactaccggcgaaggtgattaccagctggttcagcacgaagtgttgtgctctatgaagaatacgtatgaggtcctcgattttcttgggaggggcacattcggacaagtggtgaagtgctggaaacgaggaactaacgagatcgtggcaattaaaattcttaagaaccacccgtcatatgcccgccagggccaaatcgaggtgtcaatcctggcccgactgtcaaccgagaacgccgacgaatacaattttgtgagagcatatgagtgcttccaacatagaaatcacacttgtttagtcttcgaaatgctggaacagaatctttacgacttcctcaaacagaacaagttctcacctctcccacttaaggtgatccgccccatcctgcagcaggttgcaaccgcgctgaagaagctgaagtcattagggctgatacacgccgatctcaagcctgagaacattatgctggtagaccccgttaggcaaccctaccgggtgaaagttatcgacttcggctcagctagtcatgtttcaaagaccgtttgtagcacatatttgcagagccgatactatagggcccctgagatcatcctcgggctccctttctgtgaagccatcgacatgtggtcgctgggatgtgtcatcgcagagctgtttctggggtggccactctacccaggtgccttagaatatgatcagatacgctacatatcacagacccagggcctacccggtgagcagctgctgaatgtgggaacaaagtcaactagattcttctgcaaagagaccgacatgtcccacagtggctggagactgaaaactctggaggagcatgaggccgagaccggtatgaagtctaaggaggctagaaaatacatatttaatagcctggacgatgtggctcatgttaatactgttatggaccttgagggcagcgacctccttgccgagaaggcagaccgtagagagtttgtctccctgttaaagaaaatgctgttgatagacgctgacctgcgtattacacctgctgagacactcaaccatcctttcgttaatatgaaacacctgctggattttccccactccaaccacgttaaatcttgtttccacatcatggacatctgcaagtctcacttgaattcctgtgacacaaacaaccacaataaaactagcttgctccgtcctgtagcgagctcttccactgccaccctgacagccaacttcactaaaataggcacattgcgaagtcaggccctgaccactagcgctcattctgtcgttcaccacggtattccccttcaggccgggaccgctcaattcggctgcggggatgcattccagcagacgctcataatttgcccccccgctatacagggtatacccgcgactcacggaaagcccaccagctactccattcgagtggacaatacagttccacttgtgactcaggcccctgccgtgcagcccctgcaaatcagacctggtgttttatcccaaacgtggtctggccgtacccagcagatgcttgtgccagcctggcagcaagttactcctctggcccctgccactacaacgctgacgtctgagagcgttgcgggctctcataggctgggtgactggggaaagatgataagctgttccaaccactacaatagcgttatgcctcagcctctcctgactaatcagattacattatcagcgccccagcctgtatccgtaggaatagcacatgtggtttggccacagccagccacaaccaaaaagaacaagcaatgccaaaatagaggaatcttggtaaagttgatggaatgggagcccgggcgggaggagattaatgcattttcctggagcaactccctgcaaaataccaacattccacactccgccttcattagccccaagatcattaacggaaaggatgtggaggaagtttcctgtatagagacacaggacaaccagaatagcgagggagaagcacgtaattgctgcgagacatccatcaggcaagattctgactcctcggtgtccgataagcaaaggcaaactatcatcatcgctgactcccccagcccagctgtgtcagtgattaccatcagttccgacaccgacgaagaagagaccagtcaaagacatagcctgcgggagtgtaaaggctctctggattgcgaagcctgccagagtaccctgaatatcgacagaatgtgctctctgagcagccccgactctacgctctctactagttcaagcggtcagagctctccctcaccttgtaaacggcctaattctatgtctgacgaggagcaagagtcaagctgcgatactgtagatggcagccctacctcagactcatctggacacgatagcccttttgccgagagcacattcgtggaggacacgcatgaaaatacagaactggtttcttctgccgacacggaaactaagcccgcagtttgttctgtcgtcgtgccccccgtggagctagagaatggtctgaatgccgatgaacacatggccaacaccgactcaatatgccaacctttgattaagggccgttcagcccccgggaggctgaatcagcccagtgctgtgggtacacggcaacagaaactcaccagtgcgttccagcaacagcacctgaacttttcgcaggtgcagcattttggatcaggtcaccaggagtggaatggcaattttggccaccgccgacagcaggcatacattcctacaagtgttacctctaatccttttacgttgtcccatggatccccaaaccatacagctgtgcacgcacatctggcgggaaacacccacttgggaggccaacctaccctgctcccttatccctctagcgccacattgagttccgccgcgccagtcgcacacctgctcgccagtccttgtacctcccggcccatgttgcagcacccaacctataacatttcccacccatctggaatagtccaccaggtccccgtgggtctcaacccgcgcttgcttccctctcccaccatccaccaaacccaatacaagcccatcttcccaccacattcttacatcgccgcctcgccggcgtacacagggttccccctatcacctacaaagctgtcacagtatccctacatgtag

SEQ ID NO: 312118 - DNA, 231 bp, Artificial Sequence
  derived and/or modified sequence
atggcaagtcaggttctcgtgtaccccccttatgtatatcagacacagagtagtgcattctgcagcgtcaagaaactgaaggtcgagcctagctcttgcgtgttccaggagcggaattaccctagaacatacgtcaacgggagaaattttggcaacagccatcctccaacaaaaggttctgcttttcaaacaaagatccctttcaataggccgcgcggccataacttttag

SEQ ID NO: 312119 - DNA, 7408 bp, Artificial Sequence
  derived and/or modified sequence
cctcgccctagccaagccgtccccaccccaaatccccgggaaggaagatgagggagacgggcccggcgcttagcagccagagcagcagcagcagcagcagcggtcgggggagggtgtttcgccgtttcctctcagccgccaggacaagatggcagcggccgcggagaggggctgagcccgggctgggtggtgccgcctgctgaagcgcctggctcccggtccccggcacggccctgcgccccaccccggacatgctcagggctgcggccgcccgaagaggagagagcgcgggcctctaggaaggtatggcctcacaagtcttggtctacccaccatatgtttatcaaactcagtcaagtgccttttgtagtgtgaagaaactcaaagtagagccaagcagttgtgtattccaggaaagaaactatccacggacctatgtgaatggtagaaactttggaaattctcatcctcccactaagggtagtgcttttcagacaaagataccatttaatagacctcgaggacacaacttttcattgcagacaagtgctgttgttttgaaaaacactgcaggtgctacaaaggtcatagcagctcaggcacagcaagctcacgtgcaggcacctcagattggggcgtggcgaaacagattgcatttcctagaaggcccccagcgatgtggattgaagcgcaagagtgaggagttggataatcatagcagcgcaatgcagattgtcgatgaattgtccatacttcctgcaatgttgcaaaccaacatgggaaatccagtgacagttgtgacagctaccacaggatcaaaacagaattgtaccactggagaaggtgactatcagttagtacagcatgaagtcttatgctccatgaaaaatacttacgaagtccttgattttcttggtcgaggcacgtttggccaggtagttaaatgctggaaaagagggacaaatgaaattgtagcaatcaaaattttgaagaatcatccttcttatgcccgtcaaggtcaaatagaagtgagcatattagcaaggctcagtactgaaaatgctgatgaatataactttgtacgagcttatgaatgctttcagcaccgtaaccatacttgtttagtctttgagatgctggaacaaaacttgtatgactttctgaaacaaaataaatttagtcccctgccactaaaagtgattcggcccattcttcaacaagtggccactgcactgaaaaaattgaaaagtcttggtttaattcatgctgatctcaagccagagaatattatgttggtggatcctgttcggcagccttacagggttaaagtaatagactttgggtcggccagtcatgtatcaaagactgtttgttcaacatatctacaatctcggtactacagagctccagagattatattggggttgccattttgtgaagccatagacatgtggtcattgggatgtgtgattgcagaattatttcttggatggccgctctacccaggagccttggagtatgatcagattcgatacatttctcagactcaaggtttgccaggagaacagttgttaaatgtgggtactaaatccacaagatttttttgcaaagaaacagatatgtctcattctggttggagattaaagacattggaagagcatgaggcagagacaggaatgaagtctaaagaagccagaaaatacattttcaacagtctggatgatgtagcgcatgtgaacacagtgatggatttggaaggaagtgatcttttggctgagaaagctgatagaagagaatttgttagtctgttgaagaaaatgttgctgattgatgcagatttaagaattactccagctgagaccctgaaccatccttttgttaatatgaaacatcttctagatttccctcatagcaaccatgtaaagtcctgttttcatattatggatatttgtaagtcccacctaaattcatgtgacacaaataatcacaacaaaacttcacttttaagaccagttgcttcaagcagtactgctacactgactgcaaattttactaaaatcggaacattaagaagtcaggcattgaccacatctgctcattcagttgtgcaccatggaatacctctgcaggcaggaactgctcagtttggttgtggtgatgcttttcagcagacattgattatctgtcccccagctattcaaggtattcctgcaacacatggtaaacccaccagttattcaataagggtagataatacagttccacttgtaactcaggccccagctgtgcagccactacagatccgaccaggagttctttctcagacgtggtctggtagaacacagcagatgctggtgcctgcctggcaacaggtgacacccctggctcctgctactactacactaacttctgagagtgtggctggttcacacaggcttggagactgggggaagatgatttcatgcagcaatcattataactcagtgatgccgcagcctcttctgaccaatcagataactttatctgcccctcagccagttagtgtggggattgcacatgttgtctggcctcagcctgccactaccaagaaaaataaacagtgccagaacagaggtattttggtaaaactaatggaatgggagccaggaagagaggaaataaatgctttcagttggagtaattcattacagaataccaatatcccacattcagcatttatttctccaaagataattaatgggaaagatgtcgaggaagtaagttgtatagaaacacaggacaatcagaactcagaaggagaggcaagaaattgctgtgaaacatctatcagacaggactctgattcatcagtttcagacaaacagcggcaaaccatcattattgccgactccccgagtcctgcagtgagtgtcatcactatcagcagtgacactgatgaggaagagacttcccagagacattcactcagagaatgtaaaggtagtctagattgtgaagcttgccagagcactttgaatattgatcggatgtgttcattaagtagtcctgatagtactctgagtaccagctcctcagggcagtccagcccatccccctgcaagagaccgaatagtatgtcagatgaagagcaagaaagtagttgtgatacggtggatggctctccgacatctgactcttccgggcatgacagtccatttgcagagagcacttttgtggaggacactcatgaaaacacagaattggtatcctctgctgacacagaaaccaagccagctgtctgttctgttgtggtgccaccagtggaactagaaaatggcttaaatgccgatgagcatatggcaaacacagattctatatgccagccattaataaaaggacgatctgcccctggaagattaaaccagccttctgcagtgggtactcgtcagcaaaaattgacatcagcattccagcagcagcatttgaacttcagtcaggttcagcactttggatctgggcatcaagagtggaatggaaactttgggcacagaagacagcaagcttatattcctactagtgttaccagtaatccattcactctttctcatggaagtcccaatcacacagcagtgcatgcccacctggctggaaatacacacctcggaggacagcctactctacttccatacccatcatcagccaccctcagtagtgctgcaccagtggcccacctgttagcctctccgtgtacctcaagacctatgttacagcatccaacttataatatctcccatcccagtggcatagttcaccaagtcccagtgggcttaaatccccgtctgttaccatccccaaccattcatcagactcagtacaaaccaatcttcccaccacattcttacattgcagcatcacctgcatatactggatttccactgagtccaacaaaactcagccagtatccatatatgtgaaaaacagtatattggggaagctcaatgatacaaacatttgattaaaaataaaaacatggtatttaatattagccatggcacaagaaaattatttttgaatcatgtagacttgggtgcaatttaaacaactttgagctttaaaaactcacttttgatgtgttttgcacatttggtataacttgtctttggtcatgttatcttcttatgtagtaactctagacaggtgacttatgggagcagaagtccagttttgctcctgctattttttataaattgccttctaactagtgcaagacacgtctacatttgggaagccattctgtgtacagacttagagcaacagatgcacatatgtcagaattacagcatacaagtgaattgtattatccgtgtcttagtgtataaatgttgggtcacttacctaagaaattgagctattgttctttacatttgcatgtgtcttttgcatgggcaaaatgttgcctagactttgctcttaaatgttgttctaataatctcagctgcattgtaaaccgttcctacacatagtgccttaaatatttgaggttgttaatgttattacctatatataaatgttgaggactgcagcacttaaaattcagacctactatttagtttccttttgatagcgtaatgttcatttttgtttttgtgtggtatgatttcaggtagtagctgtttttttccttattaagagggcagcatgtttgctatagctgaattctgctgtctgatttttcagaatgatctagcttcaagaaaagcaagcagttagtagtgcttaagaaaaattgattcagtatctaatggatagttgataactgtcacagcacagcattttatatactgttaagtgaaactgcaatacaatctaagtttattttgagagtgtttgctgtataattggacttaataaaatgtttagaggtacagtaggcatgactttgggtagataataaaatgcaaaatgctcattgattcatgatgtggttttatcttagcttgggcaaaccatgcagtatttaataaatagtagcagaacttttactattgaagcttgaaaagatgtgagttctttgtgtgcaatttttgatttatgcatgtgagagggttttttttttttttaagtatttttacattgcagtacttgttttgcttgttggtgatgtttgcttatttaatacattccgtcagggacagaaattacatgcttttttttctttctaggaagtgtgttgagttccccccttccccgacatttttttcttttttgggtggtggtgatggtagtggttatgtctgtttaaatgaagttgcttttacagcaccaaagacttaatcatccatttcctatataaaggtagctactttttgcatagacctcaagtatattgtagtgtaaaggtggaatttaaggaaaggtattaaattgaggctgtgttttagcttacaggcaagtaataaattgtatcatttatcttgaatgtatcatagataagctgctatataacgattgccacttcagatagctgtgaaattaggtgattaactagttgttatttagccttctaatttctgtataagtctaattacatgaatagaaattggggttttgattttttactttgcttttctgtttggagtgtcattgtaactactgtattgtaaatggtggaaaataattgcatttgttactttggggtgtgttatttgcatcagtattttatctctattaatgtttgtgctcatcactgcatattaaaaaaacttggatgtatcagtgtaacttaattttttattttcatactggcattgtagacacttgagaaagctgtatcttgcaggcttgacttaacttttttccttaaaaatctggaatataatcttacagcatttactggaataaacagtacaaagcattggagtgtaaaactctagatgttttggatttacagcgtttctttgataaatgaattgtataccactagtacagctctagtacagcgttcacaataagctaataatggataagttttcttcactccattaacacaagcagtgttttatttaataatcatcaatgaaataaatgtgcctgaaattgattttaaaaattacagtattagatcataaagtaaaaaccagcagtacatttttagtcacactgaaaatgaaggacttaattttccccacaagtttcagtgtttttagtaattaattctatgcattttatacaaatagaaatatatatatataaaaaattaaatgtttaaaaaggagtagcctaagattaatttaaaagattatttacagatgacacatttatggggtcactatttaagtaaatttgctgccctccacagccttctaattttatttatatgttccagcagattattaggatctgcttacttcttaggaaagaatcaatgctggcaacacattgtttcagaaacaccaagtgcaaaggattgattgtatcacaacaggtacaaaactgacagagttttctttttgtttagggccatgtttactaccctgaaatgttgtattttttgtctttaatttccaagacttaaagcagtcttgttaaattgacataaatggtaaacttcaacattttcataatacagtattaatgtttgataaaggtatatcccagttaactacactgctctttaattgcaatcatgggcattttaatgtattttaaaataaatttcaaaattctgctaaattcttaatttagcatattgacaaagtaatctggatttataccttttaaaaaccattttgaccagttttcttcggttttaatgctttcttaaataaaacactgcatgatttccaagttgcatatttgcatactattttaatttgcaaaatgttttttaaatcaaatatcctgatatttagttgttttttttttcctccagcgtgtttaattaaatatgttactgtattagcaaaacattttcatttttaaaatctgctaattttaaacttggactgtgttaagtaaaagttaaatcatacactgcaaggtgtaggaagatttgttttaatgaatccaatgatacagatttgattactaagtttgaactgttaattgtttaacaattttagacttgtggctttctttctttggtttatttgtttttgcttttactcctatgctacactagtttgccatgtagcaattgcactgtgcaatattacaataaggactgggaaaattttatggatgtaatgtctattacggtttgcgatagtatttctctctagttctcagtgatttaaatgtgaccaagccttctgtactttgtcacaaaaagcgggttttccaggtgactattttggtgagtgtcaaaataagaatttatggtgtattactgtcgattcactttgaattaaaatatatatattgcagcaaa

SEQ ID NO: 312120 - DNA, 3648 bp, Artificial Sequence
  derived and/or modified sequence
atggccagccaggtgctggtgtacccaccctacgtgtaccagacccagagcagcgccttctgcagcgtgaagaagctgaaggtggagcccagcagctgtgtgttccaggagaggaactaccccaggacctacgtgaatggaagaaactttggaaacagccacccccccaccaagggcagcgccttccagaccaagatccccttcaaccggccccggggccacaacttcagcctgcagaccagcgctgtggtgctgaagaacacagctggggccaccaaggtgattgctgcccaggcccagcaggcccacgtgcaggccccccagattggagcctggaggaaccggctgcacttcctggagggcccccagagatgtggcctgaagaggaagtctgaggagctggacaaccacagcagcgccatgcagatcgtggatgagctgagcatcctgcctgccatgctgcagaccaacatgggcaaccctgtgacagtggtgacagccaccaccggcagcaagcagaactgcaccactggagagggggactaccagctggtgcagcacgaggtgctgtgcagcatgaagaacacctatgaggtgctggacttcctgggccggggcaccttcggccaggtggtgaagtgctggaagaggggcaccaatgagatcgtggccatcaagatcctgaagaaccaccccagctatgcccggcagggccagatcgaggtgtccatcctggcccggctgagcacagaaaatgctgatgagtacaactttgtgcgggcctatgagtgcttccagcacaggaaccacacctgcctggtgtttgagatgctggagcagaacctgtatgacttcctgaagcagaacaagttcagccccctgcccctgaaggtgatccggcccatcctgcagcaggtggccacagccctgaagaagctgaagagcctgggcctcatccatgctgacctgaagccagagaacatcatgctggtggaccctgtgcggcagccctacagagtgaaggtgattgactttggaagtgccagccacgtgtccaagacagtgtgcagcacctacctgcagagccgctactaccgggcccctgagatcatcctgggcctgcccttctgtgaggccatcgacatgtggagcctgggctgtgtgattgctgagctgttcctgggctggcccctgtacccaggggccctggagtatgaccagatccgctacatcagccagacccagggcctgcccggggagcagctgctgaatgtgggcaccaagagcacccgcttcttctgcaaggagacagacatgagccacagcggctggaggctgaagaccctggaggagcacgaggccgagaccggcatgaagagcaaggaggccaggaagtacatcttcaacagcctggatgatgtggcccacgtgaacacagtgatggacctggagggcagtgacctgctggccgagaaggctgacagaagagaatttgtgtccctgctgaagaagatgctgctgattgatgctgacctgcgcatcaccccagctgagaccctgaaccacccctttgtgaacatgaagcacctgctggacttcccccacagcaaccacgtgaagagctgcttccacatcatggacatctgcaagagccacctgaacagctgtgacaccaacaaccacaacaagaccagcctgctgcggcctgtggccagcagcagcacagccaccctgacagccaacttcaccaagattggcaccctgcggagccaggccctgaccaccagcgcccacagcgtggtgcaccacggcatccccctgcaggccggcacagcccagtttggctgtggagatgccttccagcagaccctcatcatctgccccccagccatccagggcatcccagccacccacggcaagcccaccagctacagcatccgggtggacaacacagtgcccctggtgacccaggccccagctgtgcagcccctgcagatccggcctggggtgctgagccagacctggagcggccgcacccagcagatgctggtgcctgcctggcagcaggtgacccccctggccccagccaccaccaccctgaccagcgagagcgtggccggcagccaccggctgggggactggggcaagatgatcagctgcagcaaccactacaacagcgtgatgccccagcccctgctgaccaaccagatcaccctgagcgccccccagcctgtgtctgtgggcatcgcccacgtggtgtggccccagcctgccaccaccaagaagaacaagcagtgccagaacagaggcatcctggtgaagctgatggagtgggagcccggccgggaggagatcaatgccttctcctggagcaacagcctgcagaacaccaacatcccccacagcgccttcatcagccccaagatcatcaatggcaaggatgtggaggaggtgtcctgcatcgagacccaggacaaccagaacagcgagggggaggccaggaactgctgtgagaccagcatccggcaggacagcgacagctctgtgtctgacaagcagaggcagaccatcatcatcgctgacagccccagccctgctgtgtctgtcatcaccatcagcagtgacacagatgaggaggagaccagccagaggcacagcctgagagaatgtaaaggcagcctggactgtgaggcctgccagagcaccctgaacatcgacaggatgtgcagcctgagcagcccagacagcaccctgagcaccagcagcagcggccagagcagccccagcccctgcaagaggcccaacagcatgtctgatgaggagcaggagagcagctgtgacacagtggatggcagccccaccagtgacagcagcggccatgacagcccctttgctgagagcacctttgtggaggacacccatgaaaatacagagctggtgagcagcgctgacacagagaccaagccagctgtgtgcagcgtggtggtgccccctgtggagctggagaatggcctgaatgctgatgagcacatggccaacacagacagcatctgccagcccctcatcaagggccgcagcgcccctggccgcctgaaccagcccagcgctgtgggcacccggcagcagaagctgaccagcgccttccagcagcagcacctgaacttcagccaggtgcagcactttggaagtggccaccaggagtggaatggaaactttggccaccggcggcagcaggcctacatccccacctctgtgaccagcaaccccttcaccctgagccacggcagccccaaccacacagctgtgcacgcccacctggccggcaacacccacctgggcggccagcccaccctgctgccctaccccagcagcgccaccctgagcagcgctgcccctgtggcccacctgctggccagcccctgcaccagccggcccatgctgcagcaccccacctacaacatcagccaccccagcggcatcgtgcaccaggtgcctgtgggcctgaacccccggctgctgcccagccccaccatccaccagacccagtacaagcccatcttccccccccacagctacatcgccgccagccctgcctacacaggcttccccctgagccccaccaagctgagccagtacccctacatgtag

SEQ ID NO: 312121 - DNA, 231 bp, Artificial Sequence
  derived and/or modified sequence
atggccagccaggtgctggtgtacccaccctacgtgtaccagacccagagcagcgccttctgcagcgtgaagaagctgaaggtggagcccagcagctgtgtgttccaggagaggaactaccccaggacctacgtgaatggaagaaactttggaaacagccacccccccaccaagggcagcgccttccagaccaagatccccttcaaccggccccggggccacaacttctag

SEQ ID NO: 312122 - DNA, 3648 bp, Artificial Sequence
  derived and/or modified sequence
atggccagccaggtgctggtgtaccccccctacgtgtaccagacccagagctccgcgttttgttctgttaagaagcttaaggtggaaccttcctcctgcgtgtttcaagaaagaaactaccctcggacttacgtcaacggacgtaattttgggaacagccacccgcccacaaaggggtctgcattccaaactaagattccgttcaatcgcccgcggggccataacttctcactacagacctctgccgttgtgctaaagaataccgctggcgcaaccaaggtcatcgctgcccaagcacagcaggcccatgttcaggcaccccaaatcggagcctggcgtaatcgcctacatttcctggaaggaccgcagaggtgtggacttaagcggaagagcgaggagctagacaatcactccagtgccatgcaaatagttgatgagctcagtatactgcccgctatgttgcagacaaacatgggaaatccagtgacagtggtgactgctacaactggcagtaagcaaaactgcactactggagaaggcgactatcagctggtgcagcatgaagtgctgtgttcaatgaaaaatacctacgaggtgctcgatttcctgggcaggggcaccttcggccaagtagttaagtgctggaagaggggcactaatgagattgttgctatcaagatcttgaaaaaccatccatcctacgcgcggcaaggtcagatcgaggtatccattctggcgaggctttcgactgagaacgctgacgaatacaacttcgtgcgggcgtacgaatgcttccagcaccgcaatcacacctgtttagtctttgagatgctggaacagaatctgtacgacttcctgaagcaaaacaaattttcacctctacctcttaaggtcatcaggccgatcctacagcaggtcgctacggcccttaaaaaactgaaatctcttggcctcatacacgcagatctgaaacccgaaaatattatgcttgtggatcctgtgcgacagccctaccgggtgaaagttattgactttggctcggcgtcccacgtgtctaagacagtgtgctcaacttatctgcaatctcgatattacagagcccccgagattattctgggcttgccattctgcgaagcaatcgacatgtggagcctgggctgcgttatagccgaactgtttttgggatggccactgtaccccggagcactcgaatatgaccagatcaggtacatctcccagactcagggattaccgggggaacagctgttaaacgtgggcaccaaaagcactagatttttttgcaaggaaactgatatgtcgcactcaggctggcggctcaagactttggaggagcatgaagcagagaccggtatgaaatcaaaagaagcccgtaagtacatatttaattccctggacgacgtggcacacgtcaataccgtcatggacctcgaagggagcgacctcctggctgagaaggccgatcggagagaatttgtttctcttctgaagaaaatgcttcttatcgacgccgatctacgcataactccagcagagaccttgaatcaccccttcgtcaacatgaagcacttgttggacttcccgcatagtaaccacgtgaagtcctgctttcacattatggatatctgtaaaagtcacttgaactcttgtgacactaacaatcacaacaaaacatccctcctgcggcccgtggccagtagctcaaccgccactctcaccgctaactttaccaaaattgggacactcaggagccaggcactgacgacctcagcccatagcgtggtgcaccacggaattcctctgcaagctggcacagcccagttcggctgcggcgatgcgtttcaacagactcttatcatctgcccgcccgcgatccaggggatccccgcaacacatggcaagcccacgtcgtatagtatcagggtagataataccgttcctctagttacgcaggcaccggctgtgcagcccctccaaataaggccgggcgttctgtctcagacatggtccggacgcacccagcaaatgctggtccccgcatggcagcaagtgacgccgttggcacccgcaactacaacccttacttctgagagcgtggcgggtagccacagattaggcgattggggcaagatgatatcctgcagcaaccactacaactccgtcatgccccaacccctcctcactaatcagatcactctctctgcccctcagcccgtgagtgttggaattgcacacgtggtgtggccacaacctgctacaactaagaagaacaaacagtgccaaaaccgcggcattctggttaagctgatggaatgggagcccggaagggaagagatcaacgccttctcttggagcaactctctgcaaaataccaatattccccatagcgcctttatttctcccaaaatcattaacggaaaagacgtagaagaggtgtcttgcatagagacacaggacaaccagaacagcgagggggaggcaagaaattgttgcgagacctctattcgccaagattctgactcttcggtctctgacaagcagaggcagacaatcataattgccgacagccccagcccagcagtgtccgttattactatcagtagcgatacagatgaagaagagacgtctcaacgccattcattgagagagtgtaagggctccctggattgcgaagcctgtcagtcaacactgaacatcgatcggatgtgctccctgagttcgccggactctactctatctacaagcagcagcggccaatccagcccctctccctgtaaacggcctaattctatgagtgatgaagagcaggaaagctcatgtgataccgtagatggctcccccacgagtgactcctcaggccacgactctccctttgccgagagtaccttcgtcgaagacacccacgagaacaccgagttagtgtcctccgcagacactgagactaaaccagccgtgtgctccgtagttgtgccaccagtggagcttgaaaacggccttaacgccgatgagcacatggcaaatacggatagcatttgtcagcccctgatcaagggacgcagcgcgcctggcaggctcaaccagccatctgctgtcggtacaagacagcaaaagctgacaagcgccttccagcagcagcatctcaactttagccaggtgcaacactttgggagtggacaccaggagtggaacggaaattttggacacagaagacagcaggcctatatccctactagtgtcacaagcaacccctttacgctgagccacggaagtcctaatcatacagctgttcacgcccatttggctggcaatacccatcttggaggccagcctaccctcctgccttatccctcatctgctaccttgtccagtgcagctccggtagcacacctcttagctagcccctgtacatcacgacctatgctccagcatcccacctacaatatatcccaccctagcggcatagtacatcaggtgcctgttggactcaaccctcggctcctgccctctccaaccattcatcagacacagtacaaaccaattttccctccacattcttacattgcagcctccccagcttacacaggattcccgcttagccccacaaaactgtcacagtatccttacatgtag

SEQ ID NO: 312123 - DNA, 231 bp, Artificial Sequence
  derived and/or modified sequence
atggccagccaggtgctggtgtaccccccctacgtgtaccagacccaatcttcagcattctgttccgtgaagaagttgaaggtggaaccttcttcttgcgtgttccaggaacgtaactatcctcgaacctacgtgaacggacggaatttcggcaacagtcaccctcccaccaagggctccgcattccagacaaagatccccttcaacaggccacgaggccacaacttttag

SEQ ID NO: 312124 - DNA, 3648 bp, Artificial Sequence
  derived and/or modified sequence
atggcatcacaggtcttggtctacccgccttacgtgtatcagacacaatcctctgccttttgttccgtcaagaagctgaaggtcgagccgtcgtcgtgtgtctttcaggaacgtaattatcctaggacgtatgtgaatgggagaaacttcgggaacagtcacccacctaccaaggggagcgcatttcagaccaaaattcctttcaatcggccacgcggacacaactttagtttgcagacctcggctgtagtgttgaagaatacagcaggcgctactaaggttatcgcggctcaggcccagcaggctcatgttcaggccccacagattggagcctggcgtaacaggctgcattttcttgaaggtccacaacgatgtggtctgaagaggaagtccgaggaactagacaaccactcctccgcaatgcagatcgtggacgaattgagtatcctaccagcaatgcttcagaccaatatgggcaacccagtaacagtggtcacggctacaacgggatctaagcagaactgtacaactggcgagggcgattaccagctcgtgcaacacgaggttttgtgctcaatgaaaaacacatacgaggtgctcgatttcctgggcaggggaacgtttggacaggtggtgaagtgttggaagcggggtaccaatgaaatcgtggccatcaagattctgaaaaatcatccgtcgtacgcccgacaaggccagatcgaagtcagcatcctggcacgactaagcactgaaaacgccgatgaatacaactttgttcgggcttacgaatgctttcagcacaggaatcatacatgccttgtgttcgaaatgctcgagcagaacttatacgactttctcaaacagaacaaattttctcccctgccccttaaagtcatacgtccaattcttcaacaagtggccacagcactaaaaaaactgaagagcctggggctcatccatgccgacctcaagccagagaacatcatgcttgtggacccagttcgacagccctacagggttaaagtgatagacttcgggagtgcctcccacgtcagcaaaaccgtatgttctacctacctacagagtcgctactatcgcgcaccagaaatcattttgggactccccttctgcgaggccatagatatgtggtccctgggctgcgtaatcgcagagttgtttctggggtggccattgtaccctggagcgctcgagtacgaccagatccggtacataagccagacccaaggcctcccaggggagcagctcctgaatgttgggaccaagagcactaggttcttttgtaaggagaccgacatgagccattccgggtggaggttaaagacattggaggagcatgaggccgagacggggatgaaaagcaaagaagccagaaaatacatcttcaacagcctagatgacgtggcccacgtaaatactgtcatggatctggaaggctccgatttactcgccgagaaggctgatcgccgagagtttgtttccctcctcaagaaaatgctcctgatcgatgccgatcttcggattacgccggcagagaccttgaatcacccattcgtcaatatgaaacacttgctcgacttcccccattcaaatcacgtgaagtcctgcttccacatcatggatatctgcaaaagccacttaaactcatgtgatactaataatcataacaaaacctccttactcaggccagtcgccagctcttccactgccaccctaacagctaattttaccaaaatcggcaccctccgcagccaggctctgactacatctgctcactctgttgtgcatcacggcatccccttgcaggctggaacagcccagttcgggtgcggggacgcatttcagcagaccctgatcatttgtcctccagcgatacaaggaatccccgctacccacgggaagcctacaagttactcaatccgggtggataataccgtgccacttgttacccaggcccctgctgtccagcccctgcaaatccggccaggcgtcttatcccagacatggtccggtagaacacagcagatgttggttccagcgtggcagcaagttacccctctagcccctgctacaactacgctgacaagtgagtccgttgcgggttctcatcgtctaggggattggggcaagatgatctcttgctccaaccactataactctgtgatgccacagccattgctgacaaaccagattaccctgagcgctccgcaacccgtctctgtaggcatagcacacgtcgtttggcctcagcccgcaacaactaagaaaaataagcaatgtcaaaataggggaatattggtgaagttaatggaatgggaacccggtcgcgaggagatcaatgcattcagttggagtaacagcctgcagaacacaaatattccccattcggcatttatctctcccaagattataaatggcaaggacgtggaggaagtaagttgcatcgagacccaagacaaccagaattcagagggcgaggcacgaaactgttgtgagacatcgatcaggcaggactcagatagctctgtgtcagataaacagagacaaactattatcatcgctgactcaccgtccccagccgtgtccgtgataacaatcagcagtgacactgacgaggaggagacctctcagcggcacagtctgagggagtgtaagggctctcttgattgcgaagcgtgtcagagtactctgaatattgatagaatgtgcagtttgtccagtcccgactcaaccctgagcacttcctcctccggtcagagcagcccctctccttgcaagagacctaacagcatgtcggacgaggagcaggaatcttcttgcgataccgtcgacgggagtcctacaagcgactctagcggccatgattccccatttgccgagtcaacctttgtggaagacacccatgagaacaccgaacttgtctcaagcgctgatacagaaacgaaacctgcggtctgcagcgtcgtggtgccacctgtagagctagaaaatggcctgaacgctgacgaacacatggccaacactgactcgatatgccagcccttaattaaaggtagaagcgcccctggaagactgaatcaaccctctgctgtcggtacccgacagcagaaactaactagtgctttccagcagcagcacctgaatttcagccaggtccagcactttggttctggccaccaggagtggaacggtaacttcgggcacagacgccagcaggcttatatcccgacgtctgtgacatccaatccattcacattgtcccatggctctccgaatcacaccgccgttcacgcacaccttgccggaaacacgcacctgggcggacagcccacactgctgccctatccctctagtgcaactctcagctctgctgcacctgtggcccatctcctggcctcgccatgcacaagtagaccgatgctccagcatcccacgtacaatatatcgcacccatctggcatcgtccaccaggtgccagtgggcttaaatcccagactgctgccaagtcccaccatccaccagactcagtacaagcccatattccctcctcactcctatatcgctgcctctcccgcatacactggatttccgctctcccccactaaactcagccagtatccctatatgtag

SEQ ID NO: 312125 - DNA, 231 bp, Artificial Sequence
  derived and/or modified sequence
atggcatcccaggtgctggtgtatccaccgtacgtgtatcaaacacaaagttcagcattctgctctgttaagaaattgaaagtggaaccttccagctgtgtgttccaggagagaaactatcctagaacctatgtgaacggcaggaatttcggcaacagccacccacccaccaaaggtagcgcctttcagaccaagataccgtttaacagaccccgtggccataatttttag

SEQ ID NO: 312126 - DNA, 3648 bp, Artificial Sequence
  derived and/or modified sequence
atggccagccaggtgctggtgtaccccccctacgtgtaccagacccagagcagcgccttctgcagcgtgaagaagctgaaggtggagcccagcagctgcgtgttccaggagagaaactaccccagaacctacgtgaacggcagaaacttcggcaacagccacccccccaccaagggcagcgccttccagaccaagatccccttcaacagacccagaggccacaacttcagcctgcagaccagcgccgtggtgctgaagaacaccgccggcgccaccaaggtgatcgccgcccaggcccagcaggcccacgtgcaggccccccagatcggcgcctggagaaacagactgcacttcctggagggcccccagagatgcggcctgaagagaaagagcgaggagctggacaaccacagcagcgccatgcagatcgtggacgagctgagcatcctgcccgccatgctgcagaccaacatgggcaaccccgtgaccgtggtgaccgccaccaccggcagcaagcagaactgcaccaccggcgagggcgactaccagctggtgcagcacgaggtgctgtgcagcatgaagaacacctacgaggtgctggacttcctgggcagaggcaccttcggccaggtggtgaagtgctggaagagaggcaccaacgagatcgtggccatcaagatcctgaagaaccaccccagctacgccagacagggccagatcgaggtgagcatcctggccagactgagcaccgagaacgccgacgagtacaacttcgtgagagcctacgagtgcttccagcacagaaaccacacctgcctggtgttcgagatgctggagcagaacctgtacgacttcctgaagcagaacaagttcagccccctgcccctgaaggtgatcagacccatcctgcagcaggtggccaccgccctgaagaagctgaagagcctgggcctgatccacgccgacctgaagcccgagaacatcatgctggtggaccccgtgagacagccctacagagtgaaggtgatcgacttcggcagcgccagccacgtgagcaagaccgtgtgcagcacctacctgcagagcagatactacagagcccccgagatcatcctgggcctgcccttctgcgaggccatcgacatgtggagcctgggctgcgtgatcgccgagctgttcctgggctggcccctgtaccccggcgccctggagtacgaccagatcagatacatcagccagacccagggcctgcccggcgagcagctgctgaacgtgggcaccaagagcaccagattcttctgcaaggagaccgacatgagccacagcggctggagactgaagaccctggaggagcacgaggccgagaccggcatgaagagcaaggaggccagaaagtacatcttcaacagcctggacgacgtggcccacgtgaacaccgtgatggacctggagggcagcgacctgctggccgagaaggccgacagaagagagttcgtgagcctgctgaagaagatgctgctgatcgacgccgacctgagaatcacccccgccgagaccctgaaccaccccttcgtgaacatgaagcacctgctggacttcccccacagcaaccacgtgaagagctgcttccacatcatggacatctgcaagagccacctgaacagctgcgacaccaacaaccacaacaagaccagcctgctgagacccgtggccagcagcagcaccgccaccctgaccgccaacttcaccaagatcggcaccctgagaagccaggccctgaccaccagcgcccacagcgtggtgcaccacggcatccccctgcaggccggcaccgcccagttcggctgcggcgacgccttccagcagaccctgatcatctgcccccccgccatccagggcatccccgccacccacggcaagcccaccagctacagcatcagagtggacaacaccgtgcccctggtgacccaggcccccgccgtgcagcccctgcagatcagacccggcgtgctgagccagacctggagcggcagaacccagcagatgctggtgcccgcctggcagcaggtgacccccctggcccccgccaccaccaccctgaccagcgagagcgtggccggcagccacagactgggcgactggggcaagatgatcagctgcagcaaccactacaacagcgtgatgccccagcccctgctgaccaaccagatcaccctgagcgccccccagcccgtgagcgtgggcatcgcccacgtggtgtggccccagcccgccaccaccaagaagaacaagcagtgccagaacagaggcatcctggtgaagctgatggagtgggagcccggcagagaggagatcaacgccttcagctggagcaacagcctgcagaacaccaacatcccccacagcgccttcatcagccccaagatcatcaacggcaaggacgtggaggaggtgagctgcatcgagacccaggacaaccagaacagcgagggcgaggccagaaactgctgcgagaccagcatcagacaggacagcgacagcagcgtgagcgacaagcagagacagaccatcatcatcgccgacagccccagccccgccgtgagcgtgatcaccatcagcagcgacaccgacgaggaggagaccagccagagacacagcctgagagagtgcaagggcagcctggactgcgaggcctgccagagcaccctgaacatcgacagaatgtgcagcctgagcagccccgacagcaccctgagcaccagcagcagcggccagagcagccccagcccctgcaagagacccaacagcatgagcgacgaggagcaggagagcagctgcgacaccgtggacggcagccccaccagcgacagcagcggccacgacagccccttcgccgagagcaccttcgtggaggacacccacgagaacaccgagctggtgagcagcgccgacaccgagaccaagcccgccgtgtgcagcgtggtggtgccccccgtggagctggagaacggcctgaacgccgacgagcacatggccaacaccgacagcatctgccagcccctgatcaagggcagaagcgcccccggcagactgaaccagcccagcgccgtgggcaccagacagcagaagctgaccagcgccttccagcagcagcacctgaacttcagccaggtgcagcacttcggcagcggccaccaggagtggaacggcaacttcggccacagaagacagcaggcctacatccccaccagcgtgaccagcaaccccttcaccctgagccacggcagccccaaccacaccgccgtgcacgcccacctggccggcaacacccacctgggcggccagcccaccctgctgccctaccccagcagcgccaccctgagcagcgccgcccccgtggcccacctgctggccagcccctgcaccagcagacccatgctgcagcaccccacctacaacatcagccaccccagcggcatcgtgcaccaggtgcccgtgggcctgaaccccagactgctgcccagccccaccatccaccagacccagtacaagcccatcttccccccccacagctacatcgccgccagccccgcctacaccggcttccccctgagccccaccaagctgagccagtacccctacatgtag

SEQ ID NO: 312127 - DNA, 231 bp, Artificial Sequence
  derived and/or modified sequence
atggccagccaggtgctggtgtaccccccctacgtgtaccagacccagagcagcgccttctgcagcgtgaagaagctgaaggtggagcccagcagctgcgtgttccaggagagaaactaccccagaacctacgtgaacggcagaaacttcggcaacagccacccccccaccaagggcagcgccttccagaccaagatccccttcaacagacccagaggccacaacttctag

SEQ ID NO: 312128 - protein, 733 aa, Artificial Sequence
  derived and/or modified sequence
MAKREDSPGPEVQPMDKQFLVCSICLDRYQCPKVLPCLHTFCERCLQNYIPAQSLTLSCPVCRQTSILPEQGVSALQNNFFISSLMEAMQQAPDGAHDPEDPHPLSVVAGRPLSCPNHEGKTMEFYCEACETAMCGECRAGEHREQHKAALQRQLEAVRGRLPQLSAAIALVGGISQQLQERKAEALAQISAAFEDLEQALQQRKQALVSDLETICGAKQKVLQSQLDTLRQGQEHIGSSCSFAEQALRLGSAPEVLLVRKHMRERLAALAAQAFPERPHENAQLELVLEVDGLRRSVLNLGALLTTSATAHETVATGEGLRQALVGQPASLTVTTKDKDGRLVRTGSAELRAEITGPDGTRLPVPVVDHKNGTYELVYTARTEGELLLSVLLYGQPVRGSPFRVRALRPGDLPPSPDDVKRRVKSPGGPGSHVRQKAVRRPSSMYSTGGKRKDNPIEDELVFRVGSRGREKGEFTNLQGVSAASSGRIVVADSNNQCIQVFSNEGQFKFRFGVRGRSPGQLQRPTGVAVDTNGDIIVADYDNRWVSIFSPEGKFKTKIGAGRLMGPKGVAVDRNGHIIVVDNKSCCVFTFQPNGKLVGRFGGRGATDRHFAGPHFVAVNNKNEIVVTDFHNHSVKVYSADGEFLFKFGSHGEGNGQFNAPTGVAVDSNGNIIVADWGNSRIQVFDSSGSFLSYINTSAEPLYGPQGLALTSDGHVVVADAGNHCFKAYRYLQ

SEQ ID NO: 312129 - protein, 744 aa, Artificial Sequence
  derived and/or modified sequence
MAKREDSPGPEVQPMDKQFLVCSICLDRYQCPKVLPCLHTFCERCLQNYIPAQSLTLSCPVCRQTSILPEQGVSALQNNFFISSLMEAMQQAPDGAHDPEDPHPLSVVAGRPLSCPNHEGKTMEFYCEACETAMCGECRAGEHREHGTVLLRDVVEQHKAALQRQLEAVRGRLPQLSAAIALVGGISQQLQERKAEALAQISAAFEDLEQALQQRKQALVSDLETICGAKQKVLQSQLDTLRQGQEHIGSSCSFAEQALRLGSAPEVLLVRKHMRERLAALAAQAFPERPHENAQLELVLEVDGLRRSVLNLGALLTTSATAHETVATGEGLRQALVGQPASLTVTTKDKDGRLVRTGSAELRAEITGPDGTRLPVPVVDHKNGTYELVYTARTEGELLLSVLLYGQPVRGSPFRVRALRPGDLPPSPDDVKRRVKSPGGPGSHVRQKAVRRPSSMYSTGGKRKDNPIEDELVFRVGSRGREKGEFTNLQGVSAASSGRIVVADSNNQCIQVFSNEGQFKFRFGVRGRSPGQLQRPTGVAVDTNGDIIVADYDNRWVSIFSPEGKFKTKIGAGRLMGPKGVAVDRNGHIIVVDNKSCCVFTFQPNGKLVGRFGGRGATDRHFAGPHFVAVNNKNEIVVTDFHNHSVKVYSADGEFLFKFGSHGEGNGQFNAPTGVAVDSNGNIIVADWGNSRIQVFDSSGSFLSYINTSAEPLYGPQGLALTSDGHVVVADAGNHCFKAYRYLQ

SEQ ID NO: 312130 - protein, 742 aa, Artificial Sequence
  derived and/or modified sequence
MAKREDSPGPEVQPMDKQFLVCSICLDRYQCPKVLPCLHTFCERCLQNYIPAQSLTLSCPVCRQTSILPEQGVSALQNNFFISSLMEAMQQAPDGAHDPEDPHPLSVVAGRPLSCPNHEGKTMEFYCEACETAMCGECRAGEHREHGTVLLRDVVEQHKAALQRQLEAVRGRLPQLSAAIALVGGISQQLQERKAEALAQISAAFEDLEQALQQRKQALVSDLETICGAKQKVLQSQLDTLRQGQEHIGSSCSFAEQALRLGSAPEVLLVRKHMRERLAALAAQAFPERPHENAQLELVLEVDGLRRSVLNLGALLTTSATAHETVATGEGLRQALVGQPASLTVTTKDKDGRLVRTGSAELRAEITGPDGTRLPVPVVDHKNGTYELVYTARTEGELLLSVLLYGQPVRGSPFRVRALRPGDLPPSPDDVKRRVKSPGGPGSHVRQKAVRRPSSMYSTGGKRKDNPIEDELVFRVGSRGREKGEFTNLQGVSAASSGRIVVADSNNQCIQVFSNEGQFKFRFGVRGRSPGQLQRPTGVAVDTNGDIIVADYDNRWVSIFSPEGKFKTKIGAGRLMGPKGVAVDRNGHIIVVDNKSCCVFTFQPNGKLVGRFGGRGATDRHFAGPHFVAVNNKNEIVVTDFHNHSVKVYSADGEFLFKFGSHGEGNGQFNAPTGVAVDSNGNIIDVCRASPYPSYTPPHPCQSAPHPPAWGQNSLPQDRSPSSCLPTTLYTLTETAIPHPPY

SEQ ID NO: 312131 - protein, 666 aa, Artificial Sequence
  derived and/or modified sequence
MAKREDSPGPEVQPMDKQFLVCSICLDRYQCPKVLPCLHTFCERCLQNYIPAQSLTLSCPVCRQTSILPEQGVSALQNNFFISSLMEAMQQAPDGAHDPEDPHPLSVVAGRPLSCPNHEGKTMEFYCEACETAMCGECRAGEHREHGTVLLRDVVEQHKAALQRQLEAVRGRLPQLSAAIALVGGISQQLQERKAEALAQISAAFEDLEQALQQRKQALVSDLVDGLRRSVLNLGALLTTSATAHETVATGEGLRQALVGQPASLTVTTKDKDGRLVRTGSAELRAEITGPDGTRLPVPVVDHKNGTYELVYTARTEGELLLSVLLYGQPVRGSPFRVRALRPGDLPPSPDDVKRRVKSPGGPGSHVRQKAVRRPSSMYSTGGKRKDNPIEDELVFRVGSRGREKGEFTNLQGVSAASSGRIVVADSNNQCIQVFSNEGQFKFRFGVRGRSPGQLQRPTGVAVDTNGDIIVADYDNRWVSIFSPEGKFKTKIGAGRLMGPKGVAVDRNGHIIVVDNKSCCVFTFQPNGKLVGRFGGRGATDRHFAGPHFVAVNNKNEIVVTDFHNHSVKVYSADGEFLFKFGSHGEGNGQFNAPTGVAVDSNGNIIVADWGNSRIQVFDSSGSFLSYINTSAEPLYGPQGLALTSDGHVVVADAGNHCFKAYRYLQ

SEQ ID NO: 312132 - protein, 741 aa, Artificial Sequence
  derived and/or modified sequence
MAKREDSPGPEVQPMDKQFLVCSICLDRYQCPKVLPCLHTFCERCLQNYIPAQSLTLSCPVCRQTSILPEQGVSALQNNFFISSLMEAMQQAPDGAHDPEDPHPLSVVAGRPLSCPNHEGKTMEFYCEACETAMCGECRAGEHREHGTVLLRDVVEQHKAALQRQLEAVRGRLPQLSAAIALVGGISQQLQERKAEALAQISAAFEDLEQALQQRKQALVSDLETICGAKQKVLQSQLDTLRQGQEHIGSSCSFAEQALRLGSAPEVLLVRKHMRERLAALAAQAFPERPHENAQLELVLEVDGLRRSVLNLGALLTTSATAHETVATGEGLRQALVGQPASLTVTTKDKDGRLVRTGSAELRAEITGPDGTRLPVPVVDHKNGTYELVYTARTEGELLLSVLLYGQPVRGSPFRVRALRPGDLPPSPDDVKRRVKSPGGPGSHVRQKAVRRPSSMYSTGGKRKDNPIEDELVFRVGSRGREKGEFTNLQGVSAASSGRIVVADSNNQCIQVFSNEGQFKFRFGVRGRSPGQLQRPTGVAVDTNGDIIVADYDNRWVSIFSPEGKFKTKIGAGRLMGPKGVAVDRNGHIIVVDNKSCCVFTFQPNGKLVGRFGGRGATDRHFAGPHFVAVNNKNEIVVTDFHNHSVKVYSADGEFLFKFGSHGEGNGQFNAPTGVAVDSNGNIIVCRASPYPSYTPPHPCQSAPHPPAWGQNSLPQDRSPSSCLPTTLYTLTETAIPHPPY

SEQ ID NO: 312133 - DNA, 3059 bp, Artificial Sequence
  derived and/or modified sequence
ggtccgcagccccgccccggcccctccctccggcctgtgcggctagtccggcggcggcgccggcgcggggacaggcggaggcgcgggcagggccgggcggacgggcgctggcagcagtagcagcgccgcgggcccttcagagtggccgcagtccgagctttgccctcgcatcctgttccaacgcggaaaggacccctctggttctcctgtagcctgagccctgcctggaggaccccaggcccctccctggttctgacctcctcccttctgcaattggcttcagatcctgggctgcaaacctgcagggacagatggttgcaggttggaggggcaggctgcaccccagggagaggctggtgtgagtggcgggagccatctgtgggcgccatggcaaagagggaggacagccctggcccagaggtccagccaatggacaagcagttcctggtatgcagcatctgcctggatcggtaccagtgccccaaggttcttccttgcctgcacaccttctgtgagagatgtctccaaaactatatccctgcccagagcctgacgctatcctgtccagtatgccggcagacgtccatcctcccagagcagggcgtctcggcactgcagaacaacttcttcatcagcagcctcatggaggcaatgcagcaggcacctgatggggcccacgacccggaggacccccaccccctcagtgtagtggctggccgccctctctcctgccccaaccatgaaggcaagacgatggagttttactgtgaggcctgtgagacggccatgtgtggtgagtgccgcgccggggagcatcgtgagcatggcacagtgctgctgagggatgtggtggagcagcacaaggcggccctgcagcgccagctcgaggctgtgcgtggccgattgccacagctgtccgcagcaattgccttagtcgggggcatcagccagcagctgcaggagcgcaaggcagaggccctggcccagatcagtgcagcgttcgaggacctggagcaagcactgcagcagcgcaagcaggctctggtcagcgacctggagaccatttgtggggccaaacagaaggtgttgcaaagccagctggacacactgcgccagggtcaggaacacatcggcagtagctgcagctttgcagagcaggcactgcgcctgggctcggccccggaggtgttgctggtgcgcaagcacatgcgagagcggctggctgcattggcggcacaggccttcccggagcggccacatgagaatgcacagctggaactggtccttgaggtggacggtctgcggcgatcggtgctcaatctgggcgcactgctcaccacgagcgccactgcacacgaaacggtggccacgggagagggcctgcgccaggcgctagtgggccagcctgcctcgctcactgtcactaccaaagacaaggacgggcggttggtgcgcacaggcagcgctgagctgcgtgcagagatcaccggcccggacggcacgcgccttccggtgccagtggtggaccacaagaatggcacatatgagctagtgtacacagcgcgcacggaaggcgagctgctcctctcggtgctgctctacggacagccagtgcgcggcagccccttccgcgtgcgtgccctgcgtccgggggacctgccaccttccccggacgatgtgaagcgccgtgtcaagtcccctggcggccccggcagccatgtgcgccagaaggcagtgcgtaggcccagctccatgtacagcacaggcggcaaacgaaaggacaacccaattgaggatgagctcgtcttccgtgttggcagtcgtggaagggagaaaggtgaattcaccaatttacaaggtgtgtccgcagccagcagcggccgcatcgtggtagcagacagcaacaaccagtgtattcaggttttctccaatgagggccagttcaagttccgttttggggtccgaggacgctcacctgggcagctgcagcgccccacaggtgtggcagtggacaccaatggagacataattgtggcagactatgacaaccgttgggtcagcatcttctcccctgagggcaagttcaagaccaagattggagctggccgcctcatgggccccaagggagtggccgtagaccggaatggacatatcattgtggtcgacaacaagtcttgctgcgtctttaccttccagcccaatggcaaactggttggccgttttgggggccgtggggccactgaccgccactttgcagggccccattttgtggctgtgaacaacaagaatgaaattgtagtaacggacttccataaccattcagtgaaggtgtacagtgccgatggagagttcctcttcaagtttggctcccatggcgagggcaatgggcagttcaatgcccccacaggagtagctgtggactccaatggaaacatcattgtggctgactggggcaacagccgcatccaggtattcgacagctctggctccttcctgtcctatatcaacacatctgcagaaccactgtatggtccacagggcctggcactgacctcggatggccatgtggtggtggctgatgctggcaaccactgctttaaagcctatcgctacctccagtagctgtacagaggccctgcctggcttgtggagggacagacattggggtgattggacaagagggtctggctgggaggtgggccagacctggcagcactgaatgtgggctgtgggcatgggtgcacccggtgccctccctctcctacccccacccccacggttgcactttatttattcggttcttgctttggtgactgggtgagcctggactgtggtcccaaggatgtgtgcagagcttcaccctacccttcttacacacctccccacccctgtcagtctgctccccatcccccagcctggggccagaacagcctaccccaggacaggagtccctctagttgtctccctaccaccctatacacactgacagagacagcaataccccaccccccatattaaataaatgtcttcaccaagaaaaaaaaaaaaaaaaaaaaaaa

SEQ ID NO: 312134 - DNA, 2202 bp, Artificial Sequence
  derived and/or modified sequence
atggccaagagagaggacagccccggccccgaggtgcagcccatggacaagcagttcctggtgtgcagcatctgcctggacagataccagtgccccaaggtgctgccctgcctgcacaccttctgcgagagatgcctgcagaactacatccccgcccagagcctgaccctgagctgccccgtgtgcagacagaccagcatcctgcccgagcagggcgtgagcgccctgcagaacaacttcttcatcagcagcctgatggaggccatgcagcaggcccccgacggcgcccacgaccccgaggacccccaccccctgagcgtggtggccggcagacccctgagctgccccaaccacgagggcaagaccatggagttctactgcgaggcctgcgagaccgccatgtgcggcgagtgcagagccggcgagcacagagagcagcacaaggccgccctgcagagacagctggaggccgtgagaggcagactgccccagctgagcgccgccatcgccctggtgggcggcatcagccagcagctgcaggagagaaaggccgaggccctggcccagatcagcgccgccttcgaggacctggagcaggccctgcagcagagaaagcaggccctggtgagcgacctggagaccatctgcggcgccaagcagaaggtgctgcagagccagctggacaccctgagacagggccaggagcacatcggcagcagctgcagcttcgccgagcaggccctgagactgggcagcgcccccgaggtgctgctggtgagaaagcacatgagagagagactggccgccctggccgcccaggccttccccgagagaccccacgagaacgcccagctggagctggtgctggaggtggacggcctgagaagaagcgtgctgaacctgggcgccctgctgaccaccagcgccaccgcccacgagaccgtggccaccggcgagggcctgagacaggccctggtgggccagcccgccagcctgaccgtgaccaccaaggacaaggacggcagactggtgagaaccggcagcgccgagctgagagccgagatcaccggccccgacggcaccagactgcccgtgcccgtggtggaccacaagaacggcacctacgagctggtgtacaccgccagaaccgagggcgagctgctgctgagcgtgctgctgtacggccagcccgtgagaggcagccccttcagagtgagagccctgagacccggcgacctgccccccagccccgacgacgtgaagagaagagtgaagagccccggcggccccggcagccacgtgagacagaaggccgtgagaagacccagcagcatgtacagcaccggcggcaagagaaaggacaaccccatcgaggacgagctggtgttcagagtgggcagcagaggcagagagaagggcgagttcaccaacctgcagggcgtgagcgccgccagcagcggcagaatcgtggtggccgacagcaacaaccagtgcatccaggtgttcagcaacgagggccagttcaagttcagattcggcgtgagaggcagaagccccggccagctgcagagacccaccggcgtggccgtggacaccaacggcgacatcatcgtggccgactacgacaacagatgggtgagcatcttcagccccgagggcaagttcaagaccaagatcggcgccggcagactgatgggccccaagggcgtggccgtggacagaaacggccacatcatcgtggtggacaacaagagctgctgcgtgttcaccttccagcccaacggcaagctggtgggcagattcggcggcagaggcgccaccgacagacacttcgccggcccccacttcgtggccgtgaacaacaagaacgagatcgtggtgaccgacttccacaaccacagcgtgaaggtgtacagcgccgacggcgagttcctgttcaagttcggcagccacggcgagggcaacggccagttcaacgcccccaccggcgtggccgtggacagcaacggcaacatcatcgtggccgactggggcaacagcagaatccaggtgttcgacagcagcggcagcttcctgagctacatcaacaccagcgccgagcccctgtacggcccccagggcctggccctgaccagcgacggccacgtggtggtggccgacgccggcaaccactgcttcaaggcctacagatacctgcagtag

SEQ ID NO: 312135 - DNA, 2235 bp, Artificial Sequence
  derived and/or modified sequence
atggccaagagagaggacagccccggccccgaggtgcagcccatggacaagcagttcctggtgtgcagcatctgcctggacagataccagtgccccaaggtgctgccctgcctgcacaccttctgcgagagatgcctgcagaactacatccccgcccagagcctgaccctgagctgccccgtgtgcagacagaccagcatcctgcccgagcagggcgtgagcgccctgcagaacaacttcttcatcagcagcctgatggaggccatgcagcaggcccccgacggcgcccacgaccccgaggacccccaccccctgagcgtggtggccggcagacccctgagctgccccaaccacgagggcaagaccatggagttctactgcgaggcctgcgagaccgccatgtgcggcgagtgcagagccggcgagcacagagagcacggcaccgtgctgctgagagacgtggtggagcagcacaaggccgccctgcagagacagctggaggccgtgagaggcagactgccccagctgagcgccgccatcgccctggtgggcggcatcagccagcagctgcaggagagaaaggccgaggccctggcccagatcagcgccgccttcgaggacctggagcaggccctgcagcagagaaagcaggccctggtgagcgacctggagaccatctgcggcgccaagcagaaggtgctgcagagccagctggacaccctgagacagggccaggagcacatcggcagcagctgcagcttcgccgagcaggccctgagactgggcagcgcccccgaggtgctgctggtgagaaagcacatgagagagagactggccgccctggccgcccaggccttccccgagagaccccacgagaacgcccagctggagctggtgctggaggtggacggcctgagaagaagcgtgctgaacctgggcgccctgctgaccaccagcgccaccgcccacgagaccgtggccaccggcgagggcctgagacaggccctggtgggccagcccgccagcctgaccgtgaccaccaaggacaaggacggcagactggtgagaaccggcagcgccgagctgagagccgagatcaccggccccgacggcaccagactgcccgtgcccgtggtggaccacaagaacggcacctacgagctggtgtacaccgccagaaccgagggcgagctgctgctgagcgtgctgctgtacggccagcccgtgagaggcagccccttcagagtgagagccctgagacccggcgacctgccccccagccccgacgacgtgaagagaagagtgaagagccccggcggccccggcagccacgtgagacagaaggccgtgagaagacccagcagcatgtacagcaccggcggcaagagaaaggacaaccccatcgaggacgagctggtgttcagagtgggcagcagaggcagagagaagggcgagttcaccaacctgcagggcgtgagcgccgccagcagcggcagaatcgtggtggccgacagcaacaaccagtgcatccaggtgttcagcaacgagggccagttcaagttcagattcggcgtgagaggcagaagccccggccagctgcagagacccaccggcgtggccgtggacaccaacggcgacatcatcgtggccgactacgacaacagatgggtgagcatcttcagccccgagggcaagttcaagaccaagatcggcgccggcagactgatgggccccaagggcgtggccgtggacagaaacggccacatcatcgtggtggacaacaagagctgctgcgtgttcaccttccagcccaacggcaagctggtgggcagattcggcggcagaggcgccaccgacagacacttcgccggcccccacttcgtggccgtgaacaacaagaacgagatcgtggtgaccgacttccacaaccacagcgtgaaggtgtacagcgccgacggcgagttcctgttcaagttcggcagccacggcgagggcaacggccagttcaacgcccccaccggcgtggccgtggacagcaacggcaacatcatcgtggccgactggggcaacagcagaatccaggtgttcgacagcagcggcagcttcctgagctacatcaacaccagcgccgagcccctgtacggcccccagggcctggccctgaccagcgacggccacgtggtggtggccgacgccggcaaccactgcttcaaggcctacagatacctgcagtag

SEQ ID NO: 312136 - DNA, 2229 bp, Artificial Sequence
  derived and/or modified sequence
atggccaagagagaggacagccccggccccgaggtgcagcccatggacaagcagttcctggtgtgcagcatctgcctggacagataccagtgccccaaggtgctgccctgcctgcacaccttctgcgagagatgcctgcagaactacatccccgcccagagcctgaccctgagctgccccgtgtgcagacagaccagcatcctgcccgagcagggcgtgagcgccctgcagaacaacttcttcatcagcagcctgatggaggccatgcagcaggcccccgacggcgcccacgaccccgaggacccccaccccctgagcgtggtggccggcagacccctgagctgccccaaccacgagggcaagaccatggagttctactgcgaggcctgcgagaccgccatgtgcggcgagtgcagagccggcgagcacagagagcacggcaccgtgctgctgagagacgtggtggagcagcacaaggccgccctgcagagacagctggaggccgtgagaggcagactgccccagctgagcgccgccatcgccctggtgggcggcatcagccagcagctgcaggagagaaaggccgaggccctggcccagatcagcgccgccttcgaggacctggagcaggccctgcagcagagaaagcaggccctggtgagcgacctggagaccatctgcggcgccaagcagaaggtgctgcagagccagctggacaccctgagacagggccaggagcacatcggcagcagctgcagcttcgccgagcaggccctgagactgggcagcgcccccgaggtgctgctggtgagaaagcacatgagagagagactggccgccctggccgcccaggccttccccgagagaccccacgagaacgcccagctggagctggtgctggaggtggacggcctgagaagaagcgtgctgaacctgggcgccctgctgaccaccagcgccaccgcccacgagaccgtggccaccggcgagggcctgagacaggccctggtgggccagcccgccagcctgaccgtgaccaccaaggacaaggacggcagactggtgagaaccggcagcgccgagctgagagccgagatcaccggccccgacggcaccagactgcccgtgcccgtggtggaccacaagaacggcacctacgagctggtgtacaccgccagaaccgagggcgagctgctgctgagcgtgctgctgtacggccagcccgtgagaggcagccccttcagagtgagagccctgagacccggcgacctgccccccagccccgacgacgtgaagagaagagtgaagagccccggcggccccggcagccacgtgagacagaaggccgtgagaagacccagcagcatgtacagcaccggcggcaagagaaaggacaaccccatcgaggacgagctggtgttcagagtgggcagcagaggcagagagaagggcgagttcaccaacctgcagggcgtgagcgccgccagcagcggcagaatcgtggtggccgacagcaacaaccagtgcatccaggtgttcagcaacgagggccagttcaagttcagattcggcgtgagaggcagaagccccggccagctgcagagacccaccggcgtggccgtggacaccaacggcgacatcatcgtggccgactacgacaacagatgggtgagcatcttcagccccgagggcaagttcaagaccaagatcggcgccggcagactgatgggccccaagggcgtggccgtggacagaaacggccacatcatcgtggtggacaacaagagctgctgcgtgttcaccttccagcccaacggcaagctggtgggcagattcggcggcagaggcgccaccgacagacacttcgccggcccccacttcgtggccgtgaacaacaagaacgagatcgtggtgaccgacttccacaaccacagcgtgaaggtgtacagcgccgacggcgagttcctgttcaagttcggcagccacggcgagggcaacggccagttcaacgcccccaccggcgtggccgtggacagcaacggcaacatcatcgacgtgtgcagagccagcccctaccccagctacacccccccccacccctgccagagcgccccccacccccccgcctggggccagaacagcctgccccaggacagaagccccagcagctgcctgcccaccaccctgtacaccctgaccgagaccgccatcccccaccccccctactag

SEQ ID NO: 312137 - DNA, 2001 bp, Artificial Sequence
  derived and/or modified sequence
atggccaagagagaggacagccccggccccgaggtgcagcccatggacaagcagttcctggtgtgcagcatctgcctggacagataccagtgccccaaggtgctgccctgcctgcacaccttctgcgagagatgcctgcagaactacatccccgcccagagcctgaccctgagctgccccgtgtgcagacagaccagcatcctgcccgagcagggcgtgagcgccctgcagaacaacttcttcatcagcagcctgatggaggccatgcagcaggcccccgacggcgcccacgaccccgaggacccccaccccctgagcgtggtggccggcagacccctgagctgccccaaccacgagggcaagaccatggagttctactgcgaggcctgcgagaccgccatgtgcggcgagtgcagagccggcgagcacagagagcacggcaccgtgctgctgagagacgtggtggagcagcacaaggccgccctgcagagacagctggaggccgtgagaggcagactgccccagctgagcgccgccatcgccctggtgggcggcatcagccagcagctgcaggagagaaaggccgaggccctggcccagatcagcgccgccttcgaggacctggagcaggccctgcagcagagaaagcaggccctggtgagcgacctggtggacggcctgagaagaagcgtgctgaacctgggcgccctgctgaccaccagcgccaccgcccacgagaccgtggccaccggcgagggcctgagacaggccctggtgggccagcccgccagcctgaccgtgaccaccaaggacaaggacggcagactggtgagaaccggcagcgccgagctgagagccgagatcaccggccccgacggcaccagactgcccgtgcccgtggtggaccacaagaacggcacctacgagctggtgtacaccgccagaaccgagggcgagctgctgctgagcgtgctgctgtacggccagcccgtgagaggcagccccttcagagtgagagccctgagacccggcgacctgccccccagccccgacgacgtgaagagaagagtgaagagccccggcggccccggcagccacgtgagacagaaggccgtgagaagacccagcagcatgtacagcaccggcggcaagagaaaggacaaccccatcgaggacgagctggtgttcagagtgggcagcagaggcagagagaagggcgagttcaccaacctgcagggcgtgagcgccgccagcagcggcagaatcgtggtggccgacagcaacaaccagtgcatccaggtgttcagcaacgagggccagttcaagttcagattcggcgtgagaggcagaagccccggccagctgcagagacccaccggcgtggccgtggacaccaacggcgacatcatcgtggccgactacgacaacagatgggtgagcatcttcagccccgagggcaagttcaagaccaagatcggcgccggcagactgatgggccccaagggcgtggccgtggacagaaacggccacatcatcgtggtggacaacaagagctgctgcgtgttcaccttccagcccaacggcaagctggtgggcagattcggcggcagaggcgccaccgacagacacttcgccggcccccacttcgtggccgtgaacaacaagaacgagatcgtggtgaccgacttccacaaccacagcgtgaaggtgtacagcgccgacggcgagttcctgttcaagttcggcagccacggcgagggcaacggccagttcaacgcccccaccggcgtggccgtggacagcaacggcaacatcatcgtggccgactggggcaacagcagaatccaggtgttcgacagcagcggcagcttcctgagctacatcaacaccagcgccgagcccctgtacggcccccagggcctggccctgaccagcgacggccacgtggtggtggccgacgccggcaaccactgcttcaaggcctacagatacctgcagtag

SEQ ID NO: 312138 - DNA, 2226 bp, Artificial Sequence
  derived and/or modified sequence
atggccaagagagaggacagccccggccccgaggtgcagcccatggacaagcagttcctggtgtgcagcatctgcctggacagataccagtgccccaaggtgctgccctgcctgcacaccttctgcgagagatgcctgcagaactacatccccgcccagagcctgaccctgagctgccccgtgtgcagacagaccagcatcctgcccgagcagggcgtgagcgccctgcagaacaacttcttcatcagcagcctgatggaggccatgcagcaggcccccgacggcgcccacgaccccgaggacccccaccccctgagcgtggtggccggcagacccctgagctgccccaaccacgagggcaagaccatggagttctactgcgaggcctgcgagaccgccatgtgcggcgagtgcagagccggcgagcacagagagcacggcaccgtgctgctgagagacgtggtggagcagcacaaggccgccctgcagagacagctggaggccgtgagaggcagactgccccagctgagcgccgccatcgccctggtgggcggcatcagccagcagctgcaggagagaaaggccgaggccctggcccagatcagcgccgccttcgaggacctggagcaggccctgcagcagagaaagcaggccctggtgagcgacctggagaccatctgcggcgccaagcagaaggtgctgcagagccagctggacaccctgagacagggccaggagcacatcggcagcagctgcagcttcgccgagcaggccctgagactgggcagcgcccccgaggtgctgctggtgagaaagcacatgagagagagactggccgccctggccgcccaggccttccccgagagaccccacgagaacgcccagctggagctggtgctggaggtggacggcctgagaagaagcgtgctgaacctgggcgccctgctgaccaccagcgccaccgcccacgagaccgtggccaccggcgagggcctgagacaggccctggtgggccagcccgccagcctgaccgtgaccaccaaggacaaggacggcagactggtgagaaccggcagcgccgagctgagagccgagatcaccggccccgacggcaccagactgcccgtgcccgtggtggaccacaagaacggcacctacgagctggtgtacaccgccagaaccgagggcgagctgctgctgagcgtgctgctgtacggccagcccgtgagaggcagccccttcagagtgagagccctgagacccggcgacctgccccccagccccgacgacgtgaagagaagagtgaagagccccggcggccccggcagccacgtgagacagaaggccgtgagaagacccagcagcatgtacagcaccggcggcaagagaaaggacaaccccatcgaggacgagctggtgttcagagtgggcagcagaggcagagagaagggcgagttcaccaacctgcagggcgtgagcgccgccagcagcggcagaatcgtggtggccgacagcaacaaccagtgcatccaggtgttcagcaacgagggccagttcaagttcagattcggcgtgagaggcagaagccccggccagctgcagagacccaccggcgtggccgtggacaccaacggcgacatcatcgtggccgactacgacaacagatgggtgagcatcttcagccccgagggcaagttcaagaccaagatcggcgccggcagactgatgggccccaagggcgtggccgtggacagaaacggccacatcatcgtggtggacaacaagagctgctgcgtgttcaccttccagcccaacggcaagctggtgggcagattcggcggcagaggcgccaccgacagacacttcgccggcccccacttcgtggccgtgaacaacaagaacgagatcgtggtgaccgacttccacaaccacagcgtgaaggtgtacagcgccgacggcgagttcctgttcaagttcggcagccacggcgagggcaacggccagttcaacgcccccaccggcgtggccgtggacagcaacggcaacatcatcgtgtgcagagccagcccctaccccagctacacccccccccacccctgccagagcgccccccacccccccgcctggggccagaacagcctgccccaggacagaagccccagcagctgcctgcccaccaccctgtacaccctgaccgagaccgccatcccccaccccccctactag

SEQ ID NO: 312139 - DNA, 2202 bp, Artificial Sequence
  derived and/or modified sequence
atggccaagcgggaagatagtcccgggccagaagtccagcccatggataagcagtttctggtgtgtagcatatgtctcgatcgctatcaatgccctaaagtgctcccatgcctgcacacgttctgtgaaaggtgtctccagaattatattccggcccagagtctgaccttgtcctgccccgtgtgccggcaaaccagtatactgcctgaacagggtgtcagcgcgctccaaaataacttctttatatctagcctaatggaagctatgcagcaagctcccgatggcgcccatgatcccgaggacccgcatcccctgtccgttgtggccggtcggcccctgtcttgtcccaatcacgagggtaagaccatggaattctactgcgaagcttgcgagaccgcaatgtgtggggaatgccgggctggagagcacagggagcagcataaagccgctctacagcgacagcttgaggcggtacgtggtcggctccctcaacttagcgccgccattgccctggttggtggcatcagccagcagcttcaggaaaggaaggctgaagcactggcgcagatctctgctgccttcgaagacctggagcaggctttacagcagaggaagcaggcgctcgtgagtgatctggaaaccatttgtggcgccaagcaaaaggtgctgcagtcacagctggatacgctccggcagggccaagaacatatcggtagtagttgtagctttgcggaacaggcgttaagactcggtagcgcccctgaagtgctgcttgtccgcaaacacatgagagaacgcctagctgcactagctgctcaggcttttccagagcggcctcacgagaatgcccagctcgaacttgttctggaggttgatggcctgaggcggtccgtgcttaacttgggagcgctgctcactacgtccgccactgcccatgagaccgtcgctaccggcgaaggcttgaggcaggcgcttgtgggacaacctgcaagcctgacagttaccacgaaagataaagacggaagactcgtccgtacaggaagtgcagagctccgagctgagataacaggccccgatggtactaggctgcctgtgcccgtggttgaccacaagaacgggacctacgagcttgtgtacaccgcaagaacagaaggggagctgctcctttctgtgctgctgtacggtcaaccagtgagaggctcgccgttccgcgtgagggcactcagacccggggacttacccccaagtccagatgacgtcaagcgcagggttaagagtcccggtggccccggatcacacgtaagacagaaggccgtaaggcgaccttcctcaatgtatagtaccggcgggaaaagaaaggacaaccctattgaagacgagctggtgtttcgggtcggcagcagaggccgggaaaaaggcgaattcactaacctgcaaggtgtgagcgccgcatccagtggccgcattgtggtggcagattcaaacaaccagtgcatacaagtcttttccaatgagggccaattcaagttccggtttggcgtgcggggccgtagtcccggccagctgcagaggcccactggtgtggccgtagacacaaacggcgacataatcgtggcagactacgataaccgttgggtcagcatctttagccctgagggaaagttcaaaaccaagattggcgctgggagactcatgggccctaagggcgtcgcagtggatcgcaatgggcatattattgttgttgataacaagagttgctgcgttttcaccttccagccaaacgggaaattggtgggtagatttggcggtagaggggcaaccgaccggcacttcgccgggccgcactttgtggccgtcaataacaaaaacgaaattgtggtcactgattttcataatcactctgtaaaagtttatagcgcagacggcgaatttcttttcaagttcggaagtcacggggagggaaatgggcagtttaatgccccaaccggggtggctgtcgatagtaatgggaatataatcgtcgccgattggggtaacagcaggatacaggtcttcgatagttccggatcctttctgtcttatatcaacacatctgcggagccactatacggacctcaggggttagccctgacgagcgatgggcatgtggtggtggcagacgcgggtaatcattgtttcaaggcctacagatatcttcaatag

SEQ ID NO: 312140 - DNA, 2235 bp, Artificial Sequence
  derived and/or modified sequence
atggctaagcgtgaagactcgcccggtccagaagttcagcccatggacaagcagttccttgtgtgttccatctgcctggaccgctatcagtgtcccaaagtcctgccttgtttgcacacgttctgcgagagatgtctgcaaaactatattccagcgcagtcgctgacgctgagctgtccagtgtgtaggcagacctcaatcttgcccgagcagggggtgtccgcactgcagaacaacttctttatctcaagtcttatggaagcgatgcagcaggcccccgatggtgcacacgaccctgaggatccccacccgctttctgttgtggccgggaggcctctctcttgccctaatcatgagggcaagacgatggagttctactgcgaagcctgcgagacagcaatgtgcggggaatgcagagccggtgaacatcgagagcacggtaccgtccttcttcgggacgtggtggagcagcataaagccgctctgcagagacagctggaggcggtgcggggacggttgccgcaactcagtgcggccatcgctctagtcggaggcatcagccaacaactgcaggagaggaaggcggaggccctagcacagatttcggctgcgttcgaggacctcgagcaagcacttcagcagcgaaaacaagcactggttagcgacctagaaactatttgcggtgcaaagcagaaggtgctccaatctcagctcgacacccttcgacagggccaggaacatatcggaagtagctgttctttcgccgaacaagctctcagacttgggtccgccccggaggtgctgctagttaggaagcatatgcgagagcgcctggccgccctggccgctcaggccttccctgaacgacctcatgaaaatgctcagttagagctggtgctggaagtggacgggctccgccggtccgtgcttaacctgggtgcattgctaactacttctgccactgctcacgaaacggtggcgacaggtgagggcttaaggcaggcactggtgggacagccggcatccctgaccgtcaccacaaaggacaaggacggccgactggtccggaccggaagcgccgaactacgtgccgaaattacgggcccagatggcacgagactgccggtcccagtggttgaccacaaaaatggaacttacgaattggtgtacactgctagaactgagggagagctcctcttgtccgtgcttctctatggccaacccgtaagaggcagcccttttcgagtgcgggcattgagacctggagatcttcctccaagtccggatgacgtcaaaagacgggtgaaaagcccaggcggtccagggagccacgtcaggcagaaggccgtgagaaggcctagttcaatgtatagtactggaggcaagagaaaagacaatcccatcgaggatgagctagtgtttcgggtaggcagcagagggcgggaaaagggcgaatttacaaacctccagggagtctcagccgcttcctcagggcgcatcgtcgttgccgattccaataaccaatgcattcaggtatttagtaatgaaggtcagttcaagttccgttttggtgtccgaggacgcagccctggccaactgcagaggccgaccggtgtggccgtggatactaacggagacatcatcgtggcggactacgacaatcgctgggtgtccatttttagccctgagggcaagtttaagacaaaaataggcgctgggcggctcatggggcctaaaggggtggcagtggaccgcaatggccatattatcgtcgtggataacaaatcgtgttgtgtcttcacatttcagccaaacggcaaactcgtgggcaggtttggggggaggggcgcgacagaccgccacttcgccggcccccactttgtggcggtcaataataaaaacgagatcgtcgtgactgactttcacaatcattccgtgaaagtctacagcgcagatggcgagttcctgttcaagtttggcagtcacggtgaaggaaacggccaatttaatgctcctactggcgtggcagtggacagtaatggtaacataattgtggcagactggggaaacagtcgtatacaagtgtttgatagttctggttcattcctgtcttatattaatacatcagccgagcccttgtatggcccacagggcctggctctaacctccgatggtcatgtagtggtcgccgatgctggaaatcattgctttaaggcctataggtatttgcagtag

SEQ ID NO: 312141 - DNA, 2235 bp, Artificial Sequence
  derived and/or modified sequence
atggctaaacgcgaggattccccaggaccagaagtccagcctatggacaagcaatttttagtctgttcgatctgtttagatcggtatcagtgtcccaaagtactcccatgcttgcacactttttgcgaaaggtgcctccagaattacattcccgcccagtctttgaccctgtcctgccctgtctgcagacagacgagtatattaccggagcagggagtgtccgccctgcaaaataattttttcatatcctcactaatggaggccatgcagcaggctcctgacggagcgcatgaccctgaggatccccaccctctcagtgtcgttgccggccggccgctgagttgtcctaatcatgaggggaagacaatggagttttactgtgaagcttgtgagactgctatgtgtggtgaatgccgtgcaggggagcatagggaacacggtactgtcttattgcgggacgtcgttgagcagcacaaagcagccctgcagcggcagctggaggctgtgcgcggacgactgccccagctctccgctgcaattgcattggttgggggcattagccaacagctgcaggaacggaaggccgaggccctggcgcaaatttcagcagcattcgaggatcttgagcaggctttgcagcaaagaaagcaggcgctggtgagcgatctggagacaatctgcggtgcaaaacaaaaagtattacaatcccagctggataccctcagacaggggcaggaacatatcggcagctcatgctcgttcgctgaacaggcattaaggctcggatccgcgcccgaggtactcctcgttaggaagcacatgcgcgaaaggcttgccgcacttgctgctcaggcctttcccgagcgcccacacgagaacgcccagttggaattagtgttagaggtcgatggcctgaggcgttcagtgctcaacctgggcgcccttttgacaacgtctgcaaccgctcatgagaccgtcgcgacaggcgaagggttacggcaggctttagtaggccagcctgcttcacttacagtcaccactaaagacaaggacgggcgcctcgtgcgaacggggagcgcagagctgcgcgcagagattacaggacccgatggaacgaggttacctgtgcctgtagtggaccataagaatggtacctatgagctggtgtatactgcccgtaccgaaggtgagctgctcctgtccgtcctgctctacgggcagccggttagagggagcccatttcgcgttcgcgcattgcgacccggggacctgccccccagccctgacgacgtaaagcgtcgagtgaaatcaccaggagggccagggagccacgtgaggcagaaggcagttaggcgccctagttccatgtattcaacaggcggcaagagaaaggacaatcccatcgaagatgagttggtgttccgagtgggttcaagaggtagagaaaagggtgagtttacaaacctgcagggggtgagtgctgcctcaagtggtagaatcgttgtggctgactccaataatcagtgcattcaagtcttctctaacgagggtcaatttaagtttagatttggagtacgaggccgatcaccaggccaattacaaagacctaccggggtcgcagtggataccaacggcgacattatagttgctgactacgacaaccgctgggtgagcatcttctcgcccgagggtaagttcaagactaagatcggtgcaggaaggctgatgggacccaagggtgtcgccgttgatagaaacggccacattatcgttgtcgacaataagagttgttgcgtgtttacattccagcctaacggaaagcttgttggaaggttcggcggacgcggggccactgaccgccattttgccggaccacacttcgtggccgtgaataacaaaaatgagatcgtggtcactgatttccacaatcactctgtgaaggtctatagcgcggacggcgagttcctgttcaaatttggatcccacggcgagggcaacggccagtttaacgcgccgacaggagtggcagtcgactctaacggcaatattatcgttgccgactggggaaacagccggattcaggtttttgatagttcagggagctttctctcatacatcaatacatccgcagagcccttgtacggaccacagggactggccctgacctccgacggacacgtggtcgtagcggacgcgggaaaccattgcttcaaggcctatcggtacctacaatag

SEQ ID NO: 312142 - DNA, 2235 bp, Artificial Sequence
  derived and/or modified sequence
atggccaaacgtgaggacagcccaggtccagaggtgcagcctatggacaagcagtttctggtgtgctccatttgtctagaccgataccaatgtcccaaggtgttgccgtgtcttcataccttctgtgagagatgccttcagaactacatcccagcccagagccttacgctgtcctgccccgtgtgccggcaaacatccatactgcctgaacagggtgtgtccgctttgcagaacaatttcttcatttcgtctctgatggaagctatgcagcaggcaccggatggcgctcatgaccctgaggacccccacccattgtcagtggtggccggccggcccctctcctgccctaatcatgaaggcaagactatggagttttactgtgaagcctgtgagacggccatgtgtggagagtgcagggcaggagaacaccgcgaacatgggaccgttctgctccgcgacgtagtggagcagcataaggctgcccttcagaggcaacttgaggcagtccgcggccgacttccccagctgtctgccgcgatagctttagtgggagggatcagtcagcaattgcaagaaaggaaggccgaggcacttgctcagatcagcgccgcctttgaagacctggaacaggccctccagcagcggaagcaggccctcgtcagtgacctcgagactatctgtggcgctaaacagaaagtcctgcagagccagctcgatacactcaggcaaggacaagaacacattggcagctcttgctctttcgctgaacaggctctgcgccttggctctgctcccgaggtgcttctggtgcgcaagcatatgagggaaaggctcgctgctctggccgcacaggctttcccagagaggcctcatgaaaatgcacagctggagctggtattggaggttgacggtctcaggcgttcagttcttaacttaggggcactgctgaccacctctgccactgcacacgagaccgtcgctaccggagaggggttgcgccaagcgctggtagggcagccagcttcgctgaccgtcaccacaaaagacaaagacggaagactggtacgaaccggtagtgctgagcttcgtgccgagatcacagggccagatgggacacggttacccgtccctgttgtggaccataaaaatggcacctacgagctggtctacactgctaggaccgaaggggagctgttgttatctgtcctcctctatgggcagccggtccggggcagccctttcagagtgcgcgccctgcggccaggagatctcccaccttcacccgacgatgtgaaacgtagagtcaaatctcctggtggtcctggcagtcacgtgcgtcagaaggccgtcaggaggccctctagcatgtacagcactgggggaaaacgtaaggataatcctattgaagacgaattggtgttcagagtcggctctcggggccgtgagaaaggcgaatttactaacctccaaggggtttcagctgcgagtagtggtagaatagtagtggccgatagcaacaatcagtgcattcaggtgttcagcaacgaaggccagttcaaattcaggttcggagtgcggggccgtagtcccggccagctgcagaggccaacaggggtggccgtcgacacgaatggagacatcatagtagccgactacgacaacaggtgggtaagtatatttagtccagaaggcaaattcaagacgaagattggggctgggagactcatgggacctaaaggcgtggccgtcgacaggaatggacatataatcgtggtggacaacaaatcttgctgtgtattcactttccagcctaacggaaaactagtgggcaggttcggggggagaggggcgaccgacagacatttcgccggcccgcacttcgtggcagtgaacaataagaacgagatcgtggtgactgactttcataatcactccgtgaaggtgtattcggctgacggagagttcttatttaaattcggcagccatggcgagggcaacggacagttcaacgcacccaccggagtggctgttgatagtaatggtaacataatcgtggcagactgggggaattctcgcatccaggtgttcgactcatcaggcagtttcctgagttacattaacacctctgcggagccgctgtatggcccacagggactagctctaaccagcgacggccatgtggtggtggccgacgccgggaatcactgctttaaggcgtaccgttacctgcagtag

SEQ ID NO: 312143 - DNA, 2229 bp, Artificial Sequence
  derived and/or modified sequence
atggcaaagcgggaagactctccaggtcctgaggtgcagccaatggacaagcagttcctggtgtgttccatatgtctggacaggtatcaatgtccgaaagttttaccatgcctgcacactttctgtgagcgttgtcttcagaactatatcccagcgcagagtctcacgctgtcctgcccagtctgcaggcagacatcaatactgcccgagcaaggggtgtctgctctccagaacaactttttcatctctagtctgatggaagccatgcagcaggcacccgatggcgcgcacgatccggaagatccccatccactcagcgtggtggccggtcgcccgcttagctgccctaaccatgaagggaaaactatggaattttactgtgaggcatgtgagactgctatgtgcggagaatgcagagccggcgaacatagagagcatggcactgtcctcctcagggacgttgtcgaacagcataaggctgctctccagaggcaactggaagcagttagagggcggttgccgcagctgtcagccgctatcgccctggttggagggattagccaacagctgcaggagcgcaaggctgaggccctggctcaaataagtgccgctttcgaagacctcgaacaggccctccagcagcgaaagcaggcccttgtttccgacctcgagacaatatgtggagccaagcagaaggtcctacagtcacagctggacaccctgcgacaggggcaggagcacattggttcttcttgttcttttgcggagcaggcgctgcgcttgggtagcgcacccgaagtgctgctagtgcgtaaacacatgcgggaacgattagccgcattggctgcacaggctttccctgagcgccctcatgaaaatgcgcagctcgagctggtgctggaggtggacgggctgcgtcggtcagtattgaacctgggggccctgctgaccactagtgccactgctcacgagaccgtggccacaggtgagggccttaggcaggcattggtcggccaacctgcatccctcacagtgaccacgaaagataaggacggaaggctggtcaggaccggaagcgctgaattgcgggcggagataactggccccgacggtacaaggctacctgtgccagtcgtagaccataagaatggcacctacgagcttgtctacacggcgcgtacagagggtgagcttttgctgtcagtgctcctatacggccaaccagtccgcgggagcccctttagagtgcgagcactacgccccggagaccttcctcccagtccggatgacgtgaaacggcgggtgaagagtcccggtggtcccggcagccacgtgcgacaaaaggccgtgaggcggcccagctccatgtattcaactggcggaaagcggaaggacaaccctatagaggatgagctagtgtttagggtggggtctagaggccgggaaaagggagaattcacaaaccttcaaggcgtgagcgcagccagctctggaagaatcgtagtggccgactccaataaccaatgtattcaggttttctccaacgagggccagttcaagttcaggtttggtgtcaggggaaggtcacccgggcagctccagcgacccactggagttgctgtggacaccaacggggatatcatcgtggccgattacgataatagatgggtgagcattttcagcccagagggtaagtttaagacgaagatcggagcaggcaggttgatggggcccaaaggggtggccgtagataggaacgggcacattattgtggtggataacaaatcttgctgcgttttcacctttcaaccaaatggaaaattggtaggtcgcttcggtggacggggtgcaaccgaccgtcactttgcggggccgcatttcgtcgcagtcaacaacaaaaatgagattgtcgttacggactttcacaaccattccgtcaaggtttattctgcagatggagagtttctctttaagttcggatcacatggcgaagggaacggccagtttaatgccccaactggagtcgcagtcgacagcaacgggaatattattgacgtttgtcgcgcaagtccctatccatcttacacacctccccatccctgccagtccgccccccacccacccgcttggggtcagaacagtctcccacaggacaggtcaccgtcatcctgcttgcctaccacactctatacacttacggagaccgcaattccccatccgccatactag

SEQ ID NO: 312144 - DNA, 2001 bp, Artificial Sequence
  derived and/or modified sequence
atggccaaaagagaagatagtcctggtcctgaagtccagcctatggataaacaattcctggtgtgctcaatctgcctggaccggtaccaatgcccaaaagtgctcccgtgcctccatacattctgcgaacgctgcctgcagaactatatccctgcccagtccctgaccttatcctgcccagtttgcagacagacctcgatcctgccagagcagggcgttagcgccctgcagaataatttcttcattagttccctgatggaggctatgcaacaggctcctgacggcgcccatgacccggaagaccctcatccactctcagtggtagcaggtcgaccactctcttgccccaaccatgagggcaagactatggagttttattgtgaggcatgtgaaaccgccatgtgtggcgagtgccgggcaggagagcacagagagcacgggaccgtgctgctgagagacgtagtcgagcagcacaaagctgcattacagaggcaactcgaagccgtgaggggtcgtctgccccaattgagcgcggcgatcgctttggtcggcggtatttcccagcaactccaggagcgtaaagccgaggccttggcacagataagtgccgcctttgaagatctcgagcaggccctgcagcagcggaagcaggcacttgtgtcagatctggtcgacggactgaggaggagtgttctgaatctgggcgccctgctcaccacctctgctacagctcatgagacagtggccaccggcgagggccttcgacaagcgctcgtgggtcaacccgcctcgctcacggtgactactaaggacaaggacggacgccttgtacggactggctccgcagagttgagagccgaaattacagggcccgacggtacaagattgcctgtgcctgtcgtggaccacaaaaatggaacctacgaacttgtgtataccgcccgaacggaaggcgagcttctcttatctgtcctgctgtatgggcaacctgttcgggggtcccctttcagagtgcgggcacttcgcccaggcgatctaccccctagccctgacgacgtcaaaagaagagttaagagccccggaggacctggttctcacgtcaggcagaaggccgtacggcggccaagtagcatgtattcaaccggcggcaaaagaaaggataacccaatcgaagatgagctggtatttcgggtggggtcccggggccgggagaaaggcgagttcaccaacctgcaaggggtgtccgcagctagctccgggagaatcgtggtggccgacagcaacaatcagtgcatccaggtgttcagcaacgaaggccagttcaagtttagattcggcgtgcggggcagatcaccaggacagctgcagaggccgacaggagtagccgtcgatacaaatggcgacatcatagttgccgactatgataatcggtgggtctctattttttctcctgaaggtaagtttaaaactaaaattggtgctggaagattgatggggcctaagggcgtagctgtggatagaaatggccatattattgtcgtggataataagtcatgctgtgtattcacatttcagcccaacggtaaactagttgggcggttcggcggcaggggcgcgaccgataggcactttgcaggaccccatttcgtggccgtaaataacaagaatgagattgtagtcactgactttcacaatcactctgtgaaggtctactcagctgatggcgagtttctgttcaagtttggatctcacggagaaggcaatggacagtttaacgccccgaccggagttgctgtcgattccaatggcaacatcatcgttgccgactggggcaattcgaggattcaggtcttcgacagctccggctcattcctttcatatataaacacttcggcagagcctctctatggcccacagggccttgctctgacctctgacggacatgtggtcgtcgccgatgctggaaaccattgttttaaagcttaccggtacctgcagtag

SEQ ID NO: 312145 - DNA, 2226 bp, Artificial Sequence
  derived and/or modified sequence
atggctaagcgcgaggatagccctggcccagaggtgcaaccaatggacaagcagtttctcgtgtgtagtatttgtctcgatcgttatcagtgcccaaaagtcttaccatgcttacataccttctgtgaacgctgcctccaaaactacatcccagcccagtcccttactctgagctgcccggtttgtagacagaccagtatcttgccagaacagggagttagcgcgttgcagaacaatttttttatttctagcctcatggaagctatgcagcaggcaccagacggggcacacgaccctgaggacccacaccccctctctgtcgtggcaggtcgcccgctcagctgtcccaaccacgagggtaagacgatggaattctattgcgaggcctgtgaaaccgcaatgtgcggtgagtgccgtgctggagagcaccgggaacacggaacagttctgttgagggacgtcgtagaacagcacaaagcagcactccagaggcagcttgaagccgtgagagggaggttgcctcaactctccgcagccatcgccctcgttggaggcatctctcagcagctgcaagaaagaaaggcagaggccctggcccagatcagtgctgctttcgaggacctcgagcaggcactgcagcaacgcaaacaggccctggtgtctgatctggaaacaatttgcggcgccaagcagaaagttctccagtcccagcttgacactctccggcaaggccaagagcatattggtagcagttgtagtttcgccgagcaggcgttgcgcctgggctcagctcccgaagttcttctcgtgcgaaagcacatgagagagcggctcgcagctctcgctgctcaggcctttccagagcgaccacatgaaaatgctcaattggagctggtccttgaggttgatgggctgaggcgtagtgtcctgaatctcggcgcgctgctgaccacatctgctacggcgcacgagactgtggccacaggggagggcctccgccaggccctcgtcggacagccggcctcactgaccgtgactaccaaagacaaagacggccggctagtgaggactgggagtgccgagctgcgcgccgaaataactgggccagacggaactaggctgccggtgcctgtggtggaccataagaatggaacctacgaactggtgtatacggctcgcactgagggcgagctgctgttatcggtgttactctacggccagcctgtacgtggttccccgttcagggtccgcgcgctgagacccggggatctgccgccaagcccggacgacgtcaagcgcagagtgaaaagcccaggaggtccaggctcacatgtgcgccaaaaggcagtgcggaggcccagttctatgtattccacagggggaaagcgtaaagacaaccccatcgaggatgagctcgtatttcgtgttggctcccgaggtagggaaaagggcgagtttaccaacctgcagggcgtatcggccgcttcctcgggacgtatcgtggttgccgactcaaacaaccagtgcatccaagtgttctctaatgagggccagtttaaatttcgcttcggagtgcgaggacgctcacccgggcagttgcagcgccctactggagtcgcggtggacacaaatggagacattatcgtcgccgactatgataacagatgggtgagcattttttctcctgagggtaagttcaagaccaagataggcgcaggcaggcttatgggacctaaaggcgtggccgtggaccgcaatgggcacattatagtcgtcgacaacaagtcatgttgtgtctttactttccagcctaatggaaaactcgtggggcggttcgggggacgaggcgccaccgatcggcacttcgctggacctcactttgtagcagttaataataagaacgaaatcgttgtcaccgatttccacaaccactccgttaaggtgtactccgcagacggagaattcctgtttaagtttggctcccacggggagggtaacggccagttcaacgcccccactggggtcgcagtggacagcaacggtaacatcattgtctgtcgcgcgtctccctacccgagctacaccccccctcatccgtgccagagcgcacctcaccccccggcatggggccaaaatagcctgcctcaggatcgttctccatccagttgtcttcccactaccctgtacacgctgacagaaactgctatcccacaccccccatattag

SEQ ID NO: 312146 - DNA, 2202 bp, Artificial Sequence
  derived and/or modified sequence
atggccaagcgggaggacagccctggccctgaggtgcagcccatggacaagcagttcctggtgtgcagcatctgcctggaccgctaccagtgccccaaggtgctgccctgcctgcacaccttctgtgagcgctgcctgcagaactacatcccagcccagagcctgaccctgagctgccctgtgtgccggcagaccagcatcctgcctgagcagggcgtgtctgccctgcagaacaacttcttcatcagcagcctgatggaggccatgcagcaggccccagatggagcccatgaccctgaggacccccaccccctgtctgtggtggccggccggcccctgagctgccccaaccacgagggcaagaccatggagttctactgtgaggcctgtgaaacagccatgtgtggagaatgtcgggccggggagcaccgggagcagcacaaggccgccctgcagaggcagctggaggccgtgcggggccgcctgccccagctgtctgctgccatcgccctggtgggcggcatcagccagcagctgcaggagaggaaggccgaggccctggcccagatctctgctgcctttgaggacctggagcaggccctgcagcagaggaagcaggccctggtgtctgacctggagaccatctgtggggccaagcagaaggtgctgcagagccagctggacaccctgcggcagggccaggagcacatcggcagcagctgcagctttgctgagcaggccctgcggctgggcagcgcccctgaggtgctgctggtgaggaagcacatgagggagcggctggccgccctggccgcccaggccttccctgagcggccccatgaaaatgcccagctggagctggtgctggaggtggatggcctgcggcgctctgtgctgaacctgggcgccctgctgaccaccagcgccacagcccacgagaccgtggccactggagagggcctgcggcaggccctggtgggccagcctgccagcctgactgtgaccaccaaggacaaggatggccgcctggtgaggacaggcagcgctgagctgcgggcagagatcaccggcccagatggcacccggctgcctgtgcctgtggtggaccacaagaatggcacctatgagctggtgtacacagccaggacagaaggagagctgctgctgtctgtgctgctgtatggccagcctgtgcggggcagccccttccgggtgcgggccctgcggcctggggacctgccccccagcccagatgatgtgaagagaagagtgaagagccctgggggccctggcagccacgtgcggcagaaggctgtgcggcggcccagctccatgtacagcactggaggcaagaggaaggacaaccccattgaagatgagctggtgttccgggtgggcagccggggccgggagaagggggagttcaccaacctgcagggcgtgtctgctgccagcagcggcagaattgtggtggccgacagcaacaaccagtgcatccaggtgttcagcaatgaaggccagttcaagttccgcttcggcgtgcggggccgcagccctggccagctgcagaggcccaccggggtggccgtggacaccaatggagacatcatcgtggccgactatgacaaccgctgggtgtccatcttcagccctgagggcaagttcaagaccaagattggagctggccgcctgatgggccccaagggcgtggccgtggacagaaatggccacatcatcgtggtggacaacaagagctgctgcgtgttcaccttccagcccaacgggaagctggtgggccgctttggaggccgcggggccacagacagacactttgctggcccccactttgtggccgtgaacaacaagaatgaaattgtggtgacagacttccacaaccacagcgtgaaggtgtacagcgcagatggagagttcctgttcaagtttggcagccatggagagggcaatggccagttcaatgcccccaccggggtggccgtggacagcaatggaaacatcatcgtggccgactggggcaacagccgcatccaggtgtttgacagcagcggcagcttcctgagctacatcaacaccagcgctgagcccctgtatggcccccagggcctggccctgaccagtgatggccacgtggtggtggctgatgctggcaaccactgcttcaaggcctaccgctacctgcagtag

SEQ ID NO: 312147 - DNA, 2235 bp, Artificial Sequence
  derived and/or modified sequence
atggccaagcgggaggacagccctggccctgaggtgcagcccatggacaagcagttcctggtgtgcagcatctgcctggaccgctaccagtgccccaaggtgctgccctgcctgcacaccttctgtgagcgctgcctgcagaactacatcccagcccagagcctgaccctgagctgccctgtgtgccggcagaccagcatcctgcctgagcagggcgtgtctgccctgcagaacaacttcttcatcagcagcctgatggaggccatgcagcaggccccagatggagcccatgaccctgaggacccccaccccctgtctgtggtggccggccggcccctgagctgccccaaccacgagggcaagaccatggagttctactgtgaggcctgtgaaacagccatgtgtggagaatgtcgggccggggagcaccgggagcacggcaccgtgctgctgagagatgtggtggagcagcacaaggccgccctgcagaggcagctggaggccgtgcggggccgcctgccccagctgtctgctgccatcgccctggtgggcggcatcagccagcagctgcaggagaggaaggccgaggccctggcccagatctctgctgcctttgaggacctggagcaggccctgcagcagaggaagcaggccctggtgtctgacctggagaccatctgtggggccaagcagaaggtgctgcagagccagctggacaccctgcggcagggccaggagcacatcggcagcagctgcagctttgctgagcaggccctgcggctgggcagcgcccctgaggtgctgctggtgaggaagcacatgagggagcggctggccgccctggccgcccaggccttccctgagcggccccatgaaaatgcccagctggagctggtgctggaggtggatggcctgcggcgctctgtgctgaacctgggcgccctgctgaccaccagcgccacagcccatgaaacagtggccaccggggagggcctgcggcaggccctggtgggccagcctgccagcctgactgtgaccaccaaggacaaggatggccgcctggtgaggactggatctgctgagctgcgggcagagatcactggaccagatggcacccggctgcctgtgcctgtggtggaccacaagaatggcacctatgagctggtgtacacagccaggacagaaggagagctgctgctgtctgtgctgctgtatggccagcctgtgcggggcagccccttccgggtgcgggccctgcggcctggggacctgccccccagcccagatgatgtgaagagaagagtgaagagccctgggggccctggcagccacgtgcggcagaaggctgtgagaagacccagctccatgtacagcactggaggcaagaggaaggacaaccccattgaagatgagctggtgttccgggtgggcagccggggccgggagaagggggagttcaccaacctgcagggcgtgtctgctgccagcagcggccgcatcgtggtggccgacagcaacaaccagtgcatccaggtgttcagcaatgaaggccagttcaagttccgctttggagtgcggggccgcagccctggccagctgcagaggcccactggagtggccgtggacaccaacggggacatcatcgtggccgactatgacaaccgctgggtgtccatcttcagccctgagggcaagttcaagaccaagatcggggccggccgcctgatgggccccaagggcgtggccgtggacagaaatggccacatcatcgtggtggacaacaagagctgctgcgtgttcaccttccagcccaacgggaagctggtgggccgctttggaggccgcggggccacagacagacactttgctggcccccactttgtggccgtgaacaacaagaatgagatcgtggtgacagacttccacaaccacagcgtgaaggtgtacagcgcagatggagagttcctgttcaagtttggcagccacggggagggcaatggccagttcaatgcccccactggagtggccgtggacagcaatggaaacatcatcgtggccgactggggcaacagccgcatccaggtgtttgacagcagcggcagcttcctgagctacatcaacaccagcgctgagcccctgtatggcccccagggcctggccctgaccagtgatggccacgtggtggtggctgatgctggcaaccactgcttcaaggcctaccgctacctgcagtag

SEQ ID NO: 312148 - DNA, 2229 bp, Artificial Sequence
  derived and/or modified sequence
atggccaagcgggaggacagccctggccctgaggtgcagcccatggacaagcagttcctggtgtgcagcatctgcctggaccgctaccagtgccccaaggtgctgccctgcctgcacaccttctgtgagcgctgcctgcagaactacatcccagcccagagcctgaccctgagctgccctgtgtgccggcagaccagcatcctgcctgagcagggcgtgtctgccctgcagaacaacttcttcatcagcagcctgatggaggccatgcagcaggccccagatggagcccatgaccctgaggacccccaccccctgtctgtggtggccggccggcccctgagctgccccaaccacgagggcaagaccatggagttctactgtgaggcctgtgaaacagccatgtgtggagaatgtcgggccggggagcaccgggagcacggcaccgtgctgctgagagatgtggtggagcagcacaaggccgccctgcagaggcagctggaggccgtgcggggccgcctgccccagctgtctgctgccatcgccctggtgggcggcatcagccagcagctgcaggagaggaaggccgaggccctggcccagatctctgctgcctttgaggacctggagcaggccctgcagcagaggaagcaggccctggtgtctgacctggagaccatctgtggggccaagcagaaggtgctgcagagccagctggacaccctgcggcagggccaggagcacatcggcagcagctgcagctttgctgagcaggccctgcggctgggcagcgcccctgaggtgctgctggtgaggaagcacatgagggagcggctggccgccctggccgcccaggccttccctgagcggccccatgaaaatgcccagctggagctggtgctggaggtggatggcctgcggcgctctgtgctgaacctgggcgccctgctgaccaccagcgccacagcccatgaaacagtggccaccggggagggcctgcggcaggccctggtgggccagcctgccagcctgactgtgaccaccaaggacaaggatggccgcctggtgaggactggatctgctgagctgcgggcagagatcactggaccagatggcacccggctgcctgtgcctgtggtggaccacaagaatggcacctatgagctggtgtacacagccaggacagaaggagagctgctgctgtctgtgctgctgtatggccagcctgtgcggggcagccccttccgggtgcgggccctgcggcctggggacctgccccccagcccagatgatgtgaagagaagagtgaagagccctgggggccctggcagccacgtgcggcagaaggctgtgagaagacccagctccatgtacagcactggaggcaagaggaaggacaaccccattgaagatgagctggtgttccgggtgggcagccggggccgggagaagggggagttcaccaacctgcagggcgtgtctgctgccagcagcggccgcatcgtggtggccgacagcaacaaccagtgcatccaggtgttcagcaatgaaggccagttcaagttccgctttggagtgcggggccgcagccctggccagctgcagaggcccactggagtggccgtggacaccaacggggacatcatcgtggccgactatgacaaccgctgggtgtccatcttcagccctgagggcaagttcaagaccaagatcggggccggccgcctgatgggccccaagggcgtggccgtggacagaaatggccacatcatcgtggtggacaacaagagctgctgcgtgttcaccttccagcccaacgggaagctggtgggccgctttggaggccgcggggccacagacagacactttgctggcccccactttgtggccgtgaacaacaagaatgagatcgtggtgacagacttccacaaccacagcgtgaaggtgtacagcgcagatggagagttcctgttcaagtttggcagccacggggagggcaatggccagttcaatgcccccactggagtggccgtggacagcaatggaaacatcattgatgtgtgccgggccagcccctaccccagctacaccccaccccacccctgccagagcgccccccaccccccagcctggggccagaacagcctgccccaggacaggagccccagcagctgcctgcccaccaccctgtacaccctgacagaaacagccatcccccaccccccctactag

SEQ ID NO: 312149 - DNA, 2001 bp, Artificial Sequence
  derived and/or modified sequence
atggccaagcgggaggacagccctggccctgaggtgcagcccatggacaagcagttcctggtgtgcagcatctgcctggaccgctaccagtgccccaaggtgctgccctgcctgcacaccttctgtgagcgctgcctgcagaactacatcccagcccagagcctgaccctgagctgccctgtgtgccggcagaccagcatcctgcctgagcagggcgtgtctgccctgcagaacaacttcttcatcagcagcctgatggaggccatgcagcaggccccagatggagcccatgaccctgaggacccccaccccctgtctgtggtggccggccggcccctgagctgccccaaccacgagggcaagaccatggagttctactgtgaggcctgtgaaacagccatgtgtggagaatgtcgggccggggagcaccgggagcacggcaccgtgctgctgagagatgtggtggagcagcacaaggccgccctgcagaggcagctggaggccgtgcggggccgcctgccccagctgtctgctgccatcgccctggtgggcggcatcagccagcagctgcaggagaggaaggccgaggccctggcccagatctctgctgcctttgaggacctggagcaggccctgcagcagaggaagcaggccctggtgtctgacctggtggatggcctgcggcgctctgtgctgaacctgggcgccctgctgaccaccagcgccacagcccatgaaacagtggccaccggggagggcctgcggcaggccctggtgggccagcctgccagcctgactgtgaccaccaaggacaaggatggccgcctggtgaggactggatctgctgagctgcgggcagagatcactggaccagatggcacccggctgcctgtgcctgtggtggaccacaagaatggcacctatgagctggtgtacacagccaggacagaaggagagctgctgctgtctgtgctgctgtatggccagcctgtgcggggcagccccttccgggtgcgggccctgcggcctggggacctgccccccagcccagatgatgtgaagagaagagtgaagagccctgggggccctggcagccacgtgcggcagaaggctgtgagaagacccagctccatgtacagcactggaggcaagaggaaggacaaccccattgaagatgagctggtgttccgggtgggcagccggggccgggagaagggggagttcaccaacctgcagggcgtgtctgctgccagcagcggccgcatcgtggtggccgacagcaacaaccagtgcatccaggtgttcagcaatgaaggccagttcaagttccgctttggagtgcggggccgcagccctggccagctgcagaggcccactggagtggccgtggacaccaacggggacatcatcgtggccgactatgacaaccgctgggtgtccatcttcagccctgagggcaagttcaagaccaagatcggggccggccgcctgatgggccccaagggcgtggccgtggacagaaatggccacatcatcgtggtggacaacaagagctgctgcgtgttcaccttccagcccaacgggaagctggtgggccgctttggaggccgcggggccacagacagacactttgctggcccccactttgtggccgtgaacaacaagaatgagatcgtggtgacagacttccacaaccacagcgtgaaggtgtacagcgcagatggagagttcctgttcaagtttggcagccacggggagggcaatggccagttcaatgcccccactggagtggccgtggacagcaatggaaacatcatcgtggccgactggggcaacagccgcatccaggtgtttgacagcagcggcagcttcctgagctacatcaacaccagcgctgagcccctgtatggcccccagggcctggccctgaccagtgatggccacgtggtggtggctgatgctggcaaccactgcttcaaggcctaccgctacctgcagtag

SEQ ID NO: 312150 - DNA, 2226 bp, Artificial Sequence
  derived and/or modified sequence
atggccaagcgggaggacagccctggccctgaggtgcagcccatggacaagcagttcctggtgtgcagcatctgcctggaccgctaccagtgccccaaggtgctgccctgcctgcacaccttctgtgagcgctgcctgcagaactacatcccagcccagagcctgaccctgagctgccctgtgtgccggcagaccagcatcctgcctgagcagggcgtgtctgccctgcagaacaacttcttcatcagcagcctgatggaggccatgcagcaggccccagatggagcccatgaccctgaggacccccaccccctgtctgtggtggccggccggcccctgagctgccccaaccacgagggcaagaccatggagttctactgtgaggcctgtgaaacagccatgtgtggagaatgtcgggccggggagcaccgggagcacggcaccgtgctgctgagagatgtggtggagcagcacaaggccgccctgcagaggcagctggaggccgtgcggggccgcctgccccagctgtctgctgccatcgccctggtgggcggcatcagccagcagctgcaggagaggaaggccgaggccctggcccagatctctgctgcctttgaggacctggagcaggccctgcagcagaggaagcaggccctggtgtctgacctggagaccatctgtggggccaagcagaaggtgctgcagagccagctggacaccctgcggcagggccaggagcacatcggcagcagctgcagctttgctgagcaggccctgcggctgggcagcgcccctgaggtgctgctggtgaggaagcacatgagggagcggctggccgccctggccgcccaggccttccctgagcggccccatgaaaatgcccagctggagctggtgctggaggtggatggcctgcggcgctctgtgctgaacctgggcgccctgctgaccaccagcgccacagcccatgaaacagtggccaccggggagggcctgcggcaggccctggtgggccagcctgccagcctgactgtgaccaccaaggacaaggatggccgcctggtgaggactggatctgctgagctgcgggcagagatcactggaccagatggcacccggctgcctgtgcctgtggtggaccacaagaatggcacctatgagctggtgtacacagccaggacagaaggagagctgctgctgtctgtgctgctgtatggccagcctgtgcggggcagccccttccgggtgcgggccctgcggcctggggacctgccccccagcccagatgatgtgaagagaagagtgaagagccctgggggccctggcagccacgtgcggcagaaggctgtgagaagacccagctccatgtacagcactggaggcaagaggaaggacaaccccattgaagatgagctggtgttccgggtgggcagccggggccgggagaagggggagttcaccaacctgcagggcgtgtctgctgccagcagcggccgcatcgtggtggccgacagcaacaaccagtgcatccaggtgttcagcaatgaaggccagttcaagttccgctttggagtgcggggccgcagccctggccagctgcagaggcccactggagtggccgtggacaccaacggggacatcatcgtggccgactatgacaaccgctgggtgtccatcttcagccctgagggcaagttcaagaccaagatcggggccggccgcctgatgggccccaagggcgtggccgtggacagaaatggccacatcatcgtggtggacaacaagagctgctgcgtgttcaccttccagcccaacgggaagctggtgggccgctttggaggccgcggggccacagacagacactttgctggcccccactttgtggccgtgaacaacaagaatgagatcgtggtgacagacttccacaaccacagcgtgaaggtgtacagcgcagatggagagttcctgttcaagtttggcagccacggggagggcaatggccagttcaatgcccccactggagtggccgtggacagcaatggaaacatcatcgtgtgccgggccagcccctaccccagctacaccccaccccacccctgccagagcgccccccaccccccagcctggggccagaacagcctgccccaggacaggagccccagcagctgcctgcccaccaccctgtacaccctgacagaaacagccatcccccaccccccctactag

SEQ ID NO: 312151 - DNA, 2202 bp, Artificial Sequence
  derived and/or modified sequence
atggccaagcgggaggacagccccggccccgaggtgcagcccatggacaaacagtttctggtgtgcagcatctgcctcgatcgctatcagtgcccaaaggttctcccttgcctgcatacattttgcgaaaggtgcctgcagaactacatccctgcccagtcccttactctttcctgtcctgtatgtcgccagacttccattctacctgagcagggtgtcagcgctcttcagaataattttttcattagctccctcatggaagctatgcagcaggcgccggatggggcccacgatcccgaagacccacatccgctgagtgtggtggccggacgtcctctgagctgcccaaaccatgagggtaagaccatggaattttactgtgaagcttgcgagacagccatgtgtggcgaatgtagagccggcgaacatcgggagcagcataaagcagccttgcagcggcaactggaagccgtgcgaggtcgtttacctcagttaagcgctgccattgccctcgtcggggggatctcacagcaactgcaggagcgcaaagctgaagctttagctcagatctccgctgcatttgaagacctggagcaggcactgcagcagagaaagcaggctcttgttagcgacctggaaacgatctgtggcgcaaagcaaaaagttcttcaaagtcagcttgatactctgaggcaaggacaagagcacattgggtcctcttgctcgttcgccgagcaggctctgcgccttgggagtgcacctgaggtactcctggtgcggaagcacatgagagagcgattggcagccttagctgcccaggcgttcccagagagacctcacgaaaacgcccaactggaattggtcctggaagtggacggtctccggaggtcagtcctgaacctgggcgccctcttgactacttctgctacagcccatgagactgtcgccactggcgagggtctgagacaggccctcgtgggccaaccggccagcctgaccgtgacaacgaaggacaaggacggccgcttagttaggacgggatctgctgaactccgggctgagattaccggcccagatggcacccggctgcctgttcccgtggtagaccataagaatggtacatacgagctggtttacaccgccaggacggaaggagaattgttgctgtcagtactgctttacgggcaaccagttcgtggatcccctttcagggtgcgagcacttagacccggcgacctgcctccatcccccgatgatgttaaacgacgcgtgaagagccccggggggcccggatcacatgtgcggcagaaagctgttcggcggccttcctccatgtacagtaccggcggtaagagaaaagataatccgatcgaggacgagctcgttttcagggtcggaagccgcggacgggaaaagggcgaatttaccaatctgcaaggcgtctcagcggccagttccgggcggattgtggttgcggacagcaataaccagtgtatccaggtcttcagcaacgaagggcagttcaagttccgctttggcgtgcgtggacgatcacccgggcagctccagaggcccacaggagtggcagtcgacacaaatggagatattatcgtggctgattacgataacagatgggtaagtatttttagtcccgaaggcaaatttaaaactaagatcggggccggtagactgatgggcccaaagggagtcgctgttgaccgcaacggacatatcatcgtggttgataacaaatcttgctgtgtgttcaccttccaacctaatggcaaattagtgggtcgcttcggcggacgaggtgccaccgatcggcatttcgccggaccccatttcgttgccgtcaacaataagaatgaaattgtggtgaccgacttccacaatcattccgttaaggtgtatagcgccgatggggaatttttgtttaagttcggctcacacggggaagggaatggacagttcaacgctcctaccggagttgcggttgattccaatggtaatattatcgtggccgactggggaaacagcaggatccaggtgtttgatagtagtggctctttcctgtcctacatcaataccagtgccgaacccttgtacggcccccagggcttagccctgacctccgatgggcacgttgtggtcgcagatgccggcaaccactgttttaaagcctaccgctatctgcagtag

SEQ ID NO: 312152 - DNA, 2235 bp, Artificial Sequence
  derived and/or modified sequence
atggccaagcgggaggacagccccggccccgaggtgcagcccatggataagcaattccttgtatgctcaatttgtttggatcgttaccagtgcccgaaggtgctgccatgccttcacaccttctgtgagagatgccttcagaactatattccggcgcagagtcttacattatcatgcccggtgtgcagacagacctccatacttcctgagcagggagtctccgctctccagaacaatttttttattagcagcttgatggaagccatgcaacaggcccccgatggggctcacgacccagaagatccccatcctttatccgtcgtcgcaggacggcccttgtcatgtcctaaccacgaaggaaagacaatggaattttattgtgaagcctgtgaaacagccatgtgtggagagtgcagagcgggcgaacaccgagaacacgggacagtgctgctccgagacgtggtcgagcagcacaaggccgcactgcagcgccagttagaggcagttcgtggacggctgcctcaactcagtgccgccatagctctggtgggcggtataagtcagcagctgcaggagagaaaggccgaagcacttgcacagatctccgcggccttcgaagatctcgaacaggctctacagcagcgaaagcaggccctagtgtcagatttagaaactatctgcggtgccaaacaaaaggtgctccagagccagctggataccctcagacagggccaagagcatattgggagttcttgcagcttcgccgagcaggccctgaggctgggctctgccccggaggtactgctcgttcgtaagcacatgcgagagcgcttggcagccttggccgcacaggccttcccagagcggccacatgaaaacgctcagctggaactcgttctcgaggtcgacggactgcgccgctccgtactaaatctcggcgccctactcacaacatcagctacggctcatgagacagtggccaccggagagggcctgcggcaggccctggtggggcagcccgctagcctgactgtgactacaaaagataaggatgggcggctcgtgcgtacggggtccgctgagctgcgcgcagagatcaccggacctgatggaacacgtctccctgtgccggtggtggaccacaagaatggcacctacgagcttgtctacacggcccggaccgaaggggaactgctgttgtcagttctgctctatggtcagccggtgcggggctctccctttcgggtccgcgccctgagaccaggcgacctgcctccaagcccggacgacgttaaaagaagggtgaagagccctggggggccaggaagtcatgtgcgacaaaaggcagtcagaaggccctctagcatgtatagcactggaggcaaacggaaagacaacccgattgaggacgagctggtattcagagtcgggagtcgaggccgagaaaagggcgaattcaccaatttgcagggagtgtctgctgctagctccggcagaattgtcgtcgctgactccaataaccagtgcatccaggtcttctccaacgagggccagttcaagtttcgcttcggcgtacgagggaggtcgcccggacagctgcaacgacctacgggagtcgccgtggatactaatggggatattattgtggcagattatgacaatcgctgggttagcatcttctccccagaaggtaaattcaagactaagatcggcgccgggagactcatgggcccgaagggagtggcggtggatcgcaacgggcacatcatcgtcgtggataataagagttgctgtgtgttcacttttcagccaaatggaaaattggtgggaagattcggcggtaggggggccacggatcggcattttgcaggcccccatttcgtggctgtgaataacaaaaatgaaatcgtggtgacagactttcataatcatagtgtgaaagtgtatagtgcagacggcgaatttttgtttaaattcggctctcacggcgagggcaatggtcagttcaacgcccccactggcgttgccgtcgacagtaatggcaacatcattgtcgccgactggggcaactctcgtattcaagttttcgattcgagcggaagttttttaagttatataaataccagtgctgaacccctgtatggaccgcagggtctggcgttaacctccgacgggcatgtcgttgtggctgacgccggcaaccactgtttcaaggcttaccgatatctgcaatag

SEQ ID NO: 312153 - DNA, 2235 bp, Artificial Sequence
  derived and/or modified sequence
atggccaagcgggaggacagccccggccccgaggtgcagcccatggacaagcaattccttgtgtgtagtatctgcctggacaggtaccagtgcccgaaggttctcccgtgcctacataccttctgcgagagatgtctgcaaaattacataccagctcagtctctcaccctctcctgtcctgtatgcaggcaaacgagcatcttgcccgagcagggcgtgagcgcactgcagaataacttttttataagttcccttatggaggccatgcaacaagccccggatggcgctcatgatcctgaagacccacacccacttagcgtggtggccggtcgtcccctgtcctgtccgaatcatgagggaaaaacgatggagttttactgcgaagcctgcgaaaccgccatgtgcggagaatgcagagccggcgaacatagggagcacggtaccgttctgttgcgggatgtagtggaacagcacaaagcagcactccagcggcagcttgaggccgtaagagggagactcccacaactgtcggctgccatcgcacttgtgggggggatctctcagcagctacaagagcgtaaggccgaagcattagcccaaatcagcgcagccttcgaggacctagagcaggcgttgcagcagcgtaagcaggctctcgtctctgatctcgagaccatctgtggcgcaaagcagaaagtcctgcagtcccagctcgacaccctgcgccagggccaagagcacatcggaagctcctgtagtttcgccgaacaggcacttcggcttggcagcgctcccgaggtactactcgttcggaaacacatgcgggaacgactggccgccttagcagcgcaggcttttcctgaacggccgcacgagaacgctcagctggagttagtattggaggtcgatggactgcgtcggagcgtgctgaacctcggcgctttgctgacaacgagcgccacagcacacgaaactgtggccacaggggaagggttacggcaggcattggtgggacaacccgctagccttacggtgaccaccaaggataaagatggtcgcctggtgcggactggttctgcggaactcagggcggagattacaggacctgatggtacaaggctgccagttcccgtggtcgaccacaagaacggaacatacgaactggtgtatactgcccgcacagagggagaactgctcctgtccgtgctgctgtatggacagcccgtgcgtggtagtccatttcgggttagagcgctgcgaccgggggatctacccccaagccctgacgatgtgaagagacgcgttaaatctcccggcggaccgggaagccacgtgcgccaaaaagctgtcagacggccctcttccatgtattccaccggggggaaacgcaaagataacccgatagaggacgagcttgtgttccgagtaggctctcgcggccgggagaaaggggaatttacgaatttgcagggagtgtccgccgcatcttctggtcgtatcgtggtagcagactcaaataatcaatgcattcaagtgttttcgaacgaagggcagttcaaatttaggtttggcgtgagaggtcgaagcccgggacagctgcagcgcccgacaggcgtggcagtggacactaacggcgatatcattgtggccgattacgataatcgatgggtgtctatcttttcacctgaagggaaattcaagacaaaaatcggtgccgggcgacttatgggccccaagggagtggccgttgaccggaacgggcatatcatagttgtggataacaagtcttgctgcgtgttcacattccaacccaacggcaagctagttggccgctttggcgggagaggtgccaccgaccgccatttcgctggccctcacttcgtcgccgtgaacaataaaaacgagatagtagtgaccgatttccataatcactccgttaaggtctactccgccgatggggagttcctctttaaatttggtagtcatggggagggaaacggtcagtttaacgcgcccacaggggtagctgtagactcaaatggcaacataatcgtcgctgactggggaaacagcagaatccaggtgttcgatagctctgggagcttcctctcgtatattaacacctcagcggagcctctgtatggcccgcaaggtttggccctgaccagcgacgggcacgtggttgttgctgacgcaggcaaccactgtttcaaagcatacaggtacctgcagtag

SEQ ID NO: 312154 - DNA, 2235 bp, Artificial Sequence
  derived and/or modified sequence
atggccaagcgggaggacagccccggccccgaggtgcagcccatggataaacagttccttgtctgcagtatttgcctcgatcgctatcagtgccccaaagttcttccgtgcctgcataccttctgcgaaaggtgcctgcagaattatattcctgcacagtctctcacactctcatgtcccgtgtgccggcagacttctattctccctgagcaaggtgtaagcgcactccagaataacttcttcatttcatcactgatggaggcgatgcagcaggcaccagacggcgctcacgatccagaggacccacaccccctgtctgttgtagccgggaggcccctttcctgcccaaatcatgagggcaagactatggaattttactgcgaggcttgcgagactgcaatgtgcggcgagtgcagggcaggtgaacatcgcgaacatgggactgttttgctgcgggatgtggtagagcagcataaggcagccctacagcggcaattagaggctgtgcggggtcgactgccacagttgagtgctgcaatcgcattggtgggcgggatcagtcagcagctccaggaacgtaaagcggaagccctggcccagatttccgctgcctttgaggacctggagcaggctttgcagcagaggaaacaagcactggtttctgacttggaaacaatatgcggcgccaagcaaaaggtacttcagtcacagctggacactctgcgccagggccaggagcatattggctcctcgtgttcattcgccgagcaggcactgcgactggggtcagcacccgaggtactcctcgtccggaagcacatgcgggagcgactggccgccctggcagcccaagcctttccggagagaccccatgaaaacgcccagctggaacttgtcctcgaagtggatgggctccgacggtctgtgctgaatcttggcgcactcttgaccacatcggcaacagcacatgagaccgtcgccacgggcgagggtctgcgtcaagctctggtcggacagcctgcctctctcacagtgactaccaaggacaaagacggccgcctcgtgaggacaggctcagccgaattacgagcagagatcaccggacctgacggcaccaggctgcccgtgccagtggttgatcacaagaatgggacatacgagctggtctacaccgccaggaccgagggcgagcttctcctgtccgtcttgctctacggtcagcctgtccggggcagtccattccgtgtgcgagcattgcgcccaggtgatttgcccccctccccggatgatgttaagagaagagtcaaatccccaggagggcctggctcgcacgtgagacaaaaggcagtgagacgccctagctctatgtatagtactgggggcaagagaaaggataatcctatcgaggacgaactggtgttccgtgtagggtctcgcggcagagaaaagggcgaatttaccaacctccagggagtgagcgcagccagttcagggaggatagtagttgcagatagcaataatcagtgtattcaggtttttagtaacgaggggcaattcaagttccggttcggtgttcgcggaagaagccccgggcagcttcagcgccctacgggtgtggccgtggacaccaacggcgatattatcgttgccgattacgacaatagatgggtgtcaattttctcccctgaggggaaattcaagacaaagatcggggccggacgcctcatgggccctaagggagtcgcggttgatagaaatgggcacatcattgtcgtggacaataaaagttgttgcgtgttcacctttcagccaaacggaaagctggtaggccgttttggaggcaggggcgcaaccgacaggcattttgcgggtccccacttcgtagccgtcaacaacaaaaacgagatcgtcgtcaccgactttcacaaccacagcgtgaaggtgtacagcgcagacggagagtttttattcaagtttggctcacatggagagggtaacggtcaattcaacgctcccacaggtgtggcggtagatagcaatggcaacattatagtggcagactggggcaattctagaattcaagtctttgactcgtccggtagtttccttagttacattaacaccagcgcagagcctctttacggaccacaaggcctggctctgactagcgatggccacgtggtcgtcgccgatgctggcaaccactgttttaaggcctaccgatatttgcaatag

SEQ ID NO: 312155 - DNA, 2229 bp, Artificial Sequence
  derived and/or modified sequence
atggccaagcgggaggacagccccggccccgaggtgcagcccatggacaagcaatttctggtgtgttctatatgcctagacagatatcaatgtccgaaggtgctgccatgcctgcacactttctgtgaacgatgcttgcagaattacattccagcacagagcctcaccctgtcttgccccgtatgccgccaaacttcaattctgcccgaacagggcgtcagcgcacttcagaataatttcttcatttcttccttgatggaggcgatgcaacaagcaccagatggcgcccatgatcccgaggacccacatcccctgagcgtggtggcagggagaccactcagctgtccgaatcacgagggaaaaactatggaattctactgcgaagcttgtgaaacagctatgtgtggggagtgtcgagccggagagcaccgagagcatgggactgtgttgctcagggatgtcgtggagcagcataaggccgccctccaacgccagctggaagccgtgagggggcgccttccacagctgtcagcagctatagccctggtgggtgggattagtcagcaactgcaagagaggaaagcagaagccttagctcaaatctcagccgctttcgaggacttagagcaagccctgcaacagagaaagcaagcattggtttccgatctcgagactatctgcggcgctaagcaaaaggttttgcagtcccagctcgataccctgaggcagggtcaggagcatattggcagttcttgctcctttgccgaacaggccttaagactggggagtgcgcccgaagtgctgctggtgcggaaacatatgagagagagactggctgccctggctgcgcaggcttttcccgaacgtccccacgaaaacgcgcagctagaattggtactggaggtcgacggactgaggcggagtgtgcttaacctgggtgcactgctgacaacctctgctacagcgcacgaaacggtggcaactggggaggggctcaggcaggcactggtgggacagcccgcatcattgacggtgaccactaaagacaaagacggcaggctggtgagaacaggcagcgccgagctcagagctgagatcaccggtcccgatggcactcgcctgcccgtgcccgttgtggaccacaagaatgggacgtacgagctcgtctacacggccaggaccgagggggagcttcttctatcagtacttttgtatggacaacccgtgcgcggatcgccctttcgggtgagagccctccggcccggcgacttacccccttcaccagacgatgtgaaacgtcgcgtgaaatctcctggcgggcccggatcacacgtgagacagaaagcggtgaggaggccatcatcaatgtacagcaccggaggaaagcggaaagacaatccaattgaagatgaactagtcttccgggtgggttcgcgtggccgggaaaagggcgaatttactaatctccagggcgtctccgcagccagttcagggaggatcgtggttgctgattccaataaccagtgtattcaagtgttcagcaatgaaggtcaatttaaattccgctttggggtgcgggggcgtagccctggacagttgcaacgccccactggagtcgctgtcgatacgaacggagacattattgtagctgattatgacaacaggtgggtgtccattttcagcccagagggcaaattcaaaacaaagatcggcgccggcagactgatggggcctaaaggtgttgctgtcgatcgtaacggtcacatcatcgtagtggacaataagagctgctgcgtctttaccttccaaccaaacggcaaactcgttggacgatttggtggccgaggagccaccgaccgccactttgccggcccccactttgtcgctgttaataataaaaatgagatcgtggttacagactttcacaaccattccgtgaaggtgtattccgcagatggtgagtttctgttcaagtttgggtcacatggggagggtaatggacaatttaacgctcccactggcgtcgctgtcgacagcaacggcaacattattgatgtttgcagggcttcgccatacccctcttataccccaccacacccctgtcaaagtgccccccatcctcctgcctggggacagaactctctgccacaggacagaagcccctcgtcctgcttaccaaccacattgtatacattgactgaaactgctataccacatcccccctactag

SEQ ID NO: 312156 - DNA, 2001 bp, Artificial Sequence
  derived and/or modified sequence
atggccaagcgggaggacagccccggccccgaggtgcagcccatggacaagcagtttctggtctgtagcatctgccttgacagataccaatgtcccaaggttctcccatgcctgcacacattttgtgagcggtgcctgcagaattatattccagcacaatctctcacactttcttgcccagtttgccgacaaaccagtatcctgcctgaacaaggcgtgtccgcgttgcaaaataattttttcatttcgagcctgatggaggccatgcagcaagcacctgatggagcccacgatcctgaggatccacatcctctctctgtggtcgccggacgacctctgtcttgtcccaatcatgagggcaagacaatggagttctattgcgaggcttgtgaaaccgccatgtgtggcgagtgtcgcgcgggggaacacagagaacacggaaccgtgctgctccgtgatgttgttgagcagcacaaggctgcgctccagcggcagttagaagccgtgcgtgggcggttgcctcagctgtccgcggcaatagctctggtgggcgggatatctcagcaactacaagagaggaaagctgaggctttggcccagatttcagccgcctttgaggatctagaacaagctctgcagcaacggaaacaagctttggtcagtgacctggttgacggcttacgtagatctgtgctgaacctgggcgcacttctcacaacatccgctacagcccatgaaacagtggccaccggagagggcctcagacaggcactcgtggggcagcccgcgagcctcaccgtcacaaccaaagataaggatggccggctggtcaggactggcagcgccgagctaagggcagaaatcaccgggcccgacggcaccagattacccgtgcctgtcgtcgaccacaagaacgggacgtacgaattggtgtataccgcaaggaccgaaggcgaacttctgctctcagtacttctgtatggtcagcctgttagaggaagcccctttcgcgttagggcactgagacctggggatctccccccctcgcctgacgatgtgaagagaagggtgaaaagcccaggaggacctggcagtcacgtccgccagaaggccgtaagaagaccatcctctatgtactctactggaggcaaacgtaaggataaccccatcgaggatgagctagtgttccgggtagggagtcgtggaagggaaaaaggcgagttcacgaatctgcagggcgtgagtgccgcctcctcagggaggattgtggtggccgattcaaacaaccagtgcatccaggtattttccaacgaagggcaattcaagttccggttcggtgttaggggtcgatctccgggccaactgcagcgccccaccggcgtcgctgttgataccaatggagacattatcgtggcggattatgataaccggtgggttagcatattttccccagaagggaagttcaagactaaaattggcgcagggcgcctcatgggtcccaaaggggttgcggttgaccgcaacggccacattatcgtcgtagacaataaatcatgctgcgtatttactttccagcctaacggtaagctagttggtcgatttggagggcgcggcgccacggaccgacatttcgctggcccacatttcgtagccgtcaacaataaaaatgaaatagtggttaccgatttccacaaccactcagtgaaagtatattcggccgatggggagttcctcttcaagtttggatcccacggcgaaggaaacggccagtttaacgccccaactggcgtagcggtggattccaatgggaacatcatcgtggccgattggggaaattcccgcatccaggtctttgatagttccgggtcatttctcagctatatcaatacctctgcagagccgctgtacggaccacagggtcttgccctgactagcgatgggcatgtcgttgtagcagacgcaggaaaccactgctttaaagcatatcgctacctgcagtag

SEQ ID NO: 312157 - DNA, 2226 bp, Artificial Sequence
  derived and/or modified sequence
atggccaagcgggaggacagccccggccccgaggtgcagcccatggataagcaattcctggtgtgtagtatttgcttggaccgctaccagtgccctaaggtccttccatgcctgcataccttctgcgaaaggtgtctacagaattatatcccagctcagtctctgacgctgtcctgccctgtgtgtaggcagaccagcatactgcccgagcagggagtttctgctctacagaacaacttttttatcagcagcctcatggaggcaatgcagcaggccccggatggggcccatgacccggaagacccccatcctttatctgtggtggcaggcaggccccttagttgccccaaccatgaggggaagactatggagttttattgtgaagcgtgtgagaccgctatgtgtggggaatgtcgggccggcgagcatagggagcacggtaccgtcttattgcgggatgtcgttgaacagcacaaagctgctttgcaaagacagcttgaagctgtgagagggagactgccgcagctttcagccgcgatcgctctggtgggaggcatttcgcagcagctacaagagagaaaggctgaagctcttgcccagattagcgccgctttcgaagatctcgaacaggcgttgcaacagcggaagcaggctttggtttccgacctggagacgatttgcggagcgaaacagaaggtcctgcaatcccaattagacacactcaggcagggccaagagcatataggaagctcttgtagcttcgctgagcaggccctccggctgggtagcgctcctgaggtcctgctcgttcgcaagcacatgagagaacgcctggccgctcttgctgcacaggctttcccagaacgaccacacgaaaatgcccagcttgaacttgtcctggaagtggacggacttcggaggagtgtgctcaatttaggcgctttgttgactacctcggccactgcccacgagactgtcgctacgggggaagggttacgtcaagccctcgtgggccaacccgcttcgcttacagtgaccaccaaggacaaggacggtaggttggtgcgtactggttcagccgaattgagagctgagatcaccggcccagatggaacccgactgccggtccccgtggtcgaccacaaaaatggtacttacgagcttgtatatactgccaggacagagggagagcttctcctcagtgtcctactgtatggccagcccgtccgggggagcccatttagggtgagggccttgagacctggtgacttacccccttcacctgacgacgtgaagagaagagtgaagtcaccagggggacctggtagccacgtcagacagaaagccgttcggcgcccttcgtctatgtattccaccggcggcaaacggaaagataacccgatagaagacgagttagtgttcagagtgggcagtcgagggagagagaaaggggagttcacaaacctccagggggtgagtgctgcttcatcgggccgcatcgtggtggccgattcgaacaatcagtgcatccaggtgttcagtaatgagggtcagttcaaatttcgcttcggtgtgaggggcagatctccaggccaactgcaacgaccgaccggagtggctgtggacactaatggggacattatcgtggccgactatgataataggtgggttagtatcttttcgccggagggcaagttcaagacaaaaatcggcgctggaagactaatgggtccgaagggcgtcgctgtcgatcggaacggccacattattgtcgtggataacaaatcatgttgcgtatttacctttcagccaaacggcaaactggtgggtcggttcgggggccgtggagcaactgacagacactttgcgggtcctcactttgtcgcagtaaacaacaagaatgagattgtggtcactgatttccataaccacagcgtgaaagtttattccgcagacggggaatttctgtttaagttcggctctcacggtgaagggaatggacaattcaatgcacctaccggagttgccgtggatagcaacggaaatatcatcgtctgccgggccagcccatacccctcttacacgccacctcacccctgtcagtctgcgcctcacccccccgcatggggccaaaatagtctgccgcaggatcggagtccctcaagctgcttgccaaccaccctgtatacactcaccgaaaccgcaattccccacccgccttactag

SEQ ID NO: 312158 - DNA, 2202 bp, Artificial Sequence
  derived and/or modified sequence
atggccaagagggaggattcacccggtccagaagttcagcccatggataaacagtttttagtgtgctctatttgtctggatcgataccagtgtcccaaagttctaccctgcctccatacattctgtgagcgttgtttacagaactatatccccgcacagtccttaacgttgtcgtgtcccgtgtgccgtcagaccagtattctgcccgaacaaggggtctcagccctgcaaaacaatttttttatctcttctctgatggaagcaatgcaacaagcccctgacggcgcacatgatccagaggaccctcacccactgtccgtcgtcgctggccgaccactgagctgccctaaccatgaggggaagacaatggagttctactgcgaagcgtgcgagacagccatgtgcggagaatgccgcgcaggcgagcatcgtgagcaacacaaagctgcactgcagcgccagctcgaggccgttagagggaggctgccacaactgagtgccgcaatagctctcgtggggggaattagccagcaactgcaggagaggaaagcggaggcacttgctcagatctcagcagccttcgaggatctagagcaggcactccaacagcgaaaacaggcccttgtgagtgaccttgagactatctgcggagcgaagcaaaaagtcctgcaaagtcagctcgatacattgagacagggccaagaacacatcggctcctcctgcagcttcgctgagcaagcgctccggctcggaagcgccccagaggtcctgctcgtcagaaagcatatgagagaacgtctggccgctctagccgcacaggctttcccagagcgaccccatgagaatgcgcaactggaactggtcctggaagtggacggcctccggagatccgtgttgaacctaggcgctctgcttacaactagcgcgaccgcgcatgaaactgtggctaccggcgagggtttgcggcaggcccttgtcggacagccagcgtctctgaccgttacgactaaggacaaagacgggcgtctcgttcgaacaggtagtgctgagctaagggccgaaattaccggacccgatggaacacgcctccccgtgccagtcgtcgaccacaagaacggaacgtacgaactggtgtacacagctagaaccgagggcgaattgctcctgtccgtgctactctacgggcaaccggtgaggggatccccatttagggtgagagcgctacgcccaggcgacctgccccctagtcctgacgatgttaaaagaagggtcaagtctcccggaggacctgggagtcacgtgcgacaaaaagctgtgaggcggcctagcagcatgtattccacgggcggaaaacgcaaagataatcctatcgaggacgaactggtgttcagagtcggcagtcggggtcgagagaagggcgagttcaccaacctgcagggagtgagtgcagccagcagtggcagaatcgtcgttgcggattccaataatcagtgcatacaggtattttccaatgagggccaattcaagtttcgatttggtgtgaggggaaggagtcccggtcagcttcagcggcctacaggtgtcgccgtagatactaacggagacatcatcgtagctgattatgataatcgctgggtgtctatattttcacccgaggggaagttcaagaccaaaatcggagcaggcaggttgatgggcccaaagggagtcgctgtagacaggaatgggcacattatagtagtggacaataagtcttgttgtgtgttcacatttcagcccaacgggaaactcgtcggcagattcggcggacgaggagccaccgatcggcactttgccggaccacactttgttgccgtgaacaacaagaatgagatcgtggtaacagattttcacaaccactctgtgaaagtgtactccgctgacggagagtttctcttcaaattcggcagccacggtgaaggtaacggacagtttaacgcccctaccggggtggcagtcgattccaatgggaatattatcgtagctgattgggggaacagccgtatccaggtttttgatagttcggggtctttccttagctacattaatacctctgctgaacctctctatggccctcagggacttgcacttacaagtgacggccacgtggtggtggcggacgcaggaaatcattgctttaaagcctatcgctacctgcaatag

SEQ ID NO: 312159 - DNA, 2235 bp, Artificial Sequence
  derived and/or modified sequence
atggctaagcgggaagactcaccaggcccagaggttcagccaatggacaagcagtttcttgtgtgctccatttgtctggacagataccagtgtcctaaagtattaccttgtcttcatactttctgtgaacgttgcttgcagaattatatacccgctcaatctttgacattgtcatgtccggtttgtcggcaaacttctattcttccagaacagggggtgtcagcccttcagaacaatttctttatttcctcccttatggaagcgatgcaacaggcccctgacggggctcacgacccggaagacccacatcccttgagtgtggtggcgggaaggcccctcagctgtcctaaccatgaaggcaaaactatggaattctattgcgaagcctgtgaaaccgccatgtgcggcgaatgcagagccggagaacaccgtgaacatggaacagtgctcctgagggacgtcgtggagcagcataaagcagcattgcaaaggcagctggaggctgtgagaggcaggctcccccaactgtcagccgctatagccctggtagggggaatctcacagcagcttcaggaaaggaaggcggaggctctggcccagatcagtgcagccttcgaggatttggagcaggccttacaacagcgaaagcaggcgttagtgagtgatttggaaacaatctgtggagcaaagcagaaggttctgcagagccagctcgatactctccggcaagggcaggagcatatcgggagttcttgttccttcgccgagcaggctttgagacttggatccgcaccggaggtactgttggtccgcaagcacatgcgggaaaggctcgcagcacttgcggcacaggctttcccagaaaggccccacgagaacgctcaactggagctggtgctggaggtggacggattgagacggagcgtactcaacttgggagccctcctgacaacctctgccacagcccatgaaacagtcgccacgggggagggacttcgacaagctttggttggccagcctgccagcctgacagtcacaactaaggataaggatgggagactggtccggactggctccgctgagctccgcgctgagatcaccgggccagacggaaccaggctgcctgttcccgtcgtggaccataagaacggaacctacgaactggtttatacagccagaacagagggcgaactgctcctgtctgttttgctctacggccagccagtgcgcggttcaccgttccgggtcagggcactgaggccgggagacctccccccatcccccgatgatgtcaaaagaagagtgaaatcacccggagggccaggctcacacgtgaggcagaaggctgttcggaggcccagctcaatgtatagcacaggcggaaaacgcaaggacaatcctattgaagatgagctcgtgttccgcgtggggagtcgcggtagggaaaaaggggagttcacaaatttacagggcgttagtgcagcctcatccgggaggatcgtggttgctgacagtaataatcagtgtatccaggtgttctccaatgagggacagtttaaatttagatttggggttcgcggacggtcacctggtcagttacagagacctacgggagttgcagtggacactaacggtgatattatagtcgcagattatgacaaccggtgggtgtctattttttctccggaaggtaagttcaagacaaaaattggcgctggccgactgatgggccctaagggagtagctgtggaccgcaatgggcatattatagtcgtagacaacaaatcgtgctgcgtgttcacattccagcccaatgggaaactggtgggccgatttggcggacgaggagccacagataggcacttcgctgggccacacttcgtggcggttaataacaagaatgagattgttgtgactgattttcacaatcactcagtgaaagtgtattccgctgacggtgagttcctgtttaaattcgggtcccacggggagggcaatgggcagtttaatgctcctacaggagtcgcagtggacagcaatggtaacatcatagttgccgattggggaaattcgcgcatccaggtgtttgatagctcaggtagttttctgtcgtacatcaatacttccgccgaacccctctatggaccccagggactagcacttacctctgatggacacgtggtggttgccgatgctggtaaccactgtttcaaggcttacaggtaccttcagtag

SEQ ID NO: 312160 - DNA, 2235 bp, Artificial Sequence
  derived and/or modified sequence
atggccaagagagaggacagtccagggcctgaagtgcagccaatggacaaacagttcttagtttgttcaatatgtttagataggtatcagtgtcccaaggtgctgccctgtctgcatacattttgtgaacgatgtcttcagaattatattccagcccagagcctgacgctcagttgccccgtgtgtaggcagacatctatcctccctgagcagggggttagtgccttgcaaaacaattttttcatatccagtctgatggaggctatgcagcaggccccagacggagcccacgacccggaggaccctcatcctctgtcagtcgtggcaggacggcctctgtcttgccctaaccacgaaggtaagacaatggagttctactgtgaggcctgcgagactgctatgtgcggggagtgtcgcgctggggagcacagggagcacgggacagtccttcttcgagatgtggtcgagcaacacaaagcggctctccagcggcaactcgaggccgtgagaggacgattgcctcagttgagtgcagctattgctctggtggggggtattagtcagcaactccaagagcgtaaggctgaggcccttgcgcagatttctgccgctttcgaggacctggaacaggcactgcagcagagaaagcaggctttggtcagcgatctcgagaccatttgcggtgctaaacaaaaagtcttacagtctcagctcgacacgctgcgtcaaggacaggagcatattggaagtagctgctcattcgccgaacaggcacttagactcggttcggcacctgaggttctgctcgtgaggaagcatatgagagaaagactggcagcacttgcagcacaggcctttcccgagcgcccacatgagaatgctcagctggagctcgttctggaggtggatggccttcgcaggtccgttctcaatctgggggctttgctgaccacgtcggcaaccgcacatgaaacggtggcaacgggagaaggcctgagacaagcactagtaggacagccggcaagtttgaccgtcaccactaaagacaaggatggtagactagtgaggactgggagtgcagagcttcgcgctgaaattacaggtccggacggcactagactgccagtgcccgtggtggaccataagaacgggacctacgagctggtatataccgccagaaccgagggggagctgcttctctccgtgctgctttacggccagcctgttcgagggtcaccgtttcgcgtccgcgctctacgccctggagacctgccaccatcccctgatgatgtcaaacgcagggtcaaatccccaggtggaccaggttcacatgtgcgccaaaaggctgtgagacgcccatctagcatgtacagcaccggcggaaagagaaaggataaccctattgaagacgaactggtgttccgcgtaggctctcgtggacgagagaaaggggaatttaccaatctgcagggggtgtcggcggctagttctggtaggattgtagtcgccgactcaaataaccaatgcatccaggtgttcagcaatgaaggccagtttaaattccggttcggcgttagaggacgctctcccggacagttgcagcggcctactggggtggctgtcgacactaatggggacatcattgttgcagactacgacaaccgctgggtcagtatcttctcacctgaaggtaagtttaaaaccaaaattggggcagggcgactaatgggccctaaaggagtggctgtggataggaacggtcacatcatagtggtggataataaatcgtgctgtgtctttacgttccaaccgaacggcaagctagttggtaggtttggcggacgaggcgcaactgatagacacttcgcgggaccccacttcgtcgccgttaataacaagaacgaaattgtcgtaaccgattttcacaaccactccgtcaaagtctactccgctgacggtgaattcctgttcaagttcggctcccacggcgagggcaacggccagttcaacgcccctaccggcgtggctgtggattccaatggcaacatcatcgtggccgattggggcaactctaggattcaggtgtttgattcaagtggctccttcctgagctacataaacacgtcagctgaaccactttatggcccacagggcctggcgctcacgtctgatggccacgtggttgtggcggacgcgggtaaccattgcttcaaggcctatagatatctccagtag

SEQ ID NO: 312161 - DNA, 2235 bp, Artificial Sequence
  derived and/or modified sequence
atggccaagcgcgaagattcccccggtcctgaggtgcagcctatggacaagcaatttctggtgtgtagtatttgcctagatcggtaccaatgccccaaggtgttaccatgtttgcacactttctgcgaacgctgtttacagaactacattccagcccagtccttgactctgtcttgccctgtctgcaggcagaccagtatactccccgaacagggagtgtcagcactacagaataatttcttcatctcatcactgatggaggcgatgcaacaggccccagatggagctcacgatcctgaagatccccacccactgtccgtagtggccggtcgtccattatcctgcccgaaccatgaggggaagaccatggagttttattgcgaggcttgtgagactgcaatgtgcggggagtgtagggccggagagcatcgagagcacggaactgtattacttcgggacgtggtcgaacagcacaaagctgcactgcaacgtcagctggaagccgtgcggggacgtctgccacagcttagcgcagctatcgccttggtcggtggcatctcacagcagctccaagagagaaaggccgaagccctggctcagatatccgctgcattcgaagatctggaacaagcgctacaacaacgcaagcaggctctcgtgtctgacctggagaccatctgcggcgcaaaacagaaggtgctacagagtcaattagacacattgcgacagggacaggagcacataggctcctcatgtagctttgcggagcaagcactccgccttggcagcgcccctgaagtactgctggtcaggaagcatatgagagagcggttagccgctttggctgcccaggctttccccgaaagaccccacgagaacgctcagttggagctcgtcttagaagtggatggtctccgcagatccgtgttaaatctgggcgcactgcttacaacctccgcaacggcacatgagacagttgccaccggcgaaggcttgcggcaagcactggttgggcagcccgcttctctgaccgttaccaccaaggataaagatgggcgacttgttcgtacaggatcggctgagctgagagccgaaatcactgggcctgatgggacccgcctgcccgtgcccgttgttgatcacaagaatggcacatacgaattagtctacacagcccgtacagaaggtgaattactgctgtccgttctgttgtacggccagccagtgagggggtcccctttcagggtaagagccctaagaccgggagacctacctccctcaccagatgacgtgaaaaggagggtcaagagcccgggagggccaggctcgcacgtgagacaaaaagctgtccgacgcccaagcagcatgtactccaccggtggaaagagaaaggataatcctattgaagatgaattggtcttcagggtcggttcccggggacgcgagaagggagagttcaccaacttgcagggggtaagcgcggcatcctcagggcgaatagtagttgcagattctaacaatcagtgtatccaggtttttagtaatgaagggcagtttaagttcaggtttggggtgcggggacgcagtcctggacaattacagcgacccactggcgtcgccgtggataccaacggggatattatagtggccgattatgacaaccggtgggtgtctatcttttccccagagggaaagtttaaaacaaagatcggggctggaaggcttatggggccaaagggagtcgctgtcgatagaaacggacacataattgtggtggataacaaaagctgctgtgtttttacttttcagccaaatggaaagctggtcggtcgctttggaggtagaggggcaacagataggcacttcgccggtccacattttgtagccgtgaataataagaatgagatagtggtcactgatttccacaaccactcggtcaaggtatattctgccgacggcgagttcctatttaagtttggcagccacggagaggggaacggccaattcaatgcccctacaggggtggctgtcgacagcaatggcaatattattgttgctgattggggaaatagtagaatccaggtatttgactccagtgggagctttctgagctacatcaacacttcagctgagcccctctacggaccccagggactagccctgacaagtgacggccatgtggtggtcgccgacgctggtaaccattgttttaaagcctaccgctacctccaatag

SEQ ID NO: 312162 - DNA, 2229 bp, Artificial Sequence
  derived and/or modified sequence
atggctaaaagagaggattcgcctggaccggaagtgcagccgatggataaacagttcctggtgtgtagtatttgcctcgatcggtatcagtgtccgaaggtgctgccctgcctccacaccttctgcgagcgctgtctgcagaactatatcccagcacagtcactgactttgtcatgccccgtgtgtcgacaaacttccattctacccgagcagggggtttccgcactccagaataatttcttcatctcttccctaatggaagctatgcagcaggcacctgacggggcacacgaccccgaggatccacaccctctgagcgttgttgctgggaggcccctctcgtgccctaatcacgaaggcaagactatggagttctactgcgaggcctgcgagacggccatgtgcggtgaatgtagagcgggagaacaccgtgagcacggtaccgtgctgctgagggacgtggtcgagcagcacaaggcagccttgcagaggcagctcgaagcagttagaggaaggttgccacagctaagcgcagccatcgcgctggtggggggaatttcccagcaactgcaggaacgaaaagctgaggcactggcccagatctcggcggctttcgaagacctggagcaggctctgcaacagaggaaacaagctctagttagcgatctggagacaatttgcggtgccaaacagaaagtcctccagtcccagctggacactttgcgtcagggtcaggaacatattggcagcagctgtagttttgctgagcaggccctgagactcgggagtgctcctgaagtcctcctggtgcgtaagcacatgcgggaaaggttagcagccttggcagcccaagcgtttcctgaacgacctcacgaaaatgctcaactggagctcgtactggaagtcgatggtcttaggagatcggttctgaacttaggagccctgctgacaacatccgccactgctcatgagacagtggcaaccggggagggcttacgtcaggccttagtcggccagcctgcctctttgacagtaaccactaaagacaaggatggaaggctggttcgcaccggcagtgccgagcttcgcgctgagataacaggtccggatggcactagactccctgtgcctgtagtggatcacaagaatgggacctacgagctggtgtacaccgctcggacagagggggaactgctgctctccgttctgctgtatggccagcccgtgcggggatccccattccgcgtcagagctctgaggccgggagacctccctcccagtcccgatgacgtcaagcggagagtgaaatcacctggcggtccaggaagccatgtccggcaaaaagctgtcaggcggccatcatcaatgtacagtactggtggaaagcgcaaggacaatcccatcgaggatgagctagtgtttagagtgggaagccggggtcgcgaaaagggagaatttacgaatctgcagggagtctccgccgcttccagtgggaggattgtggtggccgacagcaacaatcagtgtatccaggtgttcagcaatgaaggacagttcaagtttagattcggagtcagggggagatctcctggacagctgcagcgccctactggtgtcgccgtagacacaaatggagacattatcgtcgcggactatgataatcggtgggtgagtatcttctcccctgagggaaagttcaagacaaaaatcggggcaggcaggctcatgggcccaaagggcgtggccgtcgaccgcaacgggcatattattgtggtcgacaacaaaagctgttgcgtttttactttccaacccaatggcaagctagtagggagattcggcggaaggggggcaactgacagacattttgcaggaccgcatttcgtagccgttaataacaagaatgaaatcgtggtgactgacttccacaatcactccgtgaaagtttactctgccgatggagagtttctgttcaagttcggctcgcacggagaggggaacggacagtttaacgctccgacaggcgttgcagtggattctaacggaaacatcatcgacgtgtgccgcgcttcaccttacccctcatacactcccccacacccctgtcaatcagctcctcacccccctgcctggggacagaactctctgccccaggatagaagccccagctcatgcttacccaccaccctgtacaccctcaccgaaactgccattccacacccaccttactag

SEQ ID NO: 312163 - DNA, 2001 bp, Artificial Sequence
  derived and/or modified sequence
atggcgaaaagagaggatagccccggacctgaagtgcagcctatggacaaacagtttctggtgtgttccatctgcctcgatagataccagtgccctaaggtcctgccctgcctgcacacgttttgtgagcgatgcctgcagaactacatacctgcacagtcactgacactatcatgccccgtctgtaggcagacttctatcctgcctgaacagggcgtgagcgcattacaaaataattttttcataagctcgcttatggaagccatgcagcaggcccctgatggagcccacgatcctgaggatccgcatccattatccgtggttgccggacgccctctctcctgtcccaaccacgaaggcaagactatggaattttactgcgaggcatgtgagaccgctatgtgcggcgaatgcagggcgggtgagcatagggaacacggtactgttctgctgagggatgttgtcgagcaacataaggctgccctccaaagacagctggaggcagttaggggaaggttacctcagctgtcagcggctatagcccttgtagggggaatctcgcagcaactgcaagagcgcaaagccgaggctctggcccagatttcagccgcttttgaagacctggagcaagcattgcaacagaggaagcaagcgctggtatccgacctggttgacgggttgcggcgatctgtgttgaacctgggggcactgttgaccacttccgccactgcccatgagacagtcgcgaccggagaagggctgcggcaagccctggtggggcagcctgcgtcacttaccgttacaaccaaggataaggacggtagattagtgaggaccggcagcgctgaacttcgtgccgaaattacaggtcccgacggcacgaggttgccggtgcctgtcgtggaccacaagaacggcacttatgagcttgtgtacactgctcgcaccgagggagagctgcttctgtccgtcctgctgtatggacagcccgttagaggctccccattccgggttcgcgctctacgacctggcgacctcccgccaagtccagacgacgttaaacggagagtgaaaagtccaggaggaccgggatcacacgtccgccagaaagctgtaaggagaccaagtagcatgtactctacaggtggtaaacggaaggataaccccatcgaggatgaactcgtgtttagagttggtagccgtggcagagaaaagggggagttcacaaatctgcagggcgtttccgcagcgagcagcggtcgaatcgtggtggccgacagtaacaatcagtgcatccaggttttcagtaacgaagggcagtttaagttccgatttggagtgagggggagatctcctggacagttgcagcggccaacgggggtggctgtagacaccaatggtgacatcatcgtagccgactacgacaacagatgggtgagtattttctcccctgaaggcaagttcaaaaccaaaataggcgcaggccgactgatggggccaaaaggagtggccgtcgaccgtaacggccacataattgtggtggacaacaagtcctgctgcgtgttcacgttccagcccaatggcaaattggtcggtcgcttcggtgggcgaggagccaccgacagacacttcgctgggccacatttcgtggcagtgaataacaagaatgaaatcgtggtgacagattttcacaatcattcagttaaggtttacagtgctgatggggaatttctattcaagtttggctctcacggtgaaggcaacggccagtttaacgctccaactggagtcgcagtggactccaacggaaatattatcgttgcagactgggggaactcaaggattcaagtcttcgactcaagtggatcatttctctcttacattaatacttctgccgagcccctttacggcccacagggcctggcactcacatcagacggccacgttgtggtcgctgacgccggaaatcattgctttaaagcctacagatatctccagtag

SEQ ID NO: 312164 - DNA, 2226 bp, Artificial Sequence
  derived and/or modified sequence
atggcaaagcgcgaggatagcccgggtccagaggtgcaacctatggacaaacagttcctggtttgcagtatatgcttggaccgctatcagtgtccgaaggtactgccgtgtctccataccttttgcgagaggtgcttgcaaaactacatccctgcccagagtctcacgctcagctgtcccgtgtgtcgtcaaaccagtattctccccgaacagggagttagcgcccttcagaacaacttcttcatttcatcacttatggaggctatgcaacaagctccagatggcgcacacgaccctgaggacccccatcctctctcggtcgttgctggtcgtcctttgtcttgccccaaccatgaaggcaagacgatggaattttattgtgaagcatgcgagactgctatgtgcggcgagtgccgcgctggggaacaccgcgaacatggtactgtcctgctgagggacgtggtggagcagcataaagccgcactccaaagacaactcgaagctgtgagaggcaggttgcctcagctgagcgccgcaattgcactggtgggtgggatatcccaacagctccaagagcgtaaggctgaggccctcgcacaaattagcgccgcatttgaggacctggagcaagctctgcagcagcggaagcaggctctggtgagcgacttggagacaatctgtggcgcaaagcagaaagtcctgcaaagtcagctggacactctgcgacaggggcaggagcatatcggttccagttgctcttttgcagaacaggctctcaggctaggtagcgcgccagaggttctgctggtgagaaagcatatgcgagaacgattagctgctctggcggcacaggcctttcctgagaggccacacgagaatgctcagctggagctggttctagaggttgacggtctccgaaggtctgtactgaacctgggggcactgctcaccacgtcagctactgcacatgagaccgtcgcaacaggcgaaggcctgcgccaagccctcgtgggccagcctgcctcacttacagttaccacaaaggataaggatgggagactcgtaaggacaggtagtgcagaactgcgggctgagataactggcccagacggaactcgcctgcctgttccagtggtggatcacaagaacggcacatatgagcttgtgtataccgcccgaactgaaggtgaactgctattgtcagtactgttgtatgggcagcccgtaagggggtcccctttccgcgttagagccctgcggcctggggacctgccaccatcacctgatgacgtgaaacggagagtaaaaagcccaggtggcccaggaagtcatgtgagacagaaagctgtgcggagaccctccagcatgtatagcacaggtggaaagaggaaggataatcctatcgaggatgagctggtattccgggttggcagccgtggacgggaaaaaggggagtttaccaatctacagggggtgagtgctgcatcaagcggcaggatcgtggtcgcggactccaacaaccagtgcattcaggtgttctctaatgagggacagtttaagtttcgtttcggtgtccgcggaaggtctcccggacagcttcaaagaccgactggggtcgccgtcgataccaacggtgacatcatcgttgccgattacgataaccgatgggtgagcattttttcccctgagggtaagttcaaaacgaaaattggggctggcaggctcatgggccctaaaggagtagccgtcgatcgcaacggccatatcatcgtggttgataacaagtcctgttgcgtcttcactttccaacctaatggcaagttagtgggacggttcggcggacggggagccacggatcggcatttcgctggccctcacttcgtggccgtgaacaataaaaatgagatcgtggtgactgatttccacaatcactccgtgaaggtgtacagcgctgacggtgagttcctcttcaaatttggcagccacggggagggtaatggtcagttcaatgcaccgactggcgtggcagtggactctaatggtaacatcatcgtgtgccgggctagcccctatccatcctacacacctccacacccatgtcagtccgcccctcatcctcccgcttgggggcagaactcactgccccaggacagaagccccagcagctgcctccctacgacactctataccctgaccgaaaccgcaattcctcaccctccttactag

SEQ ID NO: 312165 - DNA, 2844 bp, Artificial Sequence
  derived and/or modified sequence
cccccggccggtccgcagccccgccccggcccctccctccggcctgtgcggctagtccggcggcggcgccggcgcggggacaggcggaggcgcgggcagggccgggcggacgggcgctggcagcagtagcagcgccgcgggcccttcagagtggccgcagtccgagctttgccctcgcatcctgttccaacgcgaggctggtgtgagtggcgggagccatctgtgggcgccatggcaaagagggaggacagccctggcccagaggtccagccaatggacaagcagttcctggtatgcagcatctgcctggatcggtaccagtgccccaaggttcttccttgcctgcacaccttctgtgagagatgtctccaaaactatatccctgcccagagcctgacgctatcctgtccagtatgccggcagacgtccatcctcccagagcagggcgtctcggcactgcagaacaacttcttcatcagcagcctcatggaggcaatgcagcaggcacctgatggggcccacgacccggaggacccccaccccctcagtgtagtggctggccgccctctctcctgccccaaccatgaaggcaagacgatggagttttactgtgaggcctgtgagacggccatgtgtggtgagtgccgcgccggggagcatcgtgagcagcacaaggcggccctgcagcgccagctcgaggctgtgcgtggccgattgccacagctgtccgcagcaattgccttagtcgggggcatcagccagcagctgcaggagcgcaaggcagaggccctggcccagatcagtgcagcgttcgaggacctggagcaagcactgcagcagcgcaagcaggctctggtcagcgacctggagaccatttgtggggccaaacagaaggtgttgcaaagccagctggacacactgcgccagggtcaggaacacatcggcagtagctgcagctttgcagagcaggcactgcgcctgggctcggccccggaggtgttgctggtgcgcaagcacatgcgagagcggctggctgcattggcggcacaggccttcccggagcggccacatgagaatgcacagctggaactggtccttgaggtggacggtctgcggcgatcggtgctcaatctgggcgcactgctcaccacgagcgccactgcacacgaaacggtggccacgggagagggcctgcgccaggcgctagtgggccagcctgcctcgctcactgtcactaccaaagacaaggacgggcggttggtgcgcacaggcagcgctgagctgcgtgcagagatcaccggcccggacggcacgcgccttccggtgccagtggtggaccacaagaatggcacatatgagctagtgtacacagcgcgcacggaaggcgagctgctcctctcggtgctgctctacggacagccagtgcgcggcagccccttccgcgtgcgtgccctgcgtccgggggacctgccaccttccccggacgatgtgaagcgccgtgtcaagtcccctggcggccccggcagccatgtgcgccagaaggcagtgcgtaggcccagctccatgtacagcacaggcggcaaacgaaaggacaacccaattgaggatgagctcgtcttccgtgttggcagtcgtggaagggagaaaggtgaattcaccaatttacaaggtgtgtccgcagccagcagcggccgcatcgtggtagcagacagcaacaaccagtgtattcaggttttctccaatgagggccagttcaagttccgttttggggtccgaggacgctcacctgggcagctgcagcgccccacaggtgtggcagtggacaccaatggagacataattgtggcagactatgacaaccgttgggtcagcatcttctcccctgagggcaagttcaagaccaagattggagctggccgcctcatgggccccaagggagtggccgtagaccggaatggacatatcattgtggtcgacaacaagtcttgctgcgtctttaccttccagcccaatggcaaactggttggccgttttgggggccgtggggccactgaccgccactttgcagggccccattttgtggctgtgaacaacaagaatgaaattgtagtaacggacttccataaccattcagtgaaggtgtacagtgccgatggagagttcctcttcaagtttggctcccatggcgagggcaatgggcagttcaatgcccccacaggagtagctgtggactccaatggaaacatcattgtggctgactggggcaacagccgcatccaggtattcgacagctctggctccttcctgtcctatatcaacacatctgcagaaccactgtatggtccacagggcctggcactgacctcggatggccatgtggtggtggctgatgctggcaaccactgctttaaagcctatcgctacctccagtagctgtacagaggccctgcctggcttgtggagggacagacattggggtgattggacaagagggtctggctgggaggtgggccagacctggcagcactgaatgtgggctgtgggcatgggtgcacccggtgccctccctctcctacccccacccccacggttgcactttatttattcggttcttgctttggtgactgggtgagcctggactgtggtcccaaggatgtgtgcagagcttcaccctacccttcttacacacctccccacccctgtcagtctgctccccatcccccagcctggggccagaacagcctaccccaggacaggagtccctctagttgtctccctaccaccctatacacactgacagagacagcaataccccaccccccatattaaataaatgtcttcacc

SEQ ID NO: 312166 - DNA, 2879 bp, Artificial Sequence
  derived and/or modified sequence
cccccggccggtccgcagccccgccccggcccctccctccggcctgtgcggctagtccggcggcggcgccggcgcggggacaggcggaggcgcgggcagggccgggcggacgggcgctggcagcagtagcagcgccgcgggcccttcagagtggccgcagtccgagctttgccctcgcatcctgttccaacgcgaggctggtgtgagtggcgggagccatctgtgggcgccatggcaaagagggaggacagccctggcccagaggtccagccaatggacaagcagttcctggtatgcagcatctgcctggatcggtaccagtgccccaaggttcttccttgcctgcacaccttctgtgagagatgtctccaaaactatatccctgcccagagcctgacgctatcctgtccagtatgccggcagacgtccatcctcccagagcagggcgtctcggcactgcagaacaacttcttcatcagcagcctcatggaggcaatgcagcaggcacctgatggggcccacgacccggaggacccccaccccctcagtgtagtggctggccgccctctctcctgccccaaccatgaaggcaagacgatggagttttactgtgaggcctgtgagacggccatgtgtggtgagtgccgcgccggggagcatcgtgagcatggcacagtgctgctgagggatgtggtggagcagcacaaggcggccctgcagcgccagctcgaggctgtgcgtggccgattgccacagctgtccgcagcaattgccttagtcgggggcatcagccagcagctgcaggagcgcaaggcagaggccctggcccagatcagtgcagcgttcgaggacctggagcaagcactgcagcagcgcaagcaggctctggtcagcgacctggagaccatttgtggggccaaacagaaggtgttgcaaagccagctggacacactgcgccagggtcaggaacacatcggcagtagctgcagctttgcagagcaggcactgcgcctgggctcggccccggaggtgttgctggtgcgcaagcacatgcgagagcggctggctgcattggcggcacaggccttcccggagcggccacatgagaatgcacagctggaactggtccttgaggtggacggtctgcggcgatcggtgctcaatctgggcgcactgctcaccacgagcgccactgcacacgaaacggtggccacgggagagggcctgcgccaggcgctagtgggccagcctgcctcgctcactgtcactaccaaagacaaggacgggcggttggtgcgcacaggcagcgctgagctgcgtgcagagatcaccggcccggacggcacgcgccttccggtgccagtggtggaccacaagaatggcacatatgagctagtgtacacagcgcgcacggaaggcgagctgctcctctcggtgctgctctacggacagccagtgcgcggcagccccttccgcgtgcgtgccctgcgtccgggggacctgccaccttccccggacgatgtgaagcgccgtgtcaagtcccctggcggccccggcagccatgtgcgccagaaggcagtgcgtaggcccagctccatgtacagcacaggcggcaaacgaaaggacaacccaattgaggatgagctcgtcttccgtgttggcagtcgtggaagggagaaaggtgaattcaccaatttacaaggtgtgtccgcagccagcagcggccgcatcgtggtagcagacagcaacaaccagtgtattcaggttttctccaatgagggccagttcaagttccgttttggggtccgaggacgctcacctgggcagctgcagcgccccacaggtgtggcagtggacaccaatggagacataattgtggcagactatgacaaccgttgggtcagcatcttctcccctgagggcaagttcaagaccaagattggagctggccgcctcatgggccccaagggagtggccgtagaccggaatggacatatcattgtggtcgacaacaagtcttgctgcgtctttaccttccagcccaatggcaaactggttggccgttttgggggccgtggggccactgaccgccactttgcagggccccattttgtggctgtgaacaacaagaatgaaattgtagtaacggacttccataaccattcagtgaaggtgtacagtgccgatggagagttcctcttcaagtttggctcccatggcgagggcaatgggcagttcaatgcccccacaggagtagctgtggactccaatggaaacatcattgtggctgactggggcaacagccgcatccaggtattcgacagctctggctccttcctgtcctatatcaacacatctgcagaaccactgtatggtccacagggcctggcactgacctcggatggccatgtggtggtggctgatgctggcaaccactgctttaaagcctatcgctacctccagtagctgtacagaggccctgcctggcttgtggagggacagacattggggtgattggacaagagggtctggctgggaggtgggccagacctggcagcactgaatgtgggctgtgggcatgggtgcacccggtgccctccctctcctacccccacccccacggttgcactttatttattcggttcttgctttggtgactgggtgagcctggactgtggtcccaaggatgtgtgcagagcttcaccctacccttcttacacacctccccacccctgtcagtctgctccccatcccccagcctggggccagaacagcctaccccaggacaggagtccctctagttgtctccctaccaccctatacacactgacagagacagcaataccccaccccccatattaaataaatgtcttcaccaa

SEQ ID NO: 312167 - DNA, 3033 bp, Artificial Sequence
  derived and/or modified sequence
ggtccgcagccccgccccggcccctccctccggcctgtgcggctagtccggcggcggcgccggcgcggggacaggcggaggcgcgggcagggccgggcggacgggcgctggcagcagtagcagcgccgcgggcccttcagagtggccgcagtccgagctttgccctcgcatcctgttccaacgcggaaaggacccctctggttctcctgtagcctgagccctgcctggaggaccccaggcccctccctggttctgacctcctcccttctgcaattggcttcagatcctgggctgcaaacctgcagggacagatggttgcaggttggaggggcaggctgcaccccagggagaggctggtgtgagtggcgggagccatctgtgggcgccatggcaaagagggaggacagccctggcccagaggtccagccaatggacaagcagttcctggtatgcagcatctgcctggatcggtaccagtgccccaaggttcttccttgcctgcacaccttctgtgagagatgtctccaaaactatatccctgcccagagcctgacgctatcctgtccagtatgccggcagacgtccatcctcccagagcagggcgtctcggcactgcagaacaacttcttcatcagcagcctcatggaggcaatgcagcaggcacctgatggggcccacgacccggaggacccccaccccctcagtgtagtggctggccgccctctctcctgccccaaccatgaaggcaagacgatggagttttactgtgaggcctgtgagacggccatgtgtggtgagtgccgcgccggggagcatcgtgagcatggcacagtgctgctgagggatgtggtggagcagcacaaggcggccctgcagcgccagctcgaggctgtgcgtggccgattgccacagctgtccgcagcaattgccttagtcgggggcatcagccagcagctgcaggagcgcaaggcagaggccctggcccagatcagtgcagcgttcgaggacctggagcaagcactgcagcagcgcaagcaggctctggtcagcgacctggagaccatttgtggggccaaacagaaggtgttgcaaagccagctggacacactgcgccagggtcaggaacacatcggcagtagctgcagctttgcagagcaggcactgcgcctgggctcggccccggaggtgttgctggtgcgcaagcacatgcgagagcggctggctgcattggcggcacaggccttcccggagcggccacatgagaatgcacagctggaactggtccttgaggtggacggtctgcggcgatcggtgctcaatctgggcgcactgctcaccacgagcgccactgcacacgaaacggtggccacgggagagggcctgcgccaggcgctagtgggccagcctgcctcgctcactgtcactaccaaagacaaggacgggcggttggtgcgcacaggcagcgctgagctgcgtgcagagatcaccggcccggacggcacgcgccttccggtgccagtggtggaccacaagaatggcacatatgagctagtgtacacagcgcgcacggaaggcgagctgctcctctcggtgctgctctacggacagccagtgcgcggcagccccttccgcgtgcgtgccctgcgtccgggggacctgccaccttccccggacgatgtgaagcgccgtgtcaagtcccctggcggccccggcagccatgtgcgccagaaggcagtgcgtaggcccagctccatgtacagcacaggcggcaaacgaaaggacaacccaattgaggatgagctcgtcttccgtgttggcagtcgtggaagggagaaaggtgaattcaccaatttacaaggtgtgtccgcagccagcagcggccgcatcgtggtagcagacagcaacaaccagtgtattcaggttttctccaatgagggccagttcaagttccgttttggggtccgaggacgctcacctgggcagctgcagcgccccacaggtgtggcagtggacaccaatggagacataattgtggcagactatgacaaccgttgggtcagcatcttctcccctgagggcaagttcaagaccaagattggagctggccgcctcatgggccccaagggagtggccgtagaccggaatggacatatcattgtggtcgacaacaagtcttgctgcgtctttaccttccagcccaatggcaaactggttggccgttttgggggccgtggggccactgaccgccactttgcagggccccattttgtggctgtgaacaacaagaatgaaattgtagtaacggacttccataaccattcagtgaaggtgtacagtgccgatggagagttcctcttcaagtttggctcccatggcgagggcaatgggcagttcaatgcccccacaggagtagctgtggactccaatggaaacatcattgtggctgactggggcaacagccgcatccaggtattcgacagctctggctccttcctgtcctatatcaacacatctgcagaaccactgtatggtccacagggcctggcactgacctcggatggccatgtggtggtggctgatgctggcaaccactgctttaaagcctatcgctacctccagtagctgtacagaggccctgcctggcttgtggagggacagacattggggtgattggacaagagggtctggctgggaggtgggccagacctggcagcactgaatgtgggctgtgggcatgggtgcacccggtgccctccctctcctacccccacccccacggttgcactttatttattcggttcttgctttggtgactgggtgagcctggactgtggtcccaaggatgtgtgcagagcttcaccctacccttcttacacacctccccacccctgtcagtctgctccccatcccccagcctggggccagaacagcctaccccaggacaggagtccctctagttgtctccctaccaccctatacacactgacagagacagcaataccccaccccccatattaaataaatgtcttcacc

SEQ ID NO: 312168 - DNA, 3044 bp, Artificial Sequence
  derived and/or modified sequence
ccttctcccagagttctgggtactgcccttctgccgcccagagatcgtgctgaggtacagacggtttctacgtcttcctggtcagccgatagactagcatattccataggagcactccaaggaagccggaaagggcgcctccaggaggcaggcggcccagacaggctcccagagtccgaaatccctgctgccccagctgccttttcttgacggagtctcatctcaatccctgagaccgactacaccgcccttcccggagccggaggcagctggcggagatccgggatccgagatccgggatccggctcgccggcccgccggctccctagcagcaccaaggaggcagcgtccgcaggagaggctggtgtgagtggcgggagccatctgtgggcgccatggcaaagagggaggacagccctggcccagaggtccagccaatggacaagcagttcctggtatgcagcatctgcctggatcggtaccagtgccccaaggttcttccttgcctgcacaccttctgtgagagatgtctccaaaactatatccctgcccagagcctgacgctatcctgtccagtatgccggcagacgtccatcctcccagagcagggcgtctcggcactgcagaacaacttcttcatcagcagcctcatggaggcaatgcagcaggcacctgatggggcccacgacccggaggacccccaccccctcagtgtagtggctggccgccctctctcctgccccaaccatgaaggcaagacgatggagttttactgtgaggcctgtgagacggccatgtgtggtgagtgccgcgccggggagcatcgtgagcatggcacagtgctgctgagggatgtggtggagcagcacaaggcggccctgcagcgccagctcgaggctgtgcgtggccgattgccacagctgtccgcagcaattgccttagtcgggggcatcagccagcagctgcaggagcgcaaggcagaggccctggcccagatcagtgcagcgttcgaggacctggagcaagcactgcagcagcgcaagcaggctctggtcagcgacctggagaccatttgtggggccaaacagaaggtgttgcaaagccagctggacacactgcgccagggtcaggaacacatcggcagtagctgcagctttgcagagcaggcactgcgcctgggctcggccccggaggtgttgctggtgcgcaagcacatgcgagagcggctggctgcattggcggcacaggccttcccggagcggccacatgagaatgcacagctggaactggtccttgaggtggacggtctgcggcgatcggtgctcaatctgggcgcactgctcaccacgagcgccactgcacacgaaacggtggccacgggagagggcctgcgccaggcgctagtgggccagcctgcctcgctcactgtcactaccaaagacaaggacgggcggttggtgcgcacaggcagcgctgagctgcgtgcagagatcaccggcccggacggcacgcgccttccggtgccagtggtggaccacaagaatggcacatatgagctagtgtacacagcgcgcacggaaggcgagctgctcctctcggtgctgctctacggacagccagtgcgcggcagccccttccgcgtgcgtgccctgcgtccgggggacctgccaccttccccggacgatgtgaagcgccgtgtcaagtcccctggcggccccggcagccatgtgcgccagaaggcagtgcgtaggcccagctccatgtacagcacaggcggcaaacgaaaggacaacccaattgaggatgagctcgtcttccgtgttggcagtcgtggaagggagaaaggtgaattcaccaatttacaaggtgtgtccgcagccagcagcggccgcatcgtggtagcagacagcaacaaccagtgtattcaggttttctccaatgagggccagttcaagttccgttttggggtccgaggacgctcacctgggcagctgcagcgccccacaggtgtggcagtggacaccaatggagacataattgtggcagactatgacaaccgttgggtcagcatcttctcccctgagggcaagttcaagaccaagattggagctggccgcctcatgggccccaagggagtggccgtagaccggaatggacatatcattgtggtcgacaacaagtcttgctgcgtctttaccttccagcccaatggcaaactggttggccgttttgggggccgtggggccactgaccgccactttgcagggccccattttgtggctgtgaacaacaagaatgaaattgtagtaacggacttccataaccattcagtgaaggtgtacagtgccgatggagagttcctcttcaagtttggctcccatggcgagggcaatgggcagttcaatgcccccacaggagtagctgtggactccaatggaaacatcattgtggctgactggggcaacagccgcatccaggtattcgacagctctggctccttcctgtcctatatcaacacatctgcagaaccactgtatggtccacagggcctggcactgacctcggatggccatgtggtggtggctgatgctggcaaccactgctttaaagcctatcgctacctccagtagctgtacagaggccctgcctggcttgtggagggacagacattggggtgattggacaagagggtctggctgggaggtgggccagacctggcagcactgaatgtgggctgtgggcatgggtgcacccggtgccctccctctcctacccccacccccacggttgcactttatttattcggttcttgctttggtgactgggtgagcctggactgtggtcccaaggatgtgtgcagagcttcaccctacccttcttacacacctccccacccctgtcagtctgctccccatcccccagcctggggccagaacagcctaccccaggacaggagtccctctagttgtctccctaccaccctatacacactgacagagacagcaataccccaccccccatattaaataaatgtcttcaccaag

SEQ ID NO: 312169 - DNA, 2435 bp, Artificial Sequence
  derived and/or modified sequence
gtattcctgtcagcccgggtctgggtcggagcgtctgtgggtgggggcacagatgattttcaaaagctgtgcctctctctgcccacgtgaggcgtgtccatgtccgtgagagcagcagggggattcttcgggctgtggctgctcacgtgagaggctggtgtgagtggcgggagccatctgtgggcgccatggcaaagagggaggacagccctggcccagaggtccagccaatggacaagcagttcctggtatgcagcatctgcctggatcggtaccagtgccccaaggttcttccttgcctgcacaccttctgtgagagatgtctccaaaactatatccctgcccagagcctgacgctatcctgtccagtatgccggcagacgtccatcctcccagagcagggcgtctcggcactgcagaacaacttcttcatcagcagcctcatggaggcaatgcagcaggcacctgatggggcccacgacccggaggacccccaccccctcagtgtagtggctggccgccctctctcctgccccaaccatgaaggcaagacgatggagttttactgtgaggcctgtgagacggccatgtgtggtgagtgccgcgccggggagcatcgtgagcatggcacagtgctgctgagggatgtggtggagcagcacaaggcggccctgcagcgccagctcgaggctgtgcgtggccgattgccacagctgtccgcagcaattgccttagtcgggggcatcagccagcagctgcaggagcgcaaggcagaggccctggcccagatcagtgcagcgttcgaggacctggagcaagcactgcagcagcgcaagcaggctctggtcagcgacctggagaccatttgtggggccaaacagaaggtgttgcaaagccagctggacacactgcgccagggtcaggaacacatcggcagtagctgcagctttgcagagcaggcactgcgcctgggctcggccccggaggtgttgctggtgcgcaagcacatgcgagagcggctggctgcattggcggcacaggccttcccggagcggccacatgagaatgcacagctggaactggtccttgaggtggacggtctgcggcgatcggtgctcaatctgggcgcactgctcaccacgagcgccactgcacacgaaacggtggccacgggagagggcctgcgccaggcgctagtgggccagcctgcctcgctcactgtcactaccaaagacaaggacgggcggttggtgcgcacaggcagcgctgagctgcgtgcagagatcaccggcccggacggcacgcgccttccggtgccagtggtggaccacaagaatggcacatatgagctagtgtacacagcgcgcacggaaggcgagctgctcctctcggtgctgctctacggacagccagtgcgcggcagccccttccgcgtgcgtgccctgcgtccgggggacctgccaccttccccggacgatgtgaagcgccgtgtcaagtcccctggcggccccggcagccatgtgcgccagaaggcagtgcgtaggcccagctccatgtacagcacaggcggcaaacgaaaggacaacccaattgaggatgagctcgtcttccgtgttggcagtcgtggaagggagaaaggtgaattcaccaatttacaaggtgtgtccgcagccagcagcggccgcatcgtggtagcagacagcaacaaccagtgtattcaggttttctccaatgagggccagttcaagttccgttttggggtccgaggacgctcacctgggcagctgcagcgccccacaggtgtggcagtggacaccaatggagacataattgtggcagactatgacaaccgttgggtcagcatcttctcccctgagggcaagttcaagaccaagattggagctggccgcctcatgggccccaagggagtggccgtagaccggaatggacatatcattgtggtcgacaacaagtcttgctgcgtctttaccttccagcccaatggcaaactggttggccgttttgggggccgtggggccactgaccgccactttgcagggccccattttgtggctgtgaacaacaagaatgaaattgtagtaacggacttccataaccattcagtgaaggtgtacagtgccgatggagagttcctcttcaagtttggctcccatggcgagggcaatgggcagttcaatgcccccacaggagtagctgtggactccaatggaaacatcattgatgtgtgcagagcttcaccctacccttcttacacacctccccacccctgtcagtctgctccccatcccccagcctggggccagaacagcctaccccaggacaggagtccctctagttgtctccctaccaccctatacacactgacagagacagcaataccccaccccccatattaaataaatgtcttcaccaag

SEQ ID NO: 312170 - DNA, 2643 bp, Artificial Sequence
  derived and/or modified sequence
cccccggccggtccgcagccccgccccggcccctccctccggcctgtgcggctagtccggcggcggcgccggcgcggggacaggcggaggcgcgggcagggccgggcggacgggcgctggcagcagtagcagcgccgcgggcccttcagagtggccgcagtccgagctttgccctcgcatcctgttccaacgcgaggctggtgtgagtggcgggagccatctgtgggcgccatggcaaagagggaggacagccctggcccagaggtccagccaatggacaagcagttcctggtatgcagcatctgcctggatcggtaccagtgccccaaggttcttccttgcctgcacaccttctgtgagagatgtctccaaaactatatccctgcccagagcctgacgctatcctgtccagtatgccggcagacgtccatcctcccagagcagggcgtctcggcactgcagaacaacttcttcatcagcagcctcatggaggcaatgcagcaggcacctgatggggcccacgacccggaggacccccaccccctcagtgtagtggctggccgccctctctcctgccccaaccatgaaggcaagacgatggagttttactgtgaggcctgtgagacggccatgtgtggtgagtgccgcgccggggagcatcgtgagcatggcacagtgctgctgagggatgtggtggagcagcacaaggcggccctgcagcgccagctcgaggctgtgcgtggccgattgccacagctgtccgcagcaattgccttagtcgggggcatcagccagcagctgcaggagcgcaaggcagaggccctggcccagatcagtgcagcgttcgaggacctggagcaagcactgcagcagcgcaagcaggctctggtcagcgacctggtggacggtctgcggcgatcggtgctcaatctgggcgcactgctcaccacgagcgccactgcacacgaaacggtggccacgggagagggcctgcgccaggcgctagtgggccagcctgcctcgctcactgtcactaccaaagacaaggacgggcggttggtgcgcacaggcagcgctgagctgcgtgcagagatcaccggcccggacggcacgcgccttccggtgccagtggtggaccacaagaatggcacatatgagctagtgtacacagcgcgcacggaaggcgagctgctcctctcggtgctgctctacggacagccagtgcgcggcagccccttccgcgtgcgtgccctgcgtccgggggacctgccaccttccccggacgatgtgaagcgccgtgtcaagtcccctggcggccccggcagccatgtgcgccagaaggcagtgcgtaggcccagctccatgtacagcacaggcggcaaacgaaaggacaacccaattgaggatgagctcgtcttccgtgttggcagtcgtggaagggagaaaggtgaattcaccaatttacaaggtgtgtccgcagccagcagcggccgcatcgtggtagcagacagcaacaaccagtgtattcaggttttctccaatgagggccagttcaagttccgttttggggtccgaggacgctcacctgggcagctgcagcgccccacaggtgtggcagtggacaccaatggagacataattgtggcagactatgacaaccgttgggtcagcatcttctcccctgagggcaagttcaagaccaagattggagctggccgcctcatgggccccaagggagtggccgtagaccggaatggacatatcattgtggtcgacaacaagtcttgctgcgtctttaccttccagcccaatggcaaactggttggccgttttgggggccgtggggccactgaccgccactttgcagggccccattttgtggctgtgaacaacaagaatgaaattgtagtaacggacttccataaccattcagtgaaggtgtacagtgccgatggagagttcctcttcaagtttggctcccatggcgagggcaatgggcagttcaatgcccccacaggagtagctgtggactccaatggaaacatcattgtggctgactggggcaacagccgcatccaggtattcgacagctctggctccttcctgtcctatatcaacacatctgcagaaccactgtatggtccacagggcctggcactgacctcggatggccatgtggtggtggctgatgctggcaaccactgctttaaagcctatcgctacctccagtagctgtacagaggccctgcctggcttgtggagggacagacattggggtgattggacaagagggtctggctgggaggtgggccagacctggcagcactgaatgtgggctgtgggcatgggtgcacccggtgccctccctctcctacccccacccccacggttgcactttatttattcggttcttgctttggtgactgggtgagcctggactgtggtcccaaggatgtgtgcagagcttcaccctacccttcttacacacctccccacccctgtcagtctgctccccatcccccagcctggggccagaacagcctaccccaggacaggagtccctctagttgtctccctaccaccctatacacactgacagagacagcaataccccaccccccatattaaataaatgtcttcacc

SEQ ID NO: 312171 - DNA, 2432 bp, Artificial Sequence
  derived and/or modified sequence
gtattcctgtcagcccgggtctgggtcggagcgtctgtgggtgggggcacagatgattttcaaaagctgtgcctctctctgcccacgtgaggcgtgtccatgtccgtgagagcagcagggggattcttcgggctgtggctgctcacgtgagaggctggtgtgagtggcgggagccatctgtgggcgccatggcaaagagggaggacagccctggcccagaggtccagccaatggacaagcagttcctggtatgcagcatctgcctggatcggtaccagtgccccaaggttcttccttgcctgcacaccttctgtgagagatgtctccaaaactatatccctgcccagagcctgacgctatcctgtccagtatgccggcagacgtccatcctcccagagcagggcgtctcggcactgcagaacaacttcttcatcagcagcctcatggaggcaatgcagcaggcacctgatggggcccacgacccggaggacccccaccccctcagtgtagtggctggccgccctctctcctgccccaaccatgaaggcaagacgatggagttttactgtgaggcctgtgagacggccatgtgtggtgagtgccgcgccggggagcatcgtgagcatggcacagtgctgctgagggatgtggtggagcagcacaaggcggccctgcagcgccagctcgaggctgtgcgtggccgattgccacagctgtccgcagcaattgccttagtcgggggcatcagccagcagctgcaggagcgcaaggcagaggccctggcccagatcagtgcagcgttcgaggacctggagcaagcactgcagcagcgcaagcaggctctggtcagcgacctggagaccatttgtggggccaaacagaaggtgttgcaaagccagctggacacactgcgccagggtcaggaacacatcggcagtagctgcagctttgcagagcaggcactgcgcctgggctcggccccggaggtgttgctggtgcgcaagcacatgcgagagcggctggctgcattggcggcacaggccttcccggagcggccacatgagaatgcacagctggaactggtccttgaggtggacggtctgcggcgatcggtgctcaatctgggcgcactgctcaccacgagcgccactgcacacgaaacggtggccacgggagagggcctgcgccaggcgctagtgggccagcctgcctcgctcactgtcactaccaaagacaaggacgggcggttggtgcgcacaggcagcgctgagctgcgtgcagagatcaccggcccggacggcacgcgccttccggtgccagtggtggaccacaagaatggcacatatgagctagtgtacacagcgcgcacggaaggcgagctgctcctctcggtgctgctctacggacagccagtgcgcggcagccccttccgcgtgcgtgccctgcgtccgggggacctgccaccttccccggacgatgtgaagcgccgtgtcaagtcccctggcggccccggcagccatgtgcgccagaaggcagtgcgtaggcccagctccatgtacagcacaggcggcaaacgaaaggacaacccaattgaggatgagctcgtcttccgtgttggcagtcgtggaagggagaaaggtgaattcaccaatttacaaggtgtgtccgcagccagcagcggccgcatcgtggtagcagacagcaacaaccagtgtattcaggttttctccaatgagggccagttcaagttccgttttggggtccgaggacgctcacctgggcagctgcagcgccccacaggtgtggcagtggacaccaatggagacataattgtggcagactatgacaaccgttgggtcagcatcttctcccctgagggcaagttcaagaccaagattggagctggccgcctcatgggccccaagggagtggccgtagaccggaatggacatatcattgtggtcgacaacaagtcttgctgcgtctttaccttccagcccaatggcaaactggttggccgttttgggggccgtggggccactgaccgccactttgcagggccccattttgtggctgtgaacaacaagaatgaaattgtagtaacggacttccataaccattcagtgaaggtgtacagtgccgatggagagttcctcttcaagtttggctcccatggcgagggcaatgggcagttcaatgcccccacaggagtagctgtggactccaatggaaacatcattgtgtgcagagcttcaccctacccttcttacacacctccccacccctgtcagtctgctccccatcccccagcctggggccagaacagcctaccccaggacaggagtccctctagttgtctccctaccaccctatacacactgacagagacagcaataccccaccccccatattaaataaatgtcttcaccaag

SEQ ID NO: 312172 - protein, 625 aa, Artificial Sequence
  derived and/or modified sequence
MKTMEFYCEACETAMCGECRAGEHREHGTVLLRDVVEQHKAALQRQLEAVRGRLPQLSAAIALVGGISQQLQERKAEALAQISAAFEDLEQALQQRKQALVSDLETICGAKQKVLQSQLDTLRQGQEHIGSSCSFAEQALRLGSAPEVLLVRKHMRERLAALAAQAFPERPHENAQLELVLEVDGLRRSVLNLGALLTTSATAHETVATGEGLRQALVGQPASLTVTTKDKDGRLVRTGSAELRAEITGPDGTRLPVPVVDHKNGTYELVYTARTEGELLLSVLLYGQPVRGSPFRVRALRPGDLPPSPDDVKRRVKSPGGPGSHVRQKAVRRPSSMYSTGGKRKDNPIEDELVFRVGSRGREKGEFTNLQGVSAASSGRIVVADSNNQCIQVFSNEGQFKFRFGVRGRSPGQLQRPTGVAVDTNGDIIVADYDNRWVSIFSPEGKFKTKIGAGRLMGPKGVAVDRNGHIIVVDNKSCCVFTFQPNGKLVGRFGGRGATDRHFAGPHFVAVNNKNEIVVTDFHNHSVKVYSADGEFLFKFGSHGEGNGQFNAPTGVAVDSNGNIIVADWGNSRIQVFDSSGSFLSYINTSAEPLYGPQGLALTSDGHVVVADAGNHCFKAYRYLQ

SEQ ID NO: 312173 - DNA, 1878 bp, Artificial Sequence
  derived and/or modified sequence
atgaagaccatggagttctactgcgaggcctgcgagaccgccatgtgcggcgagtgcagagccggcgagcacagagagcacggcaccgtgctgctgagagacgtggtggagcagcacaaggccgccctgcagagacagctggaggccgtgagaggcagactgccccagctgagcgccgccatcgccctggtgggcggcatcagccagcagctgcaggagagaaaggccgaggccctggcccagatcagcgccgccttcgaggacctggagcaggccctgcagcagagaaagcaggccctggtgagcgacctggagaccatctgcggcgccaagcagaaggtgctgcagagccagctggacaccctgagacagggccaggagcacatcggcagcagctgcagcttcgccgagcaggccctgagactgggcagcgcccccgaggtgctgctggtgagaaagcacatgagagagagactggccgccctggccgcccaggccttccccgagagaccccacgagaacgcccagctggagctggtgctggaggtggacggcctgagaagaagcgtgctgaacctgggcgccctgctgaccaccagcgccaccgcccacgagaccgtggccaccggcgagggcctgagacaggccctggtgggccagcccgccagcctgaccgtgaccaccaaggacaaggacggcagactggtgagaaccggcagcgccgagctgagagccgagatcaccggccccgacggcaccagactgcccgtgcccgtggtggaccacaagaacggcacctacgagctggtgtacaccgccagaaccgagggcgagctgctgctgagcgtgctgctgtacggccagcccgtgagaggcagccccttcagagtgagagccctgagacccggcgacctgccccccagccccgacgacgtgaagagaagagtgaagagccccggcggccccggcagccacgtgagacagaaggccgtgagaagacccagcagcatgtacagcaccggcggcaagagaaaggacaaccccatcgaggacgagctggtgttcagagtgggcagcagaggcagagagaagggcgagttcaccaacctgcagggcgtgagcgccgccagcagcggcagaatcgtggtggccgacagcaacaaccagtgcatccaggtgttcagcaacgagggccagttcaagttcagattcggcgtgagaggcagaagccccggccagctgcagagacccaccggcgtggccgtggacaccaacggcgacatcatcgtggccgactacgacaacagatgggtgagcatcttcagccccgagggcaagttcaagaccaagatcggcgccggcagactgatgggccccaagggcgtggccgtggacagaaacggccacatcatcgtggtggacaacaagagctgctgcgtgttcaccttccagcccaacggcaagctggtgggcagattcggcggcagaggcgccaccgacagacacttcgccggcccccacttcgtggccgtgaacaacaagaacgagatcgtggtgaccgacttccacaaccacagcgtgaaggtgtacagcgccgacggcgagttcctgttcaagttcggcagccacggcgagggcaacggccagttcaacgcccccaccggcgtggccgtggacagcaacggcaacatcatcgtggccgactggggcaacagcagaatccaggtgttcgacagcagcggcagcttcctgagctacatcaacaccagcgccgagcccctgtacggcccccagggcctggccctgaccagcgacggccacgtggtggtggccgacgccggcaaccactgcttcaaggcctacagatacctgcagtag

SEQ ID NO: 312174 - DNA, 1878 bp, Artificial Sequence
  derived and/or modified sequence
atgaaaaccatggagttctattgcgaggcctgcgaaaccgcaatgtgcggagaatgccgagctggagaacacagagaacatggtacagtgcttttgcgcgacgtcgttgaacaacacaaagcagcactccagcgccagttggaggccgtgcgcggcagactcccacagctcagcgctgctattgcccttgtcggtggaataagccaacaattgcaggagaggaaagccgaggccctagcccaaatttccgcggcatttgaggatctcgagcaggcacttcagcagcgcaagcaggcactagtgtcagaccttgaaacaatatgcggcgctaagcagaaggtgctccaatcacagctggacactttgcgccaggggcaggagcatatcggttccagctgcagctttgcagagcaggctttgagactgggcagcgcccctgaagtccttctagtgcgcaaacatatgagggaaagattggccgcgctcgctgcccaagcttttccagagagaccacatgaaaatgctcagctcgagcttgtactggaggtggacgggctgagaaggtctgtcttaaacctcggggcgctattaacaaccagtgctaccgcccacgaaaccgtagcaacaggggagggcctgcggcaggccctggtaggacaacccgcttcactgactgtgaccaccaaggacaaagacggtcgtctcgttaggaccggaagcgccgagctgcgggcagagataacaggcccagatggaacgcgtctgcccgtcccggttgtagaccacaagaacggaacttacgagctcgtttacaccgctcggactgaaggggaactacttttgtctgtgcttctctatgggcagcccgtccgcgggagccccttccgggtccgcgcgcttcgacctggtgacctacccccttcccctgacgatgtcaagagacgggtgaagtccccagggggacctggaagccacgtgcggcagaaagcagtccgccgcccctcttccatgtacagcactggtgggaagaggaaagataatcccattgaagatgaattggtgttccgcgtcggttctcgtggccgcgagaagggcgaattcactaatctccagggagtgtccgccgcaagttctggacggatagttgtggcagatagcaacaatcagtgcatccaagtattttccaatgaggggcagtttaagtttcggttcggggttcggggccgctccccagggcagttgcagcgtcccaccggcgtggcagtggatactaatggcgacattatagtggccgattacgacaatagatgggtgtccattttttctccggaaggcaagtttaaaactaagattggcgcaggccgacttatggggcccaaaggagttgctgtcgacaggaatggccacataatcgtcgtagataacaagtcttgctgcgtctttaccttccagccgaacgggaagttggtcggccgatttgggggtaggggagcaacagaccgccactttgccggcccccactttgtggccgtgaataacaagaatgaaatcgtcgtcacagatttccataatcactcagtcaaagtttatagcgcagatggcgagttcctgtttaaatttggcagccacggagaagggaacggccagttcaacgcccctaccggagtcgcagtggactccaatggaaacattatcgtggctgactggggcaactctagaatacaggtgttcgacagttccggttcttttctgagctacatcaataccagtgcagaacctctgtacggaccacagggcctcgcactgacgtctgacggacacgtggtcgtcgctgatgccggaaaccattgttttaaggcatatcgttatctccagtag

SEQ ID NO: 312175 - DNA, 1878 bp, Artificial Sequence
  derived and/or modified sequence
atgaagaccatggagttctactgtgaggcctgtgaaacagccatgtgtggggagtgcagagctggggagcaccgggagcacggcaccgtgctgctgagagatgtggtggagcagcacaaggccgccctgcagaggcagctggaggccgtgcggggccgcctgccccagctgtctgctgccatcgccctggtgggcggcatcagccagcagctgcaggagaggaaggccgaggccctggcccagatctctgctgcctttgaggacctggagcaggccctgcagcagaggaagcaggccctggtgtctgacctggagaccatctgtggggccaagcagaaggtgctgcagagccagctggacaccctgcggcagggccaggagcacatcggcagcagctgcagctttgctgagcaggccctgcggctgggcagcgcccctgaggtgctgctggtgaggaagcacatgagggagcggctggccgccctggccgcccaggccttccctgagcggccccatgaaaatgcccagctggagctggtgctggaggtggatggcctgcggcgctctgtgctgaacctgggcgccctgctgaccaccagcgccacagcccacgagaccgtggccactggagagggcctgcggcaggccctggtgggccagcctgccagcctgactgtgaccaccaaggacaaggatggccgcctggtgaggacaggcagcgctgagctgcgggcagagatcaccggcccagatggcacccggctgcctgtgcctgtggtggaccacaagaatggcacctatgagctggtgtacacagccaggacagaaggagagctgctgctgtctgtgctgctgtatggccagcctgtgcggggcagccccttccgggtgcgggccctgcggcctggggacctgccccccagcccagatgatgtgaagagaagagtgaagagccctgggggccctggcagccacgtgcggcagaaggctgtgcggcggcccagctccatgtacagcactggaggcaagaggaaggacaaccccattgaagatgagctggtgttccgggtgggcagccggggccgggagaagggggagttcaccaacctgcagggcgtgtctgctgccagcagcggcagaattgtggtggccgacagcaacaaccagtgcatccaggtgttcagcaatgaaggccagttcaagttccgcttcggcgtgcggggccgcagccctggccagctgcagaggcccaccggggtggccgtggacaccaatggagacatcatcgtggccgactatgacaaccgctgggtgtccatcttcagccctgagggcaagttcaagaccaagattggagctggccgcctgatgggccccaagggcgtggccgtggacagaaatggccacatcatcgtggtggacaacaagagctgctgcgtgttcaccttccagcccaacgggaagctggtgggccgctttggaggccgcggggccacagacagacactttgctggcccccactttgtggccgtgaacaacaagaatgaaattgtggtgacagacttccacaaccacagcgtgaaggtgtacagcgcagatggagagttcctgttcaagtttggcagccatggagagggcaatggccagttcaatgcccccaccggggtggccgtggacagcaatggaaacatcatcgtggccgactggggcaacagccgcatccaggtgtttgacagcagcggcagcttcctgagctacatcaacaccagcgctgagcccctgtatggcccccagggcctggccctgaccagtgatggccacgtggtggtggctgatgctggcaaccactgcttcaaggcctaccgctacctgcagtag

SEQ ID NO: 312176 - DNA, 1878 bp, Artificial Sequence
  derived and/or modified sequence
atgaagaccatggagttctactgcgaggcctgcgagaccgccatgtgcggcgagtgccgagcaggagagcatagagagcacggaaccgtccttctgagggacgtcgtggagcagcataaagcagccttgcaacggcaactggaagcggtacgtggtcgactcccgcagctgagcgccgctatcgctctggtgggggggatctcccagcagctgcaagagcggaaggccgaggccctagctcaaatctctgccgcatttgaagacctcgaacaggctctgcagcagcgcaagcaggccctcgttagcgatctggagacaatctgcggtgccaagcagaaggtgctgcagtcccaactagataccttgcgacagggtcaggagcatattggaagtagctgttcctttgctgagcaagctctgagactgggaagtgcacctgaagtgctattagtgcgcaagcatatgagggaaagactcgctgcattggctgcccaggcctttccagaaaggccccacgagaatgcccagttggagctcgttctggaggtggacgggctccggaggtccgtgttaaatcttggcgcactcctaacaacgagcgccacggctcacgaaaccgtagccaccggtgaaggtctcaggcaggccctggtaggccagccagcttcacttacagtgacgacaaaggacaaagacggtaggctcgtacgtacgggctcagccgagcttcgagctgaaatcaccggcccggatgggaccagactgccagtacctgttgtcgaccataaaaacgggacctacgagctggtttacactgctcgaactgagggagagttgctacttagcgtgcttctctacggtcagccagtgcggggcagccccttccgcgtcagggccttacggcccggcgacctgcctccttcccctgatgacgtcaaaagacgagtcaagagtccagggggacccggatcccatgttcgacagaaggccgtacggcggccctcctctatgtattccaccggcggaaaacgcaaggacaacccgatagaagacgaattggtgtttcgggttgggtcgcgcggacgcgaaaaaggtgagttcactaatttgcagggtgtgagcgccgccagttccggacggatagtggttgcggattccaacaaccagtgtattcaggtgtttagcaatgaaggtcaattcaaattccgattcggtgttcgcggaaggagtcccgggcagcttcagaggccgactggagtggccgttgacaccaatggcgacattattgtcgccgattatgacaaccgctgggttagcattttcagtcccgaaggcaagtttaaaacaaaaattggcgcagggcggctgatgggacctaagggagtcgccgtcgatcgcaacggccatattattgtggtggataataaatcctgctgcgtgttcactttccagcctaatgggaagctagtgggtcgttttggcggtagaggtgcgacagataggcacttcgctgggccgcacttcgtggccgttaataataagaatgagattgtggtgacggacttccacaaccactccgtcaaggtgtactccgctgacggcgagtttctattcaaatttggatcgcacggcgaaggaaacggtcagttcaatgcccctacaggcgtggccgtggacagcaatggaaacataatcgtcgccgattggggtaacagccgaattcaagtcttcgactccagcgggtcattcctgagttatataaacacatcagccgagccactttacggaccacaaggattagcactgacatcggacggtcacgtggtggtggcagatgccgggaaccattgctttaaggcctaccgttacctgcagtag

SEQ ID NO: 312177 - DNA, 1878 bp, Artificial Sequence
  derived and/or modified sequence
atgaaaacgatggagttttactgtgaagcatgtgagaccgcaatgtgcggtgaatgtagagcaggtgaacaccgagagcacggaacggtgcttctgcgggacgtggtagaacaacacaaggctgccctacagcgacagttagaggccgtgagagggaggttgcctcaactgtcagctgcgattgcgttggtggggggaatatctcagcagctacaggaacgaaaggcagaagctctcgctcagatctccgcagcctttgaggatctggagcaggccctgcaacagcggaagcaggccctggtctcagacctggaaacaatatgcggcgcaaagcagaaggtgctgcagagtcaactcgacacgctcagacaggggcaggagcacattggatccagctgttcgttcgcagagcaagccctgaggcttggatcagctcctgaagtcctcttagtgcgcaaacacatgagggagcgtctggcagccttggctgcccaagcatttcccgaaaggccccacgaaaatgcccagctggaacttgtcctggaggtcgacgggctcagacgatcagtgcttaacttgggcgcactacttacaacttctgctacggcacacgagactgtggctaccggcgagggcctcaggcaggccctcgttgggcaacctgccagtctcaccgtgactacaaaggataaggatggccgactggtcaggaccggttcagctgagctacgcgcagaaattacaggccctgacgggacaaggcttcccgtccccgtcgtggatcataaaaatgggacttatgagttagtgtacactgcccgtacagagggcgaactgctcctgtcggtgttactatacggccagcccgtgcgcggttcccccttccgcgtcagagccctgcgcccaggcgatttacccccatcaccagacgacgtcaagagacgagtcaaatccccgggaggacctgggtctcacgtgcggcagaaagctgtcagaaggccctccagtatgtactcaaccggtggcaaaagaaaagacaacccaattgaagacgagctggtttttagagtgggtagtcgcggtcgtgagaagggcgaattcacaaaccttcagggagtgtctgccgctagcagcgggaggattgttgtcgccgacagtaacaaccagtgcatccaggtatttagtaatgaaggacagttcaagttccgctttggggtgcggggtcggagtccaggccaactgcagcggccaacgggcgtggccgtggatacaaacggcgacatcatcgtggccgactacgataacaggtgggtaagcatttttagccctgagggcaagttcaagactaaaatcggagccggacggctgatgggtccaaaaggggtcgctgttgatcgcaacggccacattatagtagtggacaataagagctgttgtgtgttcacctttcagcctaatggtaagttagtgggcagatttggaggcaggggagcgactgataggcatttcgctggccctcatttcgttgcagtcaacaataagaacgagatcgtggtcacagattttcacaatcatagcgtcaaggtctactcggcagacggtgaattccttttcaagtttggcagtcatggtgagggaaatggacagtttaacgccccaacaggggtagctgtggacagtaacgggaacataatagtggctgactggggaaactcacgtattcaggtctttgactcctccggcagttttctgagttacatcaacaccagtgcagaacctctttatgggccacagggcctggcactgaccagtgatgggcacgttgtggtcgccgacgccggaaaccactgctttaaagcctaccgatacttgcaatag

SEQ ID NO: 312178 - DNA, 2580 bp, Artificial Sequence
  derived and/or modified sequence
agtagcagcgccgcgggcccttcagagtggccgcagtccgagctttgccctcgcatcctgttccaacgcgatgtctccaaaactatatccctgcccagagcctgacgctatcctgtccagtatgccggcagacgtccatcctcccagagcagggcgtctcggcactgcagaacaacttcttcatcagcagcctcatggaggcaatgcagcaggcacctgatggggcccacgacccggaggacccccaccccctcagtgtagtggctggccgccctctctcctgccccaaccatgaagacgatggagttttactgtgaggcctgtgagacggccatgtgtggtgagtgccgcgccggggagcatcgtgagcatggcacagtgctgctgagggatgtggtggagcagcacaaggcggccctgcagcgccagctcgaggctgtgcgtggccgattgccacagctgtccgcagcaattgccttagtcgggggcatcagccagcagctgcaggagcgcaaggcagaggccctggcccagatcagtgcagcgttcgaggacctggagcaagcactgcagcagcgcaagcaggctctggtcagcgacctggagaccatttgtggggccaaacagaaggtgttgcaaagccagctggacacactgcgccagggtcaggaacacatcggcagtagctgcagctttgcagagcaggcactgcgcctgggctcggccccggaggtgttgctggtgcgcaagcacatgcgagagcggctggctgcattggcggcacaggccttcccggagcggccacatgagaatgcacagctggaactggtccttgaggtggacggtctgcggcgatcggtgctcaatctgggcgcactgctcaccacgagcgccactgcacacgaaacggtggccacgggagagggcctgcgccaggcgctagtgggccagcctgcctcgctcactgtcactaccaaagacaaggacgggcggttggtgcgcacaggcagcgctgagctgcgtgcagagatcaccggcccggacggcacgcgccttccggtgccagtggtggaccacaagaatggcacatatgagctagtgtacacagcgcgcacggaaggcgagctgctcctctcggtgctgctctacggacagccagtgcgcggcagccccttccgcgtgcgtgccctgcgtccgggggacctgccaccttccccggacgatgtgaagcgccgtgtcaagtcccctggcggccccggcagccatgtgcgccagaaggcagtgcgtaggcccagctccatgtacagcacaggcggcaaacgaaaggacaacccaattgaggatgagctcgtcttccgtgttggcagtcgtggaagggagaaaggtgaattcaccaatttacaaggtgtgtccgcagccagcagcggccgcatcgtggtagcagacagcaacaaccagtgtattcaggttttctccaatgagggccagttcaagttccgttttggggtccgaggacgctcacctgggcagctgcagcgccccacaggtgtggcagtggacaccaatggagacataattgtggcagactatgacaaccgttgggtcagcatcttctcccctgagggcaagttcaagaccaagattggagctggccgcctcatgggccccaagggagtggccgtagaccggaatggacatatcattgtggtcgacaacaagtcttgctgcgtctttaccttccagcccaatggcaaactggttggccgttttgggggccgtggggccactgaccgccactttgcagggccccattttgtggctgtgaacaacaagaatgaaattgtagtaacggacttccataaccattcagtgaaggtgtacagtgccgatggagagttcctcttcaagtttggctcccatggcgagggcaatgggcagttcaatgcccccacaggagtagctgtggactccaatggaaacatcattgtggctgactggggcaacagccgcatccaggtattcgacagctctggctccttcctgtcctatatcaacacatctgcagaaccactgtatggtccacagggcctggcactgacctcggatggccatgtggtggtggctgatgctggcaaccactgctttaaagcctatcgctacctccagtagctgtacagaggccctgcctggcttgtggagggacagacattggggtgattggacaagagggtctggctgggaggtgggccagacctggcagcactgaatgtgggctgtgggcatgggtgcacccggtgccctccctctcctacccccacccccacggttgcactttatttattcggttcttgctttggtgactgggtgagcctggactgtggtcccaaggatgtgtgcagagcttcaccctacccttcttacacacctccccacccctgtcagtctgctccccatcccccagcctggggccagaacagcctaccccaggacaggagtccctctagttgtctccctaccaccctatacacactgacagagacagcaataccccaccccccatattaaataaatgtcttcacc

SEQ ID NO: 312179 - protein, 486 aa, Artificial Sequence
  derived and/or modified sequence
MNGTLDHPDQPDLDAIKMFVGQVPRTWSEKDLRELFEQYGAVYEINVLRDRSQNPPQSKGCCFVTFYTRKAALEAQNALHNMKVLPGMHHPIQMKPADSEKNNAVEDRKLFIGMISKKCTENDIRVMFSSFGQIEECRILRGPDGLSRGCAFVTFTTRAMAQTAIKAMHQAQTMEGCSSPMVVKFADTQKDKEQKRMAQQLQQQMQQISAASVWGNLAGLNTLGPQYLALYLQLLQQTASSGNLNTLSSLHPMGGLNAMQLQNLAALAAAASAAQNTPSGTNALTTSSSPLSVLTSSGSSPSSSSSNSVNPIASLGALQTLAGATAGLNVGSLAGMAALNGGLGSSGLSNGTGSTMEALTQAYSGIQQYAAAALPTLYNQNLLTQQSIGAAGSQKEGPEGANLFIYHLPQEFGDQDLLQMFMPFGNVVSAKVFIDKQTNLSKCFGFVSYDNPVSAQAAIQSMNGFQIGMKRLKVQLKRSKNDSKPY

SEQ ID NO: 312180 - DNA, 1461 bp, Artificial Sequence
  derived and/or modified sequence
atgaacggcaccctggaccaccccgaccagcccgacctggacgccatcaagatgttcgtgggccaggtgcccagaacctggagcgagaaggacctgagagagctgttcgagcagtacggcgccgtgtacgagatcaacgtgctgagagacagaagccagaaccccccccagagcaagggctgctgcttcgtgaccttctacaccagaaaggccgccctggaggcccagaacgccctgcacaacatgaaggtgctgcccggcatgcaccaccccatccagatgaagcccgccgacagcgagaagaacaacgccgtggaggacagaaagctgttcatcggcatgatcagcaagaagtgcaccgagaacgacatcagagtgatgttcagcagcttcggccagatcgaggagtgcagaatcctgagaggccccgacggcctgagcagaggctgcgccttcgtgaccttcaccaccagagccatggcccagaccgccatcaaggccatgcaccaggcccagaccatggagggctgcagcagccccatggtggtgaagttcgccgacacccagaaggacaaggagcagaagagaatggcccagcagctgcagcagcagatgcagcagatcagcgccgccagcgtgtggggcaacctggccggcctgaacaccctgggcccccagtacctggccctgtacctgcagctgctgcagcagaccgccagcagcggcaacctgaacaccctgagcagcctgcaccccatgggcggcctgaacgccatgcagctgcagaacctggccgccctggccgccgccgccagcgccgcccagaacacccccagcggcaccaacgccctgaccaccagcagcagccccctgagcgtgctgaccagcagcggcagcagccccagcagcagcagcagcaacagcgtgaaccccatcgccagcctgggcgccctgcagaccctggccggcgccaccgccggcctgaacgtgggcagcctggccggcatggccgccctgaacggcggcctgggcagcagcggcctgagcaacggcaccggcagcaccatggaggccctgacccaggcctacagcggcatccagcagtacgccgccgccgccctgcccaccctgtacaaccagaacctgctgacccagcagagcatcggcgccgccggcagccagaaggagggccccgagggcgccaacctgttcatctaccacctgccccaggagttcggcgaccaggacctgctgcagatgttcatgcccttcggcaacgtggtgagcgccaaggtgttcatcgacaagcagaccaacctgagcaagtgcttcggcttcgtgagctacgacaaccccgtgagcgcccaggccgccatccagagcatgaacggcttccagatcggcatgaagagactgaaggtgcagctgaagagaagcaagaacgacagcaagccctactag

SEQ ID NO: 312181 - DNA, 2108 bp, Artificial Sequence
  derived and/or modified sequence
atgaacggcaccctggaccacccagaccaaccagatcttgatgctatcaagatgtttgtgggccaggttccaaggacctggtctgaaaaggacttgcgggaactcttcgaacagtatggtgctgtgtatgaaatcaacgtcctaagggataggagccaaaacccgcctcagagcaaagggtgctgttttgttacattttacacccgtaaagctgcattagaagctcagaatgctcttcacaacatgaaagtcctcccagggatgcatcaccctatacagatgaaacctgctgacagtgagaagaacaatgcagtggaagacaggaagctgtttattggtatgatttccaagaagtgcactgaaaatgacatccgagtcatgttctcttcgtttggacagattgaagaatgccggatattgcggggacctgatggcctgagccgaggttgtgcatttgtgacttttacaacaagagccatggcacagacggctatcaaggcaatgcaccaagcacagaccatggagggttgctcatcacccatggtggtaaaatttgctgatacacagaaggacaaagaacagaagagaatggcccagcagctccagcagcagatgcagcaaatcagcgcagcatctgtgtggggaaaccttgctggtctaaatactcttggaccccagtatttagcactttatttgcagctccttcagcagactgcctcctctgggaacctcaacaccctgagcagcctccacccaatgggagggttgaatgcaatgcagttacagaatttggctgcactagctgctgcagctagtgcagctcagaacacaccaagtggtaccaatgctctcactacatccagcagtcccctcagcgtgctcactagttcagggtcctcacctagctctagcagcagtaattctgtcaaccccatagcctcacttggagccctgcagacattagctggagcaacggctggcctcaatgttggctctttggcaggaatggctgctttaaatggtggcctgggcagcagtggcctttccaatggcaccgggagcaccatggaggccctcactcaggcctactcgggtatccagcaatatgctgctgctgcgctccccactctgtacaaccagaatcttctgacacagcagagtattggtgctgctggaagccagaaggaaggtccagagggagccaacctgttcatctaccacctgccccaggagtttggtgatcaggacctgctgcagatgtttatgccctttgggaatgtcgtgtctgccaaggttttcatagacaagcagacaaacctgagcaagtgttttggttttgtaagttacgacaatcctgtttcggcccaagctgccatccagtccatgaacggctttcagattggcatgaagcggcttaaagtgcagctcaaacgttcgaagaatgacagcaagccctactgagcgtgctcccctctgagactggagtgagagggtcttctgattcctgccgtttgttcatcgttgtgcctaaagcatgtcgatgtggcgtcaagtacatcgtccaaatccctgtctcttcagcttctctgatgcttgaactctcacctttgaccttgtgttgacctttgatgctgatgtgtatttttattatgtttgtttctttcttcgtttttttttctttttttctttcctttttttttccttttgtgctgccaaattggttttgctagaacgactgctgaaggggaaatatttaaacttgcatttgaatataaaaaaaatctatttttctagaacttcataagataaccacttgattttgtgattccaattctttgtaattgtcttcagagcagccctactagcacataccgcgtggtgtttgtatttctgtgaacacacagccagtccgtttctaggctttgtttctctgtgtgcttagttttaaagacaactttgaagtaaacaatgaaataaaagatgtcactaaaacctctgaggctcctgagcacattttgctgatacagtctgtggggcttgaggagaccgcatgtattgttctttcttttgtttttcttctgagttctcaactgcggagagcacctgaa

SEQ ID NO: 312182 - DNA, 1461 bp, Artificial Sequence
  derived and/or modified sequence
atgaacggcaccttggaccaccctgaccagcctgatttggatgccattaaaatgtttgtggggcaagtgccccgtacctggagcgagaaggacctgagggagctgtttgagcagtacggcgccgtgtacgaaataaacgtgctgcgagaccggtcgcagaacccgcctcagtcaaagggctgctgctttgtcactttctacaccagaaaagctgcactggaggctcagaacgccctacataatatgaaagttctacctggcatgcatcaccccatccagatgaagcccgctgattcggaaaaaaacaacgccgtagaggatcggaagctctttatcggcatgatctccaagaagtgcacagagaatgatatccgggttatgttcagctcatttggccaaatagaagagtgcaggatcctgcgcggcccagatgggttgagtcgcggctgcgcgttcgtcacgtttacgaccagggcaatggctcagaccgccattaaggccatgcaccaggctcagaccatggaggggtgtagtagtcctatggtggtgaaatttgctgacacccaaaaagataaggagcagaaacgcatggcacagcagctacaacagcagatgcagcagatttcggcagcgtctgtctggggcaatctcgcagggctcaataccctggggccacaatacctggctctgtatctgcagttgctgcagcaaacggcatcttctggtaatcttaacacgctgagttcgcttcatcccatggggggactgaatgcaatgcagttgcaaaatctggccgctttagctgctgctgccagtgcagcgcagaacacgccaagtggaacaaacgctctgactacaagctccagccccctcagcgttctgacgtcgtccggtagcagccccagcagcagtagttcaaactcggttaatcccatcgcttccctcggggccctacaaacattggccggcgccactgccggtctgaacgtcggtagcttggccggaatggctgctttgaacggtggactgggatcctctggattgtctaacgggacgggatccacaatggaagccctgacccaggcttattctggcatacagcaatacgccgccgcggctttgcccacactctacaatcagaatctccttactcaacagagtattggggctgccggaagccaaaaagagggccctgagggagccaatctgttcatctaccacctcccacaggagttcggtgatcaagatctgcttcagatgtttatgccatttgggaatgtggtgtccgccaaagtgttcatagacaagcagacgaacctgagcaaatgcttcggttttgtttcgtacgacaaccccgtgtctgcccaggcagccattcaaagtatgaatggctttcagataggtatgaaaagactgaaggttcaactcaaacgatctaaaaatgactcaaagccatactag

SEQ ID NO: 312183 - DNA, 1461 bp, Artificial Sequence
  derived and/or modified sequence
atgaatggcaccctggaccacccagaccagcctgacctggatgccatcaagatgtttgtgggccaggtgcccaggacctggagcgagaaggacctgcgggagctgtttgagcagtatggagctgtgtatgagatcaacgtgctgcgggacaggagccagaaccccccccagagcaagggctgctgctttgtgaccttctacaccaggaaggccgccctggaggcccagaatgccctgcacaacatgaaggtgctgcccggcatgcaccaccccatccagatgaagccagctgacagcgagaagaacaatgctgtggaggacaggaagctgttcatcggcatgatcagcaagaagtgcacagaaaatgacatccgggtgatgttcagcagctttggccagatcgaggagtgccgcatcctgcggggcccagatggcctgagccggggctgtgcctttgtgaccttcaccacccgggccatggcccagacagccatcaaggccatgcaccaggcccagaccatggagggctgcagcagccccatggtggtgaagtttgctgacacccagaaggacaaggagcagaagaggatggcccagcagctgcagcagcagatgcagcagatctctgctgcctctgtgtggggcaacctggccggcctgaacaccctgggcccccagtacctggccctgtacctgcagctgctgcagcagacagccagcagcggcaacctgaacaccctgagcagcctgcaccccatgggcggcctgaatgccatgcagctgcagaacctggccgccctggccgccgccgccagcgctgcccagaacaccccatctggcaccaatgccctgaccaccagcagcagccccctgtctgtgctgaccagcagcggcagcagccccagcagcagcagcagcaacagcgtgaaccccatcgccagcctgggcgccctgcagaccctggccggggccacagctggcctgaatgtgggcagcctggccggcatggccgccctgaatggaggcctgggcagcagcggcctgagcaatggcaccggcagcaccatggaggccctgacccaggcctacagcggcatccagcagtatgctgctgctgccctgcccaccctgtacaaccagaacctgctgacccagcagagcatcggggctgctggcagccagaaggagggccctgagggcgccaacctcttcatctaccacctgccccaggagtttggagaccaggacctgctgcagatgttcatgccctttggaaatgtggtgtctgccaaggtgttcatcgacaagcagaccaacctgagcaagtgcttcggctttgtgtcctatgacaaccctgtgtctgcccaggccgccatccagagcatgaatggcttccagatcggcatgaagaggctgaaggtgcagctgaagaggagcaagaatgacagcaagccctactag

SEQ ID NO: 312184 - DNA, 1461 bp, Artificial Sequence
  derived and/or modified sequence
atgaacggcaccctggaccaccccgaccagcccgacctggacgccatcaaaatgtttgttggccaggtgcccagaacatggtcagaaaaggacttgcgggaattgttcgagcaatatggggcagtctatgagattaacgtcttgcgagaccggtcccagaacccacctcagtccaaggggtgctgtttcgtgactttctacacgcggaaggctgctctcgaggctcagaacgcgttgcataatatgaaagtgctgcccggaatgcaccatcccattcagatgaaaccagctgactccgagaaaaacaatgcggtggaggaccggaaactcttcataggtatgatctccaagaagtgcaccgaaaacgatattcgagtcatgtttagttctttcggccagatcgaagagtgtcggatactgcgcgggcccgacggactctcaaggggttgtgctttcgtgacgttcaccactagagcaatggctcagacagcgatcaaagcaatgcaccaggcccagacaatggaaggctgtagtagccccatggtggtcaagtttgctgatacacagaaggacaaagagcagaaacgcatggcccagcaacttcagcaacagatgcagcagatcagcgcagcatccgtctggggtaatctagctggacttaatacactgggaccccagtacttagccctttatctgcagttgcttcagcagacagcatcctctggaaatttgaataccctcagctcgctccaccccatgggtggtttgaatgccatgcaactgcagaatttggctgctctcgctgctgcggccagtgccgcccaaaacaccccctccggtacaaacgcccttaccacctcttcttctccattgtcagtgctcacctcgtctggctcatctcccagttcatcgagctccaacagtgtaaatcccattgccagcctgggagctctacagactttagccggcgctactgccggcttgaatgtgggaagtttggcgggaatggccgcccttaatggagggctggggtccagcggactctctaacgggaccggctccacaatggaggccctcacccaggcctatagtggaatacagcagtacgccgcagccgctctgcccactctctataatcagaaccttctgacacagcaatcgatcggtgcagctggatcacaaaaggaaggtcccgaaggagccaaccttttcatttaccacttaccacaggagtttggggaccaagatttgctgcagatgtttatgccgtttggtaatgtggtgagtgccaaagtctttattgataagcagactaatttgagtaaatgtttcggcttcgtgtcttatgataaccctgtctccgctcaggctgcaatccagagtatgaatggctttcagataggaatgaaaaggcttaaagtccagctaaaaagatctaagaatgacagcaagccgtactag

SEQ ID NO: 312185 - DNA, 1461 bp, Artificial Sequence
  derived and/or modified sequence
atgaacggcacgctggaccaccctgaccaaccggatctggacgcgattaagatgtttgtgggtcaggtgccaagaacatggtctgagaaggacctcagagaacttttcgaacagtacggcgcagtgtacgagattaatgtgcttcgggaccggagccaaaacccccctcaatccaaaggctgctgttttgttacattctatactcgtaaagccgcactggaggcccagaatgccctgcacaacatgaaagtgctccctggaatgcaccatcctatccaaatgaaacccgctgatagcgagaagaacaacgcagtagaggatcggaaactctttatcggaatgatctcaaagaagtgtacggagaacgacattcgtgtgatgttttcttccttcggccagatcgaggagtgtaggatcctgagaggacccgatggactttcccgtgggtgtgccttcgtcacctttacaactagagccatggcacagaccgccataaaagcgatgcaccaggcgcagactatggagggatgttcttcccctatggtagtgaaattcgctgatacccaaaaagacaaagagcagaagcggatggcccagcagctgcagcagcaaatgcagcagatctccgctgcctcagtgtggggcaaccttgccggtctgaacaccttaggaccacagtatctagcattgtacctccaacttctacagcagactgccagctcaggaaatcttaatacactaagcagtctccatcctatgggcggtctgaatgccatgcagttacagaacctcgccgcactggctgcagccgcatccgctgcccagaatacaccgtccgggaccaacgctctgacgacttcatccagcccgctctctgtcctgacatcatcaggctcatctccttcaagttcatcctcaaattctgtcaaccccatcgccagtctcggggcactccagaccctcgcgggagctactgcaggcctcaatgtcgggagccttgccggtatggctgcgctgaacggtggactgggcagctctgggctttctaacggaacggggagcacaatggaagctctcacacaagcctactccggtatccaacaatacgccgctgccgcactgcctactctgtataaccagaacttgctcacccagcagtccatcggcgctgctggaagccagaaagaaggccctgagggagctaacctgttcatttaccatctgcctcaggagttcggtgatcaggacctgctgcaaatgtttatgccctttggaaacgttgtttcagcaaaagtattcatagataaacaaaccaatctgtcaaagtgttttgggttcgtcagctacgacaaccctgtcagtgcacaggctgcaattcagagcatgaacggcttccaaatcggaatgaaacggctgaaggtgcagctgaaaagatccaaaaatgacagtaaaccctactag

SEQ ID NO: 312186 - protein, 38 aa, Artificial Sequence
  derived and/or modified sequence
MAAFKLDFLPEMMVDHCSLNSSPVSKKMNGTLDHPDQP

SEQ ID NO: 312187 - DNA, 45 bp, Artificial Sequence
  derived and/or modified sequence
atgaacggcaccctggaccaccccgaccagcccgacctggactag

SEQ ID NO: 312188 - DNA, 45 bp, Artificial Sequence
  derived and/or modified sequence
atgaatgggacacttgaccaccctgaccagcccgacctcgactag

SEQ ID NO: 312189 - DNA, 45 bp, Artificial Sequence
  derived and/or modified sequence
atgaatggcaccctggaccacccagaccagcctgacctggactag

SEQ ID NO: 312190 - DNA, 45 bp, Artificial Sequence
  derived and/or modified sequence
atgaacgggacactggaccatcccgaccagccagacctcgattag

SEQ ID NO: 312191 - DNA, 581 bp, Artificial Sequence
  derived and/or modified sequence
actagctaggccgtgtggccaccctttggcacccgcaccggctcagacctgctcaggactcagccagggcacacagtttgtgttcttacgtgcatccatctgtctgtctgtgtgcgtctctgtggaggactgaggttttcaagtgaaagagagtgaagacatagtccagagagggaagtgtaaagctacaggctgaacataacttctttttttcaaagttccctgtgttgtgaactgagcttgggtgaagtgaaatctttgaggaagctaaagctgtgtgtatttgtggatcagacaagtgcagcaagttaatatcattggcttctgaaggggagagtgaggtgatggctgcgtttaagttggatttccttccagaaatgatggtggatcattgctctttgaattccagtcccgttatgtttcagcagaaatcaaggtagacgaagtaacctcttgtcctgaattttcatagttgctcattcttaataatggcagcagaagcaacaatgagagtaactacctcctcagctcaaagaaaatgaacggcaccctggaccacccagaccaaccagatcttgatg

SEQ ID NO: 312192 - protein, 103 aa, Artificial Sequence
  derived and/or modified sequence
MAAFKLDFLPEMMVDHCSLNSSPVSKKMNGTLDHPDQPDLDAIKMFVGQVPRTWSEKDLRELFEQYGAVYEINVLRDRSQNPPQSKGCCFVTFYTRKAALEAQ

SEQ ID NO: 312193 - protein, 483 aa, Artificial Sequence
  derived and/or modified sequence
MNGTLDHPDQPDLDAIKMFVGQVPRTWSEKDLRELFEQYGAVYEINVLRDRSQNPPQSKGCCFVTFYTRKAALEAQNALHNMKVLPGMHHPIQMKPADSEKNNAVEDRKLFIGMISKKCTENDIRVMFSSFGQIEECRILRGPDGLSRGCAFVTFTTRAMAQTAIKAMHQAQTMEGCSSPMVVKFADTQKDKEQKRMAQQLQQQMQQISAASVWGNLAGLNTLGPQYLALLQQTASSGNLNTLSSLHPMGGLNAMQLQNLAALAAAASAAQNTPSGTNALTTSSSPLSVLTSSAGSSPSSSSSNSVNPIASLGALQTLAGATAGLNVGSLAGMAALNGGLGSSGLSNGTGSTMEALTQAYSGIQQYAAAALPTLYNQNLLTQQSIGAAGSQKEGPEGANLFIYHLPQEFGDQDLLQMFMPFGNVVSAKVFIDKQTNLSKCFGFVSYDNPVSAQAAIQSMNGFQIGMKRLKVQLKRSKNDSKPY

SEQ ID NO: 312194 - protein, 14 aa, Artificial Sequence
  derived and/or modified sequence
MNGTLDHPDQPDLD

SEQ ID NO: 312195 - DNA, 1452 bp, Artificial Sequence
  derived and/or modified sequence
atgaacggcaccctggaccaccccgaccagcccgacctggacgccatcaagatgttcgtgggccaggtgcccagaacctggagcgagaaggacctgagagagctgttcgagcagtacggcgccgtgtacgagatcaacgtgctgagagacagaagccagaaccccccccagagcaagggctgctgcttcgtgaccttctacaccagaaaggccgccctggaggcccagaacgccctgcacaacatgaaggtgctgcccggcatgcaccaccccatccagatgaagcccgccgacagcgagaagaacaacgccgtggaggacagaaagctgttcatcggcatgatcagcaagaagtgcaccgagaacgacatcagagtgatgttcagcagcttcggccagatcgaggagtgcagaatcctgagaggccccgacggcctgagcagaggctgcgccttcgtgaccttcaccaccagagccatggcccagaccgccatcaaggccatgcaccaggcccagaccatggagggctgcagcagccccatggtggtgaagttcgccgacacccagaaggacaaggagcagaagagaatggcccagcagctgcagcagcagatgcagcagatcagcgccgccagcgtgtggggcaacctggccggcctgaacaccctgggcccccagtacctggccctgctgcagcagaccgccagcagcggcaacctgaacaccctgagcagcctgcaccccatgggcggcctgaacgccatgcagctgcagaacctggccgccctggccgccgccgccagcgccgcccagaacacccccagcggcaccaacgccctgaccaccagcagcagccccctgagcgtgctgaccagcagcgccggcagcagccccagcagcagcagcagcaacagcgtgaaccccatcgccagcctgggcgccctgcagaccctggccggcgccaccgccggcctgaacgtgggcagcctggccggcatggccgccctgaacggcggcctgggcagcagcggcctgagcaacggcaccggcagcaccatggaggccctgacccaggcctacagcggcatccagcagtacgccgccgccgccctgcccaccctgtacaaccagaacctgctgacccagcagagcatcggcgccgccggcagccagaaggagggccccgagggcgccaacctgttcatctaccacctgccccaggagttcggcgaccaggacctgctgcagatgttcatgcccttcggcaacgtggtgagcgccaaggtgttcatcgacaagcagaccaacctgagcaagtgcttcggcttcgtgagctacgacaaccccgtgagcgcccaggccgccatccagagcatgaacggcttccagatcggcatgaagagactgaaggtgcagctgaagagaagcaagaacgacagcaagccctactag

SEQ ID NO: 312196 - DNA, 1452 bp, Artificial Sequence
  derived and/or modified sequence
atgaatgggaccttggaccacccagaccagcccgatctcgacgctatcaagatgtttgtcggccaggttccgcgtacctggagtgagaaagacctgagagagctgttcgagcagtatggcgcagtatacgagatcaatgtgcttcgggacagaagtcagaaccccccccagtcaaaagggtgctgctttgtaacgttttacactcggaaggcagccctggaggcacagaacgcacttcataacatgaaggtcttgcccggaatgcaccaccctatccagatgaagcctgccgactctgagaagaataacgcggtggaagaccggaagctcttcattggcatgatttctaagaagtgtaccgagaatgatattcgcgtgatgttctccagctttggccagattgaggaatgtagaatccttaggggaccagatggcctgtctagaggttgcgcatttgtgacattcacaacccgagctatggctcaaaccgcaatcaaggctatgcaccaggcacagacaatggagggctgttccagtccaatggtagtgaagtttgccgacacacagaaagacaaagagcagaaacgcatggctcagcaactgcagcagcagatgcaacagatcagtgcagcctctgtttggggcaatcttgccgggttgaatacgttgggaccacagtatctggcacttttgcagcagacagcgtcctccggtaatctgaatacactctcgtctttacatccaatgggcggtctaaatgcgatgcagcttcaaaatctggccgcactggctgcggcagcaagcgccgctcagaacacaccttctggaactaatgccctgactacgagttcctcgccgctctccgtgctgacttccagcgctgggagtagccccagctccagctcaagtaacagtgttaacccaattgcatcactgggcgctcttcaaaccttggcaggagccacagccgggcttaacgtgggctcgctggctggtatggcagctctgaatggcggactaggcagttcgggcctcagcaatgggaccggctcaactatggaagcattgactcaggcctattctggtatccaacagtatgcagcagctgcgctgccaacgctgtataatcagaacttactgacacaacaatccattggggcggccggttcccaaaaggaaggccctgagggagccaatctatttatctaccacctgccacaagaatttggcgaccaggatctgctgcaaatgttcatgccctttggaaacgtggtgtctgcgaaggtgttcattgataaacagacaaatctgagcaaatgcttcggtttcgtgtcttatgataacccggtgtccgcgcaggccgcaatccaatccatgaatgggtttcagattggaatgaagaggcttaaagtgcaactgaaacgttctaagaatgatagtaagccgtactag

SEQ ID NO: 312197 - DNA, 1452 bp, Artificial Sequence
  derived and/or modified sequence
atgaatggcaccctggaccacccagaccagcctgacctggatgccatcaagatgtttgtgggccaggtgcccaggacctggagcgagaaggacctgcgggagctgtttgagcagtatggagctgtgtatgagatcaacgtgctgcgggacaggagccagaaccccccccagagcaagggctgctgctttgtgaccttctacaccaggaaggccgccctggaggcccagaatgccctgcacaacatgaaggtgctgcccggcatgcaccaccccatccagatgaagccagctgacagcgagaagaacaatgctgtggaggacaggaagctgttcatcggcatgatcagcaagaagtgcacagaaaatgacatccgggtgatgttcagcagctttggccagatcgaggagtgccgcatcctgcggggcccagatggcctgagccggggctgtgcctttgtgaccttcaccacccgggccatggcccagacagccatcaaggccatgcaccaggcccagaccatggagggctgcagcagccccatggtggtgaagtttgctgacacccagaaggacaaggagcagaagaggatggcccagcagctgcagcagcagatgcagcagatctctgctgcctctgtgtggggcaacctggccggcctgaacaccctgggcccccagtacctggccctgctgcagcagacagccagcagcggcaacctgaacaccctgagcagcctgcaccccatgggcggcctgaatgccatgcagctgcagaacctggccgccctggccgccgccgccagcgctgcccagaacaccccatctggcaccaatgccctgaccaccagcagcagccccctgtctgtgctgaccagcagcgctggcagcagccccagcagcagcagcagcaacagcgtgaaccccatcgccagcctgggcgccctgcagaccctggccggggccacagctggcctgaatgtgggcagcctggccggcatggccgccctgaatggaggcctgggcagcagcggcctgagcaatggaacaggcagcaccatggaggccctgacccaggcctacagcggcatccagcagtatgctgctgctgccctgcccaccctgtacaaccagaacctgctgacccagcagagcattggagctgctggcagccagaaggagggccctgagggcgccaacctcttcatctaccacctgccccaggagtttggagaccaggacctgctgcagatgttcatgccctttggaaatgtggtgtctgccaaggtgttcatcgacaagcagaccaacctgagcaaatgttttggatttgtgtcctatgacaaccctgtgtctgcccaggccgccatccagagcatgaatggcttccagatcggcatgaagaggctgaaggtgcagctgaagaggagcaagaatgacagcaagccctactag

SEQ ID NO: 312198 - DNA, 2191 bp, Artificial Sequence
  derived and/or modified sequence
atactttgaaaataacagctcttttttgttccctcgtgtgtctcttcccaattgtatccctattgtattttctcatagtatgtttcagcagaaatcaaggtagacgaagtaacctcttgtcctgaattttcatagttgctcattcttaataatggcagcagaagcaacaatgagagtaactacctcctcagctcaaagaaaatgaacggcaccctggaccacccagaccaaccagatcttgatgctatcaagatgtttgtgggccaggttccaaggacctggtctgaaaaggacttgcgggaactcttcgaacagtatggtgctgtgtatgaaatcaacgtcctaagggataggagccaaaacccgcctcagagcaaagggtgctgttttgttacattttacacccgtaaagctgcattagaagctcagaatgctcttcacaacatgaaagtcctcccagggatgcatcaccctatacagatgaaacctgctgacagtgagaagaacaatgcagtggaagacaggaagctgtttattggtatgatttccaagaagtgcactgaaaatgacatccgagtcatgttctcttcgtttggacagattgaagaatgccggatattgcggggacctgatggcctgagccgaggttgtgcatttgtgacttttacaacaagagccatggcacagacggctatcaaggcaatgcaccaagcacagaccatggagggttgctcatcacccatggtggtaaaatttgctgatacacagaaggacaaagaacagaagagaatggcccagcagctccagcagcagatgcagcaaatcagcgcagcatctgtgtggggaaaccttgctggtctaaatactcttggaccccagtatttagcactccttcagcagactgcctcctctgggaacctcaacaccctgagcagcctccacccaatgggagggttgaatgcaatgcagttacagaatttggctgcactagctgctgcagctagtgcagctcagaacacaccaagtggtaccaatgctctcactacatccagcagtcccctcagcgtgctcactagttcagcagggtcctcacctagctctagcagcagtaattctgtcaaccccatagcctcacttggagccctgcagacattagctggagcaacggctggcctcaatgttggctctttggcaggaatggctgctttaaatggtggcctgggcagcagtggcctttccaatggcaccgggagcaccatggaggccctcactcaggcctactcgggtatccagcaatatgctgctgctgcgctccccactctgtacaaccagaatcttctgacacagcagagtattggtgctgctggaagccagaaggaaggtccagagggagccaacctgttcatctaccacctgccccaggagtttggtgatcaggacctgctgcagatgtttatgccctttgggaatgtcgtgtctgccaaggttttcatagacaagcagacaaacctgagcaagtgttttggttttgtaagttacgacaatcctgtttcggcccaagctgccatccagtccatgaacggctttcagattggcatgaagcggcttaaagtgcagctcaaacgttcgaagaatgacagcaagccctactgagcgtgctcccctctgagactggagtgagagggtcttctgattcctgccgtttgttcatcgttgtgcctaaagcatgtcgatgtggcgtcaagtacatcgtccaaatccctgtctcttcagcttctctgatgcttgaactctcacctttgaccttgtgttgacctttgatgctgatgtgtatttttattatgtttgtttctttcttcgtttttttttctttttttctttcctttttttttccttttgtgctgccaaattggttttgctagaacgactgctgaaggggaaatatttaaacttgcatttgaatataaaaaaaatctatttttctagaacttcataagataaccacttgattttgtgattccaattctttgtaattgtcttcagagcagccctactagcacataccgcgtggtgtttgtatttctgtgaacacacagccagtccgtttctaggctttgtttctctgtgtgcttagttttaaagacaactttgaagtaaacaatgaaataaaagatgtcactaaaacctctga

SEQ ID NO: 312199 - DNA, 1452 bp, Artificial Sequence
  derived and/or modified sequence
atgaacggcaccctggaccaccccgaccagcccgacctggacgccatcaagatgtttgtcggtcaggttccacggacttggagtgaaaaggaccttcgtgaattgttcgagcagtacggagccgtgtacgaaattaatgtgctgagagacagatcccagaaccctccacagtctaaaggttgttgcttcgtgacgttctataccaggaaagccgctctggaagcccagaatgcactgcataatatgaaagtcctgcccggcatgcaccaccccatccagatgaaaccagcagacagcgagaagaataatgctgtggaggatcggaaactgttcatcggaatgatcagcaagaagtgcaccgagaatgatatccgtgtgatgttttcctcctttgggcagatagaggagtgccgcattctgcggggtccggacggtctgagtcgcggctgcgcctttgtgactttcaccacacgggccatggcacagaccgcaattaaggctatgcatcaggctcagacaatggaaggatgtagtagccctatggtggtcaagtttgcggacactcaaaaggacaaagagcagaaacgcatggcgcagcagcttcagcagcagatgcagcaaatcagtgctgccagtgtgtggggtaaccttgccggcctcaataccctgggaccacagtatctggcattgctgcagcagactgctagttccggaaacctgaatacactgagcagcttgcacccaatgggaggattaaacgcaatgcagttacagaatctggcagctcttgccgccgcggcaagcgcggcacaaaataccccaagtggaaccaatgcccttacaacctcctcgtcgcctctgagtgtgcttacaagttccgcggggtcatctccttcgtcaagttcttctaacagtgttaacccaatagcctctttgggagcattacagacactagccggcgcgacggccgggctcaacgtggggagtctcgcaggaatggcggccctgaatggcggcctcggaagctccggtctctccaatggtactgggtcaacaatggaggccctcactcaggcgtactctgggatccagcaatatgcggccgctgctctgccgacgctctacaaccaaaatctattgacacagcaaagcatcggcgccgccggatcgcagaaggaaggccccgagggtgcgaacctctttatctatcatttgccgcaggagttcggtgatcaagacttactccagatgtttatgcccttcggtaacgtcgtaagtgcaaaagtgttcattgacaaacaaacaaatctgtctaagtgtttcggatttgtctcctacgacaatccggtcagcgcccaagcagcaatccagtctatgaatggatttcaaatcgggatgaaacgccttaaggtccagctgaaacgatccaaaaacgatagcaagccgtactag

SEQ ID NO: 312200 - DNA, 1452 bp, Artificial Sequence
  derived and/or modified sequence
atgaacgggacgctcgatcatcctgaccaacctgacctggatgccattaaaatgtttgtggggcaagtgccaagaacttggtccgaaaaagacttgcgcgagctgttcgagcaatatggtgccgtgtatgagatcaacgttcttagggaccgttcacagaatccaccgcagagcaaaggttgctgtttcgtgaccttctacactcggaaggctgcgctagaggctcaaaacgcccttcacaatatgaaagtgcttcctgggatgcaccacccaatccaaatgaagcctgcagacagtgaaaagaataatgcggtcgaggatcgaaaactctttatcggcatgatcagcaaaaagtgtactgaaaacgacatcagagtcatgtttagctcttttgggcagatcgaggagtgtcgaattctgagggggcctgatggactcagccggggatgcgcttttgttactttcaccacccgcgcaatggcccagacagccatcaaggccatgcatcaggctcaaactatggagggttgttcatctcctatggtggtgaaatttgccgatactcagaaggataaggagcaaaagcgcatggcccaacaactccagcagcaaatgcaacagatttcagccgctagtgtgtggggcaaccttgctggccttaacactctgggaccgcaatatttggccttgctgcagcagaccgcgtcatccggcaacttgaacacactcagctctcttcaccctatgggcggtctgaacgccatgcagctgcagaacctagctgcacttgctgctgcagcctcggctgcccagaatacgccaagtggcacaaatgccctgaccacgtccagcagccctctgagtgtgcttacatctagcgccggaagtagccccagtagcagctcctctaatagcgtcaatccgatcgctagtttgggcgcactgcagacactggccggagctaccgcagggctgaacgtgggctccctggccggaatggcagctctgaacggcggtcttggatctagcggactcagtaatggaaccggctcaactatggaggcactgactcaagcctattctggcatccagcagtacgcggcagctgcacttccaaccctctacaatcaaaacctcctgacccagcagagcattggggctgctgggtcgcagaaagaagggcctgaaggcgctaacctcttcatctatcatctgcctcaggaatttggggaccaagacctccttcagatgttcatgcctttcgggaacgtcgtgtccgcaaaagtgttcattgataagcagaccaacctatctaaatgtttcggctttgtgagttatgacaacccagtgtctgcacaggccgctatccagagcatgaatggctttcagattgggatgaagcgtttgaaagtgcaactgaagcgaagcaagaacgacagcaagccatactag

SEQ ID NO: 312201 - DNA, 62 bp, Artificial Sequence
  derived and/or modified sequence
acacacacattcaaagcagcaatatttacaacagccaaaaggtggaaacaattgagcaattg

SEQ ID NO: 312202 - protein, 221 aa, Artificial Sequence
  derived and/or modified sequence
MSAHMSGLEIMDEDQLIKDVLDKFLNCHEQTYDEEFLNTFTHLSQEDHVSKRGVFGTDSSENIFTSAKVTHKNEADDYHLRNKTIFLRTSSQCLEEQVDNFLDLEDLDMDEEIKPQMSEDLLLLPGEVEQDVSTSIPSCIPFVAQPPTCEVKPKPSVKRMDKQTEEILGDEVQLFSLDEEFDYDNVMLTSKFSPAEIENIKELCKQQKRKDTSPDLEKSCD

SEQ ID NO: 312203 - protein, 167 aa, Artificial Sequence [sequence omitted]

SEQ ID NO: 312204 - protein, 83 aa, Artificial Sequence
  derived and/or modified sequence
MSAHMSGLEIMDEDQLIKDVLDKFLNCHEQTYDEEFLNTFTHLSQEDHVSKRGVFGTDSSENIFTSAKVTHKNEADDYHLRNK

SEQ ID NO: 312205 - protein, 180 aa, Artificial Sequence
  derived and/or modified sequence
MSAHMSGLEIMDEDQLIKDVLDKFLNCHEQTYDEEFLNTFTHLSQEDHVSKRGVFGTDSSENIFTSAKVTHKNEADDYHLRNKTIFLRTSSQCLEEQVDNFLDLEDLDMDEEIKPQMSEDLLLLPGEVEQDVSTSIPSCIPFVAQPPTCEVKPKPSVKRMDKQTEEILGDEVQLFSLDEE

SEQ ID NO: 312206 - protein, 119 aa, Artificial Sequence
  derived and/or modified sequence
MSAHMSGLEIMDEDQLIKDVLDKFLNCHEQTYDEEFLNTFTHLSQEDHVSKRGVFGTDSSENIFTSAKVTHKNEADDYHLRNKTIFLRTSSQCLEEQVDNFLDLEDLDMDEEIKPQMSE

SEQ ID NO: 312207 - DNA, 863 bp, Artificial Sequence
  derived and/or modified sequence
tctctctgggatgtgtagctttggaaatctgtctttgttgctctgggagaggggactcctggaatgtgtctgtgaataaagactagccgaagatactgtggcctcatgaataggaatgtctgcccatatgtcaggattggaaataatggatgaagatcaattaatcaaagacgtcttggataaattccttaattgtcatgagcaaacatatgatgaagaatttctgaacacttttactcatctttcacaagaggatcatgtgtccaaaaggggagtgtttggaactgattcttcagaaaacatttttacctcagcaaaagttactcataaaaatgaagcagatgactaccatcttagaaataaaaccatctttcttcgtacttcatcacaatgtttggaagaacaggtagataatttcctagatttagaagatttggacatggatgaagagattaaaccccaaatgagtgaggatttgctgctgcttccaggagaagtggagcaggatgtaagcaccagcattccttcctgtatcccttttgtggcccagcctcctacctgtgaagtgaagccaaagcccagtgttaaaagaatggacaaacagacggaagagatacttggagatgaagttcaacttttttcacttgatgaagaatttgattatgacaatgtgatgctaacctccaagtttagtcctgcagagatagagaacatcaaagagctatgcaagcagcagaagagaaaggacaccagcccagacttagagaaatcctgtgactgattcacagaggcattttgtgtgtgtgtgcttattttaattttgttcttattctagcaacattagaataaaagataaacctact

SEQ ID NO: 312208 - DNA, 895 bp, Artificial Sequence
  derived and/or modified sequence
agctttggaaatctgtctttgttgctctgggagaggggactcctggaatgtgtctgtgaataaagactagccgaagatactgtggcctcatgaataggaatgtctgcccatatgtcaggattggaaataatggatgaagatcaattaatcaaagacgtcttggataaattccttaattgtcatgagcaaacatatgatgaagaatttctgaacacttttactcatctttcacaagaggatcatgtgtccaaaaggggagtgtttggaactgattcttcagaaaacatttttacctcagcaaaagttactcataaaaatgaagcagatgactaccatcttagaaataaaaccatctttcttcgtacttcatcacaatgtttggaagaacaggtagataatttcctagatttagaagatttggacatggatgaagagattaaaccccaaatgagtgaggatttgctgctgcttccaggagaagtggagcaggatgtaagcaccagcattccttcctgtatcccttttgtggcccagcctcctacctgtgaagtgaagccaaagcccagtgttaaaagaatggacaaacagacggaagagagttaagaaaacttattttaaactatttatggcctttaataattgagtaaggtatactcctgcaaacaaaatttggagcacgtttgtttctgtctgcctggttcctctagaagttggaaactgcctctttttgcctacattttagactaaccctgcttattcctgtgaatcaagtggtgatctcctgcagcttggaagaaacaaaaaggcatagcaatcaaaccccaaatggtgctgcagacagagccacacatggacacaccattcttctgagaacacttagattgacctcaagagg

SEQ ID NO: 312209 - DNA, 631 bp, Artificial Sequence
  derived and/or modified sequence
tcctggaatgtgtctgtgaataaagactagccgaaggtgcgaagtgactagacgggagcaaaggaggaaaactagggaatgggaggtgagagtggctgacaccgacccaacgtccgggttgccggaaggctgcagcgcccggagcggtgtcgggcaaaccgctaccctggtattgctggagcctctcctggggacttttgaacaggtgacccgataggaagcacaactgcttctgttggagtgcggttacctggagaccgcagtctgaagggactcccggcagagatgtcgttacggtgtcctgcctgtctggatgcttaggagcgcgactcaaaactacacccctgacgaccctggagatactgtggcctcatgaataggaatgtctgcccatatgtcaggattggaaataatggatgaagatcaattaatcaaagacgtcttggataaattccttaattgtcatgagcaaacatatgatgaagaatttctgaacacttttactcatctttcacaagaggatcatgtgtccaaaaggggagtgtttggaactgattcttcagaaaacatttttacctcagcaaaagttactcataaaaatgaagcagatgactaccatcttagaaataaa

SEQ ID NO: 312210 - DNA, 694 bp, Artificial Sequence
  derived and/or modified sequence
gtgtagctttggaaatctgtctttgttgctctgggagaggggactcctggaatgtgtctgtgaataaagactagccgaaggtgcgaagtgactagacgggagcaaaggaggaaaactagggaatgggagatactgtggcctcatgaataggaatgtctgcccatatgtcaggattggaaataatggatgaagatcaattaatcaaagacgtcttggataaattccttaattgtcatgagcaaacatatgatgaagaatttctgaacacttttactcatctttcacaagaggatcatgtgtccaaaaggggagtgtttggaactgattcttcagaaaacatttttacctcagcaaaagttactcataaaaatgaagcagatgactaccatcttagaaataaaaccatctttcttcgtacttcatcacaatgtttggaagaacaggtagataatttcctagatttagaagatttggacatggatgaagagattaaaccccaaatgagtgaggatttgctgctgcttccaggagaagtggagcaggatgtaagcaccagcattccttcctgtatcccttttgtggcccagcctcctacctgtgaagtgaagccaaagcccagtgttaaaagaatggacaaacagacggaagagatacttggagatgaagttcaacttttttcacttgatgaagaatt

SEQ ID NO: 312211 - DNA, 534 bp, Artificial Sequence
  derived and/or modified sequence
acggtgtcctgcctgtctggatgcttaggagcgcgactcaaaactacacccctgacgaccctggagaaagatactgtactgtgaaacattaaatcttgctgatccgtgctggccatgttttcttgattgctccagagtagcaagtaacctcatatactgtggcctcatgaataggaatgtctgcccatatgtcaggattggaaataatggatgaagatcaattaatcaaagacgtcttggataaattccttaattgtcatgagcaaacatatgatgaagaatttctgaacacttttactcatctttcacaagaggatcatgtgtccaaaaggggagtgtttggaactgattcttcagaaaacatttttacctcagcaaaagttactcataaaaatgaagcagatgactaccatcttagaaataaaaccatctttcttcgtacttcatcacaatgtttggaagaacaggtagataatttcctagatttagaagatttggacatggatgaagagattaaaccccaaatgagtgagg

SEQ ID NO: 312212 - DNA, 666 bp, Artificial Sequence
  derived and/or modified sequence
atgagcgcccacatgagcggcctggagatcatggacgaggaccagctgatcaaggacgtgctggacaagttcctgaactgccacgagcagacctacgacgaggagttcctgaacaccttcacccacctgagccaggaggaccacgtgagcaagagaggcgtgttcggcaccgacagcagcgagaacatcttcaccagcgccaaggtgacccacaagaacgaggccgacgactaccacctgagaaacaagaccatcttcctgagaaccagcagccagtgcctggaggagcaggtggacaacttcctggacctggaggacctggacatggacgaggagatcaagccccagatgagcgaggacctgctgctgctgcccggcgaggtggagcaggacgtgagcaccagcatccccagctgcatccccttcgtggcccagccccccacctgcgaggtgaagcccaagcccagcgtgaagagaatggacaagcagaccgaggagatcctgggcgacgaggtgcagctgttcagcctggacgaggagttcgactacgacaacgtgatgctgaccagcaagttcagccccgccgagatcgagaacatcaaggagctgtgcaagcagcagaagagaaaggacaccagccccgacctggagaagagctgcgactag

SEQ ID NO: 312213 - DNA, 504 bp, Artificial Sequence
  derived and/or modified sequence
atgagcgcccacatgagcggcctggagatcatggacgaggaccagctgatcaaggacgtgctggacaagttcctgaactgccacgagcagacctacgacgaggagttcctgaacaccttcacccacctgagccaggaggaccacgtgagcaagagaggcgtgttcggcaccgacagcagcgagaacatcttcaccagcgccaaggtgacccacaagaacgaggccgacgactaccacctgagaaacaagaccatcttcctgagaaccagcagccagtgcctggaggagcaggtggacaacttcctggacctggaggacctggacatggacgaggagatcaagccccagatgagcgaggacctgctgctgctgcccggcgaggtggagcaggacgtgagcaccagcatccccagctgcatccccttcgtggcccagccccccacctgcgaggtgaagcccaagcccagcgtgaagagaatggacaagcagaccgaggagagctag

SEQ ID NO: 312214 - DNA, 252 bp, Artificial Sequence
  derived and/or modified sequence
atgagcgcccacatgagcggcctggagatcatggacgaggaccagctgatcaaggacgtgctggacaagttcctgaactgccacgagcagacctacgacgaggagttcctgaacaccttcacccacctgagccaggaggaccacgtgagcaagagaggcgtgttcggcaccgacagcagcgagaacatcttcaccagcgccaaggtgacccacaagaacgaggccgacgactaccacctgagaaacaagtag

SEQ ID NO: 312215 - DNA, 543 bp, Artificial Sequence
  derived and/or modified sequence
atgagcgcccacatgagcggcctggagatcatggacgaggaccagctgatcaaggacgtgctggacaagttcctgaactgccacgagcagacctacgacgaggagttcctgaacaccttcacccacctgagccaggaggaccacgtgagcaagagaggcgtgttcggcaccgacagcagcgagaacatcttcaccagcgccaaggtgacccacaagaacgaggccgacgactaccacctgagaaacaagaccatcttcctgagaaccagcagccagtgcctggaggagcaggtggacaacttcctggacctggaggacctggacatggacgaggagatcaagccccagatgagcgaggacctgctgctgctgcccggcgaggtggagcaggacgtgagcaccagcatccccagctgcatccccttcgtggcccagccccccacctgcgaggtgaagcccaagcccagcgtgaagagaatggacaagcagaccgaggagatcctgggcgacgaggtgcagctgttcagcctggacgaggagtag

SEQ ID NO: 312216 - DNA, 360 bp, Artificial Sequence
  derived and/or modified sequence
atgagcgcccacatgagcggcctggagatcatggacgaggaccagctgatcaaggacgtgctggacaagttcctgaactgccacgagcagacctacgacgaggagttcctgaacaccttcacccacctgagccaggaggaccacgtgagcaagagaggcgtgttcggcaccgacagcagcgagaacatcttcaccagcgccaaggtgacccacaagaacgaggccgacgactaccacctgagaaacaagaccatcttcctgagaaccagcagccagtgcctggaggagcaggtggacaacttcctggacctggaggacctggacatggacgaggagatcaagccccagatgagcgagtag

SEQ ID NO: 312217 - DNA, 666 bp, Artificial Sequence
  derived and/or modified sequence
atgagtgcccacatgagtgggctggagattatggacgaggaccagctgatcaaagatgtactcgataagtttctgaactgccatgaacaaacttatgacgaggagtttcttaacactttcacccatctttctcaggaagatcatgtttcaaaaagaggcgtctttggaactgacagctcagaaaacatctttaccagcgctaaagtgacgcacaagaacgaggctgatgactaccatctccgcaataaaaccatcttcctccgtaccagcagccagtgcttggaggagcaggtggataattttctggacctggaggacctggacatggacgaagagatcaagccccagatgagtgaggacctcttgctgttgcctggagaggtggagcaagacgtttccacctctattcctagctgtatcccattcgtagcccagcctccaacctgcgaagtaaaacctaagccttccgtaaagcgcatggacaaacagaccgaggaaatcctgggagacgaggttcagttgttttccctggacgaggagtttgactacgacaatgtgatgctgacttctaagttctcacctgccgaaatcgagaatattaaagagctttgcaagcaacagaagcgaaaggacacaagcccagatctggagaagtcatgcgactag

SEQ ID NO: 312218 - DNA, 504 bp, Artificial Sequence
  derived and/or modified sequence
atgtccgctcatatgagtggacttgagattatggatgaggatcaacttatcaaggacgtgctcgacaaattcctaaactgtcatgagcagacttacgacgaggaatttctgaataccttcactcatctgtcccaggaagaccatgtctcgaaacgaggggtgtttggcaccgattctagtgagaatatcttcactagcgctaaggtcacacacaagaatgaggctgacgattatcatctccgaaataaaaccatcttcctcagaacctcctcccagtgcctggaggaacaggtggataatttcttagacctggaagatctggatatggacgaagaaattaaaccccaaatgtccgaagatctcttgctcctgcccggagaagtggaacaggatgtgagtacaagcattccctcctgcatcccctttgtcgcacagccacccacctgcgaagtaaaacctaaaccgtccgttaagcgcatggacaaacaaactgaggagtcctag

SEQ ID NO: 312219 - DNA, 252 bp, Artificial Sequence
  derived and/or modified sequence
atgtcagctcatatgtccggcctggagattatggatgaggaccagttgattaaggacgtgctggacaaattcctcaactgccacgagcagacctatgatgaagagttcctcaacacctttacacacctgagtcaggaagaccacgtgtctaaaaggggagtattcgggactgatagcagcgagaatatctttacctcagccaaagtgacacacaagaacgaagcggacgactatcaccttcgcaataagtag

SEQ ID NO: 312220 - DNA, 543 bp, Artificial Sequence
  derived and/or modified sequence
atgagtgcccatatgagcggcctggagatcatggacgaagaccagttgatcaaagacgtactggacaaatttctcaactgccacgaacagacatacgatgaagaatttcttaacacctttacacacttatcacaggaagaccacgtgtctaagaggggcgtgttcggaactgactcatcggagaacatctttacttctgctaaggtaactcataaaaacgaggccgacgattaccaccttcggaacaaaactatatttttacgaacttcttcccagtgtttggaggagcaagtggacaacttcctcgatctggaagacctggacatggacgaagagatcaaacctcagatgtccgaagaccttttgttattgcctggagaagttgagcaggacgtgtcgacatctatcccgagctgtatcccgtttgttgcacagccaccaacctgtgaggtgaagccaaagccaagtgttaagagaatggacaagcaaacagaggagatcctgggggacgaggtgcagttgttctccctcgatgaggagtag

SEQ ID NO: 312221 - DNA, 360 bp, Artificial Sequence
  derived and/or modified sequence
atgagcgcgcatatgagcggactggagatcatggacgaggaccagctgattaaggatgtcctcgacaagtttctaaattgtcacgagcaaacctatgacgaggagtttctgaatacattcactcacctttcacaggaggaccacgtctccaaacgaggcgtgtttggcacggattcctctgagaatatttttacgtcagcgaaagtgacacacaagaacgaggccgatgattatcacctgaggaataaaacaattttcctccgaacaagctcacagtgcttggaggagcaagtggacaattttcttgacctcgaggacttagatatggatgaggagatcaaaccccaaatgagtgaatag

SEQ ID NO: 312222 - DNA, 666 bp, Artificial Sequence
  derived and/or modified sequence
atgtctgcccacatgagcggcctggagatcatggatgaggaccagctgatcaaggatgtgctggacaagttcctgaactgccacgagcagacctatgatgaggagttcctgaacaccttcacccacctgagccaggaggaccacgtgtccaagaggggcgtgtttggaacagacagcagcgagaacatcttcaccagcgccaaggtgacccacaagaatgaagcagatgactaccacctgaggaacaagaccatcttcctgcggaccagcagccagtgcctggaggagcaggtggacaacttcctggacctggaggacctggacatggatgaggagatcaagccccagatgtctgaggacctgctgctgctgcctggagaggtggagcaggatgtgtccaccagcatccccagctgcatcccctttgtggcccagccccccacctgtgaggtgaagcccaagcccagcgtgaagaggatggacaagcagacagaggagatcctgggagatgaggtgcagctgttcagcctggatgaggagtttgattatgacaacgtgatgctgaccagcaagttcagccctgctgagattgagaacatcaaggagctgtgcaagcagcagaagaggaaggacaccagcccagacctggagaagagctgtgactag

SEQ ID NO: 312223 - DNA, 504 bp, Artificial Sequence
  derived and/or modified sequence
atgtctgcccacatgagcggcctggagatcatggatgaggaccagctgatcaaggatgtgctggacaagttcctgaactgccacgagcagacctatgatgaggagttcctgaacaccttcacccacctgagccaggaggaccacgtgtccaagaggggcgtgtttggaacagacagcagcgagaacatcttcaccagcgccaaggtgacccacaagaatgaagcagatgactaccacctgaggaacaagaccatcttcctgcggaccagcagccagtgcctggaggagcaggtggacaacttcctggacctggaggacctggacatggatgaggagatcaagccccagatgtctgaggacctgctgctgctgcctggagaggtggagcaggatgtgtccaccagcatccccagctgcatcccctttgtggcccagccccccacctgtgaggtgaagcccaagcccagcgtgaagaggatggacaagcagacagaggagagctag

SEQ ID NO: 312224 - DNA, 252 bp, Artificial Sequence
  derived and/or modified sequence
atgtctgcccacatgagcggcctggagatcatggatgaggaccagctgatcaaggatgtgctggacaagttcctgaactgccacgagcagacctatgatgaggagttcctgaacaccttcacccacctgagccaggaggaccacgtgtccaagaggggcgtgtttggaacagacagcagcgagaacatcttcaccagcgccaaggtgacccacaagaatgaagcagatgactaccacctgaggaacaagtag

SEQ ID NO: 312225 - DNA, 543 bp, Artificial Sequence
  derived and/or modified sequence
atgtctgcccacatgagcggcctggagatcatggatgaggaccagctgatcaaggatgtgctggacaagttcctgaactgccacgagcagacctatgatgaggagttcctgaacaccttcacccacctgagccaggaggaccacgtgtccaagaggggcgtgtttggaacagacagcagcgagaacatcttcaccagcgccaaggtgacccacaagaatgaagcagatgactaccacctgaggaacaagaccatcttcctgcggaccagcagccagtgcctggaggagcaggtggacaacttcctggacctggaggacctggacatggatgaggagatcaagccccagatgtctgaggacctgctgctgctgcctggagaggtggagcaggatgtgtccaccagcatccccagctgcatcccctttgtggcccagccccccacctgtgaggtgaagcccaagcccagcgtgaagaggatggacaagcagacagaggagatcctgggagatgaggtgcagctgttcagcctggatgaggagtag

SEQ ID NO: 312226 - DNA, 360 bp, Artificial Sequence
  derived and/or modified sequence
atgtctgcccacatgagcggcctggagatcatggatgaggaccagctgatcaaggatgtgctggacaagttcctgaactgccacgagcagacctatgatgaggagttcctgaacaccttcacccacctgagccaggaggaccacgtgtccaagaggggcgtgtttggaacagacagcagcgagaacatcttcaccagcgccaaggtgacccacaagaatgaagcagatgactaccacctgaggaacaagaccatcttcctgcggaccagcagccagtgcctggaggagcaggtggacaacttcctggacctggaggacctggacatggatgaggagatcaagccccagatgtctgagtag

SEQ ID NO: 312227 - DNA, 666 bp, Artificial Sequence
  derived and/or modified sequence
atgagcgcccacatgagcggcctggagatcatggacgaggaccagctgattaaagatgttttagacaagtttttaaattgccacgagcagacttacgacgaggaattcctgaacacatttacccatctcagccaagaggaccatgtaagcaagagaggcgtgtttgggaccgattccagcgagaacatcttcaccagtgctaaagtgacccacaaaaacgaggcagatgactaccacctcagaaataagacaatattcctgagaacctctagccagtgcttagaggagcaggtggacaacttccttgacttagaggatttagacatggacgaggaaattaagccacagatgagcgaagacctgctcctactacctggggaggtggaacaggacgtgagcacatcaattcccagctgtatcccgttcgtggcccagccacccacgtgcgaggtgaaacccaagcccagcgtgaaacggatggacaaacagacagaagagatactgggcgatgaagtacagttattttctctggacgaagagtttgactacgacaacgtgatgctgacatctaagttctctcctgctgaaatagaaaacatcaaagagctgtgtaaacagcagaagaggaaggatacaagcccagatctggaaaagagttgcgattag

SEQ ID NO: 312228 - DNA, 504 bp, Artificial Sequence
  derived and/or modified sequence
atgagcgcccacatgagcggcctggagatcatggacgaggaccagctgataaaggacgtactggacaagttcttgaattgccatgagcaaacctacgacgaggaatttctgaacacatttacccatctgtcacaggaggatcacgttagtaaaagaggtgtcttcggaaccgattctagtgaaaacatattcactagtgcgaaggttactcacaaaaacgaggccgatgattaccatctccggaataagaccatctttcttcgcactagctctcagtgcttggaggaacaggtcgacaatttcctcgacctggaagacttagatatggacgaggaaatcaaaccacagatgagcgaagacctgctgctgctgcccggggaggttgagcaggatgtctccactagcattcctagctgcattccgtttgtggcccagcctccaacatgcgaagtgaagcccaaacctagtgtgaagcggatggacaaacaaaccgaagagagctag

SEQ ID NO: 312229 - DNA, 252 bp, Artificial Sequence
  derived and/or modified sequence
atgagcgcccacatgagcggcctggagatcatggacgaggaccagctgatcaaagacgtactagacaagtttctgaattgccatgagcagacttacgacgaggaattcctcaatacctttacacacctgagccaggaggatcatgtttctaaacgcggcgtgttcgggaccgattcaagcgagaatatctttaccagtgccaaggtcacgcacaagaatgaagccgacgactatcacttgagaaataaatag

SEQ ID NO: 312230 - DNA, 543 bp, Artificial Sequence
  derived and/or modified sequence
atgagcgcccacatgagcggcctggagatcatggacgaggaccagctgatcaaggatgttttagacaagtttcttaactgccacgaacagacttacgacgaggagttcctaaacacatttacacacttgtcacaggaggaccatgtcagcaagaggggcgtcttcggtactgatagttcagagaatatcttcacatctgctaaagtgacacacaaaaacgaggccgacgactatcatctgcgcaacaagaccattttcttacgcactagcagtcagtgtctggaagagcaggttgacaacttccttgacctagaggacctcgacatggacgaagagatcaagccacagatgtcagaagatctgttgcttctcccaggggaggtagagcaggacgtcagcacatctatccccagctgtatcccattcgttgcccagcctcccacctgtgaggtcaaacccaagccctctgtgaaacgtatggataagcagactgaagaaattttgggggatgaggtacagctcttcagtttggacgaggagtag

SEQ ID NO: 312231 - DNA, 360 bp, Artificial Sequence
  derived and/or modified sequence
atgagcgcccacatgagcggcctggagatcatggacgaggaccagttgattaaagatgtgctggacaaattcttaaactgccacgagcagacttatgatgaggaatttcttaacacatttactcatctgtcccaggaagaccatgtgtctaaaaggggtgtgttcgggaccgacagtagcgagaatatcttcacatccgctaaggtgacccacaaaaatgaagcagacgattaccatttaaggaacaaaactatcttcttgaggacctctagccagtgtctcgaagagcaggtagacaattttttggacctggaagacttggatatggatgaggagatcaagcctcagatgtcagagtag

SEQ ID NO: 312232 - DNA, 666 bp, Artificial Sequence
  derived and/or modified sequence
atgtcagctcacatgagcggcctggagataatggatgaggatcaactgatcaaggatgtgctggacaaattcttaaattgtcacgagcaaacctacgatgaggagttcctcaatacattcacgcacctgagtcaggaggatcatgtttccaagcggggtgtatttggcactgattcttctgaaaatattttcacttccgccaaggtgacccacaagaacgaggccgacgactatcatctacggaacaaaactatatttctgaggacatctagccagtgtctggaggaacaagtggacaacttccttgatctcgaagatctcgatatggatgaggagattaagccgcagatgagcgaagacctgctattgctgcctggtgaagtagagcaggacgtgagcacaagtataccaagctgtattccgttcgtcgcccagccccctacctgcgaggttaaacctaagccctctgtgaaacggatggataagcagactgaggagattctcggtgacgaggtacagcttttctctctcgacgaggagtttgactatgataatgttatgctaacatccaagttctcaccagcggagatcgagaacatcaaggagctttgtaagcagcagaagaggaaggacacgtcccctgatctcgagaagtcatgtgactag

SEQ ID NO: 312233 - DNA, 504 bp, Artificial Sequence
  derived and/or modified sequence
atgtcggcacacatgtctgggttggagattatggacgaggatcagctcatcaaggacgtgctggacaaatttcttaactgtcacgagcagacgtatgacgaagagttcctgaacacattcacacatctgtctcaggaggatcatgtcagcaaaagaggggtcttcgggacggattcgtccgagaatatttttacgagcgcaaaggtgacccacaaaaacgaagctgatgattatcacctgcgcaacaaaactatctttcttagaacgtcttcacagtgtctggaagagcaggtggacaatttcctcgatctcgaggatctagatatggacgaggagatcaagccccagatgagcgaagatctgcttctgcttccaggggaagtggagcaggatgtgagtacctctattccttcttgtatcccattcgtcgcccagccgccaacgtgcgaggtaaagcccaagccttcagtgaaacgaatggataagcagactgaagagagttag

SEQ ID NO: 312234 - DNA, 252 bp, Artificial Sequence
  derived and/or modified sequence
atgtcagcgcacatgtcaggactcgagattatggatgaggatcagttaataaaagacgtgctagacaagttcttgaattgtcacgagcagacttacgatgaagagttcctcaacacgtttactcacctctcacaagaggatcacgtttccaagagaggggtgttcggcacagattcctctgagaatattttcacatcagctaaagtaacccacaaaaacgaggcagatgattatcacctgagaaataaatag

SEQ ID NO: 312235 - DNA, 543 bp, Artificial Sequence
  derived and/or modified sequence
atgtctgcacacatgagtgggctcgaaataatggacgaggatcagctgatcaaggatgtgcttgataaattcctgaattgtcatgagcagacctacgatgaagagtttctgaatacttttacacatctgtcacaagaggatcacgttagcaaacgtggtgtctttggcaccgactccagcgagaacatctttactagcgcgaaggtgacccacaaaaacgaggccgatgactaccatctacgtaataagaccattttccttcgcacatcttctcagtgcctcgaagaacaggtggacaatttcttggatctagaggacttggacatggatgaagaaattaagccacagatgtctgaagacctcctcctattgcccggtgaagtggagcaagatgtgtccacaagcattccatcatgcattcctttcgttgcccaaccacctacctgcgaggtaaagccaaaaccttctgtcaagagaatggataaacagacagaggagatcctgggtgacgaagttcagcttttctcgctggacgaagagtag

SEQ ID NO: 312236 - DNA, 360 bp, Artificial Sequence
  derived and/or modified sequence
atgtccgctcacatgagcgggttagagatcatggacgaggatcagttgatcaaggatgtgttggacaagttccttaattgtcatgaacagacctatgatgaagagttcctaaacacctttacacacctgagccaggaagatcatgttagcaaacgcggtgtgttcggcacggacagctctgagaacatcttcaccagcgccaaggtaactcacaaaaacgaagctgacgattaccacctaaggaataagactattttcctgaggacctccagccagtgcctggaggagcaagtcgataacttcctcgacctcgaggatttggacatggacgaggagatcaagcctcaaatgagcgagtag

SEQ ID NO: 312237 - DNA, 417 bp, Artificial Sequence
  derived and/or modified sequence
atggaggcctgggagagcagccagcccctgctgcgctgtgagatcccctgccccctgcccggcacagacagagatggctctgtgtccctgcctggagaggccgccagctgtgacctggacaccctggagcctgagcacggcaacagaagagtgtctggcaaccccatctctgtgtgctgggcctacaaggtgaccaaggtgaagtgctggagcgtgcgggagcggggcggccgccacatcggcggccccaggaacaccctgaagcacccagcccaccacggcatgggcaagaacctggccaccagcctgcccacagctgccagcctgggcctgggcaagggccagctgctggtgtccatccgcttcatggacaccaccaagaagaggggccagagcgagaccttcaacatctgctag

SEQ ID NO: 312238 - DNA, 507 bp, Artificial Sequence
  derived and/or modified sequence
atggaggagcagctggtgctgaagggcggccagcacccccaccagcctgtgtggcatgatggccgggctgtggccggccagcccctgcacccccactgggccccccagccccggccccggggcagcctgggccagcacctgctgcggggcagcctgctggccgagagcctgcagcccctgtctgctggccaggtgtgcagcaggaagcccaggagccggctgaggaagtgccccagccgcagcctgcggtctgagcccatctctgtgcccaccctgtggacaggccatgctgagcggggccagtgccccctgctgcccccagcccccacccacggccccctgctggatgactgctacagcttcttccggcggctgggcctgagccaggtgaagccctttgtgccccggctgcacctgaagggctgccgcctggcctgggagagcctcttccaggtgctgacctgccggcagtgcagcctgaccggccccagccagctgctgaactag

SEQ ID NO: 312239 - protein, 319 aa, Artificial Sequence
  derived and/or modified sequence
MLAKVVEGDLAFKGGRDISVSLLTLVVTACGLALFGVSLFVSWKLCWVPWRERGLPSGSKDNNQEPLNYMDTETNEQENSEDFLDPPTPCPDSSMKISHTSPDIPLSTQTGIQENCAHGVRVQRQVTEPTSSARHNSIRRQLNLSNPDFNIQQLQKQEQLTGIGRIKPELYKQRSLDNDDGRRSNSKACGKLNFILKYDCDLEQLIVKIHKAVNLPAKDFSGTSDPYVKIYLLPDRKTKHQTKVHRKTLNPVFDEVFLFPVPYNDLEARKLHFSVYDFDRFSRHDLIGQVVVDHFLDLADFPRECILWKDIEYVTNILS

SEQ ID NO: 312240 - DNA, 960 bp, Artificial Sequence
  derived and/or modified sequence
atgctggccaaggtggtggagggcgacctggccttcaagggcggcagagacatcagcgtgagcctgctgaccctggtggtgaccgcctgcggcctggccctgttcggcgtgagcctgttcgtgagctggaagctgtgctgggtgccctggagagagagaggcctgcccagcggcagcaaggacaacaaccaggagcccctgaactacatggacaccgagaccaacgagcaggagaacagcgaggacttcctggacccccccaccccctgccccgacagcagcatgaagatcagccacaccagccccgacatccccctgagcacccagaccggcatccaggagaactgcgcccacggcgtgagagtgcagagacaggtgaccgagcccaccagcagcgccagacacaacagcatcagaagacagctgaacctgagcaaccccgacttcaacatccagcagctgcagaagcaggagcagctgaccggcatcggcagaatcaagcccgagctgtacaagcagagaagcctggacaacgacgacggcagaagaagcaacagcaaggcctgcggcaagctgaacttcatcctgaagtacgactgcgacctggagcagctgatcgtgaagatccacaaggccgtgaacctgcccgccaaggacttcagcggcaccagcgacccctacgtgaagatctacctgctgcccgacagaaagaccaagcaccagaccaaggtgcacagaaagaccctgaaccccgtgttcgacgaggtgttcctgttccccgtgccctacaacgacctggaggccagaaagctgcacttcagcgtgtacgacttcgacagattcagcagacacgacctgatcggccaggtggtggtggaccacttcctggacctggccgacttccccagagagtgcatcctgtggaaggacatcgagtacgtgaccaacatcctgagctag

SEQ ID NO: 312241 - DNA, 960 bp, Artificial Sequence
  derived and/or modified sequence
atgctggcgaaggttgtcgagggcgatttggctttcaagggcgggcgggacattagtgtctccctgcttaccttggtggtgaccgcgtgcgggctggcgctgttcggagtgtctctctttgtcagctggaaattgtgctgggtcccatggagggagcgcgggctaccctccggcagcaaggacaataatcaggaacccctcaattatatggacactgaaacgaacgaacaggaaaacagcgaggattttctggatcccccaaccccttgccctgactcgagcatgaagatatctcatacatctcccgatatccccctgagcacccagacaggtatacaggagaactgcgctcacggtgtgcgagttcaacgccaggttaccgagccaaccagttcagcacgtcacaattcgatccgtaggcaattaaacctcagtaaccctgatttcaatattcagcaactccaaaagcaggaacaactgaccggcatcggtcgcattaaaccggaactgtacaaacagcggtcgctggacaacgacgatggcagaaggagcaactcaaaagcctgtgggaaactgaattttatcctcaagtatgattgtgatctggagcaactcatagttaaaattcataaagcagtcaacctacctgcgaaagactttagtggcacgtcagacccatacgtaaaaatctatctcctccctgatcggaagacgaagcaccagacaaaggtccataggaagactctgaatcccgtcttcgatgaggttttcctttttccagtgccctacaatgatctagaggcaagaaaactgcatttcagtgtctatgactttgaccgctttagccgccatgacctgatcggccaggtcgttgtggatcatttcttggacctggcagactttcccagagaatgtatcttgtggaaggacatagagtatgtgaccaatatcttatcgtag

SEQ ID NO: 312242 - DNA, 960 bp, Artificial Sequence
  derived and/or modified sequence
atgctggccaaggtggtggagggggacctggccttcaagggcggccgggacatctctgtgtccctgctgaccctggtggtgacagcctgtggcctggccctgtttggagtgtccctgtttgtgtcctggaagctgtgctgggtgccctggagggagcggggcctgcccagcggcagcaaggacaacaaccaggagcccctgaactacatggacacagagaccaatgagcaggagaacagcgaggacttcctggacccccccaccccctgcccagacagctccatgaagatcagccacaccagcccagacatccccctgagcacccagacaggcatccaggagaactgtgcccacggcgtgcgggtgcagaggcaggtgacagagcccaccagcagcgcccggcacaacagcatccggcggcagctgaacctgagcaacccagacttcaacatccagcagctgcagaagcaggagcagctgactggaattggccgcatcaagccagagctgtacaagcagaggagcctggacaatgatgatggccgccgcagcaacagcaaggcctgtgggaagctgaacttcatcctgaagtatgactgtgacctggagcagctgattgtgaagatccacaaggctgtgaacctgcctgccaaggacttcagcggcaccagtgacccctacgtgaagatctacctgctgcctgacaggaagaccaagcaccagaccaaggtgcacaggaagaccctgaaccctgtgtttgatgaggtgttcctgtttcctgtgccctacaatgacctggaggccaggaagctgcacttctctgtgtatgactttgaccgcttcagcagacatgacctgattggccaggtggtggtggaccacttcctggacctggccgacttcccccgggagtgcatcctgtggaaggacattgaatatgtgaccaacatcctgtcctag

SEQ ID NO: 312243 - DNA, 960 bp, Artificial Sequence
  derived and/or modified sequence
atgctggccaaggtggtggagggcgacctggccttcaagggcggccgggatatcagcgtctcactgttgaccctggttgtgacggcctgtgggctcgcgctgtttggcgtttctcttttcgtgagctggaaactttgctgggtcccttggcgggaacgaggcctccctagcggatctaaagataataaccaagagcctctaaattatatggatactgagacgaatgagcaggagaactctgaagatttcctggacccgcccacaccctgtcctgatagtagcatgaaaatctcacacaccagtcccgatattccactatcaacccagaccggtattcaagaaaattgcgctcacggcgtacgggttcagcgccaggtcactgagcctaccagctcagcaaggcataattccattcgcagacagttaaatctcagcaacccggattttaatattcagcagttacagaaacaggagcaactgacgggcattgggcgcatcaaacccgagttgtacaaacaaaggtctcttgacaacgacgatggcagaaggagtaactctaaggcctgtggcaagctcaatttcattcttaagtatgactgcgacctggaacagctgattgttaagatccacaaggccgtcaacctgcccgcaaaggattttagcggcacctccgacccgtatgttaaaatctacctgctccccgacaggaagaccaaacaccagaccaaagttcatcgaaagaccctcaacccagtattcgatgaggtgtttctattcccagtcccctataacgatcttgaagccaggaagcttcacttctcagtgtacgatttcgatagattttcacgacatgacctgataggtcaggtggtcgtggaccactttttggatctcgcagatttcccgagagagtgcatcttgtggaaggatatagaatacgttaccaacattctatcctag

SEQ ID NO: 312244 - DNA, 960 bp, Artificial Sequence
  derived and/or modified sequence
atgttggccaaggtggtcgaaggggatttagcttttaaagggggtcgggacatttctgtgagccttctgaccctggtagtgacagcttgtgggctggcgctgttcggggtctcactgttcgtgtcctggaaattatgttgggttccttggagagaacgcggtctccctagcggctcgaaagataataaccaggagccactgaattacatggatactgaaacaaacgagcaggagaacagcgaggatttcctagacccgccaaccccctgccccgattctagcatgaagatctcccacaccagccctgatatcccattgtcgacacagactgggatacaagagaactgcgcacatggggtacgggtgcagcgtcaggtaactgagccaacctctagcgcgaggcacaatagtatccggagacagctgaacctgtccaaccctgatttcaacatacagcagctacaaaagcaggaacagctgacggggatcgggagaataaaaccagagttatacaaacaacggagccttgataacgatgatggcaggaggagcaattccaaagcgtgtggcaagttgaacttcatcctaaagtacgactgtgacctcgagcaattaatcgtgaaaattcacaaggcagttaatttacccgctaaggatttttccggaacctcagatccatacgtgaaaatctacttactccctgacaggaagactaagcatcaaaccaaagtccaccggaaaaccttaaaccccgtctttgatgaagtgttccttttcccagtgccttataatgatctggaagccaggaaactgcattttagtgtttacgattttgacagattcagccgacacgacttgatcggtcaagtggttgtcgaccactttctcgatctcgcggatttcccgcgagagtgtattctgtggaaggacatcgagtacgttacaaatatcctgtcatag

SEQ ID NO: 312245 - DNA, 960 bp, Artificial Sequence
  derived and/or modified sequence
atgctggcgaaggtggtggagggagatttagctttcaaaggaggcagagatatctcagtgagcctgctgacccttgtggtcactgcctgtggtctcgctctctttggcgtgtctctcttcgtatcttggaaactctgctgggttccgtggcgagaacgaggcctgccctctggtagcaaagacaacaaccaggagccccttaactacatggacacagagaccaatgagcaggagaacagtgaggacttcctagatcctcccacgccctgccctgactcctccatgaagatcagccacacctcccctgacattcccctctccacccagacggggatccaggagaactgtgcccatggcgtccgcgtgcagcgccaagtcacagagccaacctcgtcggcccggcataattcaatccgaagacaactcaacttgtcaaacccggacttcaatatccagcagcttcaaaaacaggaacagttgactggaattggtagaattaaaccagagttatataagcagaggtcattggataatgatgacgggagacggagtaacagcaaggcttgtgggaaactgaacttcattttaaaatatgactgtgacttagagcagctcatagtgaagattcacaaagctgtcaatttgcccgccaaggacttttctgggacttcagatccttatgtcaagatctatttgcttcctgatcggaaaacaaaacaccagactaaagttcacagaaagaccctgaaccctgtgtttgatgaagtgtttttatttccggttccctacaatgaccttgaagcacggaagcttcacttctctgtgtacgactttgacaggttctctcgtcatgacttaatcggccaagtggtggtggatcacttcctagacttggctgatttccccagggagtgcatcctttggaaggatatcgaatatgtcaccaatattcttagctag

SEQ ID NO: 312246 - protein, 361 aa, Artificial Sequence
  derived and/or modified sequence
MGIIQSILATSRDCYSFKKKPIPKKPTMLALAKILLISTLFYSLLSGSHGKENQDINTTQNIAEVFKTMENKPISLESEANLNSDKENITTSNLKASHSPPLNLPNNSHGITDFSSNSSAEHSLGSLKPTSTISTSPPLIHSFVSKVPWNAPIADEDLLPISAHPNATPALSSENFTWSLVNDTVKTPDNSSITVSILSSEPTSPSVTPLIVEPSGWLTTNSDSFTGFTPYQEKTTLQPTLKFTNNSKLFPNTSDPQKENRNTGIVFGAILGAILGVSLLTLVGYLLCGKRKTDSFSHRRLYDDRNEPVLRLDNAPEPYDVSFGNSSYYNPTLNDSAMPESEENARDGIPMDDIPPLRTSV

SEQ ID NO: 312247 - protein, 334 aa, Artificial Sequence
  derived and/or modified sequence
MLALAKILLISTLFYSLLSGSHGKENQDINTTQNIAEVFKTMENKPISLESEANLNSDKENITTSNLKASHSPPLNLPNNSHGITDFSSNSSAEHSLGSLKPTSTISTSPPLIHSFVSKVPWNAPIADEDLLPISAHPNATPALSSENFTWSLVNDTVKTPDNSSITVSILSSEPTSPSVTPLIVEPSGWLTTNSDSFTGFTPYQEKTTLQPTLKFTNNSKLFPNTSDPQKENRNTGIVFGAILGAILGVSLLTLVGYLLCGKRKTDSFSHRRLYDDRNEPVLRLDNAPEPYDVSFGNSSYYNPTLNDSAMPESEENARDGIPMDDIPPLRTSV

SEQ ID NO: 312248 - DNA, 3252 bp, Artificial Sequence
  derived and/or modified sequence
ttttccattaaaagcactgcaaattttagcctctaatgagattggagtcagttgacttggctttaaatattgcctcttccattttccagcttctgttactagccattgtgagcttcagtttcttcatctgcaaaatgggcataatacaatctattcttgccacatcaagggattgttattcctttaaaaaaaaaccaataccaaagaagcctacaatgttggccttagccaaaattctgttgatttcaacgttgttttattcacttctatcggggagccatggaaaagaaaatcaagacataaacacaacacagaacattgcagaagtttttaaaacaatggaaaataaacctatttctttggaaagtgaagcaaacttaaactcagataaagaaaatataaccacctcaaatctcaaggcgagtcattcccctcctttgaatctacccaacaacagccacggaataacagatttctccagtaactcatcagcagagcattctttgggcagtctaaaacccacatctaccatttccacaagccctcccttgatccatagctttgtttctaaagtgccttggaatgcacctatagcagatgaagatcttttgcccatctcagcacatcccaatgctacacctgctctgtcttcagaaaacttcacttggtctttggtcaatgacaccgtgaaaactcctgataacagttccattacagttagcatcctctcttcagaaccaacttctccatctgtgacccccttgatagtggaaccaagtggatggcttaccacaaacagtgatagcttcactgggtttaccccttatcaagaaaaaacaactctacagcctaccttaaaattcaccaataattcaaaactctttccaaatacgtcagatccccaaaaagaaaatagaaatacaggaatagtattcggggccattttaggtgctattctgggtgtctcattgcttactcttgtgggctacttgttgtgtggaaaaaggaaaacggattcattttcccatcggcgactttatgacgacagaaatgaaccagttctgcgattagacaatgcaccggaaccttatgatgtgagttttgggaattctagctactacaatccaactttgaatgattcagccatgccagaaagtgaagaaaatgcacgtgatggcattcctatggatgacatacctccacttcgtacttctgtatagaactaacagcaaaaaggcgttaaacagcaagtgtcatctacatcctagccttttgacaaattcatctttcaaaaggttacacaaaattactgtcacgtggattttgtcaaggagaatcataaaagcaggagaccagtagcagaaatgtagacaggatgtatcatccaaaggttttctttcttacaatttttggccatcctgaggcatttactaagtagccttaatttgtattttagtagtattttcttagtagaaaatatttgtggaatcagataaaactaaaagatttcaccattacagccctgcctcataactaaataataaaaattattccaccaaaaaattctaaaacaatgaagatgactctttactgctctgcctgaagccctagtaccataattcaagattgcattttcttaaatgaaaattgaaagggtgctttttaaagaaaatttgacttaaagctaaaaagaggacatagcccagagtttctgttattgggaaattgaggcaatagaaatgacagacctgtattctagtacgttataattttctagatcagcacacacatgatcagcccactgagttatgaagctgacaatgactgcattcaacggggccatggcaggaaagctgaccctacccaggaaagtaatagcttctttaaaagtcttcaaaggttttgggaattttaacttgtcttaatatatcttaggcttcaattatttgggtgccttaaaaactcaatgagaatcatggtaaaaaaaaaaagttaaccaaagaatatacctgtacataatttgtacagttttaagttgttagataggaactggatttcttatgtattagacattattgctcaatcataatggaatagattctgcatccctaaatgtatgaaccataaggttaaaaaagatgaatggaaatatcaaacaactttttactgagcatcagtttcataatcaataatataagaagattaatttggattctagtatgtttcagtttgtttttaattaccaccttcctttggtagaaaaaatatgttccttgatgtaggaaagtctaggttttagagattagaggatgagatcaagagttaaattcctaaagaagcactgaatatatgaagagagcaaacaaatcaagtaccaacctagaggctttatttttgaattgattcatggtgtgtgtgtgtgtgtgtgtgtgtgtgtgtgtgtgtgtgtaacacagaaacagcttcagaaaataagggatagaaagtaatgaagaaagtacttaccccatattgccataaaaatagcaaagaagactgtccctccattatcgaacaaatatgtcacctgagtagaaaacaaacagaaatattagtcatgcaaattgattataataagccagtgaatactgtttgcactcaggtactatgattttttctcaaatagaatcatattattttatagtacagaaatattatatatgaattcctttcatgggtcttgcaacaatttcacatgatttttctcatggggagaggtgaagaaacaacattagccctcttctctcctctcttgattccctttataccccaccatcatttctgattataaataattctaccattctatggaagtatttgtgggtcacagattgtcaaactacttaatgaaagttgtatgaaattagtttttcaggtgaggcattcctagttgcaattcctgttagcaaaacttctaggagtggggaagttggaaaatgcaggattcttccagtgagccagcatttcccatagctaaccctattctcttagtctttcaaaatgtagaatgggtccaataatggctataagatgtaataaatcccatcttaatttgttttaaaagtttcataaatcactgaacacttatgaaacaaagtgttttttaatcagatatcaactgaaacttcataaaggatgcatagttttataatgttattgaatcaaattttaaggcttgtattgtttgattttaataaagtataaattcaattt

SEQ ID NO: 312249 - DNA, 2084 bp, Artificial Sequence
  derived and/or modified sequence
ggttcctgggcgctctgttacacaagcaagatacagccagccccacctaattttgtttccctggcaccctcctgctcagtgcgacattgtcacacttaacccatctgttttctctaatgcacgacagattcctttcagacaggacaactgtgatatttcagttcctgattgtaaatacctcctaagcctgaagcttctgttactagccattgtgagcttcagtttcttcatctgcaaaatgggcataatacaatctattcttgccacatcaagggattgttattcctttaaaaaaaaaccaataccaaagaagcctacaatgttggccttagccaaaattctgttgatttcaacgttgttttattcacttctatcggggagccatggaaaagaaaatcaagacataaacacaacacagaacattgcagaagtttttaaaacaatggaaaataaacctatttctttggaaagtgaagcaaacttaaactcagataaagaaaatataaccacctcaaatctcaaggcgagtcattcccctcctttgaatctacccaacaacagccacggaataacagatttctccagtaactcatcagcagagcattctttgggcagtctaaaacccacatctaccatttccacaagccctcccttgatccatagctttgtttctaaagtgccttggaatgcacctatagcagatgaagatcttttgcccatctcagcacatcccaatgctacacctgctctgtcttcagaaaacttcacttggtctttggtcaatgacaccgtgaaaactcctgataacagttccattacagttagcatcctctcttcagaaccaacttctccatctgtgacccccttgatagtggaaccaagtggatggcttaccacaaacagtgatagcttcactgggtttaccccttatcaagaaaaaacaactctacagcctaccttaaaattcaccaataattcaaaactctttccaaatacgtcagatccccaaaaagaaaatagaaatacaggaatagtattcggggccattttaggtgctattctgggtgtctcattgcttactcttgtgggctacttgttgtgtggaaaaaggaaaacggattcattttcccatcggcgactttatgacgacagaaatgaaccagttctgcgattagacaatgcaccggaaccttatgatgtgagttttgggaattctagctactacaatccaactttgaatgattcagccatgccagaaagtgaagaaaatgcacgtgatggcattcctatggatgacatacctccacttcgtacttctgtatagaactaacagcaaaaaggcgttaaacagcaagtgtcatctacatcctagccttttgacaaattcatctttcaaaaggttacacaaaattactgtcacgtggattttgtcaaggagaatcataaaagcaggagaccagtagcagaaatgtagacaggatgtatcatccaaaggttttctttcttacaatttttggccatcctgaggcatttactaagtagccttaatttgtattttagtagtattttcttagtagaaaatatttgtggaatcagataaaactaaaagatttcaccattacagccctgcctcataactaaataataaaaattattccaccaaaaaattctaaaacaatgaagatgactctttactgctctgcctgaagccctagtaccataattcaagattgcattttcttaaatgaaaattgaaagggtgctttttaaagaaaatttgacttaaagctaaaaagaggacatagcccagagtttctgttattgggaaattgaggcaatagaaatgacagacctgtattctagtacgttataattttctagatcagcacacacatgatcagcccactgagttatgaagctgacaatgactgcattcaacggggccatggcaggaaagctgaccctacccaggaaagtaatagcttctttaaaagtcttcaaaggttttgggaattttaacttgtcttaatatatcttaggcttcaattatttgggtgccttaaaaactcaatgagaatcatggt

SEQ ID NO: 312250 - protein, 311 aa, Artificial Sequence
  derived and/or modified sequence
MGIIQSILATSRDCYSFKKKPIPKKPTMLALAKILLISTLFYSLLSGSHGKENQDINTTQNIAEVFKTMENKPISLESEANLNSDKENITTSNLKASHSPPLNLPNNSHGITDFSSNSSAEHSLGSLKPTSTISTSPPLIHSFVSKVPWNAPIADEDLLPISAHPNATPALSSENFTWSLVNDTVKTPDNSSITVSILSSEPTSPSVTPLIVEPSGWLTTNSDSFTGFTPYQEKTTLQPTLKFTNNSKLFPNTSDPQKVLRLDNAPEPYDVSFGNSSYYNPTLNDSAMPESEENARDGIPMDDIPPLRTSV

SEQ ID NO: 312251 - DNA, 1386 bp, Artificial Sequence
  derived and/or modified sequence
acacttaacccatctgttttctctaatgcacgacagattcctttcagacaggacaactgtgatatttcagttcctgattgtaaatacctcctaagcctgaagcttctgttactagccattgtgagcttcagtttcttcatctgcaaaatgggcataatacaatctattcttgccacatcaagggattgttattcctttaaaaaaaaaccaataccaaagaagcctacaatgttggccttagccaaaattctgttgatttcaacgttgttttattcacttctatcggggagccatggaaaagaaaatcaagacataaacacaacacagaacattgcagaagtttttaaaacaatggaaaataaacctatttctttggaaagtgaagcaaacttaaactcagataaagaaaatataaccacctcaaatctcaaggcgagtcattcccctcctttgaatctacccaacaacagccacggaataacagatttctccagtaactcatcagcagagcattctttgggcagtctaaaacccacatctaccatttccacaagccctcccttgatccatagctttgtttctaaagtgccttggaatgcacctatagcagatgaagatcttttgcccatctcagcacatcccaatgctacacctgctctgtcttcagaaaacttcacttggtctttggtcaatgacaccgtgaaaactcctgataacagttccattacagttagcatcctctcttcagaaccaacttctccatctgtgacccccttgatagtggaaccaagtggatggcttaccacaaacagtgatagcttcactgggtttaccccttatcaagaaaaaacaactctacagcctaccttaaaattcaccaataattcaaaactctttccaaatacgtcagatccccaaaaagttctgcgattagacaatgcaccggaaccttatgatgtgagttttgggaattctagctactacaatccaactttgaatgattcagccatgccagaaagtgaagaaaatgcacgtgatggcattcctatggatgacatacctccacttcgtacttctgtatagaactaacagcaaaaaggcgttaaacagcaagtgtcatctacatcctagccttttgacaaattcatctttcaaaaggttacacaaaattactgtcacgtggattttgtcaaggagaatcataaaagcaggagaccagtagcagaaatgtagacaggatgtatcatccaaaggttttctttcttacaatttttggccatcctgaggcatttactaagtagccttaatttgtattttagtagtattttcttagtagaaaatatttgtggaatcagataaaactaaaagatttcaccattacagccc

SEQ ID NO: 312252 - DNA, 3102 bp, Artificial Sequence
  derived and/or modified sequence
ttttccattaaaagcactgcaaattttagcctctaatgagattggagtcagttgacttggctttaaatattgcctcttccattttccagcttctgttactagccattgtgagcttcagtttcttcatctgcaaaatgggcataatacaatctattcttgccacatcaagggattgttattcctttaaaaaaaaaccaataccaaagaagcctacaatgttggccttagccaaaattctgttgatttcaacgttgttttattcacttctatcggggagccatggaaaagaaaatcaagacataaacacaacacagaacattgcagaagtttttaaaacaatggaaaataaacctatttctttggaaagtgaagcaaacttaaactcagataaagaaaatataaccacctcaaatctcaaggcgagtcattcccctcctttgaatctacccaacaacagccacggaataacagatttctccagtaactcatcagcagagcattctttgggcagtctaaaacccacatctaccatttccacaagccctcccttgatccatagctttgtttctaaagtgccttggaatgcacctatagcagatgaagatcttttgcccatctcagcacatcccaatgctacacctgctctgtcttcagaaaacttcacttggtctttggtcaatgacaccgtgaaaactcctgataacagttccattacagttagcatcctctcttcagaaccaacttctccatctgtgacccccttgatagtggaaccaagtggatggcttaccacaaacagtgatagcttcactgggtttaccccttatcaagaaaaaacaactctacagcctaccttaaaattcaccaataattcaaaactctttccaaatacgtcagatccccaaaaagttctgcgattagacaatgcaccggaaccttatgatgtgagttttgggaattctagctactacaatccaactttgaatgattcagccatgccagaaagtgaagaaaatgcacgtgatggcattcctatggatgacatacctccacttcgtacttctgtatagaactaacagcaaaaaggcgttaaacagcaagtgtcatctacatcctagccttttgacaaattcatctttcaaaaggttacacaaaattactgtcacgtggattttgtcaaggagaatcataaaagcaggagaccagtagcagaaatgtagacaggatgtatcatccaaaggttttctttcttacaatttttggccatcctgaggcatttactaagtagccttaatttgtattttagtagtattttcttagtagaaaatatttgtggaatcagataaaactaaaagatttcaccattacagccctgcctcataactaaataataaaaattattccaccaaaaaattctaaaacaatgaagatgactctttactgctctgcctgaagccctagtaccataattcaagattgcattttcttaaatgaaaattgaaagggtgctttttaaagaaaatttgacttaaagctaaaaagaggacatagcccagagtttctgttattgggaaattgaggcaatagaaatgacagacctgtattctagtacgttataattttctagatcagcacacacatgatcagcccactgagttatgaagctgacaatgactgcattcaacggggccatggcaggaaagctgaccctacccaggaaagtaatagcttctttaaaagtcttcaaaggttttgggaattttaacttgtcttaatatatcttaggcttcaattatttgggtgccttaaaaactcaatgagaatcatggtaaaaaaaaaaagttaaccaaagaatatacctgtacataatttgtacagttttaagttgttagataggaactggatttcttatgtattagacattattgctcaatcataatggaatagattctgcatccctaaatgtatgaaccataaggttaaaaaagatgaatggaaatatcaaacaactttttactgagcatcagtttcataatcaataatataagaagattaatttggattctagtatgtttcagtttgtttttaattaccaccttcctttggtagaaaaaatatgttccttgatgtaggaaagtctaggttttagagattagaggatgagatcaagagttaaattcctaaagaagcactgaatatatgaagagagcaaacaaatcaagtaccaacctagaggctttatttttgaattgattcatggtgtgtgtgtgtgtgtgtgtgtgtgtgtgtgtgtgtgtgtaacacagaaacagcttcagaaaataagggatagaaagtaatgaagaaagtacttaccccatattgccataaaaatagcaaagaagactgtccctccattatcgaacaaatatgtcacctgagtagaaaacaaacagaaatattagtcatgcaaattgattataataagccagtgaatactgtttgcactcaggtactatgattttttctcaaatagaatcatattattttatagtacagaaatattatatatgaattcctttcatgggtcttgcaacaatttcacatgatttttctcatggggagaggtgaagaaacaacattagccctcttctctcctctcttgattccctttataccccaccatcatttctgattataaataattctaccattctatggaagtatttgtgggtcacagattgtcaaactacttaatgaaagttgtatgaaattagtttttcaggtgaggcattcctagttgcaattcctgttagcaaaacttctaggagtggggaagttggaaaatgcaggattcttccagtgagccagcatttcccatagctaaccctattctcttagtctttcaaaatgtagaatgggtccaataatggctataagatgtaataaatcccatcttaatttgttttaaaagtttcataaatcactgaacacttatgaaacaaagtgttttttaatcagatatcaactgaaacttcataaaggatgcatagttttataatgttattgaatcaaattttaaggcttgtattgtttgattttaataaagtataaattcaattt

SEQ ID NO: 312253 - protein, 1121 aa, Artificial Sequence
  derived and/or modified sequence
MAAATVGRDTLPEHWSYGVCRDGRVFFINDQLRCTTWLHPRTGEPVNSGHMIRSDLPRGWEEGFTEEGASYFIDHNQQTTAFRHPVTGQFSPENSEFILQEEPNPHMSKQDRNQRPSSMVSETSTAGTASTLEAKPGPKIIKSSSKVHSFGKRDQAIRRNPNVPVVVRGWLHKQDSSGMRLWKRRWFVLADYCLFYYKDSREEAVLGSIPLPSYVISPVAPEDRISRKYSFKAVHTGMRALIYNSSTAGSQAEQSGMRTYYFSADTQEDMNAWVRAMNQAAQVLSRSSLKRDMEKVERQAVPQANHTESCHECGRVGPGHTRDCPHRGHDDIVNFERQEQEGEQYRSQRDPLEGKRDRSKARSPYSPAEEDALFMDLPTGPRGQQAQPQRAEKNGMLPASYGPGEQNGTGGYQRAFPPRTNPEKHSQRKSNLAQVEHWARAQKGDSRSLPLDQTLPRQGPGQSLSFPENYQTLPKSTRHPSGGSSPPPRNLPSDYKYAQDRASHLKMSSEERRAHRDGTVWQLYEWQQRQQFRHGSPTAPICLGSPEFTDQGRSRSMLEVPRSISVPPSPSDIPPPGPPRVFPPRRPHTPAERVTVKPPDQRRSVDISLGDSPRRARGHAVKNSSHVDRRSMPSMGYMTHTVSAPSLHGKSADDTYLQLKKDLEYLDLKMTGRDLLKDRSLKPVKIAESDTDVKLSIFCEQDRVLQDLEDKIRALKENKDQLESVLEVLHRQMEQYRDQPQHLEKIAYQQKLLQEDLVHIRAELSRESTEMENAWNEYLKLENDVEQLKQTLQEQHRRAFFFQEKSQIQKDLWRIEDVTAGLSANKENFRILVESVKNPERKTVPLFPHPPVPSLSTSESKPPPQPSPPTSPVRTPLEVRLFPQLQTYVPYRPHPPQLRKVTSPLQSPTKAKPKVEDEAPPRPPLPELYSPEDQPPAVPPLPREATIIRHTSVRGLKRQSDERKRDRELGQCVNGDSRVELRSYVSEPELATLSGDMAQPSLGLVGPESRYQTLPGRGLSGSTSRLQQSSTIAPYVTLRRGLNAESSKATFPRPKSALERLYSGDHQRGKMSAEEQLERMKRHQKALVRERKRTLGQGERTGLPSSRYLSRPLPGDLGSVC

SEQ ID NO: 312254 - protein, 753 aa, Artificial Sequence
  derived and/or modified sequence
  misc_feature (1)..(1): Xaa can be any naturally occurring amino acid
XDALFMDLPTGPRGQQAQPQRAEKNGMLPASYGPGEQNGTGGYQRAFPPRTNPEKHSQRKSNLAQVEHWARAQKGDSRSLPLDQTLPRQGPGQSLSFPENYQTLPKSTRHPSGGSSPPPRNLPSDYKYAQDRASHLKMSSEERRAHRDGTVWQLYEWQQRQQFRHGSPTAPICLGSPEFTDQGRSRSMLEVPRSISVPPSPSDIPPPGPPRVFPPRRPHTPAERVTVKPPDQRRSVDISLGDSPRRARGHAVKNSSHVDRRSMPSMGYMTHTVSAPSLHGKSADDTYLQLKKDLEYLDLKMTGRDLLKDRSLKPVKIAESDTDVKLSIFCEQDRVLQDLEDKIRALKENKDQLESVLEVLHRQMEQYRDQPQHLEKIAYQQKLLQEDLVHIRAELSRESTEMENAWNEYLKLENDVEQLKQTLQEQHRRAFFFQEKSQIQKDLWRIEDVTAGLSANKENFRILVESVKNPERKTVPLFPHPPVPSLSTSESKPPPQPSPPTSPVRTPLEVRLFPQLQTYVPYRPHPPQLRKVTSPLQSPTKAKPKVQEDEAPPRPPLPELYSPEDQPPAVPPLPREATIIRHTSVRGLKRQSDERKRDRELGQCVNGDSRVELRSYVSEPELATLSGDMAQPSLGLVGPESRYQTLPGRGLSGSTSRLQQSSTIAPYVTLRRGLNAESSKATFPRPKSALERLYSGDHQRGKMSAEEQLERMKRHQKALVRERKRTLGQGERTGLPSSRYLSRPLPGDLGSVC

SEQ ID NO: 312255 - DNA, 2262 bp, Artificial Sequence
  derived and/or modified sequence
tgagatgcgctgtttatggacctgcccaccgggccccgggggcagcaggcccagccccaaagggcggagaagaacggcatgttgcctgcctcctatggaccaggtgagcaaaatgggacgggcggttaccaacgcgcttttcctccgcgaactaatccggagaagcattcgcagcgtaagtcgaatctggcccaagtcgaacactgggcgcgcgcgcaaaagggtgactcgcgctccctaccactcgatcagactctaccccgccaaggccctggccagtcactgagctttcccgagaattatcagaccctcccaaagagcactaggcacccttctggtggttcaagccctccccctcggaatctcccctcagattacaagtacgcccaagacagagcctcccatctcaaaatgagctctgaggaacgcagagctcaccgcgatggaacggtttggcagctttacgagtggcagcagcgccagcagtttagacatggaagccctacagcaccgatttgtctggggtcaccagaattcacagatcaagggcgcagccggagcatgctggaagtgccacgtagcatcagtgtgcctccttcaccttcagatatcccgcctcccggaccacccagagtcttcccccccagacggccccatacaccagctgaaagagttacagtgaagccacccgatcagcggaggtccgtggatatctctctgggggatagtccgcggcgtgcacgcggccacgcagttaagaacagctcacatgttgatagacgatcaatgccgtcaatggggtacatgacacacacggtatctgctccaagcttgcacggcaaatctgctgacgacacctacctgcagttgaaaaaagatctggagtacctggacttgaagatgacgggtcgagatcttctgaaggaccggtctctgaagcccgtgaagatcgcagaatcagacacagacgtgaaactgtccattttctgtgagcaagacagggtcctacaagacctggaagacaagattcgggctttaaaggagaacaaggaccagctcgagtccgtcctcgaggtgctccatcggcagatggagcaataccgagaccagcctcaacacttggaaaaaatcgcttatcagcaaaaactgctccaggaggacttggttcacattcgcgccgagttgtctcgcgagtccactgaaatggagaacgcctggaacgagtacttgaagctcgaaaacgatgtggaacagctgaaacagaccttacaggaacagcaccgtagagctttcttctttcaggagaaatcccagatacagaaggacctatggcgcatcgaagacgtgaccgccggcctgtcagcaaacaaggaaaattttaggatactggtggaaagtgtaaagaatcccgaacgcaagacagttccactgttcccgcatccgccggttcccagtctctcaacctcggagagtaagccacctccgcagccttccccacccacaagtcccgtgcggacacccttggaggtgcgcctctttccgcagttgcagacttacgtgccataccggcctcacccacctcagctgcgtaaggttacatctcctctccagtcccctacaaaagccaagcctaaagtgcaggaggatgaggcccccccaaggcccccactgccagaactgtacagcccagaggaccagcctcctgctgttccccccctccctagagaggctaccattataaggcatacgagtgttagggggctgaagagacagtcggatgagaggaagcgtgatcgcgagttggggcagtgtgtaaatggcgattcccgagtcgagctaagatcttacgtctctgagcctgaattggctaccctgtcaggggatatggcacagcccagtctggggttggtgggtccagaatctagatatcagactttgccaggacggggcctgagcggctccacatctagactgcagcagagctctaccattgccccttacgttactctgaggagaggattaaatgctgaatcatccaaagctacttttccaaggcctaagagtgctcttgagcgtctctatagcggtgaccaccaaagaggcaaaatgtcggccgaggaacagctggaaaggatgaaaaggcatcagaaggcattggtgcgggagcggaagcggaccctgggtcagggggaacgaactggattaccaagctcaaggtacctgagtcgacccttgccaggcgatctaggatccgtatgttag

SEQ ID NO: 312256 - DNA, 2262 bp, Artificial Sequence
  derived and/or modified sequence
tgagatgccctcttcatggacctgcccaccggcccccggggccagcaggcccagccccagagagctgagaagaatggcatgctgcctgccagctatggccctggagagcagaatggcaccggcggctaccagagggccttcccccccaggaccaaccctgagaagcacagccagaggaagagcaacctggcccaggtggagcactgggcccgggcccagaagggggacagccgcagcctgcccctggaccagaccctgccccggcagggccctggccagagcctgtccttccctgagaactaccagaccctgcccaagagcaccaggcaccccagcggcggcagcagccccccacccaggaacctgcccagcgactacaagtatgcccaggaccgggccagccacctgaagatgagcagcgaggagcggcgggcccacagagatggcaccgtgtggcagctgtatgagtggcagcagaggcagcagttcagacatggcagccccacagcccccatctgcctgggcagccctgagttcacagaccagggccgcagccgctccatgctggaggtgcccaggagcatctctgtgccccccagccccagcgacatccccccacctggcccccccagggtcttccccccccggcggccccacaccccagctgagcgggtgacagtgaagcccccagaccagaggagatctgtggacatcagcctgggggacagcccccggcgggcccggggccatgctgtgaagaacagcagccacgtggaccggcgctccatgcccagcatgggctacatgacccacacagtgtctgcccccagcctgcacggcaagtctgcagatgacacctacctgcagctgaagaaggacctggagtacctggacctgaagatgacaggccgggacctgctgaaggacaggagcctgaagcctgtgaagattgctgagagtgacacagatgtgaagctgagcatcttctgtgagcaggacagagtgctgcaggacctggaggacaagatccgggccctgaaggagaacaaggaccagctggagagcgtgctggaggtgctgcaccggcagatggagcagtacagagaccagccccagcacctggagaagatcgcctaccagcagaagctgctgcaggaggacctggtgcacatccgggcagagctgagccgggagagcacagagatggagaatgcctggaatgagtacctgaagctggagaatgatgtggagcagctgaagcagaccctgcaggagcagcaccggcgggccttcttcttccaggagaagagccagatccagaaggacctgtggagaattgaagatgtgacagctggcctgagcgccaacaaggagaacttccgcatcctggtggagagcgtgaagaaccctgagaggaagacagtgcccctcttcccccacccccctgtgcccagcctgagcaccagcgagagcaagcccccaccccagcccagcccccccaccagccctgtgaggacccccctggaggtgcggctcttcccccagctgcagacctacgtgccctaccggccccaccccccccagctgaggaaggtgaccagccccctgcagagccccaccaaggccaagcccaaggtgcaggaggatgaggccccacccaggcctcccctgcctgagctgtacagccctgaggaccagcccccagctgtgccccccctgccccgggaggccaccatcatccgccacacctctgtgcggggcctgaagaggcagagtgatgagaggaagagggaccgggagctgggccagtgtgtgaatggagacagccgggtggagctgcggagctatgtgtctgagcctgagctggccaccctgagcggggacatggcccagcccagcctgggcctggtgggccctgagagccgctaccagaccctgcccggccggggcctgagcggcagcaccagccggctgcagcagagcagcaccatcgccccctacgtgaccctgcggcggggcctgaatgctgagagcagcaaggccaccttcccccggcccaagagcgccctggagcggctgtacagcggggaccaccagaggggcaagatgtctgctgaggagcagctggagaggatgaagaggcaccagaaggccctggtgcgggagaggaagaggaccctgggccagggcgagaggacaggcctgcccagcagccgctacctgagccggcccctgcccggggacctgggctctgtgtgctag

SEQ ID NO: 312257 - DNA, 2262 bp, Artificial Sequence
  derived and/or modified sequence
tgagacgccctgttcatggacctgcccaccggcccccggggccagcaagctcagccccagagggccgaaaagaacgggatgctccctgcctcctacggcccgggagagcagaacggcaccggtggctatcagcgggcatttcctcctaggacgaatcctgagaagcattcgcagcgcaaaagcaacctcgcccaggtggagcattgggcgagggcccagaaaggggattcccggtcattgccattagaccagacactgcctcgccagggccccggccagtccctctccttccctgagaactatcagacacttccgaaaagtactagacacccgagtggaggaagctctccacccccccggaatctcccaagcgactacaagtacgcgcaagatcgcgctagccacctgaagatgtcctctgaagagagaagggcgcacagggatggtacagtctggcagttatacgagtggcaacagaggcaacaatttcggcacggatctcctactgctcctatttgtctcggaagtcctgaatttaccgaccagggcagatcccgcagcatgctcgaggttccccggtcaatttctgtgcccccaagtcctagcgacattcctccacccgggcccccgcgcgtgttccctccaagaagaccccataccccggccgaacgtgtcaccgtgaaaccaccggatcagaggcggagcgtcgatatatcattaggcgatagtccgcggcgagcaagaggacatgccgttaagaattctagccatgtcgacagacggagcatgccttctatggggtatatgacccataccgtaagcgctccctccctgcacggaaagtccgcagacgacacctacctgcagttgaaaaaagacctcgaatatctagacctgaaaatgactgggagggatctccttaaagaccgtagcctcaaacccgttaagatcgcggagtccgacactgatgtgaagttatctattttttgcgagcaggatcgggttcttcaggacctcgaagacaaaattagggcgctgaaagaaaacaaggaccagctggagagcgtgctcgaggttctgcatcgccagatggaacaatacagagaccagccacagcatctggagaaaatagcttatcagcagaaactgcttcaagaggacttggtccacatcagagctgagctctcgagagaaagcacagaaatggaaaatgcctggaacgagtatcttaagctcgagaatgacgtggaacagttgaagcaaacgctgcaggagcagcatcggagagccttctttttccaggagaagtctcagatccagaaagacttgtggaggatcgaagacgtcacggctggattatccgctaataaggaaaatttccggattcttgttgagtccgttaaaaatcctgagcgcaaaaccgtacccctgttcccgcatcccccggtccctagcctctcgacgagcgagtctaagccacctcctcagcccagtccccctacctcccctgtgaggactccactggaggttagactatttccgcagctgcagacctatgtcccttatagaccccatcctcctcagctgaggaaagtcacatcccccttacaaagtcccaccaaggccaaacccaaggtgcaggaggatgaggctccgccaagacccccgctccctgaattatattcgcctgaggaccagccacccgcagttcccccactgcccagagaggcgaccattatacgccacacatcagtacgaggactgaaacgccagtcggacgagagaaagagagatcgggagttaggtcagtgcgtaaacggtgacagtcgggtggagcttagatcctacgtctctgaaccggagttggcgacactgagtggcgacatggcacaaccaagtcttggattagtggggcctgaatccaggtatcagactctgccagggagaggcctctcggggagcaccagcaggttacagcaatcaagcactatcgctccttatgtgacccttcgcagggggctaaacgctgaaagcagcaaagccacatttccccggccaaagtcagcactggagcgcttgtattccggcgatcaccagaggggaaaaatgtccgccgaggaacaactggagcgcatgaagcgtcatcagaaggcactcgtgcgggagcgaaaacggaccttgggacagggggaaaggacggggctcccttcatcaaggtatctgagtaggccactgccaggagacctgggatctgtttgttag

SEQ ID NO: 312258 - DNA, 3688 bp, Artificial Sequence
  derived and/or modified sequence
aggatgccttgtttatggatttacccactggcccaagaggccagcaggcacagccccaacgggcagagaagaatggaatgctgcctgcctcatatggcccaggagaacagaatgggactggtgggtaccagcgggcctttcctcccaggaccaaccctgaaaaacacagccaaaggaagagcaatctggcccaggtggagcactgggcaagggcccagaaaggggatagcaggagtcttcccttggaccagacgcttcctcgccagggtcctggccaatccctgtccttcccagaaaactaccagactcttcccaagagcacccgacacccctcggggggctcctcgccacctccccgaaacctgccaagtgactacaagtatgcgcaggaccgagccagccacctgaagatgtcgagtgaagagcgccgggcgcaccgggatggcaccgtgtggcagctctacgagtggcagcagcgccagcagttccggcacggcagccccacagcgcccatctgccttggctccccagagttcaccgaccagggccggagcaggagcatgctagaggtgccccgctccatctctgtgcctccatctccctcggacatccctcccccaggacccccaagggtcttcccaccccggcggccacacacaccagcagagcgagtcacagtgaagccaccggaccagaggaggagtgtggacatctcgctgggggattctccaaggagggcacggggccacgctgtcaagaactcatctcatgtggaccgacgctccatgccctccatgggttacatgacccacaccgtcagcgctcccagtttacatggaaaatcggctgatgatacctacctccagctgaagaaagacctggagtacctggatctaaagatgacaggccgggaccttctcaaggatcgaagtctgaagcctgtgaagatcgctgagagcgacactgacgtcaaactgagcatcttctgtgaacaagacagggtcctccaggacttggaagacaagatacgagcccttaaagagaacaaagaccagctagaatctgtgctggaggtgttgcacagacagatggagcagtaccgagaccagccccagcacttggagaagattgcctaccagcagaagttgctgcaggaggaccttgtccatatccgagctgagctctccagagagtccactgagatggaaaatgcttggaacgaatacctgaagttggagaatgatgtggaacagctgaagcagaccctgcaggagcaacacagaagagccttttttttccaggagaaatcgcagatacagaaagatctatggagaattgaagatgtcactgcaggcctgagtgcaaataaagagaacttcagaattctagtggagtcagtaaaaaatccggagagaaaaacggtgcctttgtttcctcacccgcctgtgccttcactctcaacttctgagagcaagccgcccccacagcccagtcctcccaccagccctgtgcggacccctctggaggttcgactcttcccccagctgcaaacctacgtgccgtaccgacctcacccaccccagctgaggaaagtgacatccccccttcagtcaccaactaaggcgaagcccaaagttcaggaagatgaagcacctcccaggcccccactccccgaactctacagcccagaggaccagcccccggctgtgccgcctctgccaagagaggccaccatcatccggcacacatctgtgcggggcctcaagcggcagtcagacgagaggaagcgagaccgggagctggggcagtgtgtgaatggggattccagggtggagctgcggtcgtatgtcagtgagcctgagctggcgaccctcagcggggacatggcccagccctccctaggacttgtgggccctgagagcaggtaccagacgctgccaggcagagggctctcagggtccacgtcaaggctccagcagtcgtccaccattgctccctacgtcacactccggaggggtctcaatgccgaaagcagcaaggcgaccttccctagacctaagagtgccttggagcgcctgtactcaggggatcaccagcgaggcaagatgagtgcagaggagcagctggagcgcatgaagcgacaccagaaggccctggtccgagagcgcaagaggacactgggccaaggggagaggacgggcctgccctcatctcgctacctcagccggccgctccctggagatcttggctcagtatgttaggaggggccaggcagcggggcagggacagggagccgagtgcccctcagagtcccccaaacacaagcacatcacacctcccagtgagagagctgtccattgacctacatggttcagagaacaccccacggggctgtttgtccacgacccaggctggacgaatgcctggtcagagggtgacctgaaccagagctggagtgaggatcaaacaggcccaggagcctgaggaaatacccagtcagtcctcccagccgcgatggagaggggcctttgcaggcgttcggaatctcggctgaattcaggacctgggaatacagggttcagagaggagaggaggaagatggtgacatgatttggttagaagcacaagcaaactgatcagcctcccagacctgccagcagatgctgtgtgagggtgatggagcacggggtcacacccctgccccaagggccactggtctccctgggcttgcagtgcagaggcctcagggtgtctgggattgctggggaggcctgtgctgccccctggtggcgcttcctggcgctgcgccctgtccacagtcaccttaggtccctttggaaacattccatttgacttttccctgttgtttgaaatcccatgtttccctaaacctctagcctgattgttctttccctaattcattgcacaagctcctttgcttttagtgttaccgctcattgcctctctaatcctgcctgattgtgtttacagaagcttctgatttgcattgaacatgctctaactggcctgtgctacttattaccgggcttgtaatagcggttcttgtctccatagcctgttgagtgttcccagatgtgactcacctttctgctgccctcttcatgcaggcctactgactcataattcacttgtcccaaaagccaccccacaagcctgagccaacctgctgcctgacgccacagtcattggcagaggtctgggcattattaatttataaaaatccatgctttacacctggacagtagacagggacttcagagattgcacgtttgaatacattctcccaagactgaggttgttcggttttaattcctgtagtccaatcacacaatttcttatggaaaaccttttgtgtttctggtatttaataacttgaagggatagcaaaatatactgtgtattcagagggcctctctgcagctgctagctcagacaccaaaggggtaaggcccaggacattcatatctttaaaagctgcaaacctggtaacctttaaacttttaaaacaaatgtcatatggggtaacactgaccttttataatttgatgtctcaaatgtagagattatctaaaaatcgtaacttgaataccttgtaatttttctcttaaaaaagaagacttgtgtaagtctctgcatcaacgccaataaacatgttgcttaataataa

SEQ ID NO: 312259 - DNA, 2262 bp, Artificial Sequence
  derived and/or modified sequence
tgagatgccttgttcatggaccttcctaccggacctcgcggacagcaggcccagccccagagggcggagaagaatgggatgttgcctgctagctatggaccgggtgagcaaaacggcaccgggggataccaaagagccttcccgccacggaccaatcctgaaaaacacagtcagaggaaaagtaaccttgcgcaagtggagcactgggcgagggcccagaagggggactcaagatctctcccgctagatcagaccctcccacggcaggggccaggccaatctctatctttcccagagaattaccagactttacctaaaagcacaagacatccttccggaggcagcagccctccacctcggaatttaccttcagactacaagtatgcacaggatcgcgcttctcacctcaaaatgtcctcggaggagcgaagggctcaccgcgacggcacagtttggcagctatatgaatggcagcagcggcaacagtttaggcatgggagtccgactgcccctatttgcctgggcagtccagagttcactgatcaggggaggtcaaggagcatgttggaagtgccaaggtccatttccgttccccctagtccttcagatatccccccacccggaccccctagagtgtttcctcccaggcggccacataccccggcagaaagggtcacagtgaagccgcctgaccagcggaggtccgtggacatttctctgggggacagcccaagacgcgctaggggacatgcagtcaaaaactcctcccacgtcgaccgaagaagcatgccatctatgggatatatgacccacaccgtttcagctccttcattacacggcaagtctgcggacgatacatatctacagctcaagaaagacctagagtacttggatctgaagatgactggacgagacctactgaaggatcgcagcctgaaacccgtcaagatagctgagtccgacacagacgtgaagctatcgatcttctgtgaacaggaccgagtcctacaggatctggaggacaaaattcgggctctgaaagaaaataaagaccagcttgaaagcgtgcttgaagtcctacatagacagatggagcaatatagagaccagcctcagcacctggaaaagatcgcttatcagcagaagctgctccaagaagacttagtccacattagagcagaattgagtagggagtcaacggagatggagaatgcctggaatgagtacttaaagctcgagaatgatgttgaacagttaaagcagactctccaggaacagcaccgtagggccttttttttccaggagaagagccagatccagaaggatttgtggcgcatcgaagatgtgactgctgggctcagtgccaataaggaaaacttccgcatactggtggagtcagtgaagaacccagagcgaaagaccgtccccctctttcctcatccacctgttccctcactgagcacctcagaatcaaagccccctccccagcctagcccacccaccagccccgtaagaactccactggaggttagactgttcccacagctgcagacctatgtgccctataggccgcaccctccacagctgaggaaggtgactagtccgctgcaaagtcccaccaaagccaaaccaaaagtacaagaggacgaagcaccacccagaccgccactcccagaactgtacagtcctgaagatcaaccacccgcagttcctcccctaccgcgagaagccacaattatccgccacacatcggtacggggtctcaagcggcagtcggatgagcggaagagagatcgagaactgggccagtgcgtgaacggcgacagccgggtagagctgaggagctacgtttcagagccagaactggctaccttgagcggagacatggctcagccaagtttaggacttgtgggtcctgaatctcggtaccagacacttccagggaggggcttgtccggttcgacctctagactgcagcaaagtagcaccattgccccatacgtaactctgaggcggggactgaatgccgagtcaagcaaagccacgtttcccagaccgaagagcgccctggagagactgtactccggagaccatcagcgaggaaagatgtctgccgaagaacaactggagcgcatgaaacggcatcagaaagcccttgtccgtgagaggaaacgcacacttggtcagggcgaacgcactgggttacccagcagtaggtatctgtcccggccactgccaggagatctcggaagcgtgtgctag

SEQ ID NO: 312260 - DNA, 2262 bp, Artificial Sequence
  derived and/or modified sequence
tgagacgccctgttcatggacctgcccaccggccccagaggccagcaggcccagccccagagagccgagaagaacggcatgctgcccgccagctacggccccggcgagcagaacggcaccggcggctaccagagagccttcccccccagaaccaaccccgagaagcacagccagagaaagagcaacctggcccaggtggagcactgggccagagcccagaagggcgacagcagaagcctgcccctggaccagaccctgcccagacagggccccggccagagcctgagcttccccgagaactaccagaccctgcccaagagcaccagacaccccagcggcggcagcagccccccccccagaaacctgcccagcgactacaagtacgcccaggacagagccagccacctgaagatgagcagcgaggagagaagagcccacagagacggcaccgtgtggcagctgtacgagtggcagcagagacagcagttcagacacggcagccccaccgcccccatctgcctgggcagccccgagttcaccgaccagggcagaagcagaagcatgctggaggtgcccagaagcatcagcgtgccccccagccccagcgacatccccccccccggcccccccagagtgttcccccccagaagaccccacacccccgccgagagagtgaccgtgaagccccccgaccagagaagaagcgtggacatcagcctgggcgacagccccagaagagccagaggccacgccgtgaagaacagcagccacgtggacagaagaagcatgcccagcatgggctacatgacccacaccgtgagcgcccccagcctgcacggcaagagcgccgacgacacctacctgcagctgaagaaggacctggagtacctggacctgaagatgaccggcagagacctgctgaaggacagaagcctgaagcccgtgaagatcgccgagagcgacaccgacgtgaagctgagcatcttctgcgagcaggacagagtgctgcaggacctggaggacaagatcagagccctgaaggagaacaaggaccagctggagagcgtgctggaggtgctgcacagacagatggagcagtacagagaccagccccagcacctggagaagatcgcctaccagcagaagctgctgcaggaggacctggtgcacatcagagccgagctgagcagagagagcaccgagatggagaacgcctggaacgagtacctgaagctggagaacgacgtggagcagctgaagcagaccctgcaggagcagcacagaagagccttcttcttccaggagaagagccagatccagaaggacctgtggagaatcgaggacgtgaccgccggcctgagcgccaacaaggagaacttcagaatcctggtggagagcgtgaagaaccccgagagaaagaccgtgcccctgttcccccacccccccgtgcccagcctgagcaccagcgagagcaagccccccccccagcccagcccccccaccagccccgtgagaacccccctggaggtgagactgttcccccagctgcagacctacgtgccctacagaccccaccccccccagctgagaaaggtgaccagccccctgcagagccccaccaaggccaagcccaaggtgcaggaggacgaggccccccccagaccccccctgcccgagctgtacagccccgaggaccagccccccgccgtgccccccctgcccagagaggccaccatcatcagacacaccagcgtgagaggcctgaagagacagagcgacgagagaaagagagacagagagctgggccagtgcgtgaacggcgacagcagagtggagctgagaagctacgtgagcgagcccgagctggccaccctgagcggcgacatggcccagcccagcctgggcctggtgggccccgagagcagataccagaccctgcccggcagaggcctgagcggcagcaccagcagactgcagcagagcagcaccatcgccccctacgtgaccctgagaagaggcctgaacgccgagagcagcaaggccaccttccccagacccaagagcgccctggagagactgtacagcggcgaccaccagagaggcaagatgagcgccgaggagcagctggagagaatgaagagacaccagaaggccctggtgagagagagaaagagaaccctgggccagggcgagagaaccggcctgcccagcagcagatacctgagcagacccctgcccggcgacctgggcagcgtgtgctag

SEQ ID NO: 312261 - protein, 277 aa, Artificial Sequence
  derived and/or modified sequence
MVVMIVGFLTVLIQGSTHAGGFHNVLEQSTNGSRLHIFDFDVDPLRRHTFWTITVGGTFTWLGIYGVNQSTIQRCISCKTEKHAKLALYFNLLGLWIILVCAVFSGLIMYSHFKDCDPWTSGIISAPDQLMPYFVMEIFATMPGLPGLFVACAFSGTLSTVASSINALATVTFEDFVKSCFPHLSDKLSTWISKGLCRSLIWRDVYLYGCGCICHGRCCAGFPQHSRHVWRTNAGLILPGNRVPFCELEGCTRRSSYWNHLVILGGHWGLHLPCTSL

SEQ ID NO: 312262 - DNA, 834 bp, Artificial Sequence
  derived and/or modified sequence
atggtggtgatgatcgtgggcttcctgaccgtgctgatccagggcagcacccacgccggcggcttccacaacgtgctggagcagagcaccaacggcagcagactgcacatcttcgacttcgacgtggaccccctgagaagacacaccttctggaccatcaccgtgggcggcaccttcacctggctgggcatctacggcgtgaaccagagcaccatccagagatgcatcagctgcaagaccgagaagcacgccaagctggccctgtacttcaacctgctgggcctgtggatcatcctggtgtgcgccgtgttcagcggcctgatcatgtacagccacttcaaggactgcgacccctggaccagcggcatcatcagcgcccccgaccagctgatgccctacttcgtgatggagatcttcgccaccatgcccggcctgcccggcctgttcgtggcctgcgccttcagcggcaccctgagcaccgtggccagcagcatcaacgccctggccaccgtgaccttcgaggacttcgtgaagagctgcttcccccacctgagcgacaagctgagcacctggatcagcaagggcctgtgcagaagcctgatctggagagacgtgtacctgtacggctgcggctgcatctgccacggcagatgctgcgccggcttcccccagcacagcagacacgtgtggagaaccaacgccggcctgatcctgcccggcaacagagtgcccttctgcgagctggagggctgcaccagaagaagcagctactggaaccacctggtgatcctgggcggccactggggcctgcacctgccctgcaccagcctgtag

SEQ ID NO: 312263 - DNA, 834 bp, Artificial Sequence
  derived and/or modified sequence
atggtggtcatgatcgtgggatttctgaccgtactcattcagggaagcacccacgcagggggtttccacaatgtactcgagcagagtacaaacggtagccgtctccatatctttgacttcgatgttgatcccctccggagacacacgttttggaccatcacggtgggcgggaccttcacctggctagggatctacggtgtcaatcagagcaccatacagagatgtatcagctgcaagacagagaagcacgctaagttggcactgtacttcaatttgctaggtctatggattattctggtctgcgccgtgttttcaggtcttatcatgtactcacattttaaggattgtgatccttggactagtggcataatctcagctcctgaccagttaatgccgtacttcgttatggagatttttgcaaccatgccaggcctgcctggtctcttcgtcgcctgcgctttttcgggcactttgagcacagtggccagcagcatcaacgcacttgccactgtcactttcgaggattttgtgaaaagctgctttcctcacctgtcagataaactctctacatggatctccaaaggactatgtaggtcactgatctggcgggatgtatacctctacggatgcggctgtatttgccatggccggtgctgcgcgggcttcccgcaacatagccgacatgtgtggcggaccaacgcaggtctgattctccctgggaacagagtaccgttctgtgagttagagggttgcacccgccgttcctcctattggaaccatcttgtgatcctgggtggccattgggggctccatcttccctgcacctccctctag

SEQ ID NO: 312264 - DNA, 834 bp, Artificial Sequence
  derived and/or modified sequence
atggtggtgatgattgtgggcttcctgactgtgctgatccagggcagcacccatgctgggggcttccacaacgtgctggagcagagcaccaacggcagccggctgcacatctttgattttgatgtggaccccctgcggcggcacaccttctggaccatcaccgtgggcggcaccttcacctggctgggcatctatggagtgaaccagagcaccatccagcgctgcatcagctgcaagacagagaagcacgccaagctggccctgtacttcaacctgctgggcctgtggatcatcctggtgtgtgctgtgttttctggcctcatcatgtacagccacttcaaggactgtgacccctggaccagcggcatcatcagcgccccagaccagctgatgccctactttgtgatggagatctttgccaccatgcctggcctgcccggcctgtttgtggcctgtgccttcagcggcaccctgagcacagtggccagcagcatcaatgccctggccaccgtgacctttgaggactttgtgaagagctgcttcccccacctgagtgacaagctgagcacctggatcagcaagggcctgtgccgcagcctcatctggagagatgtgtacctgtatggctgcggctgcatctgccacggccgctgctgtgccggcttcccccagcacagccgccacgtgtggaggaccaatgccggcctcatcctgcccggcaacagagtgcccttctgtgagctggagggctgcaccaggaggagcagctactggaaccacctggtgatcctgggcggccactggggcctgcacctgccctgcaccagcctgtag

SEQ ID NO: 312265 - DNA, 834 bp, Artificial Sequence
  derived and/or modified sequence
atggtggtgatgatcgtgggcttcctgaccgtgctgatccagggctctactcatgccggtggcttccacaacgtgctggaacagagcaccaatgggagtcgcctccacatatttgacttcgacgtggaccctttgcggaggcataccttctggacaataaccgtcgggggcacgttcacatggttgggcatttacggcgtaaaccagtcgacaattcaaaggtgtattagttgtaaaactgagaaacacgctaagcttgcactgtacttcaacttgctgggcctatggatcatcttagtttgcgctgtctttagtggactgattatgtactcccacttcaaggactgcgatccctggacttctggcatcataagcgctccagaccagttgatgccatatttcgtaatggaaatcttcgctactatgcccggtctgccggggctcttcgtcgcctgcgcttttagcggaacactgtctacagttgcaagcagcatcaatgctttagcaactgtgacattcgaagattttgtgaagtcatgtttccctcacctgtctgataagttgtccacctggatctcaaaaggcttgtgccgcagtctgatctggcgcgacgtttacctatacggctgcggatgtatatgtcacggaaggtgttgtgcgggcttcccacagcacagtaggcacgtttggcggaccaatgccgggcttattttacccggcaacagggtccctttctgcgaattggaggggtgcacacgcagatcctcctattggaaccatctggtcattcttgggggccactggggactgcatctcccgtgtacatctctgtag

SEQ ID NO: 312266 - DNA, 834 bp, Artificial Sequence
  derived and/or modified sequence
atggtagtcatgattgttggcttcttgacagttctcattcaggggtctacacacgcgggaggattccataatgtattggaacagagtaccaacggcagtcgactccatattttcgactttgacgtcgatcccctgcgacggcacacattctggacaatcactgttggtggcacctttacttggctgggcatctacggcgtgaaccagtccaccatacagagatgtatcagctgcaagaccgaaaagcacgccaaactggccctgtactttaatctcttaggcctctggattattctggtttgtgccgtgttcagcggcctaattatgtattcccacttcaaggattgtgatccttggacctccggaataatcagcgctccagaccagctgatgccatactttgtcatggaaatatttgccactatgccgggtctgccagggttgttcgtggcatgcgctttctccggcacactaagtacagttgctagcagcattaacgccctcgccactgtgacattcgaggacttcgtcaagagctgtttcccacacctcagcgataagctgtctacatggatctctaaggggctctgccggtccctgatctggagggacgtgtacctctacggctgtggttgcatttgtcacgggcgatgttgcgcaggctttccccagcattctaggcatgtttggagaacaaacgccggactcattcttcctggaaacagagtccctttctgtgagcttgaggggtgtacccgtcggtcttcttattggaaccacctggtcattctcggcggacactggggactacacctcccgtgcactagcttgtag

SEQ ID NO: 312267 - protein, 625 aa, Artificial Sequence
  derived and/or modified sequence
MAGDRLPRKVMDAKKLASLLRGGPGGPLVIDSRSFVEYNSWHVLSSVNICCSKLVKRRLQQGKVTIAELIQPAARSQVEATEPQDVVVYDQSTRDASVLAADSFLSILLSKLDGCFDSVAILTGGFATFSSCFPGLCEGKPAALLPMSLSQPCLPVPSVGLTRILPHLYLGSQKDVLNKDLMTQNGISYVLNASNSCPKPDFICESRFMRVPINDNYCEKLLPWLDKSIEFIDKAKLSSCQVIVHCLAGISRSATIAIAYIMKTMGMSSDDAYRFVKDRRPSISPNFNFLGQLLEYERSLKLLAALQGDPGTPSGTPEPPPSPAAGAPLPRLPPPTSESAATGNAAAREGGLSAGGEPPAPPTPPATSALQQGLRGLHLSSDRLQDTNRLKRSFSLDIKSAYAPSRRPDGPGPPDPGEAPKLCKLDSPSGAALGLSSPSPDSPDAAPEARPRPRRRPRPPAGSPARSPAHSLGLNFGDAARQTPRHGLSALSAPGLPGPGQPAGPGAWAPPLDSPGTPSPDGPWCFSPEGAQGAGGVLFAPFGRAGAPGPGGGSDLRRREAARAEPRDARTGWPEEPAPETQFKRRSCQMEFEEGMVEGRARGEELAALGKQASFSGSVEVIEVS

SEQ ID NO: 312268 - DNA, 1878 bp, Artificial Sequence
  derived and/or modified sequence
atggccggggataggttacccagaaaggtgatggatgccaagaaactggccagtctactcagaggaggtcccggagggcctcttgtgatcgattctcgttcgttcgtcgagtacaactcctggcacgtgctgtccagtgtaaatatctgttgctctaagcttgtgaaacgtagactgcaacagggaaaagtgactattgccgagcttattcagcctgcagctagaagccaggttgaggcgactgaaccacaggatgtcgtggtgtatgaccagtccactcgggatgcatctgtgctggctgccgatagtttcctctcaatattgttgtccaaattggatggttgtttcgattccgttgctatccttacggggggatttgctactttttcctcttgcttcccagggttgtgcgaggggaagcctgcggcacttctgcccatgtctctgtcacagccttgtctccctgtcccatcagtcggacttacccgaatcctacctcatctgtacctcggcagtcagaaggacgtccttaataaagacctcatgacacagaacggcatctcttacgtgctgaatgcctctaattcctgccccaagcctgacttcatctgtgagagccggttcatgcgggtccctatcaacgataactactgtgaaaagttattgccatggctagacaagtcaattgagttcatagacaaagcaaagctttcatcctgccaggtgatagtccactgtttagccggcataagtcggagcgcgacaatagccatagcttacatcatgaagaccatgggtatgagttccgacgacgcctaccgctttgtaaaggatcgcagacctagtattagccctaacttcaattttctgggccagctactagagtacgaacggtcactgaagctgttggcggccctgcagggagatcctgggacccccagcggaacccccgaaccacctcctagtcccgctgcaggtgcgccattgccaagacttccacctcccacatccgaaagcgcagccacaggtaatgccgcagcccgtgaaggagggctctctgccggcggggagccccctgcaccccccacacccccggcaacatctgccctccagcagggattgaggggattacatctgagtagcgatcggttgcaggacacgaatcggctaaagcgctccttctcgctcgacataaagagtgcttacgctccctcaaggaggcccgatgggcctgggcccccagatccaggcgaagcaccaaagctctgtaagctggactctccgtccggcgctgccctggggctatcctccccttccccagattcgcctgatgccgcccccgaagcgaggcctaggccgcgacgaaggccgcggccccccgccggatcacctgcacggagtcctgcgcacagccttggcctgaacttcggtgatgctgcccgacagacaccccggcacggcctgtcagccttatctgcacctgggctgcccggtcctgggcagcccgctggccccggtgcatgggcccctcctttggattcccctggaaccccttcccccgatggaccctggtgcttctcacccgagggggctcagggagctggtggcgtcttgtttgccccttttggccgcgccggggccccggggcccggaggggggagtgatctacgccggagagaggcagctcgcgctgagcctagggacgctaggactgggtggcccgaggagcctgccccagaaacccagttcaaaaggaggagttgtcagatggaattcgaagagggcatggtggagggcagagcgaggggcgaggaactggctgcactggggaaacaagcttcttttagcggatcagtggaagtaatcgaggtgtcctag

SEQ ID NO: 312269 - DNA, 1878 bp, Artificial Sequence
  derived and/or modified sequence
atggctggagaccggttaccacgaaaggtgatggacgccaagaagctcgcatcgttgctgcgcggcggcccaggtggtccccttgtcatcgattctaggagctttgtggaatataattcttggcacgtacttagctccgtgaacatctgttgcagtaagctagtcaaaagacgactgcaacaaggcaaagtgaccattgccgaactcatccagccagccgcccgctctcaggtagaagctacagagccccaggacgtggtggtgtacgaccagagtacccgggacgccagcgtactcgcggccgacagttttctttcaatcctcttaagcaagcttgacggctgttttgacagtgtcgccatcctgaccgggggttttgccacctttagttcctgctttcccggcctgtgtgaaggtaaacctgcagcccttctccccatgtccctgtctcaaccgtgtctgccagtccccagtgtgggactgaccaggattcttccccacctttacctcgggtcccagaaggacgtgctgaataaggacctgatgacccaaaatggaatcagctatgtgctgaacgcctcaaactcctgtcctaagccagactttatctgcgagagtaggtttatgcgggttcccatcaacgacaattactgtgaaaagctcctgccctggctcgacaagtcaatcgagtttatcgataaggccaaactctcctcgtgtcaggtcatcgttcactgtctggccggcatcagcagaagcgccaccatagcaattgcctatataatgaagaccatggggatgtcttcagatgacgcctataggttcgtaaaggatcggagaccaagtatctcgcctaactttaactttttgggacagctgttggagtacgaaagatccttgaagctgctggcggcgttacaaggagatcccggcaccccgtctgggacaccagagcctcctcccagtccagctgcgggcgcgccactccctagacttcctccccctacgagtgagtccgcggccacaggaaacgccgcagccagggaggggggattgtccgcaggcggcgaaccgccagcgccgccaacaccacccgccacaagcgcactgcaacagggtctgcggggtctgcatttgagctccgaccggctccaggacactaatcgactaaagcgaagtttttcccttgatattaaaagcgcctatgccccctctagaagacccgatggccccggccctcccgacccaggtgaggctcccaaactttgtaaattagactctccatccggagcagccctcgggctctcctccccgagtcccgacagtcccgacgcggccccagaggcccgccccaggccacgaagacgacctagacctccagctggctcaccagcacgatccccggcgcattccctcggactgaatttcggggatgctgccagacagaccccccggcatggtttgtcggcattaagtgctcccggtctgcccggccccggacagccagccggtcccggtgcatgggctcccccactcgattcaccaggaaccccttctcccgacggaccatggtgtttttctcctgagggagcacaaggggccggtggcgtgttgttcgcgcccttcgggagggccggggcgccaggtccaggtggcggctctgatttgcggcgccgggaggcggcgcgggcagagccgcgagatgcccgcaccgggtggcctgaagagcctgctcccgaaactcagtttaaaagaagaagttgtcaaatggaattcgaagaaggaatggtagagggccgcgcccggggcgaagagcttgccgccctcgggaaacaagcctcatttagcggttctgtggaggtgatcgaagtatcatag

SEQ ID NO: 312270 - DNA, 1878 bp, Artificial Sequence
  derived and/or modified sequence
atggccggggaccggctgcccaggaaggtgatggatgccaagaagctggccagcctgctgcggggcggccctgggggccccctggtgattgacagccgcagctttgtggagtacaacagctggcacgtgctgagctctgtgaacatctgctgcagcaagctggtgaagaggcggctgcagcagggcaaggtgaccatcgccgagctgatccagcctgctgcccggagccaggtggaggccacagagccccaggatgtggtggtgtatgaccagagcaccagagatgcctctgtgctggccgctgacagcttcctgagcatcctgctgagcaagctggatggctgctttgacagcgtggccatcctgactggaggctttgccaccttcagcagctgcttccctggcctgtgtgagggcaagccagctgccctgctgcccatgagcctgagccagccctgcctgcctgtgcccagcgtgggcctgacccgcatcctgccccacctgtacctgggcagccagaaggatgtgctgaacaaggacctgatgacccagaatggcatctcctatgtgctgaatgccagcaacagctgccccaagccagacttcatctgtgagagccgcttcatgagggtgcccatcaatgacaactactgtgagaagctgctgccctggctggacaagagcattgagttcatcgacaaggccaagctgagcagctgccaggtgattgtgcactgcctggccggcatcagccgcagcgccaccatcgccatcgcctacatcatgaagaccatgggcatgagcagtgatgatgcctacagatttgtgaaggacagaagacccagcatcagccccaacttcaacttcctgggccagctgctggagtatgaaagaagcctgaagctgctggccgccctgcagggcgaccccggcacccccagcggcaccccagagcccccacccagccctgctgctggggcccccctgccccggctgcccccacccaccagcgagagcgctgccactggaaatgctgctgcccgggagggcggcctgtctgctggaggagagcccccagccccacccaccccaccagccaccagcgccctgcagcagggcctgcggggcctgcacctgagcagtgaccggctgcaggacaccaaccggctgaagaggagcttcagcctggacatcaagagcgcctatgcccccagccggcggccagatggccctggccccccagaccccggggaggcccccaagctgtgcaagctggacagccccagcggggccgccctgggcctgagcagccccagcccagacagcccagatgctgcccctgaggcccggccccggcccaggagaagacccaggcctcctgctggcagccctgcccggagccctgcccacagcctgggcctgaactttggagatgctgcccggcagacccccaggcatggcctgagcgccctgagcgcccctggcctgcccggccctggccagcctgctggccctggggcctgggccccacccctggacagccctggcacccccagcccagatggcccctggtgcttcagccctgagggcgcccagggcgctgggggcgtgctgtttgcccccttcggccgggccggggcccctggccctgggggcggcagtgacctgcggcggcgggaggccgcccgggcagagcccagagatgccaggacaggctggccagaggagcccgcccctgagacccagttcaagagaagaagctgccagatggagtttgaggagggcatggtggagggccgggcccggggggaggagctggccgccctgggcaagcaggccagcttcagcggctctgtggaggtgattgaggtgtcctag

SEQ ID NO: 312271 - DNA, 1878 bp, Artificial Sequence
  derived and/or modified sequence
atggccggcgaccggctgccccggaaggtgatggacgccaagaagcttgcctcactgctccgcggtggcccaggcggaccgttggttatcgactctaggtctttcgttgagtataattcatggcacgttctctcaagcgtgaacatttgttgttcaaagctggtcaagaggcgtctccaacagggcaaagtaaccattgccgaattaatccagccagccgccagatcacaggtggaagccaccgagccccaggacgttgtcgtctacgatcagagcactcgggatgcctccgtgctggcagctgacagcttcctctccatcttgctatctaagctggatgggtgttttgattcagtcgccatactaacagggggctttgcaaccttcagctcatgcttccctgggctctgtgaaggtaaacccgctgccctgctccctatgagtctcagtcagccctgcctaccagtgccgtctgtggggctcacccgcattctcccgcacctctaccttggcagtcagaaggacgtcctgaataaggatctgatgacccaaaacggcatctcctacgtgctcaatgcctctaactcctgtccaaagcccgacttcatctgcgagagcaggtttatgcgagtgcctattaatgacaattattgcgaaaaactacttccatggctcgacaagagtattgagtttattgataaagcaaagttaagctcctgtcaggtgatcgtgcactgcctggccggcatttctcgcagcgccaccattgccattgcctatattatgaagaccatgggcatgagcagcgatgatgcatatcgtttcgtcaaagataggcggccatcaatctccccgaacttcaacttcctcggtcagttgctggagtacgagagaagtttgaagctgctagctgccctgcagggggatcctggcactcctagcggcacccccgaacctccgccttcacctgctgccggggctccactgccaaggctccctccacctacctctgagtccgctgctaccgggaacgcagccgctcgtgaggggggactcagcgccggcggggaacctccggcaccaccaacacctccggccacttccgccctccagcagggattgcgcggtctgcacctgagcagcgatagactgcaagatactaacagactcaaaagatcctttagcctcgatattaaatccgcttatgcccctagcaggcgcccagatgggcctggtccccccgatccaggcgaggcaccgaaattgtgcaagcttgattctccaagcggcgccgcccttggtctctccagcccatctcctgattctccagatgctgccccagaggcccgcccccgcccgagaagaagacctagaccgcctgccggcagccctgcgagatcaccagcacattccctaggcctcaacttcggagacgccgcccggcagaccccaaggcatggactcagcgccttatccgccccagggctccctggacccggccagcctgctgggccaggcgcatgggctcctccactagattcgcccggaactcccagccccgatggcccgtggtgcttctcccctgaaggagcccagggagccggcggggtccttttcgcaccgtttggacgggcaggggctcccggaccggggggaggctcagatctgaggcgccgagaggctgctagggctgagcctcgggatgctaggacaggctggccggaggagcctgcccctgagacacaatttaaacggagaagctgtcagatggaattcgaggagggaatggtcgaaggacgcgccagaggggaagaactcgccgccttaggaaagcaggcgtcctttagtggctcggttgaggttatcgaggttagttag

SEQ ID NO: 312272 - DNA, 1878 bp, Artificial Sequence
  derived and/or modified sequence
atggccggcgaccggctgccccggaaggtgatggacgccaagaagttggcatccttgttgcgtgggggccccggcggaccccttgtgatcgatagccgctcatttgttgaatacaatagttggcatgtactgagttctgtgaacatttgctgttccaaactggtgaagcgcaggctacagcagggaaaggtcactattgcagagttgatacagccagcagcccgatcacaggtggaggcaactgaaccccaggacgtcgtagtgtatgaccagagtactcgggacgctagtgtgcttgcagctgactcgttcttgtcaatcctgctctccaaactggatggttgcttcgattctgttgctattctgaccgggggctttgctacctttagcagctgctttccgggcctgtgcgaaggcaaacctgccgccttgctgcccatgagcctctctcagccctgcttaccggtcccctccgtggggcttacacggattctgccccatttatacctcggctcccagaaggatgtgctcaataaagatttaatgactcagaacggcattagttatgtgctgaacgcctcgaatagttgccccaaacctgatttcatctgcgagtctcgatttatgagggtgcccataaacgacaactactgtgaaaaactgctgccatggctggacaagagtatcgaatttatcgacaaggcaaagttgtcatcctgccaggtaattgtgcactgtctggccggaatctctcgctctgccacaatcgccatcgcttacatcatgaaaacaatgggcatgagttcagacgacgcttacaggttcgtcaaggaccggcgaccgtccataagccctaacttcaattttctgggccagttattagaatacgaacgttccctcaaactgctggcagcactacaaggagatccaggcacgccctctgggacaccggagcctccaccctccccagcagcgggggctcctctgccgcggctaccgcctccgacatctgaatccgctgccacaggcaacgctgcagcgcgcgaagggggcctgtccgcaggtggggaacctcctgcgccacctacccccccagcaacctcagccctgcaacagggcctgagaggtttacatcttagtagtgaccgtctgcaggacaccaataggctgaaaaggagcttctctctcgatatcaaatctgcctacgccccctctaggcggcccgacggaccaggcccacctgaccccggtgaggcccccaagctgtgcaagttagactctcctagtggcgccgccctgggcctttcaagtccgtcgcctgactcgcccgacgccgcacccgaagcacggccacgccccagacgacgcccacgccccccagccggatcacctgctagaagccccgctcacagtctagggttgaacttcggtgatgcagcaagacaaacacccagacacggcctcagtgctctgagtgctccaggcctgcctggcccaggtcagccagcaggccccggggcctgggctcctcctcttgacagcccaggaacaccctctcccgacggtccctggtgcttttctccggagggcgcccagggggccgggggtgtgctgtttgccccctttggtagagctggagcacccggacctggcggggggtctgacctgcggcgtagggaggctgcccgagctgagccgcgagacgccaggaccggctggcccgaagaacctgctcccgaaacacagttcaagaggcggtcatgccagatggagttcgaagagggcatggtggagggacgggccagaggcgaggaattagccgcattgggtaagcaggcttctttcagcgggtctgtggaggtcatcgaagtatcttag

SEQ ID NO: 312273 - DNA, 1878 bp, Artificial Sequence
  derived and/or modified sequence
atggcaggtgaccgcctccccaggaaggtcatggatgccaagaagttggcgagcctcctgcggggaggacctggaggccctctggtgatcgactcacgttccttcgtagaatataactcttggcacgtcctgtcctctgtgaacatctgctgtagcaaactggtgaaaaggagactgcagcagggtaaggtaaccattgccgagctgattcagccagccgcaagatcccaggtcgaagctaccgaacctcaggacgtggttgtttatgaccaaagtaccagggacgccagcgtactggccgctgattccttcctgagtatactgctgagcaagctcgacgggtgctttgactctgtggccattctcactggcggattcgcgacattttcctcttgtttccccggtctctgcgaaggtaaaccagccgctcttctgccgatgtctctcagtcagccatgtctgcctgtcccctcggtggggctgaccaggattctcccgcacttatatctggggtcgcaaaaagacgtgttgaacaaggatctgatgactcaaaatggtattagttacgtgctgaacgcctcaaactcgtgccctaagcctgacttcatatgtgaaagccgctttatgcgcgttccaatcaacgataattactgtgaaaaactcttgccctggcttgacaagagcatagaatttattgacaaagccaaactatcttcttgtcaagtgatcgtgcattgccttgccggaattagccgtagcgccacaatcgccattgcctatattatgaagacaatgggcatgtcttctgatgatgcataccggtttgtgaaagaccgacggccttccattagtcctaatttcaatttccttggtcagcttctggagtacgagcggtctctcaagctgctggcagcgctgcagggggaccccggaactccaagtggcacgccagaaccgcctccaagtccagctgccggagcaccactgcctaggctacctccacccaccagcgaatctgctgctacaggaaatgccgctgcaagggaaggcggacttagtgctgggggagaaccacctgccccacctaccccccctgcgacttcagctcttcaacaaggtctgcgcggtctgcatctcagtagcgacagacttcaggacaccaataggctcaagcgatccttttcccttgacataaagagcgcttacgcaccctcccgtcggcctgacggaccgggtccccctgatccaggcgaagccccaaaactctgcaaactggactctccgagtggtgcggcattgggcctgagtagtcctagccctgatagtcccgacgcggctcccgaagctcgtccgcgacccaggagacgaccacgtccccctgccggaagcccagcgcgatcccctgcgcactcactgggcctaaacttcggcgacgccgctcgtcagacaccgaggcacggtctctctgcactgtctgctcccggactgccaggtccaggccagccggctggaccgggtgcttgggcaccccctttggacagccctggcacccccagtccggatggcccatggtgtttttcaccagagggcgcacagggagcaggtggtgtcctgttcgcacccttcggtagagccggtgccccaggaccgggaggcggatcagacctacgtaggcgggaagccgctcgagccgaaccgagagatgctcgaaccggctggcctgaagagcctgcccctgaaacccagttcaagcggcgttcgtgccagatggagttcgaggaagggatggtagaagggagagcccgaggtgaagaactggctgccctgggaaaacaggccagtttttcgggctcggttgaagttatcgaagtgtcttag

SEQ ID NO: 312274 - DNA, 1878 bp, Artificial Sequence
  derived and/or modified sequence
atggcaggtgatcgcctgccgagaaaggttatggatgctaaaaaattagcctccctactgagggggggaccaggcggtccgctcgttattgatagtaggagttttgtggaatacaattcctggcacgtgctttccagtgtcaatatctgttgctccaagctcgtcaaacgccgtctccagcagggcaaggttaccatagcggaacttatacaacccgctgccagaagccaggtcgaggccacggagccgcaagacgtggttgtgtacgatcagagcaccagggatgccagcgtcctggccgctgactcctttctgagtattttactctctaagttggatggctgcttcgactctgtggccattctaactggcggttttgctacattttcatcctgcttccctggactgtgcgagggcaagccagcagctctgctgcctatgtcattgtcccagccatgtctgccggtcccctccgtcgggctcacccggatcctgccacacttatacctgggatcacaaaaagacgtactgaacaaggatctcatgacccaaaatggcatttcttatgtgctcaatgccagcaactcctgtccaaaacctgattttatctgcgagtccagattcatgcgcgtgcctatcaatgataactattgcgagaagctgctgccctggcttgacaagagcatcgagttcatcgacaaagcaaagctgagcagctgccaagtaattgtgcactgcttagcaggaatctccagatctgccacaatagcaatcgcttacatcatgaaaactatgggaatgagctctgacgacgcctataggttcgttaaggatcggaggccttcaataagcccaaactttaattttctcggccaactgctggagtacgagcggagcctgaagctgctggctgctttgcagggagaccccggaaccccttctggcacccctgagccaccaccaagccctgccgcaggcgctccgctgcccagactgcctccacctactagtgaatccgcagcaaccggcaacgcagccgcacgagaggggggactgtctgcaggcggtgagccaccagccccacccaccccgcctgcaacgtcggcattgcagcagggactccggggactacatttgtcgagcgatcggctacaggatactaaccgactgaaacggtccttttctctggatattaagtccgcttacgcgcctagccgaagacccgacggaccaggtcccccagatccaggagaagccccaaagctgtgcaaactcgattctccttctggggctgcacttgggctttctagcccttccccagacagcccggacgccgctcctgaagcaagaccaagaccaaggcgcagacccagacccccagccggatcacctgctcgcagcccggcacactccttgggtctcaattttggagacgccgctagacagacccctcggcatggtctgagcgctctctcagcgccaggcttaccaggtcctggacagccggctgggccaggggcatgggcacccccactcgatagcccaggtaccccatccccggatggaccatggtgcttcagccccgagggcgcacaaggcgcaggaggggtgctattcgccccattcggaagagctggggcacccggaccaggtggaggcagtgacctcagacgccgagaagctgccagggctgagcccagagatgcccgtaccggctggccggaagaacccgctcctgaaacccagtttaagcgcagatcctgccagatggagttcgaggagggaatggtcgaaggaagggctaggggcgaggagctcgctgctctcgggaaacaagccagcttttccggcagtgtggaagtaatcgaggtgtcctag

SEQ ID NO: 312275 - DNA, 1878 bp, Artificial Sequence
  derived and/or modified sequence
atggccggcgacagactgcccagaaaggtgatggacgccaagaagctggccagcctgctgagaggcggccccggcggccccctggtgatcgacagcagaagcttcgtggagtacaacagctggcacgtgctgagcagcgtgaacatctgctgcagcaagctggtgaagagaagactgcagcagggcaaggtgaccatcgccgagctgatccagcccgccgccagaagccaggtggaggccaccgagccccaggacgtggtggtgtacgaccagagcaccagagacgccagcgtgctggccgccgacagcttcctgagcatcctgctgagcaagctggacggctgcttcgacagcgtggccatcctgaccggcggcttcgccaccttcagcagctgcttccccggcctgtgcgagggcaagcccgccgccctgctgcccatgagcctgagccagccctgcctgcccgtgcccagcgtgggcctgaccagaatcctgccccacctgtacctgggcagccagaaggacgtgctgaacaaggacctgatgacccagaacggcatcagctacgtgctgaacgccagcaacagctgccccaagcccgacttcatctgcgagagcagattcatgagagtgcccatcaacgacaactactgcgagaagctgctgccctggctggacaagagcatcgagttcatcgacaaggccaagctgagcagctgccaggtgatcgtgcactgcctggccggcatcagcagaagcgccaccatcgccatcgcctacatcatgaagaccatgggcatgagcagcgacgacgcctacagattcgtgaaggacagaagacccagcatcagccccaacttcaacttcctgggccagctgctggagtacgagagaagcctgaagctgctggccgccctgcagggcgaccccggcacccccagcggcacccccgagcccccccccagccccgccgccggcgcccccctgcccagactgcccccccccaccagcgagagcgccgccaccggcaacgccgccgccagagagggcggcctgagcgccggcggcgagccccccgccccccccaccccccccgccaccagcgccctgcagcagggcctgagaggcctgcacctgagcagcgacagactgcaggacaccaacagactgaagagaagcttcagcctggacatcaagagcgcctacgcccccagcagaagacccgacggccccggcccccccgaccccggcgaggcccccaagctgtgcaagctggacagccccagcggcgccgccctgggcctgagcagccccagccccgacagccccgacgccgcccccgaggccagacccagacccagaagaagacccagaccccccgccggcagccccgccagaagccccgcccacagcctgggcctgaacttcggcgacgccgccagacagacccccagacacggcctgagcgccctgagcgcccccggcctgcccggccccggccagcccgccggccccggcgcctgggccccccccctggacagccccggcacccccagccccgacggcccctggtgcttcagccccgagggcgcccagggcgccggcggcgtgctgttcgcccccttcggcagagccggcgcccccggccccggcggcggcagcgacctgagaagaagagaggccgccagagccgagcccagagacgccagaaccggctggcccgaggagcccgcccccgagacccagttcaagagaagaagctgccagatggagttcgaggagggcatggtggagggcagagccagaggcgaggagctggccgccctgggcaagcaggccagcttcagcggcagcgtggaggtgatcgaggtgagctag

SEQ ID NO: 312276 - DNA, 4455 bp, Artificial Sequence
  derived and/or modified sequence
aggtccagcaccatgtgctaggtcactcccagcgcgaggccacacctgggccgtcggagcagcccctcctcacttcaggggtcaccctccccagcacccattgccccaccatggctggggaccggctcccgaggaaggtgatggatgccaagaagctggccagcctgctgcggggcgggcctggggggccgctggtcatcgacagccgctccttcgtggagtacaacagctggcatgtgctcagctccgtcaacatctgctgctccaagctggtgaagcggcggctgcagcagggcaaggtgaccattgcggagctcatccagccggctgcacgcagccaggtggaggctacggagccacaggacgtggtggtctatgaccagagcacgcgggacgccagcgtgctggccgcagacagcttcctctccatcctgctgagcaagctggacggctgcttcgacagcgtggccatcctcactgggggcttcgccaccttctcctcctgcttccccggcctctgcgagggcaagcctgctgccctgctacccatgagcctctcccagccctgcctgcctgtgcccagcgtgggcctgacccgcatcctgcctcacctctacctgggctcgcagaaggacgtcctaaacaaggatctgatgacgcaaaatggaataagctacgtcctcaacgccagcaactcctgccccaagcctgacttcatctgcgagagccgcttcatgcgggtccccatcaacgacaactactgtgaaaaactgctgccctggctggacaagtccatcgagttcatcgataaagccaagctctccagctgccaagtcatcgtccactgtctggctggcatctcccgctctgccaccatcgccatcgcctacatcatgaagaccatgggcatgtcctccgacgacgcctacaggttcgtgaaggacaggcgcccgtccatctcgcccaacttcaacttcctgggccagctgctggagtacgagcgcagcctgaagctgctggccgccctgcagggcgacccgggcaccccctcagggacgccggagcctccgcccagtcctgccgccggggccccgctgccacggctgccaccacctacctcagagagcgctgccacagggaatgcggctgccagggagggcggcctgagcgcgggcggggagccccccgcgccccccacgcccccggcgaccagcgcactgcagcagggcctgcgcggcctgcacctctcctcggaccgcctgcaggacactaaccgcctcaagcgctccttctccctggacatcaagtctgcctacgcccctagcaggcggcccgacggccccgggccccccgaccccggcgaggccccgaagctctgcaagctggacagcccgtcgggggccgcgctgggcctgtcctcgcccagcccggacagcccggacgccgcgcctgaggcgcgcccacggccccgccggcggccccggccccccgccggctcccccgcgcgctcccccgcgcacagcctcggcctgaacttcggcgatgcggcccggcagactccgcggcacggcctctcggccctgtcggcgcccgggctgcccggccctggccagccggccggccccggggcctgggcaccgccgctcgactccccaggcacgccgtcgcccgacgggccctggtgcttcagccccgagggcgcacagggggcgggcggggtgctgtttgcgcccttcggccgggcgggcgccccgggaccaggcggcggcagcgacctgcggcggcgggaggcagcgagggctgagccccgggacgcgcggaccggctggcccgaggagccggccccggagacgcagttcaagcgccgcagctgccagatggagttcgaggagggcatggtggaggggcgcgcgcgcggcgaggagctggccgccctgggcaagcaggcgagcttctcgggcagcgtggaggtcatcgaggtgtcctgacccctccgctgccctcggccccgccgcccgcagccaggcccgttataaatgtatattatatataatgcaaagaaaggtaaatggttttactgggatttttatcgagaagtaaatatttcgattttttatttatttaagctgttcattctggcaatgatttggcaacagtgcgggtggtcctcgagctctatttttactgtctggtatttaaactgaaacatacgtttctaagcaatacgaggccaccttcagtcgcaagctgggtgccaggcctggggcccctcccagttcccccgccccaggaaacactgctgacctttgcaaaggctgccgagctttcgtgcactttttacataacaaaaaggtgaaaaaaaggaaaaaaaaacttctttgccacaaactgagccgcagaaccccccttctccccccacccacctcccctgctccctcccttctctgcgccggcctagggctctgcaccaaagccataggatggaggagcaggagctggtgtgccccggagaggtgcggccagccctccatcagctccaggcaccaaatcttggtggcaaggagggcaccccgctgcccgttgccccagagctgttctctggcaggggaggacaggcattgggcttcatggtgccagggtgttcagaggggctgagaaatagaacagtgtgtgtaggggcttcgggcagggggttctggaacgtcagatgaggtgcagcccaggggaggacagaggtgttagtgcccccaactcctgccagagccccagtccagccacagagtggctcagaaaggccattcctagagggctgcggccctcccttctcccttgcccatgcccccagagctgcctgccgggcagggtggcaccattgcaggagaggagcttggcctccgggggtcaggcaggaggcgcctggctagccagtgctggctccactgggcaggaagccctggacccccaggtatgaggagggggtggtcttagggttctgttccaggtctgccccgcccccctcccagccatgccccaggcagaacttggaattcaggtgtgcacctgcaggctgaggggctctgtgagcaggtgctgctcacacagggagttcaggcgccagccaagcccctgtgctgctgggataggcctgcttcacttagggagcactgcctcaagacaggtaaagccccctcgtttgcccccacccccatggggccgctcaggagagaaactcccattcacccctttcccagggtgctctctctctaggtggcatgccagcccccaaacacaagtggcttttgggcccaggtgggtcagcctgctgcccctgccccataccccctcgggccattgggacccctgcccttcagatgtcctagggtctaggagtggggccagtcactgtgggaagaggccaggggcttggccggagaggcagcccagggcaggacccagtcctgagtcctggagcagggccagggaggcgcccatcccgccccagccagccgccctctctgctgtttcttctatttgttcttcttttcacccacagctctgtgttcctgtcatccctcctttcagcaaaagtcctgttcccgttccctctgtccccacccactcctgttcccccaagaaaataagctatcgttgtatttgcaatctatggattagaggtttaagtatttattattattggttaattattattaattatgtaaatttgcctcccatatgtctgttgcgttgggtttctgaggagaccctgggtgaggaggatgcactggcttcccgcttctcgccccccacccctgtgctgtccgggagacagtggtctggggccactggttgggcccccttctcccttcccccttccccttgtcccttctgcaggccgttgaggggggctgtctgtctcagtctgtctctgctcccactcttgaggcactggttaccgcaaagtgagcagccagcaggggggcgaaggtcctgtgttggccactgcctcctccagtgctgcaggaggcgggctgaggccccacctggtggctttcacctgacccagccctgagtcctctccaagcctctctccggcccctcccacctggccactgcctcctccagtgctgcgggaggcgggccagggccccacctggtggctttcacctgacccagccctgagtcctctccaagcctctctccggcccctcccacctggccactgcctggcattgggatcgccccaaaatggacccggcccctcctgttatttgctgggaagtccagcggaggagagggtgcaggtcccccgctgagcctccagtctctgtagactgggctgccggcccttcagccccccttggagcccctcccgccacagccgcaccttctgctcccggcccctccctttgtatttggagacaatgtgttgtaataaagcttaaagtggatgttttc

SEQ ID NO: 312277 - DNA, 4480 bp, Artificial Sequence
  derived and/or modified sequence
ccgaggcgagcgcgagcgaggtccagcaccatgtgctaggtcactcccagcgcgaggccacacctgggccgtcggagcagcccctcctcacttcaggggtcaccctccccagcacccattgccccaccatggctggggaccggctcccgaggaaggtgatggatgccaagaagctggccagcctgctgcggggcgggcctggggggccgctggtcatcgacagccgctccttcgtggagtacaacagctggcatgtgctcagctccgtcaacatctgctgctccaagctggtgaagcggcggctgcagcagggcaaggtgaccattgcggagctcatccagccggctgcacgcagccaggtggaggctacggagccacaggacgtggtggtctatgaccagagcacgcgggacgccagcgtgctggccgcagacagcttcctctccatcctgctgagcaagctggacggctgcttcgacagcgtggccatcctcactgggggcttcgccaccttctcctcctgcttccccggcctctgcgagggcaagcctgctgccctgctacccatgagcctctcccagccctgcctgcctgtgcccagcgtgggcctgacccgcatcctgcctcacctctacctgggctcgcagaaggacgtcctaaacaaggatctgatgacgcaaaatggaataagctacgtcctcaacgccagcaactcctgccccaagcctgacttcatctgcgagagccgcttcatgcgggtccccatcaacgacaactactgtgaaaaactgctgccctggctggacaagtccatcgagttcatcgataaagccaagctctccagctgccaagtcatcgtccactgtctggctggcatctcccgctctgccaccatcgccatcgcctacatcatgaagaccatgggcatgtcctccgacgacgcctacaggttcgtgaaggacaggcgcccgtccatctcgcccaacttcaacttcctgggccagctgctggagtacgagcgcagcctgaagctgctggccgccctgcagggcgacccgggcaccccctcagggacgccggagcctccgcccagtcctgccgccggggccccgctgccacggctgccaccacctacctcagagagcgctgccacagggaatgcggctgccagggagggcggcctgagcgcgggcggggagccccccgcgccccccacgcccccggcgaccagcgcactgcagcagggcctgcgcggcctgcacctctcctcggaccgcctgcaggacactaaccgcctcaagcgctccttctccctggacatcaagtctgcctacgcccctagcaggcggcccgacggccccgggccccccgaccccggcgaggccccgaagctctgcaagctggacagcccgtcgggggccgcgctgggcctgtcctcgcccagcccggacagcccggacgccgcgcctgaggcgcgcccacggccccgccggcggccccggccccccgccggctcccccgcgcgctcccccgcgcacagcctcggcctgaacttcggcgatgcggcccggcagactccgcggcacggcctctcggccctgtcggcgcccgggctgcccggccctggccagccggccggccccggggcctgggcaccgccgctcgactccccaggcacgccgtcgcccgacgggccctggtgcttcagccccgagggcgcacagggggcgggcggggtgctgtttgcgcccttcggccgggcgggcgccccgggaccaggcggcggcagcgacctgcggcggcgggaggcagcgagggctgagccccgggacgcgcggaccggctggcccgaggagccggccccggagacgcagttcaagcgccgcagctgccagatggagttcgaggagggcatggtggaggggcgcgcgcgcggcgaggagctggccgccctgggcaagcaggcgagcttctcgggcagcgtggaggtcatcgaggtgtcctgacccctccgctgccctcggccccgccgcccgcagccaggcccgttataaatgtatattatatataatgcaaagaaaggtaaatggttttactgggatttttatcgagaagtaaatatttcgattttttatttatttaagctgttcattctggcaatgatttggcaacagtgcgggtggtcctcgagctctatttttactgtctggtatttaaactgaaacatacgtttctaagcaatacgaggccaccttcagtcgcaagctgggtgccaggcctggggcccctcccagttcccccgccccaggaaacactgctgacctttgcaaaggctgccgagctttcgtgcactttttacataacaaaaaggtgaaaaaaaggaaaaaaaaacttctttgccacaaactgagccgcagaaccccccttctccccccacccacctcccctgctccctcccttctctgcgccggcctagggctctgcaccaaagccataggatggaggagcaggagctggtgtgccccggagaggtgcggccagccctccatcagctccaggcaccaaatcttggtggcaaggagggcaccccgctgcccgttgccccagagctgttctctggcaggggaggacaggcattgggcttcatggtgccagggtgttcagaggggctgagaaatagaacagtgtgtgtaggggcttcgggcagggggttctggaacgtcagatgaggtgcagcccaggggaggacagaggtgttagtgcccccaactcctgccagagccccagtccagccacagagtggctcagaaaggccattcctagagggctgcggccctcccttctcccttgcccatgcccccagagctgcctgccgggcagggtggcaccattgcaggagaggagcttggcctccgggggtcaggcaggaggcgcctggctagccagtgctggctccactgggcaggaagccctggacccccaggtatgaggagggggtggtcttagggttctgttccaggtctgccccgcccccctcccagccatgccccaggcagaacttggaattcaggtgtgcacctgcaggctgaggggctctgtgagcaggtgctgctcacacagggagttcaggcgccagccaagcccctgtgctgctgggataggcctgcttcacttagggagcactgcctcaagacaggtaaagccccctcgtttgcccccacccccatggggccgctcaggagagaaactcccattcacccctttcccagggtgctctctctctaggtggcatgccagcccccaaacacaagtggcttttgggcccaggtgggtcagcctgctgcccctgccccataccccctcgggccattgggacccctgcccttcagatgtcctagggtctaggagtggggccagtcactgtgggaagaggccaggggcttggccggagaggcagcccagggcaggacccagtcctgagtcctggagcagggccagggaggcgcccatcccgccccagccagccgccctctctgctgtttcttctatttgttcttcttttcacccacagctctgtgttcctgtcatccctcctttcagcaaaagtcctgttcccgttccctctgtccccacccactcctgttcccccaagaaaataagctatcgttgtatttgcaatctatggattagaggtttaagtatttattattattggttaattattattaattatgtaaatttgcctcccatatgtctgttgcgttgggtttctgaggagaccctgggtgaggaggatgcactggcttcccgcttctcgccccccacccctgtgctgtccgggagacagtggtctggggccactggttgggcccccttctcccttcccccttccccttgtcccttctgcaggccgttgaggggggctgtctgtctcagtctgtctctgctcccactcttgaggcactggttaccgcaaagtgagcagccagcaggggggcgaaggtcctgtgttggccactgcctcctccagtgctgcaggaggcgggctgaggccccacctggtggctttcacctgacccagccctgagtcctctccaagcctctctccggcccctcccacctggccactgcctcctccagtgctgcgggaggcgggccagggccccacctggtggctttcacctgacccagccctgagtcctctccaagcctctctccggcccctcccacctggccactgcctggcattgggatcgccccaaaatggacccggcccctcctgttatttgctgggaagtccagcggaggagagggtgcaggtcccccgctgagcctccagtctctgtagactgggctgccggcccttcagccccccttggagcccctcccgccacagccgcaccttctgctcccggcccctccctttgtatttggagacaatgtgttgtaataaagcttaaagtggatgttttccccacga

SEQ ID NO: 312278 - DNA, 580 bp, Artificial Sequence
  derived and/or modified sequence
gacggcccggatcccggttaccggcccctcgctcgctgctcgccagcccagactcggccctggcagtggcggctggcgattcggaccgatccgacctgggcggaggtggcccgcgccccgcggcatgagccggtgaccaagctcggggccgagcgggaggcagccgtggccgagagctactcagagttgctgtttctccttgagatgcttttggagtgtgaggaagaggctgtctgtgtcattatgtgtgcgtcggtcaagtataatatccggggtcctgccctcatcccaagaatgaagaccaagcaccgaatctactatatcaccctcttctccattgtcctcctgggcctcattgccactggcatgtttcagttttggccccattctatcgagtcctcaaatgactggaatgtagagaagcgcagcatccgtgatgtgccggttgttaggctgccagccgacagtcccatcccagagcggggggatctcagttgcagaatgcacacgtgttttgatgtctatcgctgtggcttcaacccaaagaacaaaatcaaggtgtatatctatgctctgaaaa

SEQ ID NO: 312279 - protein, 718 aa, Artificial Sequence
  derived and/or modified sequence
MCASVKYNIRGPALIPRMKTKHRIYYITLFSIVLLGLIATGMFQFWPHSIESSNDWNVEKRSIRDVPVVRLPADSPIPERGDLSCRMHTCFDVYRCGFNPKNKIKVYIYALKKYVDDFGVSVSNTISREYNELLMAISDSDYYTDDINRACLFVPSIDVLNQNTLRIKETAQAMAQLSRWDRGTNHLLFNMLPGGPPDYNTALDVPRDRALLAGGGFSTWTYRQGYDVSIPVYSPLSAEVDLPEKGPGPRQYFLLSSQVGLHPEYREDLEALQVKHGESVLVLDKCTNLSEGVLSVRKRCHKHQVFDYPQVLQEATFCVVLRGARLGQAVLSDVLQAGCVPVVIADSYILPFSEVLDWKRASVVVPEEKMSDVYSILQSIPQRQIEEMQRQARWFWEAYFQSIKAIALATLQIINDRIYPYAAISYEEWNDPPAVKWGSVSNPLFLPLIPPQSQGFTAIVLTYDRVESLFRVITEVSKVPSLSKLLVVWNNQNKNPPEDSLWPKIRVPLKVVRTAENKLSNRFFPYDEIETEAVLAIDDDIIMLTSDELQFGYEVWREFPDRLVGYPGRLHLWDHEMNKWKYESEWTNEVSMVLTGAAFYHKYFNYLYTYKMPGDIKNWVDAHMNCEDIAMNFLVANVTGKAVIKVTPRKKFKCPECTAIDGLSLDQTHMVERSECINKFASVFGTMPLKVVEHRADPVLYKDDFPEKLKSFPNIGSL

SEQ ID NO: 312280 - protein, 112 aa, Artificial Sequence
  derived and/or modified sequence
MCASVKYNIRGPALIPRMKTKHRIYYITLFSIVLLGLIATGMFQFWPHSIESSNDWNVEKRSIRDVPVVRLPADSPIPERGDLSCRMHTCFDVYRCGFNPKNKIKVYIYALK

SEQ ID NO: 312281 - protein, 181 aa, Artificial Sequence
  derived and/or modified sequence
MCTALSPKVRSGPGLSDMHQYSQWLASRHEANLLPMKEDLALWLTNLLGKEITAETFMEKLDNGALLCQLAETMQEKFKESMDANKPTKNLPLKKIPCKTSAPSGSFFARDNTANFLSWCRDLGVDETCLFESEGLVLHKQPREVCLCLLELGRIAARYGVEPPGLIKLEKEIEQEETLSA

SEQ ID NO: 312282 - protein, 205 aa, Artificial Sequence
  derived and/or modified sequence
MCTALSPKVRSGPGLSDMHQYSQWLASRHEANLLPMKEDLALWLTNLLGKEITAETFMEKLDNGALLCQLAETMQEKFKESMDANKPTKNLPLKKIPCKTSAPSGSFFARDNTANFLSWCRDLGVDETCLFESEGLVLHKQPREVCLCLLELGRIAARYGVEPPGLIKLEKEIEQEETLSAPSPSPSPSSKSSGKKSTGNLLDDA

SEQ ID NO: 312283 - protein, 136 aa, Artificial Sequence
  derived and/or modified sequence
MCTALSPKVRSGPGLSDMHQYSQWLASRHEANLLPMKEDLALWLTNLLGKEITAETFMEKLDNGALLCQLAETMQEKFKESMDANKPTKNLPLKKIPCKTSAPSGSFFARDNTANFLSWCRDLGVDETCLFESEGL

SEQ ID NO: 312284 - protein, 155 aa, Artificial Sequence
  derived and/or modified sequence
MCTALSPKVRSGPGLSDMHQYSQWLASRHEANLLPMKEDLALWLTNLLGKEITAETFMEKLDNGALLCQLAETMQEKFKESMDANKPTKNLPLKKIPCKTSAPSGSFFARDNTANFLSWCRDLGVDETCLFESEGLVLHKQPREVCLCLLELGRI

SEQ ID NO: 312285 - DNA, 546 bp, Artificial Sequence
  derived and/or modified sequence
atgtgcacagccttgtcgcctaaagtaagaagcgggcccgggttgtccgatatgcatcaatactcacaatggctggcttcccgtcacgaggccaatctgctccccatgaaggaagatctggccctatggctgaccaatctcctcggcaaggaaattactgccgagactttcatggagaagctggataacggcgccctgctttgccagctcgcagagactatgcaggaaaagtttaaggagtccatggacgccaataagccgactaaaaatctgccactcaagaagattccttgtaagacaagcgccccatctggatctttcttcgcccgggataacacagccaactttctgagctggtgtcgtgatctcggcgtcgacgaaacttgccttttcgaaagcgagggcctcgtgctgcataaacagcctagggaggtgtgcctctgtctacttgagctggggcgtatagccgcaaggtacggcgtggagccccccggcctgattaaactagaaaaggagatcgaacaggaagagaccctttctgcctag

SEQ ID NO: 312286 - DNA, 618 bp, Artificial Sequence
  derived and/or modified sequence
atgtgcacagcactgtcacctaaggtgcgcagtggcccaggtctctcggacatgcaccagtattcacagtggctggcaagtagacatgaggccaatctgctgcccatgaaggaggacttagccttatggcttactaacctcctgggcaaggagattacagccgaaacctttatggagaagcttgacaatggtgccctgctgtgccagctggccgaaaccatgcaggagaagttcaaagagtcaatggatgctaacaaacctaccaagaaccttcccctcaagaagatcccatgtaaaacctctgccccatccggaagtttcttcgctagagacaacaccgctaattttctcagctggtgcagagatctaggagtcgacgaaacatgtttgtttgaatcagagggtctcgtactgcataagcagccccgagaggtgtgcttgtgcctgctggagctggggcgcatagccgcgaggtacggcgttgaaccacctgggctcatcaaactggaaaaagagatagaacaggaggaaaccctcagtgctccctccccaagccctagtcccagcagtaagagctctgggaagaaaagtaccggcaatttactagacgatgcatag

SEQ ID NO: 312287 - DNA, 411 bp, Artificial Sequence
  derived and/or modified sequence
atgtgtacagcgttaagtcccaaagtccgcagtgggcccggactaagcgacatgcaccagtattcccagtggctggcctcacgccacgaagcaaacctgttgcctatgaaggaggacttagccctgtggctcactaacctgttgggcaaagagatcaccgctgagacatttatggaaaagctggacaacggagccctgctctgtcagctcgccgaaaccatgcaagaaaagttcaaggagagcatggacgcgaacaagcccactaagaatctgcccttaaagaaaatcccttgtaagacttcagcaccgtctgggagtttttttgcccgcgacaacacagcaaactttttatcctggtgccgcgatctgggagtggatgagacatgcttgtttgagagtgaaggcttatag

SEQ ID NO: 312288 - DNA, 468 bp, Artificial Sequence
  derived and/or modified sequence
atgtgtacagctttgtcccctaaggtgaggagcggccctgggctgagcgatatgcatcaatacagccagtggctagctagcaggcacgaggcaaacttactacctatgaaggaggacctggccctatggcttacaaacttactgggcaaggagatcaccgcagaaacttttatggaaaagctcgataacggcgctctcctatgtcagctcgcagagacaatgcaggagaaattcaaagaatcaatggatgcgaacaagcccaccaagaacttgccactgaagaagatcccctgtaagacctctgcgccttctggatcctttttcgctagggacaacaccgcaaacttcttgtcatggtgccgtgatctcggggtcgacgagacctgtctgtttgagtctgagggtctggtgctccacaaacagccacgggaagtgtgtctgtgcctgctcgagttgggacgaatctag

SEQ ID NO: 312289 - DNA, 736 bp, Artificial Sequence
  derived and/or modified sequence
ccgtgcgaatggggccatgccgaccaaagcgccgatggatgtggcgcaggtagcgcgcccactgcaaggcccggcgcacggtggcggggtcccaggtgctgacgtaggtagtgcttgagaccgccagaagctcggaaaagcgatccaggtgctgcagaagggattccatgaggtattacaagtggataaataatgtgcactgctctgagcccaaaggtacgcagtggacctggcctctctgatatgcatcagtatagccaatggctagccagcagacatgaagctaatttgctaccaatgaaagaagatctggccttgtggttaaccaatctattagggaaggagattacagcagaaacttttatggagaagttggacaatggtgccttgctctgtcaacttgcagaaactatgcaggagaaattcaaggagagcatggatgctaacaagcccacaaagaatctaccgttgaagaagatcccatgcaaaaccagtgcaccctcgggctccttttttgccagagacaatacagcaaatttcttatcctggtgccgagatttaggggtggatgaaacgtgtctatttgaatcggaaggtttggtcctccacaagcaacccagagaagtgtgtctctgtctgctagagcttggccggattgcagccaggtatggtgtggagcctcctggtttgataaagctggaaaaagagattgaacaagaagaaacactttctgccc

SEQ ID NO: 312290 - DNA, 712 bp, Artificial Sequence
  derived and/or modified sequence
cattataatgtcatgatgacaacattttgtgagagaagtctgtataaaaagcaattgctcttttgtttccaaaacaggtattacaagtggataaataatgtgcactgctctgagcccaaaggtacgcagtggacctggcctctctgatatgcatcagtatagccaatggctagccagcagacatgaagctaatttgctaccaatgaaagaagatctggccttgtggttaaccaatctattagggaaggagattacagcagaaacttttatggagaagttggacaatggtgccttgctctgtcaacttgcagaaactatgcaggagaaattcaaggagagcatggatgctaacaagcccacaaagaatctaccgttgaagaagatcccatgcaaaaccagtgcaccctcgggctccttttttgccagagacaatacagcaaatttcttatcctggtgccgagatttaggggtggatgaaacgtgtctatttgaatcggaaggtttggtcctccacaagcaacccagagaagtgtgtctctgtctgctagagcttggccggattgcagccaggtatggtgtggagcctcctggtttgataaagctggaaaaagagattgaacaagaagaaacactttctgccccttctccttcaccttctccttcatcaaagtcttctggaaaaaagagtacaggaaacttactggatgatgca

SEQ ID NO: 312291 - DNA, 547 bp, Artificial Sequence
  derived and/or modified sequence
gttggacaggctctttctctaagagtgggtattcactgcagggggtgactttctgattctctggaaacaaccatgtgttccttatccctattgcggaacaccccggacaaccgcagcacgtattacaagtggataaataatgtgcactgctctgagcccaaaggtacgcagtggacctggcctctctgatatgcatcagtatagccaatggctagccagcagacatgaagctaatttgctaccaatgaaagaagatctggccttgtggttaaccaatctattagggaaggagattacagcagaaacttttatggagaagttggacaatggtgccttgctctgtcaacttgcagaaactatgcaggagaaattcaaggagagcatggatgctaacaagcccacaaagaatctaccgttgaagaagatcccatgcaaaaccagtgcaccctcgggctccttttttgccagagacaatacagcaaatttcttatcctggtgccgagatttaggggtggatgaaacgtgtctatttgaatcggaaggtttg

SEQ ID NO: 312292 - DNA, 579 bp, Artificial Sequence
  derived and/or modified sequence
taatagggtgtaggtaaagttactgaacagccacatctcactttcaggaaagtagtggaagagattgtgtcttgagaagacaggcattttagaggtattacaagtggataaataatgtgcactgctctgagcccaaaggtacgcagtggacctggcctctctgatatgcatcagtatagccaatggctagccagcagacatgaagctaatttgctaccaatgaaagaagatctggccttgtggttaaccaatctattagggaaggagattacagcagaaacttttatggagaagttggacaatggtgccttgctctgtcaacttgcagaaactatgcaggagaaattcaaggagagcatggatgctaacaagcccacaaagaatctaccgttgaagaagatcccatgcaaaaccagtgcaccctcgggctccttttttgccagagacaatacagcaaatttcttatcctggtgccgagatttaggggtggatgaaacgtgtctatttgaatcggaaggtttggtcctccacaagcaacccagagaagtgtgtctctgtctgctagagcttggccggatt

SEQ ID NO: 312293 - DNA, 546 bp, Artificial Sequence
  derived and/or modified sequence
atgtgcacagccctgagccccaaggtgcgcagcggccctggcctgagtgacatgcaccagtacagccagtggctggccagcagacatgaggccaacctgctgcccatgaaggaggacctggccctgtggctgaccaacctgctgggcaaggagatcacagctgagaccttcatggagaagctggacaatggagccctgctgtgccagctggccgagaccatgcaggagaagttcaaggagagcatggatgccaacaagcccaccaagaacctgcccctgaagaagatcccctgcaagaccagcgcccccagcggcagcttctttgcccgggacaacacagccaacttcctgtcctggtgccgggacctgggcgtggatgagacctgcctgtttgaaagtgagggcctggtgctgcacaagcagccccgggaggtgtgcctgtgcctgctggagctgggcagaattgctgcccgctatggagtggagcccccaggcctcatcaagctggagaaggagattgagcaggaggagaccctgagcgcctag

SEQ ID NO: 312294 - DNA, 618 bp, Artificial Sequence
  derived and/or modified sequence
atgtgcacagccctgagccccaaggtgcgcagcggccctggcctgagtgacatgcaccagtacagccagtggctggccagcagacatgaggccaacctgctgcccatgaaggaggacctggccctgtggctgaccaacctgctgggcaaggagatcacagctgagaccttcatggagaagctggacaatggagccctgctgtgccagctggccgagaccatgcaggagaagttcaaggagagcatggatgccaacaagcccaccaagaacctgcccctgaagaagatcccctgcaagaccagcgcccccagcggcagcttctttgcccgggacaacacagccaacttcctgtcctggtgccgggacctgggcgtggatgagacctgcctgtttgaaagtgagggcctggtgctgcacaagcagccccgggaggtgtgcctgtgcctgctggagctgggcagaattgctgcccgctatggagtggagcccccaggcctcatcaagctggagaaggagattgagcaggaggagaccctgagcgcccccagccccagccccagccccagcagcaagagcagcggcaagaagagcacaggcaacctgctggatgatgcctag

SEQ ID NO: 312295 - DNA, 411 bp, Artificial Sequence
  derived and/or modified sequence
atgtgcacagccctgagccccaaggtgcgcagcggccctggcctgagtgacatgcaccagtacagccagtggctggccagcagacatgaggccaacctgctgcccatgaaggaggacctggccctgtggctgaccaacctgctgggcaaggagatcacagctgagaccttcatggagaagctggacaatggagccctgctgtgccagctggccgagaccatgcaggagaagttcaaggagagcatggatgccaacaagcccaccaagaacctgcccctgaagaagatcccctgcaagaccagcgcccccagcggcagcttctttgcccgggacaacacagccaacttcctgtcctggtgccgggacctgggcgtggatgagacctgcctgtttgaaagtgagggcctgtag

SEQ ID NO: 312296 - DNA, 468 bp, Artificial Sequence
  derived and/or modified sequence
atgtgcacagccctgagccccaaggtgcgcagcggccctggcctgagtgacatgcaccagtacagccagtggctggccagcagacatgaggccaacctgctgcccatgaaggaggacctggccctgtggctgaccaacctgctgggcaaggagatcacagctgagaccttcatggagaagctggacaatggagccctgctgtgccagctggccgagaccatgcaggagaagttcaaggagagcatggatgccaacaagcccaccaagaacctgcccctgaagaagatcccctgcaagaccagcgcccccagcggcagcttctttgcccgggacaacacagccaacttcctgtcctggtgccgggacctgggcgtggatgagacctgcctgtttgaaagtgagggcctggtgctgcacaagcagccccgggaggtgtgcctgtgcctgctggagctgggccgcatctag

SEQ ID NO: 312297 - DNA, 546 bp, Artificial Sequence
  derived and/or modified sequence
atgtgcaccgccctgagccccaaggtgcggagcggccccggcctgagtgacatgcaccagtatagtcagtggctcgctagtagacacgaggcaaatcttttgcctatgaaagaggatctcgcattgtggttaaccaacctgctgggtaaggaaataaccgctgaaacctttatggagaagctggacaatggtgcgctcctctgtcagctggccgaaacaatgcaggaaaaatttaaggagtcaatggacgccaacaaacctacaaaaaacctgccactgaagaagataccctgtaaaacctctgccccatcaggatcctttttcgcaagagacaacacagcaaactttctgtcttggtgtagagatctcggagtggacgagacttgcctattcgagagtgagggcctcgtcctacacaaacagcctcgcgaagtatgcctgtgcctgttggaattgggcagaattgccgcgcgatacggcgtggagccgcccggcctgataaagcttgaaaaggaaattgagcaggaagagacactttccgcgtag

SEQ ID NO: 312298 - DNA, 618 bp, Artificial Sequence
  derived and/or modified sequence
atgtgcaccgccctgagccccaaggtgcggagcggccccggcctgagtgacatgcatcaatacagccaatggctagcttctagacatgaagccaacctcctcccaatgaaagaagatctggcactctggctcactaatctcctggggaaagagatcactgccgagacatttatggagaagctggacaatggcgctttactatgccagttggcagagactatgcaggagaaatttaaagagagtatggacgcgaataaacccaccaaaaaccttcccctcaagaaaattccctgcaagacctctgcgcctagcgggagtttcttcgccagggacaacacagctaatttcctaagctggtgtagagaccttggggtcgatgagacatgcttattcgagtctgaggggctggtgctgcataaacagccgcgggaggtttgcctttgtttgttggaactcggtcggatcgccgcacggtatggagtcgaaccccctgggctcataaagctggaaaaagagattgagcaggaagagactctgtctgcaccaagtccctcgccttccccttcttctaagtcctcaggcaagaagagtacagggaacttgctagacgatgcctag

SEQ ID NO: 312299 - DNA, 411 bp, Artificial Sequence
  derived and/or modified sequence
atgtgcaccgccctgagccccaaggtgcggagcggccccggcctgtccgatatgcaccagtactcccagtggctggctagtcgtcacgaggcaaacctgcttccgatgaaggaggatctggccctgtggctcactaatctgttgggaaaggaaataaccgctgagaccttcatggagaagctggacaacggagccttgctttgtcagctagcagagactatgcaggagaaattcaaagagagcatggatgctaacaagcccactaagaatctccccctcaaaaagattccctgtaagactagcgcgccatctggatcttttttcgctagagacaacactgcgaacttcctgtcttggtgtagggatctcggggtcgacgaaacctgtctgtttgagtctgaaggcctgtag

SEQ ID NO: 312300 - DNA, 468 bp, Artificial Sequence
  derived and/or modified sequence
atgtgcaccgccctgagccccaaggtgcggagcggccccggcctgtcagacatgcatcagtattctcagtggctggcaagccgccatgaagctaatctgttaccaatgaaggaggatctggccctgtggctgacgaatcttctcggcaaggagattacagcggaaactttcatggaaaaactagataacggcgcccttctgtgccagctcgcggagacaatgcaggagaaatttaaagagagcatggatgcgaataaacctactaaaaacctccccctcaagaaaattccttgtaaaacaagtgcaccgagcggcagcttttttgctagagataataccgctaactttttatcgtggtgccgagatctcggcgttgacgaaacttgtctgttcgagagcgaagggcttgtccttcataagcaaccccgtgaagtttgcctgtgcctgctggagctgggccgcatctag

SEQ ID NO: 312301 - DNA, 546 bp, Artificial Sequence
  derived and/or modified sequence
atgtgcaccgccctctccccgaaagtgcgctctggtccgggtcttagcgacatgcaccagtattctcaatggctggctagcagacatgaggccaatctcctgcctatgaaggaggaccttgcgctgtggttgacgaatcttctgggaaaagagatcaccgctgagacatttatggaaaaacttgataatggagcattgctctgtcaactggcagaaacaatgcaggaaaagttcaaggagagcatggatgcaaataagcctactaaaaaccttcccctgaagaagattccgtgcaaaacgagtgctccctctggctctttttttgcacgcgacaatacagcgaactttctcagctggtgcagagatctcggggtagatgaaacctgcttgttcgaaagtgaaggcctcgttcttcacaaacagcctcgcgaagtatgcctgtgtctgttggagctcggacgaattgcagcgaggtacggagtcgaaccgccagggttgataaagctggagaaggagatcgagcaggaggagactctcagcgcttag

SEQ ID NO: 312302 - DNA, 618 bp, Artificial Sequence
  derived and/or modified sequence
atgtgcactgcgctcagccctaaagtcagatccggccctggcctctcggatatgcaccagtattctcagtggctcgccagtcgccatgaggctaacctgctccccatgaaagaggacctggccttgtggctcacgaatttactcggaaaggagatcactgctgagactttcatggagaaattggataacggggcactgctgtgccagttggctgaaacgatgcaggagaagtttaaagaatcaatggatgccaataaaccgaccaagaacctccctctcaagaaaatcccttgcaagacctctgcaccctccggatccttcttcgcaagggataacaccgccaatttcttgtcttggtgcagagaccttggtgtcgacgagacatgcctgttcgagtctgaggggctggtgctgcacaagcagccgagagaggtgtgcctgtgtctgctcgaactaggcagaattgcagcaaggtacggcgtggagccgccaggactgattaaactggagaaggaaatcgagcaagaggaaactctgtctgcgccatccccttctcccagccctagcagtaagtcgtccggcaaaaagagtactggtaatttgcttgacgacgcctag

SEQ ID NO: 312303 - DNA, 411 bp, Artificial Sequence
  derived and/or modified sequence
atgtgcaccgccctgtccccaaaggtgaggagcgggcctggcctgtcggacatgcaccagtactcgcaatggctggcctctcgccacgaagccaacctgctgcctatgaaagaggatctggccctttggctgaccaatctcctaggtaaagagatcactgccgagacatttatggagaaacttgacaatggggctctgctttgtcagctggccgagaccatgcaggagaagtttaaggaatcgatggatgctaataagcctacgaaaaatctccctcttaaaaaaattccttgtaagacctccgcgccttccggttcatttttcgccagggataatacagccaacttcctgtcgtggtgccgagaccttggcgttgatgagacatgtctctttgagtctgagggtctttag

SEQ ID NO: 312304 - DNA, 468 bp, Artificial Sequence
  derived and/or modified sequence
atgtgcaccgcgctgtctccaaaagtgcgcagtggccctggcctaagcgacatgcaccagtattctcagtggttagctagccgccatgaggccaacctactaccaatgaaggaggatctggccttgtggctcaccaatcttctcgggaaggaaatcaccgcggagaccttcatggagaagctggacaacggggcattgttgtgccagcttgccgaaacgatgcaagagaagttcaaggagtcaatggatgccaataaacccactaaaaaccttcccctgaaaaaaatcccctgcaaaacaagtgcgccatcaggctcattttttgctcgcgacaatacagctaactttctgagctggtgtcgggatcttggggtggacgaaacctgtttattcgaaagtgaagggctcgtccttcacaagcagcctcgagaagtatgtctgtgcctgctggaactgggtcgaatttag

SEQ ID NO: 312305 - DNA, 546 bp, Artificial Sequence
  derived and/or modified sequence
atgtgcaccgccctgagccccaaggtgagaagcggccccggcctgagcgacatgcaccagtacagccagtggctggccagcagacacgaggccaacctgctgcccatgaaggaggacctggccctgtggctgaccaacctgctgggcaaggagatcaccgccgagaccttcatggagaagctggacaacggcgccctgctgtgccagctggccgagaccatgcaggagaagttcaaggagagcatggacgccaacaagcccaccaagaacctgcccctgaagaagatcccctgcaagaccagcgcccccagcggcagcttcttcgccagagacaacaccgccaacttcctgagctggtgcagagacctgggcgtggacgagacctgcctgttcgagagcgagggcctggtgctgcacaagcagcccagagaggtgtgcctgtgcctgctggagctgggcagaatcgccgccagatacggcgtggagccccccggcctgatcaagctggagaaggagatcgagcaggaggagaccctgagcgcctag

SEQ ID NO: 312306 - DNA, 618 bp, Artificial Sequence
  derived and/or modified sequence
atgtgcaccgccctgagccccaaggtgagaagcggccccggcctgagcgacatgcaccagtacagccagtggctggccagcagacacgaggccaacctgctgcccatgaaggaggacctggccctgtggctgaccaacctgctgggcaaggagatcaccgccgagaccttcatggagaagctggacaacggcgccctgctgtgccagctggccgagaccatgcaggagaagttcaaggagagcatggacgccaacaagcccaccaagaacctgcccctgaagaagatcccctgcaagaccagcgcccccagcggcagcttcttcgccagagacaacaccgccaacttcctgagctggtgcagagacctgggcgtggacgagacctgcctgttcgagagcgagggcctggtgctgcacaagcagcccagagaggtgtgcctgtgcctgctggagctgggcagaatcgccgccagatacggcgtggagccccccggcctgatcaagctggagaaggagatcgagcaggaggagaccctgagcgcccccagccccagccccagccccagcagcaagagcagcggcaagaagagcaccggcaacctgctggacgacgcctag

SEQ ID NO: 312307 - DNA, 411 bp, Artificial Sequence
  derived and/or modified sequence
atgtgcaccgccctgagccccaaggtgagaagcggccccggcctgagcgacatgcaccagtacagccagtggctggccagcagacacgaggccaacctgctgcccatgaaggaggacctggccctgtggctgaccaacctgctgggcaaggagatcaccgccgagaccttcatggagaagctggacaacggcgccctgctgtgccagctggccgagaccatgcaggagaagttcaaggagagcatggacgccaacaagcccaccaagaacctgcccctgaagaagatcccctgcaagaccagcgcccccagcggcagcttcttcgccagagacaacaccgccaacttcctgagctggtgcagagacctgggcgtggacgagacctgcctgttcgagagcgagggcctgtag

SEQ ID NO: 312308 - DNA, 468 bp, Artificial Sequence
  derived and/or modified sequence
atgtgcaccgccctgagccccaaggtgagaagcggccccggcctgagcgacatgcaccagtacagccagtggctggccagcagacacgaggccaacctgctgcccatgaaggaggacctggccctgtggctgaccaacctgctgggcaaggagatcaccgccgagaccttcatggagaagctggacaacggcgccctgctgtgccagctggccgagaccatgcaggagaagttcaaggagagcatggacgccaacaagcccaccaagaacctgcccctgaagaagatcccctgcaagaccagcgcccccagcggcagcttcttcgccagagacaacaccgccaacttcctgagctggtgcagagacctgggcgtggacgagacctgcctgttcgagagcgagggcctggtgctgcacaagcagcccagagaggtgtgcctgtgcctgctggagctgggcagaatctag

SEQ ID NO: 312309 - DNA, 3617 bp, Artificial Sequence
  derived and/or modified sequence
acccgtggtgccccatccctataggagctggtgagattgcagcctgctgcctcccctccatcagccacagctattggatttcccacccagaatctttaggtaaatgagatcatgattctggaaggaggtggtgtaatgaatctcaaccccggcaacaacctccttcaccagccgccagcctggacagacagctactccacgtgcaatgtttccagtgggttttttggaggccagtggcatgaaattcatcctcagtactggaccaagtaccaggtgtgggagtggctccagcacctcctggacaccaaccagctggatgccaattgtatccctttccaagagttcgacatcaacggcgagcacctctgcagcatgagtttgcaggagttcacccgggcggcagggacggcggggcagctcctctacagcaacttgcagcatctgaagtggaacggccagtgcagtagtgacctgttccagtccacacacaatgtcattgtcaagactgaacaaactgagccttccatcatgaacacctggaaagacgagaactatttatatgacaccaactatggtagcacagtagatttgttggacagcaaaactttctgccgggctcagatctccatgacaaccaccagtcaccttcctgttgcagagtcacctgatatgaaaaaggagcaagacccccctgccaagtgccacaccaaaaagcacaacccgagagggactcacttatgggaattcatccgcgacatcctcttgaacccagacaagaacccaggattaataaaatgggaagaccgatctgagggcgtcttcaggttcttgaaatcagaggcagtggctcagctatggggtaaaaagaagaacaacagcagcatgacctatgaaaagctcagccgagctatgagatattactacaaaagagaaattctggagcgtgtggatggacgaagactggtatataaatttgggaagaatgcccgaggatggagagaaaatgaaaactgaagctgccaatactttggacacaaaccaaaacacacaccaaataatcagaaacaaagaactcctggacgtaaatatttcaaagactacttttctctgatatttatgtaccatgaggggaacaagaaactacttctaacgggaagaagaaacactacagtcgattaaaaaaattattttgttacttcgaagtatgtcctatatggggaaaaaacgtacacagttttctgtgaaatatgatgctgtatgtggttgtgattttttttcacctctattgtgaattctttttcactgcaagagtaacaggatttgtagccttgtgcttcttgctaagagaaagaaaaacaaaatcagagggcattaaatgttttgtatgtgacatgatttagaaaaaggtgatgcatcctcctcacataagcatccatatggcttcgtcaagggaggtgaacattgttgctgagttaaattccagggtctcagatggttaggacaaagtggatggatgccgggaagtttaacctgagccttaggatccaatgagtggagaatggggacttccaaaacccaaggttggctataatctctgcataaccacatgacttggaatgcttaaatcagcaagaagaataatggtggggtctttatactcattcaggaatggtttatctgatgccagggctgtcttcctttctcccctttggatggttggtgaaatactttaattgccctgtctgctcacttctagctatttaagagagaacccagcttggttcttttttgctccaagtgcttaaaaataagttggaaaaaggagacggtggtgtggaaatggctgaagagtttgctcttgtatccctatagtccaaggtttctcaatctgcacaattgacatttttggccggagtgttctttgtggtgagggctttcctgtgcattgtaagatgttcagcagtatccactcatggtctctaaccacttgacaccagaaaccccccagctgtgataacgcaaaatgtctctagacatcaccaaatgttccctgggggtggcaaatttgcccttgattgagaaccaccagtttagctagtcaatatgaggatggtggtttattctcagaagaaaaagatatgtaaggtcttttagctccttagagtgaagcaaaagcaagacttcaacctcaacctatctttatgttttaaatgttagggacaataagttgaaatagctagaggagcttcttttcagaaccccagatgagagccaatgtcagataaagtaagcatagtaatgtagcaggaactacaatagaagacattttcactggaattacaaagcagaattaaaattatattgtagaaggaaacaccaagaaaagaatttccagggaaaatcctctttgcaggtattaattcttataattttttgtcttttggattatctgtttactgtctcatctgaactgatcccaggtgaacggtttattgcctagatttgtactcagaggaattttttttgttttgttttgtcttttaagaaaggaaagaaaggatgaaaaaaataaacagaaaactcagctcaggcacaattgtcaccaaggagttaaaagcttcttcttcaatagaggaattgttctgggggtcctggagacttaccattgagccatgcaatctgggaagcacaggaataagtagacactttgaaaatggatttgaatgttctcatcccttttgcagcttttctttttggctctctcatgtccttggcttgctcctctattctacctctctttctccagcaataatatgcaaatgaagacatgtatccataagaaggagtgctcttcatcaactaatagagcacctaccacagtgtcatacctggtagaggtgagcaattcatattcaaaggttgcaaagtgtttgtaatatattcatgaggctggaagtaagaagaattaaaaatttgtcctaattacaatgagaaccattctaggtagtgatcttggagcacacatgaataactttctgaaggtgcaaccaaatccatttttatttctgcctggcttggtcacctctgtaaaggtttaacttagtgttgtcaagtaacagttactgaaagagctgagaaaaagaacaatgaacagcaacgatcttgactgtgcaactcagacattcctgcagaaaagacatatgttgctttacaagaaggccaaagaactatggggccttcccagcatttgactgttcattgcatagaatgaattaaatatccagttacttgaatgggtataacgcatgaatatttgtgtgtctgtgtgtgtgtctgagttgtgtgattttattaggggcatctgccaattctctcactgtggttccttctctgactttgcctgttcatcatctaaggaggctagatccttcgctgacttcaccattcctcaaacctgtaagtttctcacttcttccaaattggctttggctctttctgcaacctttccattcaagagcaatctttgctaaggagtaagtgaatgtgaagagtaccaactacaacaattctacagataattagtggattgtgttgtttgttgagagtgaaggtttctt

SEQ ID NO: 312310 - DNA, 3150 bp, Artificial Sequence
  derived and/or modified sequence
acttgataacacccgtggtgccccatccctataggagctggtgagattgcagcctgctgcctcccctccaacagccacagctattggatttcccacccagaatctttaggtaaatgagatcatgattctggaaggaggtggtgtaatgaatctcaaccccggcaacaacctccttcaccagccgccagcctggacagacagctactccacgtgcaatgtttccagtgggttttttggaggccagtggcatgaaattcatcctcagtactggaccaagtaccaggtgtgggagtggctccagcacctcctggacaccaaccagctggatgccaattgtatccctttccaagagttcgacatcaacggcgagcacctctgcagcatgagtttgcaggagttcacccgggcggcagggacggcggggcagctcctctacagcaacttgcagcatctgaagtggaacggccagtgcagtagtgacctgttccagtccacacacaatgtcattgtcaagactgaacaaactgagccttccatcatgaacacctggaaagacgagaactatttatatgacaccaactatggtagcacagtagatttgttggacagcaaaactttctgccgggctcagatctccatgacaaccaccagtcaccttcctgttgcagagtcacctgatatgaaaaaggagcaagacccccctgccaagtgccacaccaaaaagcacaacccgagagggactcacttatgggaattcatccgcgacatcctcttgaacccagacaagaacccaggattaataaaatgggaagaccgatctgagggcgtcttcaggttcttgaaatcagaggcagtggctcagctatggggtaaaaagaagaacaacagcagcatgacctatgaaaagctcagccgagctatgagatattactacaaaagagaaattctggagcgtgtggatggacgaagactggtatataaatttgggaagaatgcccgaggatggagagaaaatgaaaactgaagctgccaatactttggacacaaaccaaaacacacaccaaataatcagaaacaaagaactcctggacgtaaatatttcaaagactacttttctctgatatttatgtaccatgaggggaacaagaaactacttctaacgggaagaagaaacactacggtcgattaaaaaaattattttgttacttcgaagtatgtcctatatggggaaaaaacgtacacagttttctgtgaaatatgatgctgtatgtggttgtgattttttttcacctctattgtgaattctttttcactgcaagagtaacaggatttgtagccttgtgcttcttgctaagagaaagaaaaacaaaatcagagggcattaaatgttttgtatgtgacatgatttagaaaaaggtgatgcatcctcctcacataagcatccatatggcttcgtcaagggaggtgaacattgttgctgagttaaattccagggtctcagatggttaggacaaagtggatggatgccgggaagtttaacctgagccttaggatccaatgagtggagaatggggacttccaaaacccaaggttggctataatctctgcataaccacatgacttggaatgcttaaatcagcaagaagaataatggtggggtctttatactcattcaggaatggtttatctgatgccagggctgtcttcctttctcccctttggatggttggtgaaatactttaattgccctgtctgctcacttctagctatttaagagagaacccagcttggttcttttttgctccaagtgcttaaaaataagttggaaaaaggagacggtggtgtggaaatggctgaagagtttgctcttgtatccctatagtccaaggtttctcaatctgcacaattgacatttttggccggagtgttctttgtggtgagggctttcctgtgcattgtaagatgttcagcagtatccactcatggtctctaaccacttgacaccagaaaccccccagctgtgataacgcaaaatgtctctagacatcaccaaatgttccctgggggtggcaaatttgcccttgattgagaaccaccagtttagctagtcaatatgaggatggtggtttattctcagaagaaaaagatatgtaaggtcttttagctccttagagtgaagcaaaagcaagacttcaacctcaacctatctttatgttttaaatgttagggacaataagttgaaatagctagaggagcttcttttcagaaccccagatgagagccaatgtcagataaagtaagcatagtaatgtagcaggaactacaatagaagacattttcactggaattacaaagcagaattaaaattatattgtagaaggaaacaccaagaaaagaatttccagggaaaatcctctttgcaggtattaattcttataattttttgtcttttggattatctgtttactgtctcatctgaactgatcccaggtgaacggtttattgcctagatttgtactcagaggaattttttttgttttgttttgtcttttaagaaaggaaagaaaggatgaaaaaaataaacagaaaactcagctcaggcacaattgtcaccaaggagttaaaagcttcttcttcaatagaggaattgttctgggggtcctggagacttaccattgagccatgcaatctgggaagcacaggaataagtagacactttgaaaatggatttgaatgttctcatcccttttgcagcttttctttttggctctctcatgtccttggcttgctcctctattctacctctctttctccagcaataatatgcaaatgaagacatgtatccataagaaggagtgctcttcatcaactaatagagcacctaccacagtgtcatacctggtagaggtgagcaattcatattcaaaggttgcaaagtgtttgtaatatattcatgaggctggaagtaagaagaattaaaaatttgtcctaattacaatgagaaccattctaggtagtgatcttggagcacacatgaataactttctgaaggtgcaaccaaatccatttttatttctgcctggcttggtcacttctgtaaaggtttaacttagtgttgtcaagtaacagttactgaaagagctgagaaaa

SEQ ID NO: 312311 - DNA, 1280 bp, Artificial Sequence
  derived and/or modified sequence
ctcagcagcaacaaatgccttctgagacagggattcttttgattttgcttggacattgtggagaagtgttagccccaatgtggactgatctgggaacagtgggaaattaacttcttgttggtaaatatcaggctgagatcatgattctggaaggaggtggtgtaatgaatctcaaccccggcaacaacctccttcaccagccgccagcctggacagacagctactccacgtgcaatgtttccagtgggttttttggaggccagtggcatgaaattcatcctcagtactggaccaagtaccaggtgtgggagtggctccagcacctcctggacaccaaccagctggatgccaattgtatccctttccaagagttcgacatcaacggcgagcacctctgcagcatgagtttgcaggagttcacccgggcggcagggacggcggggcagctcctctacagcaacttgcagcatctgaagtggaacggccagtgcagtagtgacctgttccagtccacacacaatgtcattgtcaagactgaacaaactgagccttccatcatgaacacctggaaagacgagaactatttatatgacaccaactatggtagcacagtagatttgttggacagcaaaactttctgccgggctcagatctccatgacaaccaccagtcaccttcctgttgcagagtcacctgatatgaaaaaggagcaagacccccctgccaagtgccacaccaaaaagcacaacccgagagggactcacttatgggaattcatccgcgacatcctcttgaacccagacaagaacccaggattaataaaatgggaagaccgatctgagggcgtcttcaggttcttgaaatcagaggcagtggctcagctatggggtaaaaagaagaacaacagcagcatgacctatgaaaagctcagccgagctatgagatattactacaaaagagaaattctggagcgtgtggatggacgaagactggtatataaatttgggaagaatgcccgaggatggagagaaaatgaaaactgaagctgccaatactttggacacaaaccaaaacacacaccaaataatcagaaacaaagaactcctggacgtaaatatttcaaagactacttttctctgatatttatgtaccatgaggggaacaagaaactacttctaacgggaagaagaaacactacggtcgattaaaaaaattattttgttacttcgaagtatgtcctatatggggaaaaaacgtacacagttttctgtgaaatatga

SEQ ID NO: 312312 - DNA, 1501 bp, Artificial Sequence
  derived and/or modified sequence
attttcaccgtccatctttgctgatttaccatgctcccaggatggtgggagtgtgtgtttttaagatggagagtgtatgcttctgggttcaagttcacaggtgtctctgctggttatctgcactcaccttggtaacagggagaaagtgagtgaatggattccaagaacttactgatggaagtctaattcaggagttggttctgcagccatggagatcatgattctggaaggaggtggtgtaatgaatctcaaccccggcaacaacctccttcaccagccgccagcctggacagacagctactccacgtgcaatgtttccagtgggttttttggaggccagtggcatgaaattcatcctcagtactggaccaagtaccaggtgtgggagtggctccagcacctcctggacaccaaccagctggatgccaattgtatccctttccaagagttcgacatcaacggcgagcacctctgcagcatgagtttgcaggagttcacccgggcggcagggacggcggggcagctcctctacagcaacttgcagcatctgaagtggaacggccagtgcagtagtgacctgttccagtccacacacaatgtcattgtcaagactgaacaaactgagccttccatcatgaacacctggaaagacgagaactatttatatgacaccaactatggtagcacagtagatttgttggacagcaaaactttctgccgggctcagatctccatgacaaccaccagtcaccttcctgttgcagagtcacctgatatgaaaaaggagcaagacccccctgccaagtgccacaccaaaaagcacaacccgagagggactcacttatgggaattcatccgcgacatcctcttgaacccagacaagaacccaggattaataaaatgggaagaccgatctgagggcgtcttcaggttcttgaaatcagaggcagtggctcagctatggggtaaaaagaagaacaacagcagcatgacctatgaaaagctcagccgagctatgagatattactacaaaagagaaattctggagcgtgtggatggacgaagactggtatataaatttgggaagaatgcccgaggatggagagaaaatgaaaactgaagctgccaatactttggacacaaaccaaaacacacaccaaataatcagaaacaaagaactcctggacgtaaatatttcaaagactacttttctctgatatttatgtaccatgaggggaacaagaaactacttctaacgggaagaagaaacactacggtcgattaaaaaaattattttgttacttcgaagtatgtcctatatggggaaaaaacgtacacagttttctgtgaaatatgatgctgtatgtggttgtgattttttttcacctctattgtgaattctttttcactgcaagagtaacaggatttgtagccttgtgcttcttgctaagagaaagaaaaacaaaatcagagggcattaaatgttttgtatgtgacatga

SEQ ID NO: 312313 - DNA, 903 bp, Artificial Sequence
  derived and/or modified sequence
atgatcctggagggaggcggagtcatgaaccttaaccccgggaataatcttctccaccagccccctgcgtggacggacagctattcgacatgtaacgtgtcaagtggcttcttcggaggtcaatggcatgagatccaccctcagtattggactaagtatcaagtgtgggagtggctgcaacacctgctggacaccaatcagctggatgcaaattgtattccgttccaggagttcgacattaatggggagcatctttgctctatgtccttacaggagttcacaagagcagccggcactgccggacaactgttgtacagcaatttgcagcatctcaagtggaatggccagtgttccagcgatctgttccaatccacacataatgtgattgtgaagaccgagcaaaccgaacctagtatcatgaatacctggaaggatgagaattacctgtatgataccaactacggctccacagtggacctgctcgactctaagacattttgcagggcacagataagcatgaccacaacaagccacttgcctgtggctgaaagtcctgacatgaaaaaggagcaggatccccctgccaaatgtcacactaaaaagcacaacccacgtggaactcatctctgggaatttatcagggacatactactcaatccggacaagaatccaggcctcatcaaatgggaggacagatcagaaggcgtgtttagattcctcaaatccgaagctgtggcccagctctggggaaagaaaaagaataatagtagtatgacatacgaaaagctgagcagggcaatgcgctactactacaaacgcgagattctcgaacgcgtggacggccgcagactggtttataagtttggtaagaatgcaagagggtggagggagaatgaaaattag

SEQ ID NO: 312314 - DNA, 903 bp, Artificial Sequence
  derived and/or modified sequence
atgatcctcgagggggggggcgtgatgaatctgaaccctggaaataacctcttgcatcaaccccctgcatggactgactcttatagcacgtgcaacgtatcttccgggttctttggaggacagtggcatgaaattcatcctcagtactggactaagtatcaggtgtgggagtggcttcaacacctgcttgacactaaccagctggacgcaaattgtatcccttttcaggagttcgacataaatggcgaacacctgtgctcaatgtcactgcaggaattcacacgggcagccggtaccgctgggcagctgctctactccaatctgcagcacttgaagtggaatggccagtgtagctccgacctgttccaaagtactcacaacgtcatcgtcaaaacagagcagaccgagccgagcataatgaacacctggaaggatgaaaactatctgtacgataccaactatggcagcacggttgacctgctcgattccaaaacgttctgtcgggcccagatttccatgacaaccacttcacacttgcctgtggcggagtctcccgacatgaagaaggagcaggacccccctgctaagtgtcatacaaaaaaacacaatcccagggggacgcatctatgggagtttattagagacatcctgctgaatccagataaaaatcccggcttgattaagtgggaggacaggagcgaaggagtgttccggttcctgaaaagcgaggccgtggcacagctgtggggcaaaaagaagaacaatagcagtatgacatacgaaaaactgtcccgtgctatgcggtactattacaagcgcgagatcctggaacgcgtggacggtcgacgactggtgtacaaatttggcaaaaatgcccggggttggagagaaaacgaaaattag

SEQ ID NO: 312315 - DNA, 903 bp, Artificial Sequence
  derived and/or modified sequence
atgatcctggagggcggtggcgttatgaatctgaatccagggaacaatctcttgcatcaacctcctgcctggaccgattcttactccacctgtaacgtttcgtccggattctttggcggacagtggcatgaaatccatccgcagtactggaccaaataccaggtgtgggaatggctgcagcaccttctggatacgaatcagttggacgccaactgtatccctttccaggaatttgacatcaacggcgagcacctgtgtagcatgtcattgcaggaatttacgcgtgcggctggtaccgccggacaacttctatactctaatttgcaacaccttaaatggaacggtcagtgctcctccgatttgttccaaagcacacacaacgtaatagtgaagacagaacaaaccgaaccttctatcatgaacacatggaaggacgagaactatctgtacgataccaactatggtagtaccgttgacttgttggattctaagacattctgtagggcacagattagcatgacaacaacgagtcacctgcccgtagctgagagtcccgacatgaagaaggagcaagatccccccgccaaatgtcataccaaaaagcataatcctcgtggaacgcacctgtgggagttcattagggatattctgctgaatcctgataagaatccaggcttaatcaagtgggaagatcgttccgagggggtctttcggttcctgaagtcagaagccgtcgctcaactgtggggaaaaaagaaaaacaatagtagtatgacctacgaaaagctgagccgggcaatgcgatattattacaaaagagagatcctggaacgcgtcgatgggaggcggctggtgtacaagtttgggaaaaacgcccgtggatggcgcgaaaatgagaactag

SEQ ID NO: 312316 - DNA, 903 bp, Artificial Sequence
  derived and/or modified sequence
atgatcctggagggcggcggcgtgatgaacctgaaccctggcaacaacctgctgcaccagcccccagcctggacagacagctacagcacctgcaatgtgagcagcggcttcttcggcggccagtggcatgagatccacccccagtactggaccaagtaccaggtgtgggagtggctgcagcacctgctggacaccaaccagctggatgccaactgcatccccttccaggagtttgacatcaatggagagcacctgtgcagcatgagcctgcaggagttcaccagggctgctggaacagctggccagctgctgtacagcaacctgcagcacctgaagtggaatggccagtgcagcagtgacctcttccagagcacccacaacgtgattgtgaagacagagcagacagagcccagcatcatgaacacctggaaggatgagaactacctgtatgacaccaactacggcagcacagtggacctgctggacagcaagaccttctgccgggcccagatctccatgaccaccaccagccacctgcctgtggccgagagcccagacatgaagaaggagcaggaccccccagccaagtgccacaccaagaagcacaacccccggggcacccacctgtgggagttcatccgggacatcctgctgaacccagacaagaaccctggcctcatcaagtgggaggacagaagtgaaggagtcttccgcttcctgaagtctgaggccgtggcccagctgtggggcaagaagaagaacaacagctccatgacctatgagaagctgagccgggccatgagatactactacaagcgggagatcctggagcgggtggatggccggcggctggtgtacaagtttgggaagaatgcccggggctggagagaaaatgaaaattag

SEQ ID NO: 312317 - DNA, 903 bp, Artificial Sequence
  derived and/or modified sequence
atgatcctggagggcggcggcgtgatgaacctgaaccccggcaacaacttgctgcaccagccgcccgcctggactgacagttatagcacctgcaatgtgtcatccggcttcttcggaggacagtggcacgagatccatccccagtactggactaaataccaggtgtgggaatggctgcagcacctgctcgataccaaccagctggacgcaaactgtattccgttccaggagtttgacatcaacggcgaacatctttgttcaatgtcactgcaggaattcaccagagcagccgggactgcaggacagctgctgtacagcaatctgcaacacttgaagtggaatggacaatgttcttctgacctattccagtctacccacaatgtgattgtaaagactgagcaaactgagccatccataatgaatacttggaaggacgagaactacctgtacgacactaactatggcagcactgtcgatttactcgatagcaagaccttttgccgggcgcagatcagcatgacaaccacatcccatcttccagtcgctgagagccctgatatgaaaaaagagcaagatccaccagccaagtgtcatacgaagaagcacaaccctcgagggacccacctgtgggaatttatccgagacatcctgctaaaccccgacaaaaaccctgggcttatcaagtgggaggaccggtctgagggtgtgtttcgcttcctgaaatctgaggcagtggcacagctttggggaaagaaaaagaacaactcctcgatgacgtacgagaaactctcaagggccatgcggtactattataagcgagaaatcctcgagagggtggacggaaggaggctggtctacaaatttgggaagaacgccagagggtggagagaaaatgaaaactag

SEQ ID NO: 312318 - DNA, 903 bp, Artificial Sequence
  derived and/or modified sequence
atgatcctggagggcggcggcgtgatgaacctgaaccccggcaacaatctcctgcaccagcccccggcatggacagactcttactctacttgtaatgtttcatctgggttcttcggtggccaatggcatgaaatccacccacagtattggacaaaataccaggtatgggagtggctccagcatctcttggacactaatcagctggacgccaattgcattcccttccaggagttcgacatcaacggtgagcacctgtgctcaatgtctctgcaagaatttacacgcgcagcaggtacagctgggcagctcttgtattcgaacctgcaacacctaaagtggaatggccagtgcagctcagatttattccagtccacacacaatgtgatcgttaagacggaacagacagagccctcaattatgaacacatggaaggacgaaaactatctttacgatacaaactacggctccaccgtggatctcttagattccaaaacgttctgccgcgcccaaatatcaatgactacaacatctcacctgccagttgccgaaagtccagatatgaaaaaggagcaggacccaccagctaaatgccacaccaaaaagcacaaccctcgcggtacacacctctgggagtttataagagatatcctactaaacccagacaaaaatcccgggctgatcaaatgggaagatcgttcagagggcgtcttcagattccttaaatccgaggctgttgcccagctgtggggcaaaaagaaaaacaacagctccatgacatacgaaaagctgtctagagccatgcggtattattacaaacgggagattttggagcgcgtggacggtcgtagattagtgtataagttcggcaagaatgcaagagggtggcgggagaacgaaaactag

SEQ ID NO: 312319 - DNA, 903 bp, Artificial Sequence
  derived and/or modified sequence
atgatcctggagggcggcggcgtgatgaacctgaaccccggcaacaacctcctccatcagccccccgcctggactgactcctactcaacgtgcaacgttagtagtggattctttggcggccaatggcacgaaatccacccgcagtactggaccaagtaccaagtgtgggaatggcttcagcacctgttagacacgaatcagctggatgcaaactgcatcccttttcaggaattcgacataaatggcgagcatctgtgtagcatgagcttacaggagttcacccgcgcggcaggcaccgccggccagttgctgtatagcaatcttcagcacctcaaatggaatgggcaatgtagcagtgatctgttccaatctacgcataacgtgattgtcaagaccgagcagactgaacccagcattatgaacacatggaaggacgaaaactatttgtacgacactaattatggtagcacagtggatctgctcgactccaaaactttttgccgggctcagatttcaatgaccacgaccagccatctgccggttgctgagagtcccgatatgaaaaaggaacaggatcctcctgccaagtgtcacacgaaaaagcacaatcctagagggactcacctgtgggaattcattcgcgacatcttgttgaaccccgacaaaaaccctggcctaataaaatgggaagatcggagcgaaggcgtatttaggtttctgaaatcagaagccgtggcccaattgtggggaaaaaagaagaacaattcctccatgacttacgaaaaactttctcgcgctatgcggtactactataagcgcgaaattcttgaacgagtggatggccgccggcttgtatataagttcgggaaaaatgcaagaggatggagagagaacgaaaactag

SEQ ID NO: 312320 - DNA, 903 bp, Artificial Sequence
  derived and/or modified sequence
atgattcttgaaggtgggggtgtcatgaatttaaaccccggaaataacttgctccaccagcccccagcctggactgattcctacagcacttgcaacgtttcaagcggttttttcggcggtcagtggcacgagatccatccacagtattggaccaagtatcaggtgtgggagtggctgcagcacctgctggacactaaccagctcgatgctaactgcatcccttttcaagagtttgatattaatggggaacatctgtgctctatgtcactgcaggaattcacaagagccgcagggactgccggtcaactgctgtacagcaatctgcaacatctgaagtggaacggacagtgtagtagtgacctctttcagagcacacacaatgtaattgttaagacggagcagacagagccgtcaataatgaacacatggaaagacgagaactatctttacgacactaactatggctctactgtagacctgcttgactctaagacattctgccgcgctcagattagcatgaccactacatcacacctccctgtggctgagtcgcctgacatgaagaaggagcaggaccctccagccaagtgtcacaccaagaagcacaatcctagaggcactcatttatgggagttcatccgcgacatcctcttaaaccccgacaagaatccaggcctgatcaaatgggaggaccggagcgaaggagtgttccgatttctgaaatctgaagcggttgctcagctttgggggaagaagaagaataactcctccatgacctacgagaaactctcccgggctatgcgctactattataagagggaaatattagagcgggttgacggacggaggctggtatataagttcggtaaaaacgcacgcggttggcgggaaaacgagaattag

SEQ ID NO: 312321 - DNA, 903 bp, Artificial Sequence
  derived and/or modified sequence
atgatactggaaggcggtggggtcatgaacctgaaccccggaaataacctgctgcatcagcctccagcttggacagatagttattcgacatgcaacgtgtctagtgggttttttggcggtcagtggcacgaaattcatccccaatattggaccaaataccaggtgtgggaatggctacagcatctgctggataccaaccaactggatgccaactgcatcccctttcaagaattcgacattaacggagagcacctgtgcagtatgtccctccaggagtttactagggccgcagggacagctggccagctgctctacagtaaccttcagcacctgaaatggaatggacagtgctccagcgacttattccagtccacccacaatgtgatcgtgaaaaccgaacagactgaacctagtattatgaacacctggaaggacgagaattacctttacgataccaactacggctcgacggtcgatctactggatagcaaaacattctgtcgggctcagatatctatgaccactactagccacttgccagtcgctgaaagccccgacatgaagaaggagcaagatcccccagctaagtgccacaccaaaaaacacaatccacgaggtacacacctgtgggagttcattcgggacatactgctaaacccggacaagaacccgggactgatcaagtgggaagataggagtgagggggttttcaggttcttgaagtctgaggcggttgcccagctgtgggggaagaagaaaaataactcctccatgacatacgagaagctatccagagccatgagatattactataaaagggaaattttagaacgtgtcgacggtcgtagactagtctacaaatttggaaagaacgccaggggttggagggagaatgaaaattag

SEQ ID NO: 312322 - DNA, 903 bp, Artificial Sequence
  derived and/or modified sequence
atgatcctcgaaggtggcggagttatgaacctcaacccaggtaacaaccttcttcatcagccccctgcttggactgatagttactcaacatgcaacgttagtagcgggttttttggcggacagtggcatgagattcatccacagtattggaccaaataccaggtttgggagtggctccagcacctactggacaccaatcagctggatgcaaattgcattccatttcaggagtttgacattaacggggaacatctctgcagcatgtccctgcaagaattcacccgcgctgcgggaacggcaggccagctcttgtactcgaacttgcaacacctgaaatggaacggccagtgttcctctgatctattccagagcactcacaacgttattgtcaagacagaacagactgaaccttctatcatgaatacttggaaggatgagaattacttgtatgatacgaactacggaagtacagtggacctgttggattcaaaaactttctgtagagctcagatcagcatgactactacatcccatttgcccgttgcggagtcccctgacatgaagaaggaacaggacccgccagcaaaatgccacacaaagaaacacaaccctaggggaacgcatctgtgggagtttataagagacatcctgctgaatcctgacaagaatccaggtttaattaagtgggaggatcgatccgagggggtgttccggtttctgaaatctgaggcagtggctcagttatggggaaagaagaaaaataacagctctatgacttacgaaaaacttagtcgggcaatgcgctattactataagagggaaattctggagcgcgtggatggaaggcgactggtctacaagtttggcaagaacgcacgtggctggcgcgagaatgaaaactag

SEQ ID NO: 312323 - DNA, 903 bp, Artificial Sequence
  derived and/or modified sequence
atgatcctggagggcggcggcgtgatgaacctgaaccccggcaacaacctgctgcaccagccccccgcctggaccgacagctacagcacctgcaacgtgagcagcggcttcttcggcggccagtggcacgagatccacccccagtactggaccaagtaccaggtgtgggagtggctgcagcacctgctggacaccaaccagctggacgccaactgcatccccttccaggagttcgacatcaacggcgagcacctgtgcagcatgagcctgcaggagttcaccagagccgccggcaccgccggccagctgctgtacagcaacctgcagcacctgaagtggaacggccagtgcagcagcgacctgttccagagcacccacaacgtgatcgtgaagaccgagcagaccgagcccagcatcatgaacacctggaaggacgagaactacctgtacgacaccaactacggcagcaccgtggacctgctggacagcaagaccttctgcagagcccagatcagcatgaccaccaccagccacctgcccgtggccgagagccccgacatgaagaaggagcaggacccccccgccaagtgccacaccaagaagcacaaccccagaggcacccacctgtgggagttcatcagagacatcctgctgaaccccgacaagaaccccggcctgatcaagtgggaggacagaagcgagggcgtgttcagattcctgaagagcgaggccgtggcccagctgtggggcaagaagaagaacaacagcagcatgacctacgagaagctgagcagagccatgagatactactacaagagagagatcctggagagagtggacggcagaagactggtgtacaagttcggcaagaacgccagaggctggagagagaacgagaactag

SEQ ID NO: 312324 - protein, 207 aa, Artificial Sequence [sequence omitted]

SEQ ID NO: 312325 - DNA, 624 bp, Artificial Sequence
  derived and/or modified sequence
atgttcagcgccgccagccagcccctggaccccgacggcaccctgttcagactgagattcaccgccatggtgtggtgggccatcaccttccccgtgttcggcttcttcttctgcatcatctggagcctggtgttccacttcgagtacaccgtggccaccgactgcggcgtgagcgccagcagccccgcccccggcagcggccccggccaggaggtggccgtgagagtggagctggacagcggcgaggaggtggaggaccagagagagggcaagggccagggcgacggcggcagagtgggcaagagcgagagcgagatcatccacggcggcagactgagagagaacagaatcaccgtgctgcccgagctggaggacgacgacagaaacgccagagagatgaccggcgccgtggcccacacctgcaacctgagcaccagcggcggcagaagccagtggatcaccagagtgcagttcgagaccagcctgggcaacatggtgaagcccagactgtacaagaagtgcaagaagatcagctgggtgccctggcacgcccccgtggtgcccgccacctgggaggccaaggccggcgagctgctggaggccggcagatggaccttccagtag

SEQ ID NO: 312326 - DNA, 624 bp, Artificial Sequence
  derived and/or modified sequence
atgttctccgcagcaagccagcctcttgacccagacggaactctattccgccttagattcacagccatggtgtggtgggccattacgttcccggtgttcggtttttttttttgcattatttggagtttggtgttccacttcgagtacactgtagccacagattgcggagtttcagcctcttcccctgcacctgggtctggaccgggacaagaagtagcagtgcgggttgagctggactctggggaagaggtggaggaccagagggaaggcaagggtcagggagacggaggcagagtggggaaatcagaaagcgagatcatacacgggggacgtctgagagaaaacagaatcaccgtattacccgagctggaggacgatgatagaaacgcacgggagatgacaggggcagtcgctcatacatgcaatctctccacatcgggcggcaggagccagtggatcacacgggtgcagttcgagacatcactgggtaatatggtcaaaccaagactgtataaaaaatgcaaaaaaatttcttgggtgccatggcatgcccctgtcgtgcctgcgacctgggaagctaaggcaggggagctactggaagcaggcagatggactttccaatag

SEQ ID NO: 312327 - DNA, 624 bp, Artificial Sequence
  derived and/or modified sequence
atgttttctgctgccagccagcccctggaccctgatggcaccctcttccggctgcgcttcaccgccatggtgtggtgggccatcaccttccctgtgtttggcttcttcttctgcatcatctggagcctggtgttccactttgagtacacagtggccacagactgtggggtgtctgccagcagccctgcccctggcagcggccctggccaggaggtggccgtgcgggtggagctggacagcggggaggaggtggaggaccagcgggagggcaagggccagggagatggcggccgggtgggcaagtctgagagcgagatcatccacggcggccgcctgcgggagaaccgcatcaccgtgctgcctgagctggaggatgatgacagaaatgcccgggagatgaccggggctgtggcccacacctgcaacctgagcaccagcggcggccgcagccagtggatcaccagggtgcagtttgagaccagcctgggcaacatggtgaagccccggctgtacaagaagtgcaagaagatctcctgggtgccctggcacgcccctgtggtgcctgccacctgggaggccaaggccggggagctgctggaggccggccgctggaccttccagtag

SEQ ID NO: 312328 - DNA, 624 bp, Artificial Sequence
  derived and/or modified sequence
atgttcagcgccgccagccagcccctggaccccgacggcaccctgttcagacttagatttactgccatggtgtggtgggcaatcactttcccagtctttggattcttcttttgtataatttggtccctggtgttccatttcgaatacaccgtggctaccgattgtggagtcagcgcctccagccccgccccaggctcaggccctggacaggaagttgccgtaagggtggaattggatagcggcgaagaggtcgaggaccaacgcgaaggcaaagggcagggcgatggcggccgcgttggaaagagcgaatcggagattattcatggtggccggctgcgggagaatcggatcacagttctacctgagctagaggatgacgatcgcaacgctagggaaatgaccggcgctgtggcacacacttgcaaccttagtaccagtgggggaaggtcacagtggatcacccgcgtgcagttcgagacttccctggggaacatggtgaaaccaagactgtataaaaaatgcaagaaaataagctgggtcccttggcacgcacctgtcgtcccagccacatgggaggccaaggctggggaactgctggaagcgggccgttggacgtttcagtag

SEQ ID NO: 312329 - DNA, 2843 bp, Artificial Sequence
  derived and/or modified sequence
aggctctggggcactccctctgttcctagttgaacttgggtaaggaacaggaatgtggtcagacagggtcagtgggagggctttggccattctgagccaacggtcctttgttagttggcctgaaagaagccatgacttagaacctgaagctgtcaggtggcaagaggccttagtcctggtgtttgatcctggcatagttctgggcctcagtctccccttctgtgaaatgggaataataacctttctacctctgacccttctcctgagtggctatgagggttgtgagagtgaggtgggccaccagagctccctgtccaagccaccgggagcctctcttctgtaggctcttcaagaggtggacctagagtatcactgtgccagggggattcctaagctctgaccctgcctgtctctgctgctcctgccccatctccctctgatccttctcctctgcactgtcttccttttccccttatgccttttctaccctttctgctctggcttttccttatactctgaggagccatctctggaaaaggccccactttcccagacccaggtgtcctaccaggccccaagttgtatccctcgtgctgcttaggccacgccctgcaggatgttctctgcggcctcccagcctttggaccccgatgggaccttgttccggcttcgcttcacagccatggtctggtgggccatcacttttcctgtgttcggcttcttcttctgcatcatctggtccctggtgttccactttgagtacacggtggccactgactgtggggtgagtgccagctccccagcccctgggtcagggccaggtcaggaggtggcagttagggtagaattagatagtggagaggaagtggaggatcagagagagggaaagggacaaggggatgggggaagggtaggtaagtcagagtcagagataattcatggggggagactcagagagaatagaatcacagtcctccctgagttggaagatgatgatagaaatgcaagggagatgacgggcgcagtggctcatacctgtaatctcagcacctcgggagggcgaagccagtggatcactcgagttcagttcgagaccagcctgggcaacatggtgaaaccccgtctgtacaaaaaatgcaaaaaaattagctgggtgccctggcatgcccctgtagtcccagctacttgggaggctaaggcaggagaattgcttgaggctgggaggtggacatttcagtgagctgagttcacaccattatactccagcctgggtgacaggagtaaaaccctgtctcaaaaacaaaacaaaataaaaaaaaaaaaacagcaggctgtgcactgtggctcatgcctgtaatcccagcactttgagaggccgaggtgggaggatcacctgaggtcaggagtttgagaccagcctggccaacatggtgaaaccccatctctactaaaaatacaaaaattagaggccaggcgtctgtaatcccagctactcgggagactgaggcaggagaattgcttgaacctgggaggtggagtttgcaatgagttgagaccgcaccattgcactccagcctaggcaacaagagtgaaactccatctcaaaaaaaaaaagaaaaattagctgcgtgtggtggcacctctagtcccagctactcagcaggctgaagcacgagaatcacttgaacctgggaggcggaggttgcaatgagccaagattatgccactgtactccagcctgggtgacagagcgagaccctgtctcaaataaataaataaataaagagaattcataaacaccctgcaaggtaggtggtgttatacccattttaccaatgaggaaattggagctcagagaggtgaagtgacttgctcaaggtcacccagctaataaaggcagagctgggatgcagactcagctttgtgcagttcctgagcctctatgctgccccttcacattactcagagtgcatgtctgagcctggtctcaagctatgatatctcaagctatggtatctcaagctatggctttgagaccagcatcttctctcccagagctctacatttagcttcctctgacagtgcagaagggaatccatctccttttttgtggaggctgtgaagccccatggctagtcttgccccaggcctacctgtgggctgccctatgagccgcctgcagcattgctcaccttctcagcagtctggcatctcattgaaagaaaggaatgatggtccttaagaactccacttccgaagactgtccctccatagttagagcaaattcattcccttgctgggttgctgggctctggcactgcgctggccctcgttggaggtctgcagaagtgcacagaaagtgtgggcaatggactggccatttccacagttttggaaacttttaaaaatccatattcttgctgggggtggtggctcacgcctgtaatcccagcactttgggaggccgaggcaggcagatcaccagaggtcaggagttctgagacgagcctgcccaacatggtgaaaccccatctctactaaaaatacaaaattagctgggcgtggcagcaggcgcctgtaatcccagttacttgggaggctgaggcaggagaattgcttgaccgcaggaagcggaggttgcagtgagccaaaattgcgccactgcactccaacctgagcaacacagcgagactccatctcaaaaaaaaaaaaatgcatattctggcttggcgtggtggcttatgcctgtaatcccagcagtttgagaggccgaggggggtggattgtttgagtccaggagttttagaccagcctgggcaacatggcaaaaccctgttgctact

SEQ ID NO: 312330 - DNA, 624 bp, Artificial Sequence
  derived and/or modified sequence
atgttctctgccgctagccaacccctggaccccgacggtacactctttcgcctgagatttaccgcaatggtatggtgggccattacatttcccgtgttcggcttttttttctgcatcatctggtcgcttgtctttcacttcgagtacaccgtggcaacagattgcggagtaagcgctagttcccctgctcctggatctggcccaggccaagaagttgccgttagagtggagcttgactccggcgaggaagtcgaagaccagcgcgagggtaaaggacagggggacggagggcgagtggggaaaagtgagagcgagattatccatggtgggcgtttaagagagaataggatcaccgtattaccagaattagaggacgatgaccgcaacgctcgcgagatgaccggcgctgtcgctcacacctgcaacctatccacgtcaggcggtcgttcacagtggataacccgcgtacaattcgagacatcattaggaaatatggtgaaaccacgcctgtataaaaagtgtaagaagattagctgggtcccgtggcacgcacctgtggtcccagctacctgggaggcaaaggcaggagagctgctggaagctggcaggtggaccttccaatag

SEQ ID NO: 312331 - protein, 161 aa, Artificial Sequence
  derived and/or modified sequence
MVDGTQLRGAQLPALGELSHRRGGAPALRVAFLHRPALGASLLGGLRLLEPLPQLHLPVFLLSPALPPQLRPQCRGEPRVASAHLCLLLRGLHHPRKCFHCVHCLIPRAHAPHLHSLAVDQEAHSKSGGSQVLQLETAALHHQLHLLLLGAGCLLSAQHVL

SEQ ID NO: 312332 - DNA, 486 bp, Artificial Sequence
  derived and/or modified sequence
atggtggacggcacccagctgagaggcgcccagctgcccgccctgggcgagctgagccacagaagaggcggcgcccccgccctgagagtggccttcctgcacagacccgccctgggcgccagcctgctgggcggcctgagactgctggagcccctgccccagctgcacctgcccgtgttcctgctgagccccgccctgcccccccagctgagaccccagtgcagaggcgagcccagagtggccagcgcccacctgtgcctgctgctgagaggcctgcaccaccccagaaagtgcttccactgcgtgcactgcctgatccccagagcccacgccccccacctgcacagcctggccgtggaccaggaggcccacagcaagagcggcggcagccaggtgctgcagctggagaccgccgccctgcaccaccagctgcacctgctgctgctgggcgccggctgcctgctgagcgcccagcacgtgctgtag

SEQ ID NO: 312333 - DNA, 486 bp, Artificial Sequence
  derived and/or modified sequence
atggtggacgggacccagttacgcggagctcagctaccagccttaggcgagctaagccacagacgggggggggcccctgcccttcgtgtcgctttcctgcataggccagctctaggggcatcattgctaggcgggttgaggctgctggaacccctgccgcaacttcatctccctgtttttttgctgagccccgctttacccccacagttacgcccacagtgtcgtggggaaccgagagtggcttcagcccacctatgcctgctccttcggggcctacatcatcctcgaaaatgctttcattgtgtgcattgtctcatcccacgcgcgcacgcacctcatctgcacagcttagctgttgatcaagaggcgcatagtaagagtgggggtagccaggttctacagctcgaaacagcggccctccatcatcaactgcacctcctgcttctgggtgccggctgcttgttgtctgcccagcacgtgctgtag

SEQ ID NO: 312334 - DNA, 486 bp, Artificial Sequence
  derived and/or modified sequence
atggtggatggcacccagctgcggggggcccagctgcctgccctgggggagctgagccacagaagaggaggagccccagccctgcgggtggccttcctgcacaggcctgccctgggcgccagcctgctgggcggcctgcggctgctggagcccctgccccagctgcacctgcccgtcttcctgctgagccctgccctgcccccccagctgcggccccagtgccgcggggagccccgggtggccagcgcccacctgtgcctgctgctgcggggcctgcaccaccccaggaagtgcttccactgtgtgcactgcctgatcccccgggcccacgccccccacctgcacagcctggccgtggaccaggaggcccacagcaagagcggcggcagccaggtgctgcagctggagacagctgccctgcaccaccagctgcacctgctgctgctgggcgccggctgcctgctgagcgcccagcacgtgctgtag

SEQ ID NO: 312335 - DNA, 486 bp, Artificial Sequence
  derived and/or modified sequence
atggtggacggcacccagctgcggggcgcccagctgcccgccctgggagaactgtcccatcgacggggtggagcccccgcactgcgggtagcctttttgcaccggccggcattgggagcgtctcttctcggaggcctcaggcttcttgagccccttccacaactgcatctgccagtttttctcctctcacccgctctgcctccgcaacttcgtcctcaatgcagaggagagcctcgagtggccagcgcacacttatgtctgctgctacggggtttgcatcatccaaggaagtgtttccactgcgtgcactgcctgatcccgagggcgcacgcaccacaccttcattccctggccgttgaccaggaggcccattcaaagtcaggcggttcgcaggtgttgcagcttgaaactgccgcactccatcaccagctgcacctactcctgctcggcgcagggtgtctgttgtccgcccagcacgtgctctag

SEQ ID NO: 312336 - DNA, 486 bp, Artificial Sequence
  derived and/or modified sequence
atggtcgatggtactcagctgcggggagcccagttgcctgcactgggagagttgagccaccggcgaggaggggcaccagcacttcgcgtggccttccttcacaggccagccctgggagcatcacttctgggtggcctccgccttctcgaacctctgccccagttgcacctgcccgtgtttctcctcagccccgctctgcctcctcagctgcgtcctcagtgtcgcggagaacctcgcgttgcttccgcacatctgtgcctattgcttaggggtctgcaccatcccaggaaatgctttcactgcgtccactgcctgattccacgcgctcacgctccgcatctgcatagcttggcagtagaccaggaagcgcacagtaagagtggcggtagccaggttctgcagttagagactgccgctctgcatcatcagcttcacctgctgttgcttggggctggatgtttattatctgcccagcacgttctttag

SEQ ID NO: 312337 - protein, 872 aa, Artificial Sequence
  derived and/or modified sequence
MQDVQGPRPGSPGDAEDRRELGLHRGEVNFGGSGKKRGKFVRVPSGVAPSVLFDLLLAEWHLPAPNLVVSLVGEEQPFAMKSWLRDVLRKGLVKAAQSTGAWILTSALRVGLARHVGQAVRDHSLASTSTKVRVVAVGMASLGRVLHRRILEEAQEDFPVHYPEDDGGSQGPLCSLDSNLSHFILVEPGPPGKGDGLTELRLRLEKHISEQRAGYGGTGSIEIPVLCLLVNGDPNTLERISRAVEQAAPWLILVGSGGIADVLAALVNQPHLLVPKVAEKQFKEKFPSKHFSWEDIVRWTKLLQNITSHQHLLTVYDFEQEGSEELDTVILKALVKACKSHSQEPQDYLDELKLAVAWDRVDIAKSEIFNGDVEWKSCDLEEVMVDALVSNKPEFVRLFVDNGADVADFLTYGRLQELYRSVSRKSLLFDLLQRKQEEARLTLAGLGTQQAREPPAGPPAFSLHEVSRVLKDFLQDACRGFYQDGRPGDRRRAEKGPAKRPTGQKWLLDLNQKSENPWRDLFLWAVLQNRHEMATYFWAMGQEGVAAALAACKILKEMSHLETEAEAARATREAKYERLALDLFSECYSNSEARAFALLVRRNRCWSKTTCLHLATEADAKAFFAHDGVQAFLTRIWWGDMAAGTPILRLLGAFLCPALVYTNLITFSEEAPLRTGLEDLQDLDSLDTEKSPLYGLQSRVEELVEAPRAQGDRGPRAVFLLTRWRKFWGAPVTVFLGNVVMYFAFLFLFTYVLLVDFRPPPQGPSGPEVTLYFWVFTLVLEEIRQGFFTDEDTHLVKKFTLYVGDNWNKCDMVAIFLFIVGVTCRMLPSAFEAGRTVLAMDFMVFTLRLIHIFAIHKQLGPKIIVVERMKPV

SEQ ID NO: 312338 - DNA, 2619 bp, Artificial Sequence
  derived and/or modified sequence
atgcaggacgtgcagggccccagacccggcagccccggcgacgccgaggacagaagagagctgggcctgcacagaggcgaggtgaacttcggcggcagcggcaagaagagaggcaagttcgtgagagtgcccagcggcgtggcccccagcgtgctgttcgacctgctgctggccgagtggcacctgcccgcccccaacctggtggtgagcctggtgggcgaggagcagcccttcgccatgaagagctggctgagagacgtgctgagaaagggcctggtgaaggccgcccagagcaccggcgcctggatcctgaccagcgccctgagagtgggcctggccagacacgtgggccaggccgtgagagaccacagcctggccagcaccagcaccaaggtgagagtggtggccgtgggcatggccagcctgggcagagtgctgcacagaagaatcctggaggaggcccaggaggacttccccgtgcactaccccgaggacgacggcggcagccagggccccctgtgcagcctggacagcaacctgagccacttcatcctggtggagcccggcccccccggcaagggcgacggcctgaccgagctgagactgagactggagaagcacatcagcgagcagagagccggctacggcggcaccggcagcatcgagatccccgtgctgtgcctgctggtgaacggcgaccccaacaccctggagagaatcagcagagccgtggagcaggccgccccctggctgatcctggtgggcagcggcggcatcgccgacgtgctggccgccctggtgaaccagccccacctgctggtgcccaaggtggccgagaagcagttcaaggagaagttccccagcaagcacttcagctgggaggacatcgtgagatggaccaagctgctgcagaacatcaccagccaccagcacctgctgaccgtgtacgacttcgagcaggagggcagcgaggagctggacaccgtgatcctgaaggccctggtgaaggcctgcaagagccacagccaggagccccaggactacctggacgagctgaagctggccgtggcctgggacagagtggacatcgccaagagcgagatcttcaacggcgacgtggagtggaagagctgcgacctggaggaggtgatggtggacgccctggtgagcaacaagcccgagttcgtgagactgttcgtggacaacggcgccgacgtggccgacttcctgacctacggcagactgcaggagctgtacagaagcgtgagcagaaagagcctgctgttcgacctgctgcagagaaagcaggaggaggccagactgaccctggccggcctgggcacccagcaggccagagagccccccgccggcccccccgccttcagcctgcacgaggtgagcagagtgctgaaggacttcctgcaggacgcctgcagaggcttctaccaggacggcagacccggcgacagaagaagagccgagaagggccccgccaagagacccaccggccagaagtggctgctggacctgaaccagaagagcgagaacccctggagagacctgttcctgtgggccgtgctgcagaacagacacgagatggccacctacttctgggccatgggccaggagggcgtggccgccgccctggccgcctgcaagatcctgaaggagatgagccacctggagaccgaggccgaggccgccagagccaccagagaggccaagtacgagagactggccctggacctgttcagcgagtgctacagcaacagcgaggccagagccttcgccctgctggtgagaagaaacagatgctggagcaagaccacctgcctgcacctggccaccgaggccgacgccaaggccttcttcgcccacgacggcgtgcaggccttcctgaccagaatctggtggggcgacatggccgccggcacccccatcctgagactgctgggcgccttcctgtgccccgccctggtgtacaccaacctgatcaccttcagcgaggaggcccccctgagaaccggcctggaggacctgcaggacctggacagcctggacaccgagaagagccccctgtacggcctgcagagcagagtggaggagctggtggaggcccccagagcccagggcgacagaggccccagagccgtgttcctgctgaccagatggagaaagttctggggcgcccccgtgaccgtgttcctgggcaacgtggtgatgtacttcgccttcctgttcctgttcacctacgtgctgctggtggacttcagaccccccccccagggccccagcggccccgaggtgaccctgtacttctgggtgttcaccctggtgctggaggagatcagacagggcttcttcaccgacgaggacacccacctggtgaagaagttcaccctgtacgtgggcgacaactggaacaagtgcgacatggtggccatcttcctgttcatcgtgggcgtgacctgcagaatgctgcccagcgccttcgaggccggcagaaccgtgctggccatggacttcatggtgttcaccctgagactgatccacatcttcgccatccacaagcagctgggccccaagatcatcgtggtggagagaatgaagcccgtgtag

SEQ ID NO: 312339 - DNA, 2619 bp, Artificial Sequence
  derived and/or modified sequence
atgcaagacgttcaaggacctaggccaggctcccccggagacgctgaagaccgtagggaactcggcctgcatcggggcgaggtaaacttcgggggcagcggcaaaaagagagggaaatttgtgagggtgccaagcggcgtggccccttctgtgttgttcgatctgctgctcgccgagtggcacttgcccgctccaaacctcgtcgtatcacttgtgggtgaggaacagcctttcgccatgaaatcttggctgcgagacgtcctaagaaaaggcctagtgaaggccgcccaatctacgggcgcctggatcttgacatcagcattgcgggttggattagctaggcacgtgggccaggcggtgcgcgatcatagcctggccagcaccagcaccaaagttagagttgtcgctgtgggaatggccagtctgggcagggtgcttcatcggcggattttggaggaggcccaggaggactttccagtccattacccagaagatgatggaggctctcagggccccctctgctcccttgattccaacttgagtcattttatcttggtggagcccggccctccgggaaagggtgatgggctgacagagttgcggctgcggctggaaaagcacattagcgagcaacgggcaggctacggcgggactggcagcatcgagatccccgtcctgtgcctgcttgtaaatggggatccgaacacattggagaggataagccgggctgtggaacaggcagccccttggcttatcctcgtaggctccggagggattgctgacgtccttgcagctctggtgaaccagccccatctcttggtgcccaaggttgctgagaaacagttcaaggaaaaattcccttcgaaacatttctcatgggaggatattgtgcggtggaccaagttactgcaaaatatcacaagtcatcagcacttactcaccgtctacgacttcgaacaggaagggtcggaggagctcgatactgtgatcctgaaggcccttgtgaaagcctgtaagagtcactctcaggaaccccaagattacctggacgaactgaagctggccgttgcctgggatcgtgtcgacatcgccaaatcggaaatttttaatggagatgtggaatggaagtcttgcgacttggaggaagtaatggtggacgcactggtaagcaataagccagaatttgtgcggttgttcgtggacaacggagctgatgtagctgactttctgacatatggccggctgcaagagctctaccggtccgtatctagaaagagcctcctgtttgatctgctgcagcggaagcaggaagaggctcgtctgactcttgccggccttggcactcagcaggcccgggaaccaccagccggaccacctgctttttctctgcacgaggtctcccgtgttctgaaagattttcttcaggatgcctgccgcggattctaccaggacggaaggcccggagataggcgtcgtgcagaaaagggtcccgctaaacgaccaactgggcaaaaatggctgctggacttaaatcagaaatccgagaatccgtggcgtgacctgtttctgtgggccgtgttgcaaaacagacatgagatggccacatatttctgggctatgggccaagaaggcgtggcggctgccctggccgcctgcaagatcttgaaggaaatgtcccatctcgaaacagaggcagaggccgcccgtgctaccagagaggccaagtatgaacggctggcgcttgacctcttttccgagtgttactccaactcagaggcgagggctttcgctctcttggttcggagaaacagatgttggagcaaaacgacatgtctgcatctggcaactgaggcagacgctaaagccttcttcgctcacgacggagtacaagcttttctgaccagaatctggtggggcgacatggcagctggaactcctatcctcaggctgctgggagccttcctgtgccccgctctggtgtatacaaacctgatcacattctcggaggaagcacccctccgtaccggactcgaggatttgcaggatctcgactctctggataccgagaagtctccactgtacggcttgcagagcagagtggaagagcttgtggaggcccctagagcgcagggtgatcgagggccccgcgctgtcttcctattgacgagatggaggaagttttggggggcccccgtaaccgtattccttgggaatgtagtcatgtactttgctttcctgttcctgttcacatacgtgttgttggtcgacttcagaccaccaccacagggaccaagtgggcctgaagttactttgtatttttgggtctttaccctggtcttagaagagataaggcaaggttttttcacggatgaagacactcatctggttaagaaatttacgctgtacgtgggagacaattggaacaaatgtgacatggtcgctatttttctcttcattgtcggggtgacatgccgcatgttacccagcgctttcgaagcaggacggacagtcctcgcgatggattttatggtattcacacttcgattaatacacatcttcgctattcataagcagctggggcctaagattatcgtagtggaacgcatgaagcctgtgtag

SEQ ID NO: 312340 - DNA, 2619 bp, Artificial Sequence
  derived and/or modified sequence
atgcaggatgtgcagggccccaggcctggcagccctggagatgctgaggaccggcgggagctgggcctgcacagaggagaggtgaactttggaggcagcggcaagaagaggggcaagtttgtgcgggtgcccagcggcgtggcccccagcgtgctgtttgacctgctgctggccgagtggcacctgcctgcccccaacctggtggtgtccctggtgggggaggagcagccctttgccatgaagtcctggctgagagatgtgctgaggaagggcctggtgaaggccgcccagagcactggagcctggatcctgaccagcgccctgcgggtgggcctggcccggcacgtgggccaggccgtgcgggaccacagcctggccagcaccagcaccaaggtgcgggtggtggccgtgggcatggccagcctgggccgggtgctgcaccggcgcatcctggaggaggcccaggaggacttccctgtgcactacccagaagatgatggcggcagccagggccccctgtgcagcctggacagcaacctgagccacttcatcctggtggagcccggccccccaggaaaaggagatggcctgacagagctgcggctgcggctggagaagcacatcagcgagcagagagctggctatggaggcaccggcagcattgagatccctgtgctgtgcctgctggtgaatggagaccccaacaccctggagcgcatcagcagagctgtggagcaggccgccccctggctgatcctggtgggcagcggcggcattgctgatgtgctggccgccctggtgaaccagccccacctgctggtgcccaaggtggccgagaagcagttcaaggagaagttccccagcaagcacttctcctgggaggacatcgtgcgctggaccaagctgctgcagaacatcaccagccaccagcacctgctgactgtgtatgactttgagcaggagggcagcgaggagctggacaccgtcatcctgaaggccctggtgaaggcctgcaagagccacagccaggagccccaggactacctggatgagctgaagctggccgtggcctgggacagagtggacatcgccaagtctgagatcttcaatggagatgtggagtggaagagctgtgacctggaggaggtgatggtggatgccctggtgagcaacaagccagagtttgtgcggctgtttgtggacaacggggctgatgtggccgacttcctgacctacggccgcctgcaggagctgtacagatctgtgtccaggaagagcctgctgtttgacctgctgcagaggaagcaggaggaggcccggctgaccctggccggcctgggcacccagcaggcccgggagcccccagctggccccccagccttcagcctgcacgaggtgtcccgggtgctgaaggacttcctgcaggatgcctgccggggcttctaccaggacggccggcctggggacagaagaagagctgagaagggccctgccaagaggcccaccggccagaagtggctgctggacctgaaccagaagtctgagaacccctggagggacctcttcctgtgggccgtgctgcagaacagacatgagatggccacctacttctgggccatgggccaggagggcgtggccgccgccctggccgcctgcaagatcctgaaggagatgagccacctggagacagaagctgaggccgcccgggccacccgggaggccaagtatgaaaggctggccctggacctcttcagcgagtgctacagcaacagcgaggcccgggcctttgccctgctggtgagaagaaaccgctgctggagcaagaccacctgcctgcacctggccacagaagcagatgccaaggccttctttgcccatgatggagtgcaggccttcctgacccgcatctggtggggagacatggctgctggcacccccatcctgcggctgctgggcgccttcctgtgcccagccctggtgtacaccaacctgatcaccttcagcgaggaggcccccctgaggacaggcctggaggacctgcaggacctggacagcctggacacagagaagagccccctgtatggcctgcagagccgggtggaggagctggtggaggccccccgggcccagggcgaccggggccccagggctgtgttcctgctgacccgctggaggaagttctggggcgcccctgtgacagtgttcctgggcaatgtggtgatgtactttgccttcctgttcctgttcacctacgtgctgctggtggacttccggcccccaccccagggccccagcggccctgaggtgaccctgtacttctgggtgttcaccctggtgctggaggagatccggcagggcttcttcacagatgaggacacccacctggtgaagaagttcaccctgtatgtgggggacaactggaacaagtgtgacatggtggccatcttcctgttcatcgtgggcgtgacctgcaggatgctgcccagcgcctttgaagctggccgcacagtgctggccatggacttcatggtgttcaccctgcggctcatccacatctttgccatccacaagcagctgggccccaagatcatcgtggtggagaggatgaagcctgtgtag

SEQ ID NO: 312341 - DNA, 2619 bp, Artificial Sequence
  derived and/or modified sequence
atgcaggacgtgcagggcccccggcccggcagccccggcgacgccgaggatagacgggaattgggtttgcatagaggggaagtcaacttcgggggatccggaaagaagaggggaaagttcgtgcgagtgccgagcggggttgcaccttctgtgctgtttgaccttcttttggctgagtggcacctaccggccccaaacctagtggtgtctctggtgggagaggaacagcccttcgccatgaaatcttggttacgggatgtactgcgtaaggggctggtgaaagctgcccagtccactggcgcgtggattttgacctccgccttacgggttggactggctagacacgtgggacaggcagtgagagaccacagcttagccagcacttccactaaggtgagggtcgtggcggtcggtatggcttctctgggccgcgtacttcacaggagaattctcgaggaggctcaggaggacttcccagtgcattatcccgaggatgatggggggtctcaaggccctctctgtagcttggactccaatctctcacacttcattctcgtggaacctggcccacctggtaagggagatgggcttaccgaactgcggctcaggctcgaaaagcacatcagtgagcagcgcgccggctacggcgggaccggatccattgagatcccagtactatgtctcctagtgaatggcgatcctaatactcttgagagaattagccgggctgtggaacaggccgctccatggctgatcttggtcggaagcggcggtatcgctgatgtgctggctgccttggtcaatcagccccacctgcttgtgccgaaggtagctgagaaacagttcaaggaaaaattcccctctaagcactttagttgggaggacatcgtgaggtggacaaagttgctgcagaatatcacttcccaccagcacctgcttacagtctacgatttcgagcaggagggtagtgaggaactagatacagtgattctgaaagccctggtgaaggcctgtaaatcccatagtcaagagccacaagattacctggatgagctgaagttagcagtggcttgggatagagtggatattgccaagtctgagatcttcaacggtgacgtggagtggaagtcctgcgacctggaagaggtcatggtggacgccctcgtgtcaaataagccggagtttgttcgactgttcgtagataatggagcagatgtcgcggactttttaacatacggtagacttcaggaactttacaggagcgtgagcaggaaaagtctgctgttcgacctgctgcagagaaaacaagaagaggccagactaactctggccggactgggaacacagcaggcaagggagcctcccgcgggaccccctgccttcagtctgcatgaggtaagtcgagttttgaaagattttctgcaggacgcttgtagaggattttaccaggacggccgacctggcgaccgcagacgggccgaaaaaggccccgcaaaacgcccgacggggcagaaatggctgctagacttgaaccagaagagcgaaaacccctggagagatcttttcctgtgggcagtgctgcaaaaccgccatgagatggccacgtatttctgggcgatgggacaggagggggtggccgcagccttggctgcctgtaaaattttaaaagagatgtcacacctcgagacggaagccgaggcagcgagagccactagagaagccaaatatgagaggttggctttagacctgttctctgagtgctattcaaactcagaggctagagccttcgccttgctggtacggcgcaacaggtgctggtcgaagaccacctgtttacacctcgcaacagaggcagacgccaaggcttttttcgcccatgatggagtccaagcgttcctgaccagaatctggtggggtgacatggcggccgggaccccaatcctgaggcttttgggcgctttcctgtgtccagctttagtgtacaccaatctgatcacatttagtgaagaggcgccgctgcgcactggtctcgaggaccttcaggacctcgactcgctggacaccgagaagtcacccctgtatggtctgcagagcagggtggaggaactagtggaggctccgcgcgctcagggtgatcgcggtccccgagctgtgttcctccttacaagatggcgtaagttttggggagcgcccgtcacggtgttcctgggcaatgtagtcatgtattttgcctttttgttcctgtttacttacgtgttgttggtggacttccggccgcctccacaggggccgtcaggcccggaagtgacgctatatttctgggtattcacacttgtactggaggagattagacaggggttcttcactgatgaagacacgcacctggtcaagaaatttacactctatgttggcgataattggaataagtgtgacatggtggccatctttctgtttatcgtaggagttacatgcagaatgttacctagcgcgttcgaggccggacggacagttctggctatggacttcatggtattcaccctgaggctgattcacatctttgctatccataaacagctgggtcccaaaataatcgttgtagagagaatgaagccagtatag

SEQ ID NO: 312342 - DNA, 2619 bp, Artificial Sequence
  derived and/or modified sequence
atgcaagatgtgcagggccctcgccctggctctcctggggacgccgaagaccggcgagagttgggactacacagaggagaagtgaatttcgggggatcagggaaaaagcgaggcaaattcgtccgagtccccagtggagtggctccttccgtgctcttcgacttgctgcttgctgaatggcatctgccggctcccaacctggtcgtgagtcttgttggcgaggagcagccattcgctatgaagtcctggctgagggatgtgcttagaaagggattggtcaaagccgcacagagtacaggcgcttggattctcacgagcgcactgagggtaggcctggcccgacacgtgggccaggccgtgagagaccattcattagcgagtacaagtactaaggtgcgagtcgtggcagtgggaatggccagtctgggccgtgtgttacatagaagaatcttggaggaagctcaggaggactttccagtgcactacccagaagacgacggtggatcccagggcccactgtgttctctggattcaaatttatctcactttatccttgtagagcctggtccgcctggaaagggagatggcctgacggagcttcgactcagactagagaagcatatcagcgagcagcgcgctggctacggaggcacaggtagcatagagatccctgtcctgtgtctgctggtcaacggcgacccaaacaccctagagcggatctctcgcgcagtagagcaggctgctccatggcttattctggtcggttcaggcggaatagccgacgtactggccgcactggtgaatcagccccatctcctcgtaccgaaagtcgcagagaagcagttcaaggagaaattcccgtcaaagcacttttcttgggaggacatcgttcgatggacgaagctgctccagaatattacatcacatcagcacctcctgacggtatacgacttcgagcaggagggatcagaagagctggatacagtgatcctgaaagcattagtcaaagcatgcaagtcccactctcaggaaccacaggactatcttgacgaacttaagttggccgtcgcctgggacagagtcgatatcgccaaatccgaaatctttaatggcgatgtggagtggaagtcatgcgatctagaagaagtcatggtggacgccttagttagcaacaaacccgaatttgttcgcttgtttgtggacaatggggcagacgtggctgattttctcacatatggcagattacaagaactgtacaggtcagttagcaggaagtccttattgtttgatttattgcagagaaagcaggaagaggcacgcctcacactggctggtctcggcacccagcaggctcgggagcctcccgcagggcctcccgcatttagcttgcacgaggtttccagggtgctcaaggacttcctgcaggacgcatgccggggattttatcaggacggaagacctggagacaggaggcgagccgagaagggacctgccaagcgtcccactggccagaagtggctgctcgacctgaatcaaaaatccgagaacccatggagagatctctttttgtgggccgtgctacagaaccgtcatgaaatggctacctatttctgggctatgggacaggagggggtggctgccgctctggcagcttgtaagattctcaaagagatgtctcacctcgagacggaggctgaagccgctagagcaactcgtgaggccaagtacgagaggttggccttggatctgttttcggagtgctattctaacagcgaggcccgtgccttcgcgttgctcgtgaggcggaatagatgctggtcgaaaaccacctgtctgcatcttgcaactgaagctgatgcaaaagcattctttgcccatgacggtgtccaagccttcctgacacggatctggtggggcgatatggcagccggaactcctatcctcagactgttgggagcttttctttgccctgctctagtgtacacaaatctgatcactttctctgaggaggctcctctgaggacaggcctagaagacctacaggacttggacagtctggacactgagaagtcacccctctatggacttcaatccagagttgaggagttggttgaggcccctagggcacaaggagaccggggaccacgggcagtattcttgcttacacgctggaggaagttttggggggcaccagtaacagtgttcctaggaaatgttgttatgtactttgccttcctgttcctctttacctacgtgctcctggtcgactttaggccccctccacaaggacctagcggcccagaagtgaccctttatttttgggtcttcacattggtgctcgaggaaattcggcaggggttctttacagacgaagacacccacctggttaaaaagttcaccttgtacgttggcgacaattggaacaagtgcgacatggtggccatttttcttttcatagtcggggtcacatgcagaatgctgccttccgctttcgaggcgggtaggactgtgctggccatggacttcatggtatttaccttgcgccttatccatatatttgccatccacaaacagctgggtcctaaaattattgtcgtggaacgaatgaaaccagtgtag

SEQ ID NO: 312343 - DNA, 2625 bp, Artificial Sequence
  derived and/or modified sequence
gaggccaccatgcaggatgtccaaggcccccgtcccggaagccccggggatgctgaagaccggcgggagctgggcttgcacaggggcgaggtcaactttggagggtctgggaagaagcgaggcaagtttgtacgggtgccgagcggagtggccccgtctgtgctctttgacctgctgcttgctgagtggcacctgccggcccccaacctggtggtgtccctggtgggtgaggagcagcctttcgccatgaagtcctggctgcgggatgtgctgcgcaaggggctggtgaaggcggctcagagcacaggagcctggatcctgaccagtgccctccgcgtgggcctggccaggcatgtcgggcaggccgtgcgcgaccactcgctggccagcacgtccaccaaggtccgtgtggttgctgtcggcatggcctcgctgggccgcgtcctgcaccgccgcattctggaggaggcccaggaggattttcctgtccactaccctgaggatgacggcggcagccagggccccctctgttcactggacagcaacctctcccacttcatcctggtggagccaggccccccggggaagggcgatgggctgacggagctgcggctgaggctggagaagcacatctcggagcagagggcgggctacgggggcactggcagcatcgagatccctgtcctctgcttgctggtcaatggtgatcccaacaccttggagaggatctccagggccgtggagcaggctgccccgtggctgatcctggtaggctcggggggcatcgccgatgtgcttgctgccctagtgaaccagccccacctcctggtgcccaaggtggccgagaagcagtttaaggagaagttccccagcaagcatttctcttgggaggacatcgtgcgctggaccaagctgctgcagaacatcacctcacaccagcacctgctcaccgtgtatgacttcgagcaggagggctccgaggagctggacacggtcatcctgaaggcgctggtgaaagcctgcaagagccacagccaggagcctcaggactatctggatgagctcaagctggccgtggcctgggaccgcgtggacatcgccaagagtgagatcttcaatggggacgtggagtggaagtcctgtgacctggaggaggtgatggtggacgccctggtcagcaacaagcccgagtttgtgcgcctctttgtggacaacggcgcagacgtggccgacttcctgacgtatgggcggctgcaggagctctaccgctccgtgtcacgcaagagcctgctcttcgacctgctgcagcggaagcaggaggaggcccggctgacgctggccggcctgggcacccagcaggcccgggagccacccgcggggccaccggccttctccctgcacgaggtctcccgcgtactcaaggacttcctgcaggacgcctgccgaggcttctaccaggacggccggccaggggaccgcaggagggcggagaagggcccggccaagcggcccacgggccagaagtggctgctggacctgaaccagaagagcgagaacccctggcgggacctgttcctgtgggccgtgctgcagaaccgccacgagatggccacctacttctgggccatgggccaggaaggtgtggcagccgcactggccgcctgcaaaatcctcaaagagatgtcgcacctggagacggaggccgaggcggcccgagccacgcgcgaggcgaaatacgagcggctggcccttgacctcttctccgagtgctacagcaacagtgaggcccgcgccttcgccctgctggtgcgccggaaccgctgctggagcaagaccacctgcctgcacctggccaccgaggctgacgccaaggccttctttgcccacgacggcgttcaggccttcctgaccaggatctggtggggggacatggccgcaggcacgcccatcctgcggctgctaggagccttcctctgccccgccctcgtctataccaacctcatcaccttcagtgaggaagctcccctgaggacaggcctggaggacctgcaggacctggacagcctggacacggagaagagcccgctgtatggcctgcagagccgggtggaggagctggtggaggcgccgagggctcagggtgaccgaggcccacgtgctgtcttcctgctcacacgctggcggaaattctggggcgctcccgtgactgtgttcctggggaacgtggtcatgtacttcgccttcctcttcctgttcacctacgtcctgctggtggacttcaggccgcccccccagggcccctcagggcccgaggtcaccctctacttctgggtctttacgctggtgctggaggaaatccggcagggcttcttcacagacgaggacacacacctggtgaagaagttcacactgtatgtgggggacaactggaacaagtgtgacatggtggccatcttcctgttcatcgtgggtgtcacctgcaggatgctgccgtcggcgtttgaggctggccgcacagtcctcgccatggacttcatggtgttcacgctgcggctgatccatatctttgccatacacaagcagctgggccccaagatcatcgtggtagagcgcatgaagccagtg

SEQ ID NO: 312344 - DNA, 1356 bp, Artificial Sequence
  derived and/or modified sequence
atgagggtgcaggacacttccggaacttactattggcacatccccactggcacgactcagtgggaaccgcccggaagagcatcccccagtcagggctccagtccccaggaagagagtcagttaacctggacagggttcgcccacggggagggattcgaagatggcgagttctggaaggatgagccctccgatgaagcacctatggagctcggcctgaaggagcccgaagaaggtacactcacatttccagcacaatctctatcccccgagcccttaccgcaggaagaagagaagttaccgcctcgtaatacgaatcctggtataaagtgctttgccgtgcgttccctgggatgggtcgagatgacggaggaagaactcgcaccaggcagaagttcggtagctgtcaacaattgcatccgtcagctaagttaccacaagaacaatctacatgatcctatgtctggcgggtggggagagggcaaagatttgctgctgcagctcgaagacgaaaccttaaaactggttgagccccaaagtcaggccctgttacacgcacagcctattatcagcatccgtgtttggggagtgggaagggattcaggttctaatcgtgatttcgcctatgtggctagagacaaactgacccagatgctaaaatgtcacgtatttaggtgtgaggcccctgcaaagaatatcgcaacaagtctgcatgagatctgttcaaagatcatggccgagaggaggaatgcccgctgtttggtgaacggattgtcgctggaccacagcaaactggtggatgtgccgttccaggtggaattccccgcgccaaagaatgagcttgttcagaagttccaggtatattatctgggcaatgtcccggtcgctaaacctgttggcgtggacgtaatcaacggtgctctggaatcagtcctatcttcaagttcacgcgaacagtggacccctagccacgtgagcgtagctcctgccactcttactatccttcaccaacagacagaagctgttctgggcgagtgtcgggtgcgctttctgtccttcttggctgtgggaagggatgtgcacaccttcgcctttatcatggcagcgggccccgcaagcttttgctgtcatatgttctggtgcgaacccaatgctgccagcttatctgaggcagtgcaagcggcatgtatgcttcgttaccagaagtgcttggacgcacgctctcaggcaagtacttcttgcttgccggccccaccagcagaatctgtcgcccgaagggtgggatggacagtgcgacggggtgttcagtctctctggggatcattgaagcctaaacgcctcggtgcgcatacgccctag

SEQ ID NO: 312345 - DNA, 1356 bp, Artificial Sequence
  derived and/or modified sequence
atgagggtgcaggacaccagcggcacctactactggcacatccccaccggcaccacccagtgggagcccccaggccgggccagccccagccagggcagcagcccccaggaggagagccagctgacctggacaggctttgcccacggggagggctttgaagatggagagttctggaaggatgagcccagtgatgaggcccccatggagctgggcctgaaggagcctgaggagggcaccctgaccttccctgcccagagcctgagccctgagcccctgccccaggaggaggagaagctgccccccaggaacaccaaccctggcatcaagtgctttgctgtgcgcagcctgggctgggtggagatgacagaggaggagctggcccctggccgcagctctgtggccgtgaacaactgcatccggcagctgagctaccacaagaacaacctgcatgaccccatgtctgggggctggggcgagggcaaggacctgctgctgcagctggaggatgagaccctgaagctggtggagccccagagccaggccctgctgcacgcccagcccatcatcagcatccgggtgtggggcgtgggccgggacagcggcagcaacagagactttgcctacgtggcccgggacaagctgacccagatgctgaagtgccacgtgttccgctgtgaggccccagccaagaacatcgccaccagcctgcacgagatctgcagcaagatcatggccgagaggagaaatgcccgctgcctggtgaatggcctgagcctggaccacagcaagctggtggatgtgcccttccaggtggagttccctgcccccaagaatgagctggtgcagaagttccaggtgtactacctgggcaatgtgcctgtggccaagcctgtgggcgtggatgtgatcaacggggccctggagagcgtgctgagcagcagcagccgggagcagtggacccccagccacgtgtctgtggccccagccaccctgaccatcctgcaccagcagacagaggccgtgctgggggagtgccgggtgcgcttcctgtccttcctggccgtgggcagagatgtgcacacctttgccttcatcatggccgccggccctgccagcttctgctgccacatgttctggtgtgagcccaatgctgccagcctgtctgaggccgtgcaggccgcctgcatgctgcgctaccagaagtgcctggatgcccggagccaggccagcaccagctgcctgcctgcccctcctgctgagagcgtggcccggcgggtgggctggacagtgagaagaggagtgcagagcctgtggggcagcctgaagcccaagaggctgggcgcccacaccccctag

SEQ ID NO: 312346 - DNA, 1356 bp, Artificial Sequence
  derived and/or modified sequence
atgcgggtgcaggacaccagcggcacctactactggcacatccccaccggtaccacccagtgggagccccctggccgggcatctccctcccagggttcctctccccaggaggagtcccaactcacgtggacagggttcgcacatggcgaggggtttgaggatggggagttttggaaggacgagccatctgacgaggcacctatggaactgggcctcaaggaacccgaggaggggacgttgacctttcccgcacaatcgctgagccctgaacctcttccacaggaggaggaaaagctgcccccaaggaatacaaacccaggaattaagtgtttcgccgtccgaagcctgggatgggtagagatgactgaggaagaactcgctccaggccgatccagcgttgccgtgaacaattgcattcgccagcttagctaccacaagaacaacctccacgatccaatgagtggtggatggggcgaagggaaagatcttcttcttcagctggaggacgagactctgaagctcgtggagccccagtcccaggctctgctccatgcccagccgattatcagcattcgagtctggggcgtgggaagagactctggttccaaccgagacttcgcctacgtggcgagggataagctcactcagatgctgaaatgccatgtcttcaggtgtgaggccccagctaagaacattgctacctctttgcacgagatttgctcaaagattatggcagaaagacggaacgcacgctgcctcgtcaatggattatccctcgatcatagtaaattggtcgacgtgccatttcaggtggaattccctgcccccaaaaacgagctggtacagaaatttcaagtctattatcttggaaatgtgcctgtagcaaaaccagtgggtgtagatgttattaacggtgctctggaaagcgttctctcttcgagcagtcgggagcaatggaccccctctcatgtcagcgtagctcccgccactctgacaatactgcaccaacagacagaagcggttctcggcgaatgtagggttcggttcctttcatttctcgccgtcggaagagatgtgcatacctttgcatttattatggctgccgggccagcctccttctgttgtcacatgttttggtgtgagcctaacgccgcctctctctctgaggccgtgcaggcggcgtgcatgctcagatatcagaagtgtttggatgctcgctcccaggcatccaccagctgtctgcccgctcccccagcagagtcagtcgcccgtagagtgggatggactgttcgtcgcggggtccagagcctttgggggagcctaaaacctaaacggctgggagcccataccccctag

SEQ ID NO: 312347 - DNA, 1356 bp, Artificial Sequence
  derived and/or modified sequence
atgcgggtacaggacaccagcggtacgtattattggcacatccccactggaaccacccagtgggaaccaccgggacgagcaagtccaagccagggctcttctccgcaggaagaaagccaattaacatggactggattcgcccacggagaagggtttgaagatggtgagttttggaaggatgaacccagcgatgaggcccctatggagctcggccttaaggagccagaggaaggtacattaacctttcccgcacaatctcttagccccgagcccctaccccaagaggaggaaaagttgcccccaagaaacacaaacccaggaattaaatgttttgctgttcgaagcctcggatgggtagagatgaccgaggaagaattagcaccaggacgctcatccgtggccgtcaacaactgtatcaggcagctgagttaccacaagaataatttacacgaccctatgtctggtggttggggcgagggcaaagacctgttgctgcagctcgaagacgagaccctcaagctggtggagccccaaagccaggctctgttacatgcacaaccgatcatatcgattcgcgtctggggtgtcggtagagactccggatcgaaccgggacttcgcttacgtggccagagataagctgacgcagatgctcaaatgtcatgtgttccgttgtgaggctccggctaagaacatagccacatcgctccacgaaatctgttctaagatcatggccgagcggaggaatgcaagatgcctggtgaatgggctgtcactggatcattccaaactggtggacgttccttttcaggtggagtttcccgcacctaagaacgaactggttcagaaatttcaggtgtattatctgggaaacgttccagttgcaaagcctgtcggagtggacgtcattaatggcgcactggaaagcgtgctttcaagcagcagtcgggagcaatggacccctagtcacgtgtcagtggcccctgccacgctgaccatactccaccaacagactgaggccgtactgggagaatgtcgcgtgcgattcctgagcttcctggcagtagggagggatgtgcacactttcgcattcatcatggccgcaggtccagcttccttctgctgccatatgttctggtgcgaacccaacgcagcctccctgtcagaggccgttcaagcggcttgcatgctccggtatcagaaatgtttagatgctcggagccaggcctcaaccagctgtctgcccgctccgcctgcggagtcagtcgctagaagggtaggctggactgtaaggagaggcgtgcagtctctctgggggagtctgaaacccaaaaggttgggagctcataccccatag

SEQ ID NO: 312348 - DNA, 1356 bp, Artificial Sequence
  derived and/or modified sequence
atgagagtgcaggacaccagcggcacctactactggcacatccccaccggcaccacccagtgggagccccccggcagagccagccccagccagggcagcagcccccaggaggagagccagctgacctggaccggcttcgcccacggcgagggcttcgaggacggcgagttctggaaggacgagcccagcgacgaggcccccatggagctgggcctgaaggagcccgaggagggcaccctgaccttccccgcccagagcctgagccccgagcccctgccccaggaggaggagaagctgccccccagaaacaccaaccccggcatcaagtgcttcgccgtgagaagcctgggctgggtggagatgaccgaggaggagctggcccccggcagaagcagcgtggccgtgaacaactgcatcagacagctgagctaccacaagaacaacctgcacgaccccatgagcggcggctggggcgagggcaaggacctgctgctgcagctggaggacgagaccctgaagctggtggagccccagagccaggccctgctgcacgcccagcccatcatcagcatcagagtgtggggcgtgggcagagacagcggcagcaacagagacttcgcctacgtggccagagacaagctgacccagatgctgaagtgccacgtgttcagatgcgaggcccccgccaagaacatcgccaccagcctgcacgagatctgcagcaagatcatggccgagagaagaaacgccagatgcctggtgaacggcctgagcctggaccacagcaagctggtggacgtgcccttccaggtggagttccccgcccccaagaacgagctggtgcagaagttccaggtgtactacctgggcaacgtgcccgtggccaagcccgtgggcgtggacgtgatcaacggcgccctggagagcgtgctgagcagcagcagcagagagcagtggacccccagccacgtgagcgtggcccccgccaccctgaccatcctgcaccagcagaccgaggccgtgctgggcgagtgcagagtgagattcctgagcttcctggccgtgggcagagacgtgcacaccttcgccttcatcatggccgccggccccgccagcttctgctgccacatgttctggtgcgagcccaacgccgccagcctgagcgaggccgtgcaggccgcctgcatgctgagataccagaagtgcctggacgccagaagccaggccagcaccagctgcctgcccgccccccccgccgagagcgtggccagaagagtgggctggaccgtgagaagaggcgtgcagagcctgtggggcagcctgaagcccaagagactgggcgcccacaccccctag

SEQ ID NO: 312349 - protein, 655 aa, Artificial Sequence
  derived and/or modified sequence
MAMAKARKPREALLWALSDLEENDFKKLKFYLRDMTLSEGQPPLARGELEGLIPVDLAELLISKYGEKEAVKVVLKGLKVMNLLELVDQLSHICLHDYREVYREHVRCLEEWQEAGVNGRYNQVLLVAKPSSESPESLACPFPEQELESVTVEALFDSGEKPSLAPSLVVLQGSAGTGKTTLARKMVLDWATGTLYPGRFDYVFYVSCKEVVLLLESKLEQLLFWCCGDNQAPVTEILRQPERLLFILDGFDELQRPFEEKLKKRGLSPKESLLHLLIRRHTLPTCSLLITTRPLALRNLEPLLKQARHVHILGFSEEERARYFSSYFTDEKQADRAFDIVQKNDILYKACQVPGICWVVCSWLQGQMERGKVVLETPRNSTDIFMAYVSTFLPPDDDGGCSELSRHRVLRSLCSLAAEGIQHQRFLFEEAELRKHNLDGPRLAAFLSSNDYQLGLAIKKFYSFRHISFQDFFHAMSYLVKEDQSRLGKESRREVQRLLEVKEQEGNDEMTLTMQFLLDISKKDSFSNLELKFCFRISPCLAQDLKHFKEQMESMKHNRTWDLEFSLYEAKIKNLVKGIQMNNVSFKIKHSNEKKSQSQNLFSVKSSLSHGPKEEQKCPSVHGQKEGKDNIAGTQKEASTGKGRGTEETPKNTYI

SEQ ID NO: 312350 - protein, 66 aa, Artificial Sequence
  derived and/or modified sequence
MAMAKARKPREALLWALSDLEENDFKKLKFYLRDMTLSEGQPPLARGELEGLIPVDLAELLISKYG

SEQ ID NO: 312351 - DNA, 1968 bp, Artificial Sequence
  derived and/or modified sequence
atggccatggccaaggccagaaagcccagagaggccctgctgtgggccctgagcgacctggaggagaacgacttcaagaagctgaagttctacctgagagacatgaccctgagcgagggccagccccccctggccagaggcgagctggagggcctgatccccgtggacctggccgagctgctgatcagcaagtacggcgagaaggaggccgtgaaggtggtgctgaagggcctgaaggtgatgaacctgctggagctggtggaccagctgagccacatctgcctgcacgactacagagaggtgtacagagagcacgtgagatgcctggaggagtggcaggaggccggcgtgaacggcagatacaaccaggtgctgctggtggccaagcccagcagcgagagccccgagagcctggcctgccccttccccgagcaggagctggagagcgtgaccgtggaggccctgttcgacagcggcgagaagcccagcctggcccccagcctggtggtgctgcagggcagcgccggcaccggcaagaccaccctggccagaaagatggtgctggactgggccaccggcaccctgtaccccggcagattcgactacgtgttctacgtgagctgcaaggaggtggtgctgctgctggagagcaagctggagcagctgctgttctggtgctgcggcgacaaccaggcccccgtgaccgagatcctgagacagcccgagagactgctgttcatcctggacggcttcgacgagctgcagagacccttcgaggagaagctgaagaagagaggcctgagccccaaggagagcctgctgcacctgctgatcagaagacacaccctgcccacctgcagcctgctgatcaccaccagacccctggccctgagaaacctggagcccctgctgaagcaggccagacacgtgcacatcctgggcttcagcgaggaggagagagccagatacttcagcagctacttcaccgacgagaagcaggccgacagagccttcgacatcgtgcagaagaacgacatcctgtacaaggcctgccaggtgcccggcatctgctgggtggtgtgcagctggctgcagggccagatggagagaggcaaggtggtgctggagacccccagaaacagcaccgacatcttcatggcctacgtgagcaccttcctgccccccgacgacgacggcggctgcagcgagctgagcagacacagagtgctgagaagcctgtgcagcctggccgccgagggcatccagcaccagagattcctgttcgaggaggccgagctgagaaagcacaacctggacggccccagactggccgccttcctgagcagcaacgactaccagctgggcctggccatcaagaagttctacagcttcagacacatcagcttccaggacttcttccacgccatgagctacctggtgaaggaggaccagagcagactgggcaaggagagcagaagagaggtgcagagactgctggaggtgaaggagcaggagggcaacgacgagatgaccctgaccatgcagttcctgctggacatcagcaagaaggacagcttcagcaacctggagctgaagttctgcttcagaatcagcccctgcctggcccaggacctgaagcacttcaaggagcagatggagagcatgaagcacaacagaacctgggacctggagttcagcctgtacgaggccaagatcaagaacctggtgaagggcatccagatgaacaacgtgagcttcaagatcaagcacagcaacgagaagaagagccagagccagaacctgttcagcgtgaagagcagcctgagccacggccccaaggaggagcagaagtgccccagcgtgcacggccagaaggagggcaaggacaacatcgccggcacccagaaggaggccagcaccggcaagggcagaggcaccgaggagacccccaagaacacctacatctag

SEQ ID NO: 312352 - DNA, 201 bp, Artificial Sequence
  derived and/or modified sequence
atggccatggccaaggccagaaagcccagagaggccctgctgtgggccctgagcgacctggaggagaacgacttcaagaagctgaagttctacctgagagacatgaccctgagcgagggccagccccccctggccagaggcgagctggagggcctgatccccgtggacctggccgagctgctgatcagcaagtacggctag

SEQ ID NO: 312353 - DNA, 1968 bp, Artificial Sequence
  derived and/or modified sequence
atggccatggcaaaagccagaaagccacgggaggcactcctatgggcactttcagatctcgaagagaatgacttcaaaaagctaaaattttacctgagggacatgacactgagcgagggtcagcccccactggccaggggagagcttgaaggactgattccggttgacctcgcggaactgttgatttcgaaatacggagagaaagaggccgttaaagttgtcctgaaaggtctcaaagtcatgaatctcctggaactcgttgaccagctctcacacatctgcctacacgattatcgcgaagtatatcgcgagcacgttcgttgtcttgaggagtggcaggaagccggagttaatggcagatataatcaggttctgttggtggcaaagccgtcttcagagagccccgagagcctggcttgtccgtttcccgagcaggaactcgagagcgttacagtagaagcgcttttcgattcaggcgagaaaccctcgctggccccatccctggtggtgctccaaggaagcgccggcacaggaaagaccacgctcgctcgaaaaatggtgctcgactgggccacaggtacgttgtatcccgggaggttcgactatgtgttttacgtttcgtgtaaagaggtggtactcctactggagagcaaactggagcagctcttgttctggtgctgtggagacaatcaagctcccgtcaccgagattctgcgccagccagagcgactgctgttcatcttggatgggtttgacgagctccagagacccttcgaggaaaagcttaaaaaacgcgggctgtctccgaaggagagcctacttcacctgctgatcaggagacataccctccccacttgtagtctcctgatcaccacccgacccttggccttacgtaacctcgaacccctgttaaaacaggcacgccatgtgcacatcttggggtttagcgaagaggagagagcaagatattttagcagctatttcacggacgaaaaacaggctgaccgcgccttcgatattgtgcagaaaaatgatatcctctataaggcatgtcaggtgcccggtatctgctgggtcgtgtgctcctggctgcaagggcaaatggagcgcggcaaagttgtgctggagacaccacgtaacagcaccgacattttcatggcttacgtttccacttttctacctcccgatgatgacggggggtgctctgagctttcgcggcatcgggttttgagatcactgtgctccctggccgcagagggcattcagcaccagcgctttcttttcgaagaagccgagctccgcaagcataacctggatggtccgagactggcagctttcctgtcctctaatgattatcaattaggcttagccattaagaaattttatagcttcaggcatatttccttccaggatttttttcacgccatgagctacttagtgaaagaagaccagagtcgacttggtaaggagtcgaggagagaggtccaaaggctcctggaggtgaaggagcaggagggtaatgatgagatgaccctcaccatgcagttcctgctcgacattagcaagaaggattccttttcaaatttggagctcaagttctgctttcggatttccccatgcctagcccaggatctgaaacatttcaaagaacagatggaaagcatgaagcacaatcgtacttgggacctcgagttttctctgtatgaagccaaaataaaaaacctggtaaaagggattcagatgaacaatgtctcctttaaaattaaacactcgaatgagaagaaatcacaaagtcaaaacctcttcagtgtgaagtctagtctttcgcacggccccaaagaggagcaaaaatgccccagtgtgcacggccagaaagagggaaaggacaacatagctggcacccaaaaagaggcttcaacaggaaaaggcaggggtacagaagaaactccgaagaacacctacatttag

SEQ ID NO: 312354 - DNA, 201 bp, Artificial Sequence
  derived and/or modified sequence
atggctatggccaaggcacggaaaccccgcgaagccctgctgtgggctctaagcgatttagaggaaaacgactttaaaaaactgaagttttatctcagagacatgacgttgtccgaaggtcaaccaccactggccaggggagagctggaaggactcatccccgttgacctcgccgagttgctgatctctaagtatggatag

SEQ ID NO: 312355 - DNA, 1968 bp, Artificial Sequence
  derived and/or modified sequence
atggccatggccaaggccaggaagccccgggaggccctgctgtgggccctgagtgacctggaggagaatgacttcaagaagctgaagttctacctgcgggacatgaccctgtctgagggccagccccccctggcccggggggagctggagggcctcatccctgtggacctggccgagctgctgatcagcaaatatggagagaaggaggccgtgaaggtggtgctgaagggcctgaaggtgatgaacctgctggagctggtggaccagctgagccacatctgcctgcatgactaccgggaggtgtaccgggagcacgtgcgctgcctggaggagtggcaggaggccggcgtgaatggccgctacaaccaggtgctgctggtggccaagcccagcagcgagagccctgagagcctggcctgccccttccctgagcaggagctggagagcgtgacagtggaggccctgtttgacagcggggagaagcccagcctggcccccagcctggtggtgctgcagggcagcgctggcaccgggaagaccaccctggccaggaagatggtgctggactgggccaccggcaccctgtacccaggccgctttgattatgtgttctacgtgtcctgcaaggaggtggtgctgctgctggagagcaagctggagcagctgctcttctggtgctgcggggacaaccaggcccctgtgacagagatcctgcggcagcctgagcggctgctcttcatcctggatggctttgatgagctgcagaggccctttgaggagaagctgaagaagaggggcctgagccccaaggagagcctgctgcacctgctgatcagaagacacaccctgcccacctgcagcctgctgatcaccacccggcccctggccctgaggaacctggagcccctgctgaagcaggcccggcacgtgcacatcctgggcttcagcgaggaggagcgggcccgctacttcagcagctacttcacagatgagaagcaggccgaccgggcctttgacatcgtgcagaagaatgacatcctgtacaaggcctgccaggtgcccggcatctgctgggtggtgtgctcctggctgcagggccagatggagcggggcaaggtggtgctggagaccccaagaaacagcacagacatcttcatggcctacgtgtccaccttcctgcccccagatgatgatggcggctgcagcgagctgagccgccaccgggtgctgcggagcctgtgcagcctggccgctgagggcatccagcaccagcgcttcctgtttgaggaggccgagctgaggaagcacaacctggatggcccccggctggccgccttcctgagcagcaatgactaccagctgggcctggccatcaagaagttctacagcttccgccacatctccttccaggacttcttccacgccatgagctacctggtgaaggaggaccagagccggctgggcaaggagagccggcgggaggtgcagaggctgctggaggtgaaggagcaggagggcaatgatgagatgaccctgaccatgcagttcctgctggacatcagcaagaaggacagcttcagcaacctggagctgaagttctgcttccgcatcagcccctgcctggcccaggacctgaagcacttcaaggagcagatggagagcatgaagcacaacagaacctgggacctggagttcagcctgtatgaggccaagatcaagaacctggtgaagggcatccagatgaacaacgtgtccttcaagatcaagcacagcaatgagaagaagagccagagccagaacctcttctctgtgaagagcagcctgagccacggccccaaggaggagcagaagtgccccagcgtgcacggccagaaggagggcaaggacaacattgctggcacccagaaggaggccagcacaggcaagggccggggcacagaggagacccccaagaacacctacatctag

SEQ ID NO: 312356 - DNA, 201 bp, Artificial Sequence
  derived and/or modified sequence
atggccatggccaaggccaggaagccccgggaggccctgctgtgggccctgagtgacctggaggagaatgacttcaagaagctgaagttctacctgcgggacatgaccctgtctgagggccagccccccctggcccggggggagctggagggcctcatccctgtggacctggccgagctgctgatcagcaaatatggatag

SEQ ID NO: 312357 - DNA, 1968 bp, Artificial Sequence
  derived and/or modified sequence
atggccatggccaaggcccggaagccccgggaggccctgctgtgggccctgtcagacttagaagaaaatgattttaagaagttaaagttctacctgagagatatgactctgtcagaaggccagccacccctggcgcggggtgaacttgaggggcttatcccagtcgacctggccgagctgcttatcagtaagtacggcgaaaaggaggccgtaaaggtggtgctcaagggactgaaggtgatgaatttgctggaactggtagaccagctgtcgcatatatgcctgcatgactacagggaggtgtatcgtgaacacgtccgctgccttgaggagtggcaggaagctggggtcaacggtcgctacaatcaggtgttgctcgttgccaaacccagcagtgagtcccccgaatcattagcctgtccctttccggagcaggagcttgaaagcgtgacagtggaagctctcttcgactctggagaaaagccttcactcgctcctagcctcgtggtgcttcagggttccgctggcacgggaaaaaccaccctggcgcgcaagatggtcctggattgggccactggcaccctttatcccgggaggttcgactatgtgttttatgtgtcttgtaaagaggtggtacttctgctggagagtaagctcgagcagctgcttttctggtgttgtggggacaaccaggctccagttaccgagatcttgcggcagcctgaacggcttttattcattctagatggatttgatgaactgcagagaccgttcgaggagaaattgaaaaaacgcggactttcccctaaggaatccctgctgcatctgctcattcgcaggcacactctgccaacttgctcattactcatcacaacccgcccacttgcacttcgtaatctcgagccacttctcaaacaggctcggcacgtgcacatcctgggtttcagcgaggaggaaagggcccgttacttctcatcatatttcactgatgagaaacaggctgatcgggccttcgatattgtgcagaaaaatgacattctgtacaaggcctgccaggtccccggcatctgttgggtggtctgctcatggttgcaaggtcagatggaacgcggcaaagtggtgcttgaaactcccagaaactctaccgacatctttatggcctacgtgtcaacctttctcccccctgacgatgacggagggtgcagtgaactgagccggcatcgcgtgctccgctccttgtgttcattggccgcagagggtatacagcatcagaggtttcttttcgaagaagcggagttaaggaaacacaatctggacggtccccgcctagccgcctttctgtcgtccaacgactatcagttaggactggccatcaaaaaattttactcgtttcgtcatatctcatttcaagactttttccacgctatgtcttacttggtgaaggaagaccagagcagactcggaaaggaatcaagacgcgaagtccagaggctgttggaagtaaaggagcaggaaggaaacgatgagatgaccctcactatgcaattcctgctggacatttccaaaaaggactctttttccaacctcgaactcaagttctgttttcgtatttcaccctgtctagcacaggacctcaaacactttaaagagcagatggaatcaatgaaacataaccgcacctgggacttggagttttccctgtatgaggcgaaaattaagaatcttgtgaaaggaattcagatgaataacgtttcttttaagattaaacactcgaatgagaagaagagtcaatcccagaatctgttcagtgttaaatcttccctgtcccacggtcccaaggaggagcagaaatgtccatcagtccatggtcagaaagaagggaaggacaatatcgcgggaacacagaaggaggctagcactggcaagggacgcggtacagaggaaacccctaaaaatacatatatctag

SEQ ID NO: 312358 - DNA, 201 bp, Artificial Sequence
  derived and/or modified sequence
atggccatggccaaggcccggaagccccgggaggccctgctgtgggcgctgagtgacctcgaggagaacgactttaagaaactgaagttctacttacgggatatgaccctttcggaaggacaaccccctcttgccaggggtgagttggagggacttatccccgttgacttggctgaactcttgatttctaagtacggttag

SEQ ID NO: 312359 - DNA, 2350 bp, Artificial Sequence
  derived and/or modified sequence
ggagctttgcacatgtatctcgtctctccctggcctccgctctataacttggccaagcccccagaaagcagggtgggcctctcagcagtggacctctccttttgcctctttctccaggtcactggtcttctggtctggacttgatccttcccccagatcaccatggccatggccaaggccagaaagccccgggaggcattgctctgggccttgagtgaccttgaggagaacgatttcaagaagttaaagttctacttacgggatatgaccctgtctgagggccagcccccactggccagaggggagttggagggcctgattccggtggacctggcagaattactgatttcaaagtatggagaaaaggaggctgtgaaagttgtcctcaagggcttgaaggtcatgaacctgttggaacttgtggaccagctcagccatatttgtctgcatgattacagagaagtataccgagagcatgtgcgctgcctagaggaatggcaggaagcaggagtcaatggcagatacaaccaggtgctcctggtggccaagcccagctcagagagcccagaatcacttgcctgccccttcccggagcaggagctggagtctgtcacggtggaggctctatttgattcaggggaaaagccctcactggccccatccttagttgtgctacaggggtcggctggcactggaaagacaactctcgccagaaaaatggtgttggactgggccaccggtactctgtacccaggccggtttgattatgtcttttatgtaagctgcaaagaagtggtcctgctgctggagagcaaactggagcagctccttttctggtgctgcggggacaatcaagcccctgtcacagagattctgaggcagccagagcggctcctgttcatcctggatggctttgatgagctgcagaggccctttgaagaaaagttgaagaagaggggtttgagtcccaaggagagcctgctgcaccttctaattaggagacatacactccccacgtgctcccttctcatcaccacccggcccctggctttgaggaatctggagcccttgctgaaacaagcacgtcatgtccatatcctaggcttctctgaggaggagagggcgaggtacttcagctcctatttcacggatgagaagcaagctgaccgtgccttcgacattgtacagaaaaatgacattctctacaaagcgtgtcaggttccaggcatttgctgggtggtctgctcctggctgcaggggcagatggagagaggcaaagttgtcttagagacacctagaaacagcactgacatcttcatggcttacgtctccacctttctgccgcccgatgatgatgggggctgctccgagctttcccggcacagggtcctgaggagtctgtgctccctagcagctgaagggattcagcaccagaggttcctatttgaagaagctgagctcaggaaacataatttagatggccccaggcttgccgctttcctgagtagtaacgactaccaattgggacttgccatcaagaagttctacagcttccgccacatcagcttccaggacttttttcatgccatgtcttacctggtgaaagaggaccaaagccggctggggaaggagtcccgcagagaagtgcaaaggctgctggaggtaaaggagcaggaagggaatgatgagatgaccctcactatgcagtttttactggacatctcgaaaaaagacagcttctcgaacttggagctcaagttctgcttcagaatttctccctgtttagcgcaggatctgaagcattttaaagaacagatggaatctatgaagcacaacaggacctgggatttggaattctccctgtatgaagctaaaataaagaatctggtaaaaggtattcagatgaacaatgtatcattcaagataaaacattcaaatgaaaagaaatcacagagccagaatttattttctgtcaaaagcagcttgagtcatggacctaaggaggagcaaaaatgtccttctgtccatggacagaaggagggcaaagataatatagcaggaacacaaaaggaagcttctactggaaaaggcagagggacagaggaaacaccaaaaaatacttacatataaacctaattaaatatgtacaagatctctatgaggaaaatgacaacactctgaggaaagaaatcaaagaagctgtaaatgaatgggaagattttccatgttcatgaatagaaagactcaatattgttaagatgttagttttccccagtttgatctgtagattcaatgcaatcccaatcaagatcccagcaaataactttgtggacattgataagatgattct

SEQ ID NO: 312360 - DNA, 423 bp, Artificial Sequence
  derived and/or modified sequence
caccaaacagaagtgaactagtgagtatgggctaagagagcccaaacttggacctgtagagctgtcggaccaggaaaggggatctgtttcgtctcagtccccaggctttgcttactgggctcctggatcagggagctgagttctcgctgcctcacctccagctccccaagtctgaactgtggtcactggtcttctggtctggacttgatccttcccccagatcaccatggccatggccaaggccagaaagccccgggaggcattgctctgggccttgagtgaccttgaggagaacgatttcaagaagttaaagttctacttacgggatatgaccctgtctgagggccagcccccactggccagaggggagttggagggcctgattccggtggacctggcagaattactgatttcaaagtatgg

SEQ ID NO: 312361 - DNA, 1968 bp, Artificial Sequence
  derived and/or modified sequence
atggcaatggccaaagcacgcaaaccaagggaggccctcctgtgggccctttcggacctggaagaaaacgacttcaagaagctcaaattctatctgcgggatatgaccctgagcgagggacaacccccactcgccaggggcgagctggaggggctgatcccagtggacctcgccgaactcctgatcagcaagtacggcgagaaagaagccgtgaaggtggtcctgaaaggcctgaaagtgatgaacttgttggaactggtggaccagctctcccacatctgtctccacgactaccgggaggtctaccgagagcacgtgaggtgtttagaggaatggcaggaagcaggagtcaatggccgttataatcaggtcctcctcgtagccaagccttcatccgaatcgccggaatctctggcttgtccctttcctgagcaggaactggagagcgtcaccgtcgaagctttgttcgatagcggggaaaagcctagcctggctccaagcctcgtggtcttgcagggatctgctggaacagggaagacaacacttgctcggaagatggtgctggattgggccacggggactctttatccagggagattcgattacgtcttctatgtgtcatgtaaagaggtggtattactccttgaatccaaactagagcagctgttgttctggtgttgcggggacaaccaggctcctgtgacagagatcctgcgtcaacctgaacggctcctgtttattctagatggattcgatgaattgcagcgccctttcgaggagaaattgaagaagcgaggcctgagtccgaaggagagcctgttgcatcttctcattcgtaggcatacattaccaacgtgttcccttctcattaccaccagaccgctcgctctacgtaatttggagccattactcaagcaagcccgtcatgtacatatcttgggattctcagaggaagagagggccaggtatttctcatcatattttacagacgaaaagcaggcggaccgcgcttttgatattgtccaaaaaaatgacattctgtataaggcatgtcaggttcctggtatatgctgggttgtctgtagctggctgcagggtcagatggagcgcggaaaggtggttctggaaacaccaaggaattcaacagacatcttcatggcctacgtgagtacatttttacctccggacgacgatggtggatgcagtgaactgagccggcacagggtcctgcgctctctgtgcagcctcgccgcagagggaatccaacaccaaagattcctttttgaagaagccgaactacgcaaacacaatctcgatgggcctagactggccgctttcctgagttccaacgattatcagttaggcctggctataaagaagttctactcttttaggcatattagtttccaggactttttccacgcaatgagttatttggtgaaggaggaccaatcgcgcctgggaaaagaaagccgtcgggaagtgcagcggctgttagaagtaaaagaacaagagggcaatgacgagatgacgctgactatgcagttcctgctggatatcagcaaaaaggattccttttccaacctagaactgaagttttgcttcaggatctccccctgtttagcacaggatctaaagcacttcaaggaacagatggaaagtatgaaacacaacaggacatgggatctcgaattctccctgtacgaggcaaaaatcaagaacctggtgaagggaatccagatgaacaatgtcagtttcaagattaaacacagtaacgagaagaaatcccaaagccagaatctgttttcagtgaagtcatccctcagccacggaccaaaggaggaacagaaatgcccctccgttcatggccagaaggaaggtaaggacaatattgcgggtactcagaaggaagcgtccaccgggaagggacgaggtactgaagaaacccctaaaaatacttacatttag

SEQ ID NO: 312362 - DNA, 201 bp, Artificial Sequence
  derived and/or modified sequence
atggctatggcaaaggctcgcaagccaagggaggcactactgtgggccctctccgatctggaagagaatgacttcaagaaacttaagttttacctgcgggatatgactctgtctgaggggcaaccgcctctcgcaaggggcgagctggaaggtttaatccccgtcgatctggccgagctgctgattagcaaatacggctag

SEQ ID NO: 312363 - protein, 439 aa, Artificial Sequence
  derived and/or modified sequence
MDPLSELQDDLTLDDTSEALNQLKLASIDEKNWPSDEMPDFPKSDDSKSSSPELVTHLKWDDPYYDIARHQIVEVAGDDKYGRKIIVFSACRMPPSHQLDHSKLLGYLKHTLDQYVESDYTLLYLHHGLTSDNKPSLSWLRDAYREFDRKYKKNIKALYIVHPTMFIKTLLILFKPLISFKFGQKIFYVNYLSELSEHVKLEQLGIPRQVLKYDDFLKSTQKSPATAPKPMPPRPPLPNQQFGVSLQHLQEKNPEQEPIPIVLRETVAYLQAHALTTEGIFRRSANTQVVREVQQKYNMGLPVDFDQYNELHLPAVILKTFLRELPEPLLTFDLYPHVVGFLNIDESQRVPATLQVLQTLPEENYQVLRFLTAFLVQISAHSDQNKMTNTNLAVVFGPNLLWAKDAAITLKAINPINTFTKFLLDHQGELFPSPDPSGL

SEQ ID NO: 312364 - protein, 458 aa, Artificial Sequence
  derived and/or modified sequence
MDPLSELQDDLTLDDTSEALNQLKLASIDEKNWPSDEMPDFPKSDDSKSSSPELVTHLKWDDPYYDIARHQIVEVAGDDKYGRKIIVFSACRMPPSHQLDHSKLLGYLKHTLDQYVESDYTLLYLHHGLTSDNKPSLSWLRDAYREFDRKYKKNIKALYIVHPTMFIKTLLILFKPLISFKFGQKIFYVNYLSELSEHVKLEQLGIPRQVLKYDDFLKSTQKSPATAPKPMPPRPPLPNQQFGVSLQHLQEKNPEQEPIPIVLRETVAYLQAHALTTEGIFRRSANTQVVREVQQKYNMGLPVDFDQYNELHLPAVILKTFLRELPEPLLTFDLYPHVVGFLNIDESQRVPATLQVLQTLPEENYQVLRFLTAFLVQISAHSDQNKMTNTNLAVVFGPNLLWAKDAAITLKAINPMATFFFFFLRWSLALSPGWSAVARSRHTSAFWVQAILLPQPPE

SEQ ID NO: 312365 - protein, 192 aa, Artificial Sequence
  derived and/or modified sequence
MDPLSELQDDLTLDDTSEALNQLKLASIDEKNWPSDEMPDFPKSDDSKSSSPELVTHLKWDDPYYDIARHQIVEVAGDDKYGRKIIVFSACRMPPSHQLDHSKLLGYLKHTLDQYVESDYTLLYLHHGLTSDNKPSLSWLRDAYREFDRKYKKNIKALYIVHPTMFIKTLLILFKPLISFKFGQKIFYVNYL

SEQ ID NO: 312366 - DNA, 1320 bp, Artificial Sequence
  derived and/or modified sequence
atggaccctctctcagagttgcaggacgatttaacactggatgacacgagcgaggctctgaaccaactaaagttagcctccatcgatgagaaaaactggccttctgacgaaatgcccgactttccgaaatctgacgatagtaagtcatcaagccccgagctggtcactcacctgaagtgggacgacccatactacgatatcgcgcgacaccagatagtcgaagtagcaggcgatgataagtacggaagaaaaatcatcgtgttttcggcctgtcgaatgcccccaagccaccagcttgaccactccaaactcctgggatacctcaaacacaccctggaccagtacgtcgagagcgactataccctgctgtatctccaccacggactgactagcgacaacaagcccagtttgtcttggttgcgggatgcatacagagaatttgaccgcaagtataagaagaatataaaggcactgtatattgtgcatcctaccatgttcatcaaaacgctcctcatcctttttaagcctcttatctcattcaagttcggccagaaaatcttttatgtgaattacctatctgaattgtcagaacacgtgaagctcgagcagctggggatccctagacaggtgctcaaatacgacgacttcctcaagagtacccagaagagtcctgctactgcccccaagccaatgcccccccggccaccactccctaatcagcagtttggcgtgtctctgcagcacctgcaggagaagaatcccgagcaggagcccatccctatcgtgttaagagagacggtggcctacctgcaggcccacgccttgacgaccgagggtatctttagacgctcagccaatacccaggtggtgcgcgaggtgcagcaaaagtacaacatgggcctccctgtcgatttcgaccagtataatgagctacatctccctgcagtcattttgaaaactttcctccgcgagctgccagaacccctgttgaccttcgacttgtatccacacgttgtcgggttcttgaacatcgacgagagccagagagtgcccgccaccctacaggtcctgcagacactgccggaggagaactatcaggtcttgcgctttctcacagctttcctggtacaaatctctgctcactctgaccagaacaagatgaccaacaccaatctggccgtagtgtttgggcccaatttgctgtgggccaaagacgccgctatcactctgaaagccattaatcctatcaacacctttaccaaatttcttctggaccatcaaggagagttgttcccttcacccgatcctagcggactttag

SEQ ID NO: 312367 - DNA, 1377 bp, Artificial Sequence
  derived and/or modified sequence
atggatcccctttctgagctgcaggatgacttgacgctggatgacacaagtgaggcactcaatcagctgaagctcgcctcaatcgacgaaaaaaattggccctcagacgaaatgcctgatttccctaaatctgatgacagcaagagcagctcacccgagctcgtaacccacctcaagtgggatgacccctattacgacatagccagacatcagatcgtggaggtggcaggcgacgataagtacgggagaaaaattattgtctttagcgcctgtaggatgccaccaagtcatcagcttgatcattccaagttactggggtaccttaaacacacgttggaccaatacgtggaaagcgattataccctactttatttacaccatggtctaacaagtgataataagccctctctcagctggctgcgggacgcttaccgagaatttgacaggaaatacaagaaaaatatcaaggcattatatattgtgcatcctacaatgtttatcaagacgctcttgatattatttaaacctctgatcagctttaaattcgggcagaagatcttctacgtcaattatctctccgagctgtctgagcatgtaaaattggagcaactaggtatacctagacaggttctcaaatacgatgacttcctgaagtccacccagaaaagtccagctactgcccctaaacccatgccccctcgtcctccactcccaaaccagcaattcggcgtaagtctccaacatcttcaggagaagaacccagagcaggagcccattcccatcgtgctgcgagagaccgtggcctatttgcaggctcacgccttgactacagaggggatttttcggcgctcagcgaacacacaagtggtgagggaggttcagcagaaatataacatgggactgcctgtggatttcgatcagtacaatgagctgcacctgccagctgtcatccttaagacgtttctgcgcgaattgcctgaaccactgttaacttttgacctctaccctcatgttgtgggctttctgaacatagacgagtcacaacgtgtgcccgctactctccaagtgctccagacgctgcctgaggagaattatcaggtcctcagatttctgacggccttcctcgtccaaatcagtgcccactccgatcagaataaaatgactaatactaatctggccgtggtgtttgggcccaatttgctttgggccaaggatgcggccatcacgctgaaagccataaaccctatggcaacattcttttttttctttctccgctggagcctcgccttatcccctggctggagcgctgtagcacgaagccgccatactagcgcattctgggtacaggctatcttgctgcctcaaccaccagagtag

SEQ ID NO: 312368 - DNA, 579 bp, Artificial Sequence
  derived and/or modified sequence
atggaccctctctctgagctgcaggatgatctaaccctggacgatacatcagaagctctaaaccagctcaagttggcatctatcgacgaaaagaattggcctagcgacgagatgcccgatttcccaaagtctgacgatagcaagagttccagtcccgagctggttacccatctgaagtgggacgatccatactatgatattgctagacaccagattgtggaagttgcaggagatgacaaatacggaagaaagataatcgtgtttagcgcctgccgcatgcctccgtctcatcagctcgaccattcaaaattgctggggtatctgaaacatacactggatcagtatgtggagagtgactacacattattgtatctccaccacggactcacctcagataataagccaagtctctcgtggctgagggacgcataccgcgaattcgatcgcaaatataaaaaaaatatcaaggctttatacatagtacacccgactatgttcattaaaacactcttgattctgttcaaaccactcatcagtttcaagttcggacagaaaatcttctacgtgaactacttgtag

SEQ ID NO: 312369 - DNA, 1320 bp, Artificial Sequence
  derived and/or modified sequence
atggaccccctgtctgagctgcaggatgacctgaccctggatgacaccagcgaggccctgaaccagctgaagctggccagcattgatgagaagaactggcccagtgatgagatgccagacttccccaagagtgatgacagcaagagcagcagccctgagctggtgacccacctgaagtgggatgacccctactatgacatcgcccggcaccagatcgtggaggtggccggagatgacaagtatggcaggaagatcatcgtgttttctgcctgcaggatgccacccagccaccagctggaccacagcaagctgctgggctacctgaagcacaccctggaccagtatgtggagagtgactacaccctgctgtacctgcaccacggcctgaccagtgacaacaagcccagcctgtcctggctgagagatgcctaccgggagtttgacaggaagtacaagaagaacatcaaggccctgtacatcgtgcaccccaccatgttcatcaagaccctgctgatcctcttcaagcccctcatctccttcaagtttggccagaagatcttctacgtgaactacctgtctgagctgtctgagcacgtgaagctggagcagctgggcatcccccggcaggtgctgaagtatgatgacttcctgaagagcacccagaagagccctgccacagcccccaagcccatgccacccaggcctcccctgcccaaccagcagtttggagtgtccctgcagcacctgcaggagaagaaccctgagcaggagcccatccccatcgtgctgcgggagaccgtggcctacctgcaggcccacgccctgaccacagagggcatcttccgccgcagcgccaacacccaggtggtgcgggaggtgcagcagaagtacaacatgggcctgcctgtggactttgaccagtacaatgagctgcacctgcctgctgtgatcctgaagaccttcctgcgggagctgcctgagcccctgctgacctttgacctgtacccccacgtggtgggcttcctgaacattgatgagagccagagggtgcctgccaccctgcaggtgctgcagaccctgcctgaggagaactaccaggtgctgcgcttcctgacagccttcctggtgcagatcagcgcccacagcgaccagaacaagatgaccaacaccaacctggccgtggtgtttggccccaacctgctgtgggccaaggatgctgccatcaccctgaaggccatcaaccccatcaacaccttcaccaagttcctgctggaccaccagggcgagctgttccccagcccagaccccagcggcctgtag

SEQ ID NO: 312370 - DNA, 1377 bp, Artificial Sequence
  derived and/or modified sequence
atggaccccctgtctgagctgcaggatgacctgaccctggatgacaccagcgaggccctgaaccagctgaagctggccagcattgatgagaagaactggcccagtgatgagatgccagacttccccaagagtgatgacagcaagagcagcagccctgagctggtgacccacctgaagtgggatgacccctactatgacatcgcccggcaccagatcgtggaggtggccggagatgacaagtatggcaggaagatcatcgtgttttctgcctgcaggatgccacccagccaccagctggaccacagcaagctgctgggctacctgaagcacaccctggaccagtatgtggagagtgactacaccctgctgtacctgcaccacggcctgaccagtgacaacaagcccagcctgtcctggctgagagatgcctaccgggagtttgacaggaagtacaagaagaacatcaaggccctgtacatcgtgcaccccaccatgttcatcaagaccctgctgatcctcttcaagcccctcatctccttcaagtttggccagaagatcttctacgtgaactacctgtctgagctgtctgagcacgtgaagctggagcagctgggcatcccccggcaggtgctgaagtatgatgacttcctgaagagcacccagaagagccctgccacagcccccaagcccatgccacccaggcctcccctgcccaaccagcagtttggagtgtccctgcagcacctgcaggagaagaaccctgagcaggagcccatccccatcgtgctgcgggagaccgtggcctacctgcaggcccacgccctgaccacagagggcatcttccgccgcagcgccaacacccaggtggtgcgggaggtgcagcagaagtacaacatgggcctgcctgtggactttgaccagtacaatgagctgcacctgcctgctgtgatcctgaagaccttcctgcgggagctgcctgagcccctgctgacctttgacctgtacccccacgtggtgggcttcctgaacattgatgagagccagagggtgcctgccaccctgcaggtgctgcagaccctgcctgaggagaactaccaggtgctgcgcttcctgacagccttcctggtgcagatcagcgcccacagcgaccagaacaagatgaccaacaccaacctggccgtggtgtttggccccaacctgctgtgggccaaggatgctgccatcaccctgaaggccatcaaccccatggccaccttcttcttcttcttcctgcgctggagcctggccctgagccctggctggagcgctgtggcccggagccgccacaccagcgccttctgggtgcaggccatcctgctgccccagcccccagagtag

SEQ ID NO: 312371 - DNA, 579 bp, Artificial Sequence
  derived and/or modified sequence
atggaccccctgtctgagctgcaggatgacctgaccctggatgacaccagcgaggccctgaaccagctgaagctggccagcattgatgagaagaactggcccagtgatgagatgccagacttccccaagagtgatgacagcaagagcagcagccctgagctggtgacccacctgaagtgggatgacccctactatgacatcgcccggcaccagatcgtggaggtggccggagatgacaagtatggcaggaagatcatcgtgttttctgcctgcaggatgccacccagccaccagctggaccacagcaagctgctgggctacctgaagcacaccctggaccagtatgtggagagtgactacaccctgctgtacctgcaccacggcctgaccagtgacaacaagcccagcctgtcctggctgagagatgcctaccgggagtttgacaggaagtacaagaagaacatcaaggccctgtacatcgtgcaccccaccatgttcatcaagaccctgctgatcctcttcaagcccctcatctccttcaagtttggccagaagatcttctacgtgaactacctgtag

SEQ ID NO: 312372 - DNA, 1320 bp, Artificial Sequence
  derived and/or modified sequence
atggaccccctgagcgagctgcaggacgacctgaccctggacgacacaagtgaggccttaaatcagcttaagctcgcctcaattgacgagaaaaattggccgtctgatgagatgcccgatttccccaagtctgacgacagcaagtcatcaagtcctgaacttgtgacgcacctgaaatgggatgatccttattatgatattgcaaggcaccaaatagtagaggtggcaggtgatgacaaatacggcagaaagattatcgtgttcagcgcatgtaggatgcccccttcccaccagctcgatcacagtaaattactgggatatcttaagcacaccctcgaccaatacgtggaaagtgactacaccctactgtaccttcaccatgggttaacaagcgataacaaaccaagcctgtcttggctgcgggatgcttaccgggaattcgacagaaaatacaaaaagaacataaaggccctgtacatagtgcacccgaccatgtttattaagaccttactgatcctctttaagccactgatctcttttaaattcggacagaagatcttctatgtaaattatctcagcgaactgtccgaacacgtcaagcttgagcaattaggaattcctaggcaggtgctgaaatatgacgacttcctgaaaagcacccagaagagccccgccaccgcccctaaacccatgccgcccagacctcccttgccaaaccagcagtttggtgttagtctgcaacacctacaggaaaagaacccggaacaagaaccaatccctatcgttctgcgtgagaccgtggcctatctgcaggctcacgccctgacgaccgaggggatcttccggcgttcagccaacacccaggtcgtgcgagaggtccaacagaagtacaacatgggactcccggttgactttgaccagtataacgagctgcacctgccagctgtcattttaaagacatttctgcgggagctgccagagcctctgctaactttcgacttgtacccccacgttgtgggcttcctaaacatcgatgagagccaaagggtcccggcaacccttcaggtgctgcaaactcttccagaagaaaactaccaagtgctgaggttcctgacagcctttcttgttcagatctcagcgcactctgaccagaacaagatgaccaatactaacttggccgtagtctttggccccaatctgttgtgggccaaggacgcagccattacacttaaagccattaaccctatcaacacgttcacaaaattcctcttggaccatcagggcgagctttttccttctcctgacccatccgggctgtag

SEQ ID NO: 312373 - DNA, 1377 bp, Artificial Sequence
  derived and/or modified sequence
atggaccccctgagcgagctgcaggacgacctgaccctggacgacacctccgaagctctgaatcaactcaagctggcaagcattgatgagaagaactggcccagcgacgagatgcccgacttcccaaagagtgatgacagtaaatctagcagcccagagctggtaacgcacctcaagtgggatgatccttactacgacatcgccaggcaccagattgtagaggtggcaggtgatgataaatacggaaggaagatcatcgtgttctctgcctgtcggatgcctccatcccatcagctggatcactccaagctgctgggttatctcaaacacacactggatcagtatgtggagtccgattatacacttctttacttgcaccatggcctgacctctgacaacaaacctagcctctcctggttgcgtgacgcataccgagaatttgaccggaagtataagaagaacatcaaggctctctatatagtgcaccccacaatgttcatcaagaccctcctgatactttttaagcccctcatctcattcaagtttggccaaaaaatattctatgttaactacctctcagagctctcagaacacgtgaagctcgagcagctgggaatccctaggcaggtcctaaaatatgatgatttcctcaagagcacgcagaaatccccagccactgctccaaagcctatgcctccccgtcctccacttcctaatcagcaatttggggtttccctccaacatcttcaggagaaaaatcccgagcaggaacctattccgatagtgctgcgagaaaccgtggcctatttgcaagcccacgctttgacaacagaaggcattttccgacgctctgccaatacacaagttgtgcgtgaggtccagcagaagtataacatggggctcccagtagactttgaccagtacaacgaactgcacctgcctgctgtcatcctgaaaactttcctgcgggaactgccagagccactcttgaccttcgatctgtatccacacgtggtgggctttctcaacattgatgaatctcagagagtgcctgccaccttgcaggtgttgcaaacccttccagaggagaactaccaggtcctgcggtttcttactgcctttttggttcagatctcggctcacagcgaccagaacaaaatgaccaatactaacctcgccgttgtctttggcccaaatctcctgtgggccaaagacgcggctataactttaaaagctatcaatcctatggctactttcttcttctttttccttaggtggagtctggcactgtcccccggatggtcagccgtagctcgaagccggcacactagcgctttctgggtgcaggctatcttgttgcctcaaccccccgagtag

SEQ ID NO: 312374 - DNA, 579 bp, Artificial Sequence
  derived and/or modified sequence
atggaccccctgagcgagctgcaggacgacctgaccctggacgacacctctgaggcccttaaccagcttaagctggcaagcattgatgagaagaactggccttcggacgagatgcccgattttccgaaaagcgatgacagcaagtcgtcaagccccgaactggtaactcacctgaagtgggatgacccatattacgacatcgctcggcaccaaatcgtagaggtcgcaggcgatgataaatacggccgcaaaattatcgtgttctctgcttgcagaatgccgccaagccatcagctggatcattccaagctgttgggatacctgaaacataccctcgatcagtatgtcgaatccgattacactctgctgtacctgcatcacggcctgacatctgataataaaccctccctgtcatggttgcgtgatgcctatcgggaattcgacaggaaatacaaaaaaaatatcaaagccctttatattgtacaccctacaatgttcattaagacccttctgattctgttcaagcctctcatctcctttaaatttggacagaaaatcttttatgtgaattacttatag

SEQ ID NO: 312375 - DNA, 1320 bp, Artificial Sequence
  derived and/or modified sequence
atggatcccctgagcgagctccaggatgacctgacactggacgatacttcggaggcactgaatcagttgaaactcgcatctattgatgagaagaattggccaagcgatgaaatgccagactttcccaaaagcgacgattccaagtcgagttcgccagaattagtcacacacttgaaatgggatgatccctattatgatatcgcaagacaccagattgtggaagttgctggcgatgataagtatggcagaaagatcattgtgttcagcgcctgccgaatgccccctagtcatcagctggaccacagcaagctcctaggatatttaaaacacacattggatcagtacgtggagtcagactacacgttgctgtacctgcatcacggactcacatctgataacaaacccagtctttcgtggctgcgcgatgcctacagggagttcgatcgcaaatataagaaaaacattaaggccctgtacatcgtgcatccaactatgtttatcaaaacactcttgatcttgttcaaaccactgatctccttcaaattcggacaaaagatattctatgtgaactacttgtccgaacttagcgaacacgttaaactggagcagcttggcattccgaggcaggtcctcaagtacgatgatttcctcaagagcactcagaaatccccagccactgccccaaagcccatgcctcctcgaccccctctacctaatcagcagttcggggtctctctccagcatttgcaggagaaaaacccagaacaggaacccatcccaatagtgctgcgggaaaccgttgcttaccttcaggcccacgctctgactaccgaagggatctttagacgtagcgccaatactcaggttgttagagaggtgcagcagaaatacaatatgggcctacctgttgatttcgaccaatacaacgaacttcatctacctgccgtcatcctaaaaacattcctgcgagagttgccagagccgctcctcacctttgacctttaccctcatgtagtggggttcctcaatattgatgaaagccaaagggtgccagccaccctccaggtgctgcaaactttgcctgaggaaaactatcaggtgttgcgtttcctgacagcctttcttgtccaaattagcgcacattcggatcaaaataagatgacaaatactaacctggctgtcgtctttggaccaaacctcctttgggctaaagatgctgctatcaccctgaaagcgataaacccgatcaataccttcacaaagttcctgctcgaccatcagggcgagctatttccctcccccgacccttccggtctatag

SEQ ID NO: 312376 - DNA, 1377 bp, Artificial Sequence
  derived and/or modified sequence
atggaccctctcagtgagctgcaagatgacttaactctggacgacaccagtgaggcactgaaccagctgaaactggcttccatcgacgagaaaaactggccctccgacgagatgccagactttcccaagtcagacgacagcaagtcatccagccccgaactagtcacccatctgaagtgggatgacccctactatgacatagccaggcatcagatcgtcgaagtggctggggacgacaaatatggacgcaaaattattgtgtttagcgcatgccgcatgccgccttctcaccaattagatcattcaaaactcctcggatatttgaagcatacgctcgatcaatacgtggagtcagactacacgctcctgtatcttcaccatggcttaacatcagataacaaaccatcactcagctggctgcgggacgcgtatcgcgaatttgacagaaagtacaaaaagaacattaaggcactgtacatcgtccaccccacaatgttcattaagacactgctgatattgtttaagcccctgatttctttcaagtttgggcagaagatattttacgtgaattacttgagcgagctctcagagcatgttaagctagaacagctcggaatccctcggcaggtcctaaaatacgacgattttctgaagtctacccagaaaagtcctgctaccgctcctaagccaatgcctcccaggccccctttaccgaatcagcagtttggcgtatcactgcagcatcttcaggagaagaatcccgagcaagagcctataccaatagtgttgcgtgagacggtggcctacctgcaggcccatgccctgacaaccgaggggattttccgtagatcggcgaatactcaggtggtacgcgaggttcaacagaaatataacatgggccttccagttgattttgatcaatataatgaattgcatcttcctgctgtgatcctcaaaacattccttcgtgaattgccggagcccctcctaacatttgacctgtacccacacgttgttggtttcctcaatatagatgagtctcagagagtgcccgcaaccctccaggtgctgcaaaccctgccagaggagaattatcaagttttaagatttctgaccgctttcctggtccaaatcagcgcccatagtgaccagaataagatgactaatacaaatttggcagtggtgtttgggcctaacctgctatgggccaaagatgcggctatcaccctaaaggccattaatcctatggccacctttttctttttctttttgcgctggagtctcgccctctcccccggttggagcgctgtagccaggtcccgccatacaagcgctttctgggtgcaggctattctgctcccacaacctccggagtag

SEQ ID NO: 312377 - DNA, 579 bp, Artificial Sequence
  derived and/or modified sequence
atggacccgctgagtgagctgcaggacgacctcacgctggacgacaccagtgaagccctgaatcagctgaagctggcctccatagacgaaaaaaactggccatccgacgaaatgcctgatttccctaagagcgatgattccaaatcaagcagtccggagttggtaacccaccttaagtgggacgacccttactacgatattgctaggcaccagatcgtggaggtagctggcgacgataaatacggcagaaagattattgtcttctctgcgtgtaggatgcccccttctcaccagcttgaccatagcaagttgcttggctaccttaaacacacgttggaccagtacgtggagagtgactacaccttgctgtacctccaccacgggttgaccagcgacaataagccatcactgagttggcttcgggatgcatatagggagtttgatagaaagtacaagaagaatatcaaagccctgtacatcgtgcacccaacgatgttcatcaagactctgctgatcttgtttaaacctctcatttcctttaaattcggccagaaaatcttttatgttaattatctgtag

SEQ ID NO: 312378 - DNA, 3375 bp, Artificial Sequence
  derived and/or modified sequence
gtttgccgagccttgacaggcgtggcagagggagcagtgcccgagcgcggtttctcttaaggttctgcagggcaaggctgtctgggacaggcttggccatggatccgctctcagagctgcaggatgatctgaccttggatgacaccagcgaggctctgaaccagctgaagctggcctccatcgatgagaagaactggccctcggatgaaatgcctgacttccccaagtcagatgactccaaaagcagctccccggaacttgtcacacacctgaagtgggatgacccatactatgacatcgcccggcaccagatcgtggaggtggcaggagatgacaagtatgggcggaagatcattgtgtttagtgcctgtcgaatgccccccagccaccagctcgaccacagcaagctcctggggtacctgaagcacaccctggaccagtacgtggagagtgactacacacttctgtatctgcaccacggcctgaccagcgacaacaagccctccctcagctggctccgtgatgcctaccgggagtttgaccgcaagtacaagaaaaacatcaaggccttgtacatcgtgcatccaaccatgttcatcaaaactctgctcatcctcttcaagcccctcatcagcttcaagttcgggcagaagatcttctatgtgaattacctgagcgagctgagcgagcacgtgaagctggagcagctggggatccctcgccaagtgctcaaatatgacgacttcctgaaatccacacagaagagccccgcgacagcccccaagcccatgcccccacggccccccctgcccaaccagcagtttggagtctcgctgcagcacctccaggagaagaatccagagcaggagcccattcccattgtactcagggagactgttgcctacttacaggcccacgctctcaccaccgagggcatcttccggaggtcggccaacacccaagtggtccgggaagtgcagcagaagtacaacatggggctgcctgtggatttcgaccagtacaatgagctgcacctgccagcagtcatcctcaagaccttcctccgggagcttcctgagcccctgctcacctttgacctctacccccatgtggtgggcttcctcaacattgatgaaagccagagggtgccagcgacactgcaggtcctccagacgctgcccgaggagaactaccaggtgcttcgtttcctgactgctttcctggtgcagatttctgcacacagtgaccagaacaagatgaccaacactaacctggctgttgttttcggccctaacctgctgtgggccaaggatgcggccatcaccctcaaggccattaatcccatcaacaccttcaccaagttccttctggatcaccaaggggagctgttcccaagcccggaccccagcgggctctgaacctggcccctgccccaccagccccttctctggtagcccgggtttggactcttcctcctggcatcaggggccatgaagccccctggagagagatgttggagccacccatcaggcatgctctcccccacctctgtccagcccgcctcacggccctggcggcctcgctgttaccagaagacgtttttctctgccttacacttctcactgcctctctggacaccgggcttttgctgggctctccagagctgggcttggctcttccagctggagaaggactgagccccagtaacccctttcctgctttttcctgcctctgtttccctagcaagtgtggatgaatcaaatgactgccggctgggctggtagcaggggccagtcctcccctcttgattgctgggaatgagcagctgagctctttggtgtggacaccgccccaagctgaggtgcctccctatctggtaggctgccctgctttgcagaagccccactgcatgaaggcctgagtgcaagcacccttgctcctgtactgcccccagcagcgcagtctggggtatttcccctgctgaggagtgacagggctggagactgtgtctgctttctgcctcctcttccacacatcctgggtcagcctttcccaagtgatactgcccctggggtgtcctaaccccttggttgtgcagggactggtagcttggatgacatggctcagagtcccagcatccacttgaaacctccctctccacctccccgcccccgagagctacagcgtgtgatggaatcagtgaccggccaggttagcctctcccctcttggcctcctttcccacacgggcagatcatcagccttcatgttcttgtggacctgtctgttacggagtcacactggcccctgccccagccagaggtgactcagtgcctcaggatcttatggctccttcctccagctgggggactcttaaaggggctggggtagagactaagagtgcccgtaggaggggcagagattgtgctgataggtcagtccagataggtgggttctagcaatttccccaggggattaaggggctctagggccacctttttttttttttttctgagatggagtctcgctctgtcaccaggctggagtgcagtggcgcgatctcggcacacctccgccttctgggttcaagcaattctcctgcctcagcctcctgagtagctgggactataggtgcatgccaccatgcccagctaatttttgtatttttagtagagacggggtttcaccatgttggccaggatggtctcgatctcctgacctcatgatccacccacctcggcctcccaaagtgctgggattccaggcgtgagccactgcacccggccagccctgttgtctttcaaagaacctcggccccagtgatggctgatctcactcccactgtctcgtagaattacactccttcctggggatccctcttcctgcagccttgtccttggggagtacagggaagtacctgcagtgaccctgcccccatgaccttggccaggcaggatgattccagagcccgtactgtggggatcctcactgaccagcccagccccatccgcaagccaggctgggcctgggcataacttcgctgggctctcccaagaccatcagcagtgcatccagccccctggggcctgggctgctgctggttcttcatcagtcccttggtctctagcctcggccagggctgctctgctctccgccctcctttgtgtatcaagtgtcgctcacagccccattcactggggagcctttcggatctatttggtctttctcatgtcccccactggtctgtaccccagggagcgggtgcttgtactgtgtgaatccagtgttcacattcacacttaatgacttccttggcaccaatcatgtatttcaccgtttgcactttttgtatttcaataaaaatgttgatgcaaaa

SEQ ID NO: 312379 - DNA, 1667 bp, Artificial Sequence
  derived and/or modified sequence
cgcggagccggatgtttgccgagccttgacaggcgtggcagagggagcagtgcccgagcgcggtttctcttaaggttctgcagggcaaggctgtctgggacaggcttggccatggatccgctctcagagctgcaggatgatctgaccttggatgacaccagcgaggctctgaaccagctgaagctggcctccatcgatgagaagaactggccctcggatgaaatgcctgacttccccaagtcagatgactccaaaagcagctccccggaacttgtcacacacctgaagtgggatgacccatactatgacatcgcccggcaccagatcgtggaggtggcaggagatgacaagtatgggcggaagatcattgtgtttagtgcctgtcgaatgccccccagccaccagctcgaccacagcaagctcctggggtacctgaagcacaccctggaccagtacgtggagagtgactacacacttctgtatctgcaccacggcctgaccagcgacaacaagccctccctcagctggctccgtgatgcctaccgggagtttgaccgcaagtacaagaaaaacatcaaggccttgtacatcgtgcatccaaccatgttcatcaaaactctgctcatcctcttcaagcccctcatcagcttcaagttcgggcagaagatcttctatgtgaattacctgagcgagctgagcgagcacgtgaagctggagcagctggggatccctcgccaagtgctcaaatatgacgacttcctgaaatccacacagaagagccccgcgacagcccccaagcccatgcccccacggccccccctgcccaaccagcagtttggagtctcgctgcagcacctccaggagaagaatccagagcaggagcccattcccattgtactcagggagactgttgcctacttacaggcccacgctctcaccaccgagggcatcttccggaggtcggccaacacccaagtggtccgggaagtgcagcagaagtacaacatggggctgcctgtggatttcgaccagtacaatgagctgcacctgccagcagtcatcctcaagaccttcctccgggagcttcctgagcccctgctcacctttgacctctacccccatgtggtgggcttcctcaacattgatgaaagccagagggtgccagcgacactgcaggtcctccagacgctgcccgaggagaactaccaggtgcttcgtttcctgactgctttcctggtgcagatttctgcacacagtgaccagaacaagatgaccaacactaacctggctgttgttttcggccctaacctgctgtgggccaaggatgcggccatcaccctcaaggccattaatcccatggccacctttttttttttttttctgagatggagtctcgctctgtcaccaggctggagtgcagtggcgcgatctcggcacacctccgccttctgggttcaagcaattctcctgcctcagcctcctgagtagctgggactataggtgcatgccaccatgcccagctaatttttgtatttttagtagagacggggtttcaccatgttggccaggatggtctcgatctcctgacctcatgatccacccacctcggcctcccaaagtgctgggattccaggcgtgagccactgcacccggccagccctgttgtc

SEQ ID NO: 312380 - DNA, 890 bp, Artificial Sequence
  derived and/or modified sequence
gttgctgcccattagggctgagggcagaggtgcctacccccaggctgcatgcggctgcagccttctggccagattccagacctacagaaacccagcttggtggtcgagtctgccttgtgcctgccggagctgctgttctgctggtgacctcctcatctcagcaccccagacatcacgagcatccccctttcccatctgcgccctccaatccttagggccgtcaacctttccaccttgaaactggtgtcaggagcaccctgcagagtttctcttaaggttctgcagggcaaggctgtctgggacaggcttggccatggatccgctctcagagctgcaggatgatctgaccttggatgacaccagcgaggctctgaaccagctgaagctggcctccatcgatgagaagaactggccctcggatgaaatgcctgacttccccaagtcagatgactccaaaagcagctccccggaacttgtcacacacctgaagtgggatgacccatactatgacatcgcccggcaccagatcgtggaggtggcaggagatgacaagtatgggcggaagatcattgtgtttagtgcctgtcgaatgccccccagccaccagctcgaccacagcaagctcctggggtacctgaagcacaccctggaccagtacgtggagagtgactacacacttctgtatctgcaccacggcctgaccagcgacaacaagccctccctcagctggctccgtgatgcctaccgggagtttgaccgcaagtacaagaaaaacatcaaggccttgtacatcgtgcatccaaccatgttcatcaaaactctgctcatcctcttcaagcccctcatcagcttcaagttcgggcagaagatcttctatgtgaattacctga

SEQ ID NO: 312381 - DNA, 1320 bp, Artificial Sequence
  derived and/or modified sequence
atggaccccctgagcgagctgcaggacgacctgaccctggacgacaccagcgaggccctgaaccagctgaagctggccagcatcgacgagaagaactggcccagcgacgagatgcccgacttccccaagagcgacgacagcaagagcagcagccccgagctggtgacccacctgaagtgggacgacccctactacgacatcgccagacaccagatcgtggaggtggccggcgacgacaagtacggcagaaagatcatcgtgttcagcgcctgcagaatgccccccagccaccagctggaccacagcaagctgctgggctacctgaagcacaccctggaccagtacgtggagagcgactacaccctgctgtacctgcaccacggcctgaccagcgacaacaagcccagcctgagctggctgagagacgcctacagagagttcgacagaaagtacaagaagaacatcaaggccctgtacatcgtgcaccccaccatgttcatcaagaccctgctgatcctgttcaagcccctgatcagcttcaagttcggccagaagatcttctacgtgaactacctgagcgagctgagcgagcacgtgaagctggagcagctgggcatccccagacaggtgctgaagtacgacgacttcctgaagagcacccagaagagccccgccaccgcccccaagcccatgccccccagaccccccctgcccaaccagcagttcggcgtgagcctgcagcacctgcaggagaagaaccccgagcaggagcccatccccatcgtgctgagagagaccgtggcctacctgcaggcccacgccctgaccaccgagggcatcttcagaagaagcgccaacacccaggtggtgagagaggtgcagcagaagtacaacatgggcctgcccgtggacttcgaccagtacaacgagctgcacctgcccgccgtgatcctgaagaccttcctgagagagctgcccgagcccctgctgaccttcgacctgtacccccacgtggtgggcttcctgaacatcgacgagagccagagagtgcccgccaccctgcaggtgctgcagaccctgcccgaggagaactaccaggtgctgagattcctgaccgccttcctggtgcagatcagcgcccacagcgaccagaacaagatgaccaacaccaacctggccgtggtgttcggccccaacctgctgtgggccaaggacgccgccatcaccctgaaggccatcaaccccatcaacaccttcaccaagttcctgctggaccaccagggcgagctgttccccagccccgaccccagcggcctgtag

SEQ ID NO: 312382 - DNA, 1377 bp, Artificial Sequence
  derived and/or modified sequence
atggaccccctgagcgagctgcaggacgacctgaccctggacgacaccagcgaggccctgaaccagctgaagctggccagcatcgacgagaagaactggcccagcgacgagatgcccgacttccccaagagcgacgacagcaagagcagcagccccgagctggtgacccacctgaagtgggacgacccctactacgacatcgccagacaccagatcgtggaggtggccggcgacgacaagtacggcagaaagatcatcgtgttcagcgcctgcagaatgccccccagccaccagctggaccacagcaagctgctgggctacctgaagcacaccctggaccagtacgtggagagcgactacaccctgctgtacctgcaccacggcctgaccagcgacaacaagcccagcctgagctggctgagagacgcctacagagagttcgacagaaagtacaagaagaacatcaaggccctgtacatcgtgcaccccaccatgttcatcaagaccctgctgatcctgttcaagcccctgatcagcttcaagttcggccagaagatcttctacgtgaactacctgagcgagctgagcgagcacgtgaagctggagcagctgggcatccccagacaggtgctgaagtacgacgacttcctgaagagcacccagaagagccccgccaccgcccccaagcccatgccccccagaccccccctgcccaaccagcagttcggcgtgagcctgcagcacctgcaggagaagaaccccgagcaggagcccatccccatcgtgctgagagagaccgtggcctacctgcaggcccacgccctgaccaccgagggcatcttcagaagaagcgccaacacccaggtggtgagagaggtgcagcagaagtacaacatgggcctgcccgtggacttcgaccagtacaacgagctgcacctgcccgccgtgatcctgaagaccttcctgagagagctgcccgagcccctgctgaccttcgacctgtacccccacgtggtgggcttcctgaacatcgacgagagccagagagtgcccgccaccctgcaggtgctgcagaccctgcccgaggagaactaccaggtgctgagattcctgaccgccttcctggtgcagatcagcgcccacagcgaccagaacaagatgaccaacaccaacctggccgtggtgttcggccccaacctgctgtgggccaaggacgccgccatcaccctgaaggccatcaaccccatggccaccttcttcttcttcttcctgagatggagcctggccctgagccccggctggagcgccgtggccagaagcagacacaccagcgccttctgggtgcaggccatcctgctgccccagccccccgagtag

SEQ ID NO: 312383 - DNA, 579 bp, Artificial Sequence
  derived and/or modified sequence
atggaccccctgagcgagctgcaggacgacctgaccctggacgacaccagcgaggccctgaaccagctgaagctggccagcatcgacgagaagaactggcccagcgacgagatgcccgacttccccaagagcgacgacagcaagagcagcagccccgagctggtgacccacctgaagtgggacgacccctactacgacatcgccagacaccagatcgtggaggtggccggcgacgacaagtacggcagaaagatcatcgtgttcagcgcctgcagaatgccccccagccaccagctggaccacagcaagctgctgggctacctgaagcacaccctggaccagtacgtggagagcgactacaccctgctgtacctgcaccacggcctgaccagcgacaacaagcccagcctgagctggctgagagacgcctacagagagttcgacagaaagtacaagaagaacatcaaggccctgtacatcgtgcaccccaccatgttcatcaagaccctgctgatcctgttcaagcccctgatcagcttcaagttcggccagaagatcttctacgtgaactacctgtag

SEQ ID NO: 312384 - DNA, 105 bp, Artificial Sequence
  derived and/or modified sequence
atgtcagactctaaggagccgaggctgcaacagttaggtttgttggaggaggaacagctgagggggctcggctttcgtcagacccggcggaatcagaagtgttag

SEQ ID NO: 312385 - DNA, 201 bp, Artificial Sequence
  derived and/or modified sequence
atgggcacttcttctattttcctgtgcgtcctgttcctgtgtggtgctttgggattaaccatgtctccagcgagagggaggttgcgctgctatatttgtggcttcaccaaaccctgccaccccgtgccaaccgaatgtcgcgatgatgaggcctgtggtattagcatcggcacgagcgaccagtccgaaatcactgagtag

SEQ ID NO: 312386 - protein, 101 aa, Artificial Sequence
  derived and/or modified sequence
MADQRMDISSTISDFMSPGPTDLLSSSLGTSGVDCNRKRKGSSTDYQESMDTDKDDPHGRLEYTEHQGRIKNAREAHSQIEKRRRDKMNSFIDELASLVPT

SEQ ID NO: 312387 - protein, 59 aa, Artificial Sequence
  derived and/or modified sequence
MADQRMDISSTISDFMSPGPTDLLSSSLGTSGVDCNRKRKGSSTDYQESMDTDKDDPHG

SEQ ID NO: 312388 - DNA, 72 bp, Artificial Sequence
  derived and/or modified sequence
atggcagaccagagaatggacatatccagcaccattagcgatttcatgagccccggtcccacagatctgtag

SEQ ID NO: 312389 - DNA, 72 bp, Artificial Sequence
  derived and/or modified sequence
atggctgaccagaggatggacatcagcagcaccatcagtgacttcatgagccctggccccacagacctgtag

SEQ ID NO: 312390 - DNA, 72 bp, Artificial Sequence
  derived and/or modified sequence
atggccgaccagcggatggacatcagcagcaccatcagcgacttcatgtcgccaggtccgactgacctttag

SEQ ID NO: 312391 - DNA, 72 bp, Artificial Sequence
  derived and/or modified sequence
atggctgaccaaaggatggacattagttccaccatctctgacttcatgtcacccggaccaaccgacctgtag

SEQ ID NO: 312392 - DNA, 72 bp, Artificial Sequence
  derived and/or modified sequence
atggccgaccagagaatggacatcagcagcaccatcagcgacttcatgagccccggccccaccgacctgtag

SEQ ID NO: 312393 - protein, 72 aa, Artificial Sequence
  derived and/or modified sequence
MINIESMDTDKDDPHGRLEYTEHQGRIKNAREAHSQIEKRRRDKMNSFIDELASLVPTCNAMSRKLDKLTVL

SEQ ID NO: 312394 - protein, 46 aa, Artificial Sequence
  derived and/or modified sequence
MINIESMDTDKDDPHGRLEYTEHQGRIKNAREAHSQIEKRRRDKMN

SEQ ID NO: 312395 - protein, 141 aa, Artificial Sequence
  derived and/or modified sequence
MINIESMDTDKDDPHGRLEYTEHQGRIKNAREAHSQIEKRRRDKMNSFIDELASLVPTCNAMSRKLDKLTVLRMAVQHMKTLRGATNPYTEANYKPTFLSDDELKHLILRAADGFLFVVGCDRGKILFVSESVFKILNYSQ

SEQ ID NO: 312396 - protein, 143 aa, Artificial Sequence
  derived and/or modified sequence
MQHRGFLLLTLLALLALTSAVAKKKDKVKKGGPGSECAEWAWGPCTPSSKDCGVGFREGTCGAQTQRIRCRVPCNWKKEFGADCKYKFENWGACDGGTGTKVRQGTLKKARYNAQCQETIRVTKPCTPKTKAKAKAKKGKGKD

SEQ ID NO: 312397 - protein, 49 aa, Artificial Sequence
  derived and/or modified sequence
MQHRGFLLLTLLALLALTSAVAKKKDKVKKGGPGSECAEWAWGPCTPSS

SEQ ID NO: 312398 - protein, 131 aa, Artificial Sequence
  derived and/or modified sequence
MQHRGFLLLTLLALLALTSAVAKKKDKVKKGGPGSECAEWAWGPCTPSSKDCGVGFREGTCGAQTQRIRCRVPCNWKKEFGADCKYKFENWGACDGGTGTKVRQGTLKKARYNAQCQETIRVTKPCTPKTK

SEQ ID NO: 312399 - DNA, 432 bp, Artificial Sequence
  derived and/or modified sequence
atgcagcacagaggcttcctgctgctgaccctgctggccctgctggccctgaccagcgccgtggccaagaagaaggacaaggtgaagaagggcggccccggcagcgagtgcgccgagtgggcctggggcccctgcacccccagcagcaaggactgcggcgtgggcttcagagagggcacctgcggcgcccagacccagagaatcagatgcagagtgccctgcaactggaagaaggagttcggcgccgactgcaagtacaagttcgagaactggggcgcctgcgacggcggcaccggcaccaaggtgagacagggcaccctgaagaaggccagatacaacgcccagtgccaggagaccatcagagtgaccaagccctgcacccccaagaccaaggccaaggccaaggccaagaagggcaagggcaaggactag

SEQ ID NO: 312400 - DNA, 150 bp, Artificial Sequence
  derived and/or modified sequence
atgcagcacagaggcttcctgctgctgaccctgctggccctgctggccctgaccagcgccgtggccaagaagaaggacaaggtgaagaagggcggccccggcagcgagtgcgccgagtgggcctggggcccctgcacccccagcagctag

SEQ ID NO: 312401 - DNA, 396 bp, Artificial Sequence
  derived and/or modified sequence
atgcagcacagaggcttcctgctgctgaccctgctggccctgctggccctgaccagcgccgtggccaagaagaaggacaaggtgaagaagggcggccccggcagcgagtgcgccgagtgggcctggggcccctgcacccccagcagcaaggactgcggcgtgggcttcagagagggcacctgcggcgcccagacccagagaatcagatgcagagtgccctgcaactggaagaaggagttcggcgccgactgcaagtacaagttcgagaactggggcgcctgcgacggcggcaccggcaccaaggtgagacagggcaccctgaagaaggccagatacaacgcccagtgccaggagaccatcagagtgaccaagccctgcacccccaagaccaagtag

SEQ ID NO: 312402 - DNA, 432 bp, Artificial Sequence
  derived and/or modified sequence
atgcagcatcggggtttccttcttctgacccttctggctctccttgcactaacctctgcggtggcgaaaaaaaaagacaaggttaagaaggggggtccaggttcggaatgtgctgagtgggcctggggcccctgcaccccatctagcaaggattgtggcgtgggatttagagagggcacatgcggcgcacagacccagcgcattcgctgtagggtcccttgcaactggaagaaggagttcggggcagactgtaaatacaagtttgagaactggggggcatgtgatggtggcaccgggactaaggtgagacagggaactttgaagaaggctcgctacaatgcccagtgccaggagaccattcgggtaacaaagccttgcactcccaagaccaaggcaaaggccaaagccaagaagggaaaaggcaaggactag

SEQ ID NO: 312403 - DNA, 432 bp, Artificial Sequence
  derived and/or modified sequence
atgcagcatcggggcttccttctacttaccttactggccctgctggctttaactagtgctgtggctaaaaagaaggataaggtgaagaagggcggtcccggttccgagtgtgctgaatgggcatgggggccctgcactcccagctccaaagattgcggggtcgggtttcgggaaggtacatgtggagctcagactcagcgcattcgttgcagggtcccctgcaattggaagaaagagtttggtgcagattgcaagtataaatttgagaattggggtgcctgcgatggaggcacaggaacaaaagtacgtcagggcactctgaagaaggctcggtacaatgcacaatgccaggagacaatcagggtaaccaaaccgtgcaccccaaagaccaaggccaaggcaaaagcgaagaagggaaaaggaaaagactag

SEQ ID NO: 312404 - DNA, 432 bp, Artificial Sequence
  derived and/or modified sequence
atgcaacacaggggttttctactgctgacactactcgccctgctcgcactgacaagcgctgtggctaaaaagaaggacaaggttaagaagggcggtcctggtagcgaatgtgctgaatgggcttgggggccatgtacccctagttcgaaggactgtggcgttggtttcagggaaggcacctgtggtgcacagacccagcggattcgctgccgtgtgccttgtaactggaaaaaagagttcggggctgactgcaagtacaagttcgagaattggggtgcatgtgacggcggtactggaacaaaggttcgccagggcaccctgaaaaaagcccggtacaacgcccagtgccaggagacaattcgggtcacaaagccatgcacaccaaaaactaaagccaaagccaaggcaaagaagggaaagggaaaggattag

SEQ ID NO: 312405 - DNA, 432 bp, Artificial Sequence
  derived and/or modified sequence
atgcaacatagaggctttttgctgttgacactgcttgcattgctcgcactgacttcagccgttgccaagaaaaaggacaaagttaaaaaaggtggccctggttcagagtgcgctgaatgggcctggggcccctgtaccccatcgtcaaaagactgtggtgtgggctttagggagggaacatgcggggcgcagactcagcggattcgatgtcgggtcccctgtaactggaagaaagaattcggcgctgactgcaaatataaatttgagaattggggtgcctgcgatggagggacgggaaccaaggtgcgacagggaacccttaagaaagctcggtataatgcgcaatgccaggagaccattagagtcacaaagccctgtacccctaagactaaagcaaaggccaaggccaagaaagggaagggtaaagactag

SEQ ID NO: 312406 - DNA, 432 bp, Artificial Sequence
  derived and/or modified sequence
atgcagcaccgtggatttctcctactgaccctccttgccctccttgcattgactagcgctgtcgcaaaaaaaaaggataaagtaaaaaaagggggaccaggttccgaatgtgctgagtgggcttggggtccctgtaccccatcaagtaaggattgtggggtaggttttagagagggtacctgtggggcccagacgcagagaatcagatgtcgtgtcccatgtaactggaagaaagaatttggtgccgactgcaagtataaatttgagaactggggcgcttgcgatggcggcaccggtaccaaggtgcgacaggggacgctgaagaaagctaggtacaatgcgcagtgccaggagactatacgggtgaccaagccttgcacaccaaagactaaagccaaagcgaaagccaagaaaggaaaaggcaaggattag

SEQ ID NO: 312407 - DNA, 432 bp, Artificial Sequence
  derived and/or modified sequence
atgcagcatagaggttttctcctgctgacgcttttggcacttcttgctcttaccagtgccgtagccaaaaagaaagacaaggtaaaaaaggggggtcccgggagtgaatgcgccgaatgggcttggggaccctgcacaccttcatctaaagactgcggagtgggatttcgagagggcacttgcggcgcccagacccagaggatcaggtgccgtgtaccatgcaactggaaaaaggagtttggcgctgactgtaaatataagttcgaaaattggggcgcctgcgatggaggtaccggtacaaaggttcggcagggcaccctgaagaaggcccgctataatgcccagtgccaggagaccatccgcgtgaccaaaccatgcactccaaaaactaaagcaaaggcaaaggcaaagaagggcaaaggcaaagactag

SEQ ID NO: 312408 - DNA, 150 bp, Artificial Sequence
  derived and/or modified sequence
atgcaacatcgcggattcctgctgttaacccttttggcgttgctggcactgaccagcgcagtggcaaaaaagaaggataaagttaagaagggcggcccaggaagcgagtgcgcggagtgggcgtgggggccttgtactccaagtagctag

SEQ ID NO: 312409 - DNA, 396 bp, Artificial Sequence
  derived and/or modified sequence
atgcagcaccgagggtttctgttgcttacccttctcgcccttcttgcgctcacctcggctgtggccaaaaaaaaggacaaagtcaagaagggcggtccaggcagtgagtgcgccgagtgggcatgggggccttgtaccccttcatccaaggactgtggcgttggatttcgtgaagggacctgtggggcccagactcagcgaattcgctgcagggtcccttgtaattggaagaaagagtttggcgccgactgcaaatataagtttgagaactggggggcatgcgacggcggaactgggaccaaggtgcgacaggggactttgaaaaaggctcgatataatgcccagtgtcaggaaacgatccgggttactaagccatgcactcccaagaccaagtag

SEQ ID NO: 312410 - DNA, 432 bp, Artificial Sequence
  derived and/or modified sequence
atgcagcaccggggcttcctgctgctgaccctgctggccctgctggccctgaccagcgctgtggccaagaagaaggacaaggtgaagaagggcggccctggctctgaatgtgccgagtgggcctggggcccctgcacccccagcagcaaggactgtggggtgggcttccgggagggcacctgtggggcccagacccagaggatccgctgccgggtgccctgcaactggaagaaggagtttggagctgactgcaagtacaagtttgagaactggggcgcctgtgatggcggcaccggcaccaaggtgcggcagggcaccctgaagaaggcccgctacaatgcccagtgccaggagaccatccgggtgaccaagccctgcacccccaagaccaaggccaaggccaaggccaagaagggcaagggcaaggactag

SEQ ID NO: 312411 - DNA, 150 bp, Artificial Sequence
  derived and/or modified sequence
atgcagcaccggggcttcctgctgctgaccctgctggccctgctggccctgaccagcgctgtggccaagaagaaggacaaggtgaagaagggcggccctggctctgaatgtgccgagtgggcctggggcccctgcacccccagcagctag

SEQ ID NO: 312412 - DNA, 396 bp, Artificial Sequence
  derived and/or modified sequence
atgcagcaccggggcttcctgctgctgaccctgctggccctgctggccctgaccagcgctgtggccaagaagaaggacaaggtgaagaagggcggccctggctctgaatgtgccgagtgggcctggggcccctgcacccccagcagcaaggactgtggggtgggcttccgggagggcacctgtggggcccagacccagaggatccgctgccgggtgccctgcaactggaagaaggagtttggagctgactgcaagtacaagtttgagaactggggcgcctgtgatggcggcaccggcaccaaggtgcggcagggcaccctgaagaaggcccgctacaatgcccagtgccaggagaccatccgggtgaccaagccctgcacccccaagaccaagtag

SEQ ID NO: 312413 - DNA, 982 bp, Artificial Sequence
  derived and/or modified sequence
gtgctcccggaaaggcactgggcgaccgcacccgtggctttctctgggcgaccgggtcccagactccccccagcacagcagagcgcttccctgcccacccgcggaaaccgccccaggtgggccgcgccccctccccagcagccagcagggcgccagggctgagccggccgtggaggggagcgggtcccgcgggttatacaggcgccggggctccgcggcaggatgcagcaccgaggcttcctcctcctcaccctcctcgccctgctggcgctcacctccgcggtcgccaaaaagaaagataaggtgaagaagggcggcccggggagcgagtgcgctgagtgggcctgggggccctgcacccccagcagcaaggattgcggcgtgggtttccgcgagggcacctgcggggcccagacccagcgcatccggtgcagggtgccctgcaactggaagaaggagtttggagccgactgcaagtacaagtttgagaactggggtgcgtgtgatgggggcacaggcaccaaagtccgccaaggcaccctgaagaaggcgcgctacaatgctcagtgccaggagaccatccgcgtcaccaagccctgcacccccaagaccaaagcaaaggccaaagccaagaaagggaagggaaaggactagacgccaagcctggatgccaaggagcccctggtgtcacatggggcctggcccacgccctccctctcccaggcccgagatgtgacccaccagtgccttctgtctgctcgttagctttaatcaatcatgccctgccttgtccctctcactccccagccccacccctaagtgcccaaagtggggagggacaagggattctgggaagcttgagcctcccccaaagcaatgtgagtcccagagcccgcttttgttcttccccacaattccattactaagaaacacatcaaataaactgactttttccccccaataaaagctcttcttttttaat

SEQ ID NO: 312414 - DNA, 894 bp, Artificial Sequence
  derived and/or modified sequence
gagcgagtgagcgcgcggcggcccctggtccgcccggccgcggccgatctaggggctgggggctggaggcgggggtgggggtctgagctgcgtcctgggctcgaggcgtcccccggggagtcgcctcttagcggatgcagcaccgaggcttcctcctcctcaccctcctcgccctgctggcgctcacctccgcggtcgccaaaaagaaagataaggtgaagaagggcggcccggggagcgagtgcgctgagtgggcctgggggccctgcacccccagcagcaaggattgcggcgtgggtttccgcgagggcacctgcggggcccagacccagcgcatccggtgcagggtgccctgcaactggaagaaggagtttggagccgactgcaagtacaagtttgagaactggggtgcgtgtgatgggggcacaggcaccaaagtccgccaaggcaccctgaagaaggcgcgctacaatgctcagtgccaggagaccatccgcgtcaccaagccctgcacccccaagaccaaagcaaaggccaaagccaagaaagggaagggaaaggactagacgccaagcctggatgccaaggagcccctggtgtcacatggggcctggcccacgccctccctctcccaggcccgagatgtgacccaccagtgccttctgtctgctcgttagctttaatcaatcatgccctgccttgtccctctcactccccagccccacccctaagtgcccaaagtggggagggacaagggattctgggaagcttgagcctcccccaaagcaatgtgagtcccagagcccgcttttgttcttccccacaattccattactaagaaacacatcaaataaactgactttttccccccaataaaagctcttcttttttaat

SEQ ID NO: 312415 - DNA, 828 bp, Artificial Sequence
  derived and/or modified sequence
ttctggagacaaaaggggccgcggcggccggagcgggacgggcccggcgcgggagggagcgaagcagcgcgggcagcgagcgagatgcagcaccgaggcttcctcctcctcaccctcctcgccctgctggcgctcacctccgcggtcgccaaaaagaaagataaggtgaagaagggcggcccggggagcgagtgcgctgagtgggcctgggggccctgcacccccagcagcaaggattgcggcgtgggtttccgcgagggcacctgcggggcccagacccagcgcatccggtgcagggtgccctgcaactggaagaaggagtttggagccgactgcaagtacaagtttgagaactggggtgcgtgtgatgggggcacaggcaccaaagtccgccaaggcaccctgaagaaggcgcgctacaatgctcagtgccaggagaccatccgcgtcaccaagccctgcacccccaagaccaaagcaaaggccaaagccaagaaagggaagggaaaggactagacgccaagcctggatgccaaggagcccctggtgtcacatggggcctggcccacgccctccctctcccaggcccgagatgtgacccaccagtgccttctgtctgctcgttagctttaatcaatcatgccctgccttgtccctctcactccccagccccacccctaagtgcccaaagtggggagggacaagggattctgggaagcttgagcctcccccaaagcaatgtgagtcccagagcccgcttttgttcttccccacaattccattactaagaaacacatcaaataaactgactttttccccccaataaaa

SEQ ID NO: 312416 - DNA, 1166 bp, Artificial Sequence
  derived and/or modified sequence
cggcttcccgcttcccgcggagaacaacaatgaaagtgaaagaggggtggggcgggggcgagcccgggttctgtggcccatttgccctgtggccttgagcaagcccctcccccaggcctcgggggctctcccggtttgggggaaccgggcgaggcaatgccacaggcccagggttagagggggtgggcacttgcagctgccgatgtggctggatctggaacttctcagacggctcctgtcagcgccaagtttcaccaaatccaggcctgcgggctcctcccccaggacccccactcgcagtccctcaagcctgtgctcccggaaaggcactgggcgaccgcacccgtggctttctctgggcgaccgggtcccagactccccccagcacagcagagcgcttccctgcccacccgcggaaaccgccccaggatgcagcaccgaggcttcctcctcctcaccctcctcgccctgctggcgctcacctccgcggtcgccaaaaagaaagataaggtgaagaagggcggcccggggagcgagtgcgctgagtgggcctgggggccctgcacccccagcagcaaggattgcggcgtgggtttccgcgagggcacctgcggggcccagacccagcgcatccggtgcagggtgccctgcaactggaagaaggagtttggagccgactgcaagtacaagtttgagaactggggtgcgtgtgatgggggcacaggcaccaaagtccgccaaggcaccctgaagaaggcgcgctacaatgctcagtgccaggagaccatccgcgtcaccaagccctgcacccccaagaccaaagcaaaggccaaagccaagaaagggaagggaaaggactagacgccaagcctggatgccaaggagcccctggtgtcacatggggcctggcccacgccctccctctcccaggcccgagatgtgacccaccagtgccttctgtctgctcgttagctttaatcaatcatgccctgccttgtccctctcactccccagccccacccctaagtgcccaaagtggggagggacaagggattctgggaagcttgagcctcccccaaagcaatgtgagtcccagagcccgcttttgttcttccccacaattccattactaagaaacacatcaaataaactgactttttcccccc

SEQ ID NO: 312417 - DNA, 981 bp, Artificial Sequence
  derived and/or modified sequence
gtgctcccggaaaggcactgggcgaccgcacccgtggctttctctgggcgaccgggtcccagactccccccagcacagcagagcgcttccctgcccacccgcggaaaccgccccaggtgggccgcgccccctccccagcagccagcagggcgccagggctgagccggccgtggaggggagcgggtcccgcgggttatacaggcgccggggctccgcggatgcagcaccgaggcttcctcctcctcaccctcctcgccctgctggcgctcacctccgcggtcgccaaaaagaaagataaggtgaagaagggcggcccggggagcgagtgcgctgagtgggcctgggggccctgcacccccagcagcaaggattgcggcgtgggtttccgcgagggcacctgcggggcccagacccagcgcatccggtgcagggtgccctgcaactggaagaaggagtttggagccgactgcaagtacaagtttgagaactggggtgcgtgtgatgggggcacaggcaccaaagtccgccaaggcaccctgaagaaggcgcgctacaatgctcagtgccaggagaccatccgcgtcaccaagccctgcacccccaagaccaaagcaaaggccaaagccaagaaagggaagggaaaggactagacgccaagcctggatgccaaggagcccctggtgtcacatggggcctggcccacgccctccctctcccaggcccgagatgtgacccaccagtgccttctgtctgctcgttagctttaatcaatcatgccctgccttgtccctctcactccccagccccacccctaagtgcccaaagtggggagggacaagggattctgggaagcttgagcctcccccaaagcaatgtgagtcccagagcccgcttttgttcttccccacaattccattactaagaaacacatcaaataaactgactttttccccccaataaaagctcttcttttttaatata

SEQ ID NO: 312418 - DNA, 1026 bp, Artificial Sequence
  derived and/or modified sequence
gagcgagtgagcgcgcggcggcccctggtccgcccggccgcggccgatctaggggctgggggctggaggcgggggtgggggtctgagctgcgtcctgggctcgaggcgtcccccggggagtcgcctcttagcggtgcgtccgggctagcggcgaggggccgccccaagtcttcccaccgccgccaccttagcagcccgacttggggcctggaaagtggagcacgcggaggtgggagggccctgcacgcggcccccggtggggaaggggacgggccagggattcagactcgggctctcccctcaggatgcagcaccgaggcttcctcctcctcaccctcctcgccctgctggcgctcacctccgcggtcgccaaaaagaaagataaggtgaagaagggcggcccggggagcgagtgcgctgagtgggcctgggggccctgcacccccagcagcaaggattgcggcgtgggtttccgcgagggcacctgcggggcccagacccagcgcatccggtgcagggtgccctgcaactggaagaaggagtttggagccgactgcaagtacaagtttgagaactggggtgcgtgtgatgggggcacaggcaccaaagtccgccaaggcaccctgaagaaggcgcgctacaatgctcagtgccaggagaccatccgcgtcaccaagccctgcacccccaagaccaaagcaaaggccaaagccaagaaagggaagggaaaggactagacgccaagcctggatgccaaggagcccctggtgtcacatggggcctggcccacgccctccctctcccaggcccgagatgtgacccaccagtgccttctgtctgctcgttagctttaatcaatcatgccctgccttgtccctctcactccccagccccacccctaagtgcccaaagtggggagggacaagggattctgggaagcttgagcctcccccaaagcaatgtgagtcccagagcccgcttttgttcttccccacaattccattactaagaaacacatcaaataaa

SEQ ID NO: 312419 - DNA, 540 bp, Artificial Sequence
  derived and/or modified sequence
ggtgggcacttgcagctgccgatgtggctggatctggaacttctcagacggctcctgtcagcgccaagtttcaccaaatccaggcctgcgggctcctcccccaggacccccactcgcagtccctcaagcctgtgctcccggaaaggcactgggcgaccgcacccgtggctttctctgggcgaccgggtcccagactccccccagcacagcagagcgcttccctgcccacccgcggaaaccgccccaggtgggccgcgccccctccccagcagccagcagggcgccagggctgagccggccgtggaggggagcgggtcccgcgggttatacaggcgccggggctccgcggcaggcaagagaagctgaggcctgagaacggcccgggccttggcgatgcagcaccgaggcttcctcctcctcaccctcctcgccctgctggcgctcacctccgcggtcgccaaaaagaaagataaggtgaagaagggcggcccggggagcgagtgcgctgagtgggcctgggggccctgcacccccagcagc

SEQ ID NO: 312420 - DNA, 477 bp, Artificial Sequence
  derived and/or modified sequence
agccagcagggcgccagggctgagccggccgtggaggggagcgggtcccgcgggttatacaggcgccggggctccgcggcaggatgcagcaccgaggcttcctcctcctcaccctcctcgccctgctggcgctcacctccgcggtcgccaaaaagaaagataaggtgaagaagggcggcccggggagcgagtgcgctgagtgggcctgggggccctgcacccccagcagcaaggattgcggcgtgggtttccgcgagggcacctgcggggcccagacccagcgcatccggtgcagggtgccctgcaactggaagaaggagtttggagccgactgcaagtacaagtttgagaactggggtgcgtgtgatgggggcacaggcaccaaagtccgccaaggcaccctgaagaaggcgcgctacaatgctcagtgccaggagaccatccgcgtcaccaagccctgcacccccaagaccaaag

SEQ ID NO: 312421 - DNA, 432 bp, Artificial Sequence
  derived and/or modified sequence
atgcagcaccggggcttcctgctgctgaccctgctggccctgctggcccttacctcggcggtcgccaaaaagaaggacaaggtgaagaaaggagggccagggtcagagtgcgctgaatgggcttggggcccctgtaccccctctagcaaggactgcggtgtcgggttcagggaaggcacctgcggcgcccagactcagcgaatcaggtgccgggtcccttgcaattggaagaaagaattcggagccgattgcaaatataagtttgaaaactggggagcctgcgacggtggaacaggcactaaggttagacagggcaccctgaagaaagctcgttataacgcgcaatgtcaagagactatcagagtgacaaaaccatgtactccgaagactaaggccaaggccaaagccaagaaaggaaagggaaaagactag

SEQ ID NO: 312422 - DNA, 432 bp, Artificial Sequence
  derived and/or modified sequence
atgcagcaccggggcttcctgctgctgaccctgctggccctgctggctcttaccagtgccgtggctaagaaaaaggacaaagtgaaaaagggcggaccaggctcagagtgtgcggaatgggcttggggcccctgtaccccaagttcaaaggactgcggagtcggctttcgcgaaggcacgtgtggggcccagactcagcggatcagatgcagggtaccctgcaattggaaaaaggagtttggcgctgattgcaagtataaattcgagaactggggagcatgcgatggggggaccgggaccaaagtgagacaggggactttgaagaaagcccgatataacgctcagtgtcaagagacaattcgggtcaccaaaccatgtacccctaaaacgaaagctaaggcgaaggctaagaaggggaagggtaaagactag

SEQ ID NO: 312423 - DNA, 432 bp, Artificial Sequence
  derived and/or modified sequence
atgcagcaccggggcttcctgctgctgaccctgctggccctgctggctctgacatctgccgtggcaaaaaagaaagataaagtaaagaaagggggtcccggcagtgagtgtgccgagtgggcctgggggccgtgcacacctagcagtaaggactgcggcgttgggtttagagaagggacctgtggagctcagactcagagaatccgatgccgtgtgccttgtaactggaaaaaggagttcggcgcagactgtaagtataagtttgagaactggggcgcctgcgatggcggaaccggcacaaaggtgcgccagggtacactcaagaaggccagatataacgctcagtgtcaggagaccatccgagtcaccaaaccttgtacgcccaagacaaaagccaaagccaaggcaaaaaaaggcaagggaaaggattag

SEQ ID NO: 312424 - DNA, 432 bp, Artificial Sequence
  derived and/or modified sequence
atgcagcaccggggcttcctgctgctgaccctgctggccctgctggctctgacttctgccgtcgctaagaagaaggacaaagtaaaaaaaggaggcccgggtagcgaatgcgccgagtgggcctggggcccctgtacaccttccagtaaggactgcggagtagggttccgcgaagggacttgcggggctcaaacccaacgcatacgctgtcgggtgccatgtaactggaagaaagagttcggagccgactgcaagtacaagtttgagaactggggggcgtgcgacggagggacaggcacaaaggtcagacaaggtaccttgaagaaagcccggtataatgcacagtgtcaggaaactattcgggtgacgaagccctgcaccccaaagaccaaggccaaggccaaggccaagaagggcaaaggaaaagactag

SEQ ID NO: 312425 - DNA, 432 bp, Artificial Sequence
  derived and/or modified sequence
atgcagcaccggggcttcctgctgctgaccctgctggccctgctggccttgacaagcgccgtggccaagaagaaggacaaagttaaaaaaggtgggccaggctcagagtgcgccgagtgggcttggggcccttgcaccccatcttcaaaggactgtggggtgggatttagggagggcacttgcggcgcccagacccaacgtattagatgtcgtgtgccatgtaactggaagaaggagtttggagccgactgcaagtacaaattcgagaactggggcgcatgcgatggcggcaccggaaccaaggtgcgacaggggacccttaagaaggcacgttacaacgcccagtgtcaagaaacaatccgggtgacaaaaccgtgtacccctaaaacaaaagcgaaggccaaagccaaaaagggaaaaggtaaggactag

SEQ ID NO: 312426 - DNA, 432 bp, Artificial Sequence
  derived and/or modified sequence
atgcagcaccggggcttcctgctgctgaccctgctggccctgctggccctcacttccgctgtggccaaaaaaaaagacaaggtgaaaaaagggggtcccggatctgagtgtgccgagtgggcctggggcccgtgcacaccatccagtaaagactgcggcgtcgggttccgggagggaacatgcggagcacaaacccagcgcattaggtgcagagtgccttgcaattggaaaaaggagttcggtgctgattgcaagtataagtttgaaaattggggcgcctgcgatggggggactggtacaaaagtgcggcagggaaccctgaagaaggcacgttacaacgcccagtgccaggagaccattcgcgtgactaagccctgtacacccaaaacaaaagccaaggccaaggccaaaaaggggaagggaaaggactag

SEQ ID NO: 312427 - DNA, 150 bp, Artificial Sequence
  derived and/or modified sequence
atgcagcaccggggcttcctgctgctgaccctgctggccctgctggcgttgacctcagctgtagccaaaaaaaaagacaaagttaagaagggcggccctggatcagagtgcgccgagtgggcgtggggcccatgcactccgtcctcatag

SEQ ID NO: 312428 - DNA, 396 bp, Artificial Sequence
  derived and/or modified sequence
atgcagcaccggggcttcctgctgctgaccctgctggccctgctggcactcacctctgcggttgctaaaaagaaggacaaggttaaaaaaggcggtcccggatcggaatgtgcggaatgggcgtggggcccttgcacacctagctcaaaggattgcggagttggattccgtgaagggacctgtggtgcccagacccaacgcattcggtgcagggtgccatgtaattggaaaaaagagtttggtgctgactgtaagtacaaatttgagaattggggcgcttgtgatgggggaacgggaaccaaagtccgacaggggactttaaagaaagccagatacaatgcacagtgccaggagacaatccgcgtgacaaaaccttgtactcccaagaccaagtag

SEQ ID NO: 312429 - DNA, 432 bp, Artificial Sequence
  derived and/or modified sequence
atgcaacacagagggttcttactgttgaccctgctggctctattggctcttacgagtgcagtcgcgaagaaaaaggataaagttaagaaggggggtccaggctccgaatgtgccgagtgggcctggggcccttgcacaccttcctcgaaagattgtggcgtgggttttcgagagggaacatgtggcgctcagacacagaggatccgctgtcgggtgccgtgcaactggaagaaggagttcggtgcagattgtaagtacaagtttgagaactggggcgcttgcgacggcggaacaggaaccaaggtgcgccagggaacgctgaaaaaggctagatataacgcccagtgtcaggaaacaatacgggtcacaaaaccctgtaccccgaagacaaaagccaaagctaaagccaagaaaggtaaggggaaggattag

SEQ ID NO: 312430 - DNA, 432 bp, Artificial Sequence
  derived and/or modified sequence
atgcaacaccggggatttctgctcctaaccctgctggctctgctggccctcacctcggccgtagccaagaaaaaggacaaggtgaaaaagggtggccctggctctgagtgcgcagaatgggcctgggggccttgcacgccctcgagcaaagattgcggggtcggatttcgagagggcacctgcggcgctcagacccagaggatccgatgccgcgtgccatgtaactggaaaaaagagttcggagccgattgcaaatacaaatttgagaactggggtgcgtgtgatgggggaaccggtactaaggttcgccagggcacactgaaaaaagctaggtacaacgcacagtgccaggaaacaatccgagttactaagccctgtactcccaaaacaaaggccaaggccaaggctaagaagggaaagggcaaagactag

SEQ ID NO: 312431 - DNA, 432 bp, Artificial Sequence
  derived and/or modified sequence
atgcagcatcggggttttcttctgctgaccttactggctctgctcgcactgacctctgccgttgcaaaaaagaaagataaggttaagaagggcggaccagggtctgagtgcgccgagtgggcttggggaccatgtacgcccagcagcaaagattgcggggtcggattccgtgagggaacctgcggagcccaaacgcagaggataaggtgtcgtgtcccttgcaactggaaaaaagaattcggagccgattgcaagtataaattcgagaactggggtgcctgcgacggagggaccggaacaaaagtccggcaaggcactttaaaaaaggcacgatataatgcccaatgccaagaaacaatccgcgttaccaagccgtgtaccccgaagaccaaagctaaggctaaggccaaaaaaggcaaaggaaaggattag

SEQ ID NO: 312432 - DNA, 432 bp, Artificial Sequence
  derived and/or modified sequence
atgcagcatagaggcttcttgttgcttaccttattagccctgctcgcccttactagtgcggtggccaaaaaaaaggataaggtcaagaagggcggtccagggagcgagtgtgccgagtgggcctgggggccatgcacaccaagtagtaaggactgcggcgtgggattcagagaagggacctgcggcgctcagacgcagcgaatccggtgtcgggtgccgtgtaattggaagaaggagttcggggctgattgtaagtacaaattcgagaactggggagcctgtgatgggggtactggaactaaggtcaggcaggggaccctaaaaaaggcacggtacaatgcccagtgccaggagaccatcagggtgaccaagccatgcaccccaaaaaccaaggctaaggccaaggctaagaagggtaaagggaaagactag

SEQ ID NO: 312433 - DNA, 432 bp, Artificial Sequence
  derived and/or modified sequence
atgcagcacagggggtttcttctgctgacattgttggccctgctggccctaacctccgccgtggcaaagaaaaaggacaaggtcaaaaagggtggcccagggagtgagtgcgctgaatgggcatggggaccctgtacgcccagctcaaaggactgcggagtgggattccgggagggcacatgtggtgctcagactcagcgaatcaggtgtcgcgttccctgtaattggaagaaggagtttggcgctgattgtaagtataagtttgagaactggggcgcatgcgacggcggaaccgggaccaaggtgcggcaaggaacattgaagaaggcacgctataacgcccagtgccaggagaccattagggtgactaaaccctgcacccctaaaacgaaggctaaggcaaaagcaaagaagggtaagggaaaggattag

SEQ ID NO: 312434 - DNA, 432 bp, Artificial Sequence
  derived and/or modified sequence
atgcagcaccggggattcctgctgctaacactgctggctctcttggcgctgactagcgctgttgctaagaagaaggacaaggtgaagaaaggtggccctggaagtgagtgtgccgagtgggcatggggcccatgcacacctagctccaaggattgtggggtcgggttcagggagggcacatgtggtgctcaaacccagagaattcggtgccgcgttccatgcaactggaagaaagagttcggcgcagactgtaagtacaagtttgagaactggggagcctgtgatggtggcacaggcaccaaggttagacagggcacgctgaaaaaagctagatataatgcccagtgccaggagaccatccgggtcactaagccatgcaccccaaagactaaagctaaagccaaggcaaaaaaggggaaaggcaaggattag

SEQ ID NO: 312435 - DNA, 150 bp, Artificial Sequence
  derived and/or modified sequence
atgcagcatcgcggtttcctgctgctcacacttctggcgctattggccctgacttctgctgtagctaaaaagaaggataaggttaagaaggggggacctggtagtgaatgcgccgagtgggcatgggggccatgtaccccctcctcgtag

SEQ ID NO: 312436 - DNA, 396 bp, Artificial Sequence
  derived and/or modified sequence
atgcagcatcgcggtttcctgctgttgactctgttggccctgctcgccctgacatctgctgtcgctaaaaagaaagacaaagtgaaaaagggaggtcccggatcagagtgtgcagaatgggcttggggcccatgcactcctagctccaaggactgcggagtgggcttccgtgaggggacatgcggcgcacagacccagaggatccgctgtcgggtcccgtgtaattggaagaaggaattcggagctgactgtaaatacaagttcgaaaactggggagcatgcgatggcggaaccggaactaaggtgaggcaaggcacattgaagaaggcacgctataacgcacagtgccaggagacaatccgggtgacaaagccttgcacgcctaagaccaagtag

SEQ ID NO: 312437 - protein, 420 aa, Artificial Sequence
  derived and/or modified sequence
MRWRTILLQYCFLLITCLLTALEAVPIDIDKTKVQNIHPVESAKIEPPDTGLYYDEYLKQVIDVLETDKHFREKLQKADIEEIKSGRLSKELDLVSHHVRTKLDELKRQEVGRLRMLIKAKLDSLQDIGMDHQALLKQFDHLNHLNPDKFESTDLDMLIKAATSDLEHYDKTRHEEFKKYEMMKEHERREYLKTLNEEKRKEEESKFEEMKKKHENHPKVNHPGSKDQLKEVWEETDGLDPNDFDPKTFFKLHDVNSDGFLDEQELEALFTKELEKVYDPKNEEDDMVEMEEERLRMREHVMSEVDTNKDRLVTLEEFLKATEKKEFLEPDSWETLDQQQFFTEEELKEYENIIALQENELKKKADELQKQKEELQRQHDQLEAQKLEYHQVIQQMEQKKLQQGIPPSGPAGELKFEPRV

SEQ ID NO: 312438 - protein, 198 aa, Artificial Sequence
  derived and/or modified sequence
MRWRTILLQYCFLLITCLLTALEAVPIDIDKTKVQNIHPVESAKIEPPDTGLYYDEYLKQVIDVLETDKHFREKLQKADIEEIKSGRLSKELDLVSHHVRTKLDELKRQEVGRLRMLIKAKLDSLQDIGMDHQALLKQFDHLNHLNPDKFESTDLDMLIKAATSDLEHYDKTRHEEFKKYEMMKEHERREYLKTLNEE

SEQ ID NO: 312439 - DNA, 1263 bp, Artificial Sequence
  derived and/or modified sequence
atgagatggagaactatcctcttacaatattgtttcttgctaataacttgcctgctcactgctctcgaggcagtgcctattgacatcgataaaacaaaggtgcagaatattcacccagtggagagtgccaaaattgagcccccagatactggtctctactacgacgaatatctgaagcaagtcattgacgttttggagaccgataagcattttcgggaaaaactgcaaaaggccgatatcgaggagataaagagcggacgtctgtcaaaggagctagacctggtgtcgcaccatgtgcggaccaagctagatgaactaaagcgccaagaggtgggtcggctgcggatgctgataaaggcaaagcttgatagcctacaggatatagggatggatcaccaggctttgctcaaacagttcgaccaccttaatcacctcaatcctgataaattcgagtccactgaccttgacatgttgattaaggctgccactagtgaccttgagcattacgacaagacaaggcacgaggaattcaagaaatatgaaatgatgaaagagcacgaacggcgggagtatttgaagacccttaatgaagagaagaggaaggaagaggagtccaagtttgaggagatgaagaagaaacacgagaaccatccaaaggtgaatcatccagggtcaaaggatcagttgaaggaggtatgggaagagacagacggacttgatcccaacgatttcgatccaaagactttttttaagctccatgacgtgaattcagacggattcttagatgaacaggagctcgaggccctgttcaccaaggaattagagaaggtctatgacccaaagaacgaagaagacgatatggtagagatggaagaagaacgactgaggatgcgcgagcatgtcatgagcgaggttgataccaataaggataggctcgttactcttgaggagttcttgaaggctacggagaagaaagaattcctggagccagacagttgggagaccttagaccaacagcagttttttactgaggaggaactgaaggaatacgagaacatcatcgcactgcaagagaatgaactgaaaaaaaaagcggacgagctgcaaaagcagaaagaggaacttcagcggcagcatgaccagctggaggcacagaaattggagtaccatcaggtcattcaacagatggagcagaaaaagctgcaacaaggaattcctccttctgggcccgcgggcgagctgaagttcgagccgcgcgtgtag

SEQ ID NO: 312440 - DNA, 1263 bp, Artificial Sequence
  derived and/or modified sequence
atgcgctggaggaccatcctgctgcagtactgcttcctgctgatcacctgcctgctgacagccctggaggccgtgcccattgatattgacaagaccaaggtgcagaacatccaccctgtggagagcgccaagattgagcccccagacaccggcctgtactatgatgagtacctgaagcaggtgattgatgtgctggagacagacaagcacttccgggagaagctgcagaaggctgacatcgaggagatcaagagcggccgcctgagcaaggagctggacctggtgagccaccacgtgaggaccaagctggatgagctgaagaggcaggaggtgggccgcctgaggatgctgatcaaggccaagctggacagcctgcaggacatcggcatggaccaccaggccctgctgaagcagtttgaccacctgaaccacctgaacccagacaagtttgagagcacagacctggacatgctgatcaaggccgccaccagtgacctggagcactatgacaagaccaggcatgaggagttcaagaagtatgagatgatgaaggagcacgagcggcgggagtacctgaagaccctgaatgaggagaagaggaaggaggaggagagcaagtttgaggagatgaagaagaagcatgagaaccaccccaaggtgaaccaccctggcagcaaggaccagctgaaggaggtgtgggaggagacagatggcctggaccccaatgactttgaccccaagaccttcttcaagctgcatgatgtgaacagtgatggcttcctggatgagcaggagctggaggccctcttcaccaaggagctggagaaggtgtatgaccccaagaatgaggaggatgacatggtggagatggaggaggagcggctgaggatgagggagcacgtgatgtctgaggtggacaccaacaaggaccggctggtgaccctggaggagttcctgaaggccacagagaagaaggagttcctggagccagacagctgggagaccctggaccagcagcagttcttcacagaggaggagctgaaggagtatgagaacatcatcgccctgcaggagaatgagctgaagaagaaggcagatgagctgcagaagcagaaggaggagctgcagaggcagcacgaccagctggaggcccagaagctggagtaccaccaggtgatccagcagatggagcagaagaagctgcagcagggcatcccccccagcggccctgctggggagctgaagtttgagccccgggtgtag

SEQ ID NO: 312441 - DNA, 1263 bp, Artificial Sequence
  derived and/or modified sequence
atgcggtggcggaccatcctgctgcagtactgcttcctgctgatcacctgcttactcaccgctctggaggccgttcctatagacatagacaaaacaaaagttcagaacatccaccccgtagagtctgcgaaaatcgagccccccgatacaggtttgtattatgacgaatacctgaagcaggtcatcgacgtcctagagacagacaagcatttccgagagaagctgcaaaaggccgacatcgaggaaatcaaatcggggcgtctgagtaaagaactcgatctcgtgtctcatcatgtcagaaccaagttagatgaactcaaaaggcaggaagtgggtcgtctgaggatgttgatcaaagcaaaacttgacagtctacaagacatcggaatggaccaccaagccctgctgaaacaatttgatcatctcaaccatcttaaccctgataagttcgagtctaccgacctcgatatgctgattaaggctgcaacctccgacttggaacactacgataagacccgccatgaggagttcaaaaaatacgagatgatgaaggaacatgagagaagggaatatctcaaaaccctcaacgaagagaaaaggaaagaggaagaatctaaattcgaggagatgaagaagaaacatgaaaatcaccccaaagtgaatcacccgggctcaaaggatcaactgaaggaagtgtgggaggaaacagatggacttgatccaaatgactttgatcctaaaacctttttcaaacttcacgacgtgaacagcgatggctttctggatgaacaggaactcgaggccctgttcactaaggaactagagaaagtgtatgaccctaagaacgaggaagacgacatggtagagatggaagaggagagattgcggatgagagagcatgtgatgtcagaagtggatacaaataaggacagattagtgacgctggaagagttcctgaaggcaaccgaaaaaaaggagttcttagagccagattcctgggagaccctcgaccagcaacagttttttaccgaggaagaactaaaggagtacgagaacatcattgccctgcaagagaatgagttgaaaaaaaaagccgatgagctgcaaaaacagaaagaagagctccagagacaacatgaccagcttgaagctcagaagctggagtaccatcaggtgattcaacagatggaacagaaaaagttgcagcagggcatcccaccatctggacccgccggcgaactgaagtttgaaccaagagtgtag

SEQ ID NO: 312442 - DNA, 1905 bp, Artificial Sequence
  derived and/or modified sequence
agcggagcggtgggccgggggctggaggacaggtttgtgcgctggacgcaagcaccaggcgcagcctcgctcgccgagacccggccagaacgtgttacgagtcagtttttagtgaaaaaacattgagctaggagccaagacccatctcttcactattttggtattgtgcaagtcatcttacctctctggatctcagttgtctcatctgtaaaaaggagataaaaattatttacctgcctgaacatgaggtggaggaccatcctgctacagtattgctttctcttgattacatgtttacttactgctcttgaagctgtgcctattgacatagacaagacaaaagtacaaaatattcaccctgtggaaagtgcgaagatagaaccaccagatactggactttattatgatgaatatctcaagcaagtgattgatgtgctggaaacagataaacacttcagagaaaagctccagaaagcagacatagaggaaataaagagtgggaggctaagcaaagaactggatttagtaagtcaccatgtgaggacaaaacttgatgaactgaaaaggcaagaagtaggaaggttaagaatgttaattaaagctaagttggattcccttcaagatataggcatggaccaccaagctcttctaaaacaatttgatcacctaaaccacctgaatcctgacaagtttgaatccacagatttagatatgctaatcaaagcggcaacaagtgatctggaacactatgacaagactcgtcatgaagaatttaaaaaatatgaaatgatgaaggaacatgaaaggagagaatatttaaaaacattgaatgaagaaaagagaaaagaagaagagtctaaatttgaagaaatgaagaaaaagcatgaaaatcaccctaaagttaatcacccaggaagcaaagatcaactaaaagaggtatgggaagagactgatggattggatcctaatgactttgaccccaagacatttttcaaattacatgatgtcaatagtgatggattcctggatgaacaagaattagaagccctatttactaaagagttggagaaagtatatgaccctaaaaatgaagaggatgatatggtagaaatggaagaagaaaggcttagaatgagggaacatgtaatgagtgaggttgatactaacaaagacagattggtgactctggaggagtttttgaaagccacagaaaaaaaagaattcttggagccagatagctgggagacattagatcagcaacagttcttcacagaggaagaactaaaagaatatgaaaatattattgctttacaagaaaatgaacttaagaagaaggcagatgagcttcagaaacaaaaagaagagctacaacgtcagcatgatcaactggaggctcagaagctggaatatcatcaggtcatacagcagatggaacaaaaaaaattacaacaaggaattcctccatcagggccagctggagaattgaagtttgagccacgtgtgtaattttgtttgattatttatttaggaaaataaattattttatcaattgaaatccacatttattacaaatataatttcaaatcattaagatgttatgttattttttgtgtattttttgtggtattagagcaatttagattatagaaaaatgaaaatgcctccaaaagttttatgtagcagcaaattttaagtgctgtatcatttgtataatttgataaccatatttatggtaaaatgatttatttcaactttatttgtaattctttctaattatattaatcttaccagagaatatgttttttaaaattgtgatctatgattagctaagcatattttttaaaacaagtatatttgtatatgaaggaacatttagaataaaggaagatacttttaaaataagaa

SEQ ID NO: 312443 - DNA, 1263 bp, Artificial Sequence
  derived and/or modified sequence
atgcgctggagaactatcctgctgcagtactgcttcctgcttatcacctgccttttaacagctctagaggctgtgcccatagatatagacaaaactaaagtgcaaaacatacatccggtggaatctgcgaagatcgaacctccggacacaggtttgtactatgacgagtatctgaagcaagtgatcgatgtgcttgagaccgacaagcacttcagagagaagctgcagaaggcagacattgaggaaattaagtccggcaggctatctaaagaactagacctcgtgagccatcacgtgagaacaaagttggacgagctgaagcgacaggaggtgggaaggcttagaatgctcatcaaagctaagcttgacagcctccaagacatcgggatggatcatcaggccttgctaaaacagttcgaccatcttaaccacctgaaccctgacaaattcgaatcaactgacctggatatgcttatcaaagccgctacttcagatctggagcactacgacaaaacacgtcacgaggagttcaagaaatatgagatgatgaaggagcatgagcgacgggaatacctgaagaccttgaacgaagagaaaagaaaggaagaagagtctaaatttgaagagatgaagaagaagcacgagaaccaccccaaggtcaaccatcctggctcaaaggatcagctgaaggaagtctgggaagagactgatggtcttgatcctaacgattttgacccgaaaacatttttcaaactgcacgatgtgaacagcgacggatttctggatgagcaggagttagaggccctttttacaaaggagctcgagaaggtctacgacccgaaaaacgaagaagatgacatggtggagatggaggaggaacgactcagaatgagagaacacgtgatgtccgaggtagacaccaataaagataggctcgtaacactcgaggagttccttaaggctaccgagaaaaaggaattccttgagcctgactcttgggagactctggaccaacaacagtttttcactgaagaagaactcaaagagtacgagaatataatcgccctacaggaaaacgaactaaaaaagaaggccgatgagctgcagaagcaaaaggaggagctccagagacagcacgatcaactggaagcccagaaactggaataccaccaggttatccagcaaatggaacagaagaagctccagcaaggcattccccctagtggccctgcaggcgagctgaaattcgaacccagggtctag

SEQ ID NO: 312444 - DNA, 1263 bp, Artificial Sequence
  derived and/or modified sequence
atgagatggagaaccatcctgctgcagtactgcttcctgctgatcacctgcctgctgaccgccctggaggccgtgcccatcgacatcgacaagaccaaggtgcagaacatccaccccgtggagagcgccaagatcgagccccccgacaccggcctgtactacgacgagtacctgaagcaggtgatcgacgtgctggagaccgacaagcacttcagagagaagctgcagaaggccgacatcgaggagatcaagagcggcagactgagcaaggagctggacctggtgagccaccacgtgagaaccaagctggacgagctgaagagacaggaggtgggcagactgagaatgctgatcaaggccaagctggacagcctgcaggacatcggcatggaccaccaggccctgctgaagcagttcgaccacctgaaccacctgaaccccgacaagttcgagagcaccgacctggacatgctgatcaaggccgccaccagcgacctggagcactacgacaagaccagacacgaggagttcaagaagtacgagatgatgaaggagcacgagagaagagagtacctgaagaccctgaacgaggagaagagaaaggaggaggagagcaagttcgaggagatgaagaagaagcacgagaaccaccccaaggtgaaccaccccggcagcaaggaccagctgaaggaggtgtgggaggagaccgacggcctggaccccaacgacttcgaccccaagaccttcttcaagctgcacgacgtgaacagcgacggcttcctggacgagcaggagctggaggccctgttcaccaaggagctggagaaggtgtacgaccccaagaacgaggaggacgacatggtggagatggaggaggagagactgagaatgagagagcacgtgatgagcgaggtggacaccaacaaggacagactggtgaccctggaggagttcctgaaggccaccgagaagaaggagttcctggagcccgacagctgggagaccctggaccagcagcagttcttcaccgaggaggagctgaaggagtacgagaacatcatcgccctgcaggagaacgagctgaagaagaaggccgacgagctgcagaagcagaaggaggagctgcagagacagcacgaccagctggaggcccagaagctggagtaccaccaggtgatccagcagatggagcagaagaagctgcagcagggcatcccccccagcggccccgccggcgagctgaagttcgagcccagagtgtag

SEQ ID NO: 312445 - protein, 420 aa, Artificial Sequence
  derived and/or modified sequence
MRWRTILLQYCFLLITCLLTALEAVPIDIDKTKVQNIHPVESAKIEPPDTGLYYDEYLKQVIDVLETDKHFREKLQKADIEEIKSGRLSKELDLVSHHVRTKLDELKRQEVGRLRMLIKAKLDSLQDIGMDHQALLKQFDHLNHLNPDKFESTDLDMLIKAATSDLEHYDKTRHEEFKKYEMMKEHERREYLKTLNEEKRKEEESKFEEMKKKHENHPKVNHPGSKDQLKEVWEETDGLDPNDFDPKTFFKLHDVNSDGFLDEQELEALFTKELEKVYDPKNEEDDMVEMEEERLRMREHVMSEVDTNKDRLVTLEEFLKATEKKEFLEPDSWETLDQQQFFTEEELKEYENIIALQENELKKKADELQKQKEELQRQHDQLEAQKLEYHQVIQQMEQKKLQQGIPPSGPAGELKFEPHI

SEQ ID NO: 312446 - protein, 90 aa, Artificial Sequence
  derived and/or modified sequence
MRWRTILLQYCFLLITCLLTALEAVPIDIDKTKVQNIHPVESAKIEPPDTGLYYDEYLKQVIDVLETDKHFREKLQKADIEEIKSGRLSK

SEQ ID NO: 312447 - protein, 195 aa, Artificial Sequence
  derived and/or modified sequence
MRWRTILLQYCFLLITCLLTALEAVPIDIDKTKVQNIHPVESAKIEPPDTGLYYDEYLKQVIDVLETDKHFREKLQKADIEEIKSGRLSKELDLVSHHVRTKLDELKRQEVGRLRMLIKAKLDSLQDIGMDHQALLKQFDHLNHLNPDKFESTDLDMLIKAATSDLEHYDKTRHEEFKKYEMMKEHERREYLKTL

SEQ ID NO: 312448 - protein, 390 aa, Artificial Sequence
  derived and/or modified sequence
MRWRTILLQYCFLLITCLLTALEAVPIDIDKTKVQNIHPVESAKIEPPDTGLYYDEYLKQVIDVLETDKHFREKLQKADIEEIKSGRLSKELDLVSHHVRTKLDELKRQEVGRLRMLIKAKLDSLQDIGMDHQALLKQFDHLNHLNPDKFESTDLDMLIKAATSDLEHYDKTRHEEFKKYEMMKEHERREYLKTLNEEKRKEEESKFEEMKKKHENHPKVNHPGSKDQLKEVWEETDGLDPNDFDPKTFFKLHDVNSDGFLDEQELEALFTKELEKVYDPKNEEDDMVEMEEERLRMREHVMSETLDQQQFFTEEELKEYENIIALQENELKKKADELQKQKEELQRQHDQLEAQKLEYHQVIQQMEQKKLQQGIPPSGPAGELKFEPHI

SEQ ID NO: 312449 - protein, 69 aa, Artificial Sequence
  derived and/or modified sequence
MRWRTILLQYCFLLITCLLTALEAVPIDIDKTKVQNIHPVESAKIEPPDTGLYYDEYLKQVIDVLETDK

SEQ ID NO: 312450 - protein, 34 aa, Artificial Sequence
  derived and/or modified sequence
MRWRTILLQYCFLLITCLLTALEAVPIDIDKTKV

SEQ ID NO: 312451 - protein, 39 aa, Artificial Sequence
  derived and/or modified sequence
MRWRTILLQYCFLLITCLLTALEAVPIDIDKTKVQNIHP

SEQ ID NO: 312452 - DNA, 1173 bp, Artificial Sequence
  derived and/or modified sequence
atgagatggcgcacaatcctgctccagtattgttttcttttgatcacctgcttgctgaccgctttggaagccgtccccatcgacatagacaagactaaagttcagaacatccaccctgtggaatcagctaaaatagagcctcctgacacaggcctctactacgacgaatacctgaagcaggtgattgatgtcctggaaacagacaagcattttcgagaaaagcttcagaaggctgacatagaggagatcaaaagcggcaggctctccaaggagcttgacctggtctcccaccacgtacggacaaagctagacgagctgaaacgtcaggaggtcgggcgcctgaggatgctgatcaaggcaaagctggattcccttcaggacatcggaatggaccaccaagccttgctcaaacagtttgatcacctgaatcacctgaacccagacaagtttgaatcaactgacctggatatgctgattaaggcggcaacctccgacttggagcactatgataagactcgccacgaagagtttaagaagtatgagatgatgaaggagcacgaacggagagaatatcttaaaactctgaacgaagagaaaaggaaggaagaggaaagcaagttcgaggaaatgaagaaaaaacatgagaatcaccccaaagtaaaccacccggggtcaaaggaccaattgaaggaggtgtgggaggagaccgacggactggatcccaacgattttgatccaaaaactttctttaagcttcacgacgtgaactcggacggcttccttgacgaacaggagttggaggctttgttcaccaaggagctcgagaaagtgtacgatcccaagaacgaagaagacgacatggtggagatggaagaagagaggttgcggatgcgggaacacgttatgagtgaaaccctcgatcagcagcagttttttaccgaggaggaactgaaggaatacgagaacattattgctcttcaggaaaacgaactgaagaaaaaagctgatgagctgcaaaagcagaaagaggagttgcagaggcagcatgatcagctagaagcccagaaattagagtaccatcaagtgatccagcagatggagcagaagaagctccagcagggcatccctccttccgggccggctggggaacttaagttcgaaccccacatttag

SEQ ID NO: 312453 - DNA, 210 bp, Artificial Sequence
  derived and/or modified sequence
atgcggtggagaaccatccttctccagtactgtttccttctaattacatgcctattaacagccctggaggccgtgccgattgacattgacaaaaccaaggtccagaatatacaccctgttgaatcagccaaaatcgagccacccgataccggcttatactacgacgaatatctgaagcaggtgattgatgtgttggaaacggacaaatag

SEQ ID NO: 312454 - DNA, 105 bp, Artificial Sequence
  derived and/or modified sequence
atgcgctggagaactatcctcctacagtattgcttcttgctgatcacctgtctgcttactgctctcgaggccgttcccatagacattgacaaaaccaaagtttag

SEQ ID NO: 312455 - DNA, 588 bp, Artificial Sequence
  derived and/or modified sequence
atgaggtggcgcaccatcctcctgcaatattgttttctcctcatcacctgtctgctgactgctcttgaggccgtgcctatcgatattgataaaactaaagtacagaatatccaccccgtggagtcagctaagatcgagccacccgatactgggctatactatgacgagtatcttaaacaggtgattgatgtgctcgagactgataagcacttcagagaaaaacttcagaaggccgacattgaagaaatcaagagcgggcggctgtccaaggagcttgaccttgttagtcaccacgtccgaaccaagttggatgagctgaagcggcaagaggttgggcgtttgaggatgcttattaaggccaaattggattccctgcaggatatcgggatggaccatcaggcgctactgaaacagttcgatcacctaaatcacctcaaccctgacaagtttgaaagcacagacctggacatgctgattaaagccgccacctcagatctggaacattatgacaagactcggcatgaagaatttaagaagtatgagatgatgaaggagcacgagagaagagaatacctgaaaacactctag

SEQ ID NO: 312456 - DNA, 597 bp, Artificial Sequence
  derived and/or modified sequence
atgcggtggcgtaccatattgctacaatactgtttcttgctgatcacgtgcttgttgacagctctggaagctgttccgatcgatattgataagacaaaagtccagaatatccaccctgtcgagtcagcaaaaatcgagccccctgacactggactgtattatgacgagtacctaaagcaggtcatcgatgtcctggaaaccgataaacactttcgggagaagcttcaaaaggccgatatcgaagaaataaaaagtggacggctgagcaaggaactggatctcgtcagtcatcacgtgcgaacaaagcttgatgagctgaagagacaggaggtaggaagactgcgaatgctgatcaaagcgaagctagactctctgcaagacataggtatggatcaccaggccctgctgaagcagtttgaccacctgaaccatctgaatccagacaagtttgagtctacagacttggacatgttgatcaaggcggccacatctgatttggaacattacgacaaaacccgccacgaagaatttaagaaatacgaaatgatgaaagagcacgaacgcagggaatatttgaagacccttaatgaagagtag

SEQ ID NO: 312457 - DNA, 105 bp, Artificial Sequence
  derived and/or modified sequence
atgagatggaggacaatcctgctacagtattgctttctactcattacctgcctgttaactgcactggaagccgtcccaatcgacatcgacaaaacgaaagtctag

SEQ ID NO: 312458 - DNA, 120 bp, Artificial Sequence
  derived and/or modified sequence
atgaggtggaggaccatactcctgcagtactgttttcttctcattacctgcctactgacagccctggaggccgttcctattgacatcgataagactaaggtgcagaatattcacccctag

SEQ ID NO: 312459 - DNA, 210 bp, Artificial Sequence
  derived and/or modified sequence
atgcggtggcgcactatcttgctacagtattgcttccttttaattacctgcctgttgaccgccttggaagccgtaccaattgacatcgacaagacaaaggtccagaacatacaccccgttgaatcggccaagattgaaccccccgatacaggattgtattacgacgagtacctcaagcaggtgatcgatgtgcttgaaacagacaagtag

SEQ ID NO: 312460 - DNA, 273 bp, Artificial Sequence
  derived and/or modified sequence
atgcgctggcgtaccattttgctccagtattgcttcctcctgattacctgtctactgacggctctggaagctgtgcccatcgacattgacaagacgaaagtccaaaacatccatcctgtagagtccgcgaaaatcgagcccccagataccggcctttactatgatgagtatctgaaacaagttatagacgtacttgaaactgataagcatttccgggaaaaactccagaaagctgatatcgaagagatcaaaagcgggcggctgtcaaaatag

SEQ ID NO: 312461 - DNA, 1173 bp, Artificial Sequence
  derived and/or modified sequence
atgcgctggaggaccatcctgctgcagtactgcttcctgctgatcacctgcctgctgacagccctggaggccgtgcccattgatattgacaagaccaaggtgcagaacatccaccctgtggagagcgccaagattgagcccccagacaccggcctgtactatgatgagtacctgaagcaggtgattgatgtgctggagacagacaagcacttccgggagaagctgcagaaggctgacatcgaggagatcaagagcggccgcctgagcaaggagctggacctggtgagccaccacgtgaggaccaagctggatgagctgaagaggcaggaggtgggccgcctgaggatgctgatcaaggccaagctggacagcctgcaggacatcggcatggaccaccaggccctgctgaagcagtttgaccacctgaaccacctgaacccagacaagtttgagagcacagacctggacatgctgatcaaggccgccaccagtgacctggagcactatgacaagaccaggcatgaggagttcaagaagtatgagatgatgaaggagcacgagcggcgggagtacctgaagaccctgaatgaggagaagaggaaggaggaggagagcaagtttgaggagatgaagaagaagcatgagaaccaccccaaggtgaaccaccctggcagcaaggaccagctgaaggaggtgtgggaggagacagatggcctggaccccaatgactttgaccccaagaccttcttcaagctgcatgatgtgaacagtgatggcttcctggatgagcaggagctggaggccctcttcaccaaggagctggagaaggtgtatgaccccaagaatgaggaggatgacatggtggagatggaggaggagcggctgaggatgagggagcacgtgatgtctgagaccctggaccagcagcagttcttcacagaggaggagctgaaggagtatgagaacatcatcgccctgcaggagaatgagctgaagaagaaggcagatgagctgcagaagcagaaggaggagctgcagaggcagcacgaccagctggaggcccagaagctggagtaccaccaggtgatccagcagatggagcagaagaagctgcagcagggcatcccccccagcggccctgctggggagctgaagtttgagccccacatctag

SEQ ID NO: 312462 - DNA, 210 bp, Artificial Sequence
  derived and/or modified sequence
atgcgctggaggaccatcctgctgcagtactgcttcctgctgatcacctgcctgctgacagccctggaggccgtgcccattgatattgacaagaccaaggtgcagaacatccaccctgtggagagcgccaagattgagcccccagacaccggcctgtactatgatgagtacctgaagcaggtgattgatgtgctggagacagacaagtag

SEQ ID NO: 312463 - DNA, 105 bp, Artificial Sequence
  derived and/or modified sequence
atgcgctggaggaccatcctgctgcagtactgcttcctgctgatcacctgcctgctgacagccctggaggccgtgcccattgatattgacaagaccaaggtgtag

SEQ ID NO: 312464 - DNA, 588 bp, Artificial Sequence
  derived and/or modified sequence
atgcgctggaggaccatcctgctgcagtactgcttcctgctgatcacctgcctgctgacagccctggaggccgtgcccattgatattgacaagaccaaggtgcagaacatccaccctgtggagagcgccaagattgagcccccagacaccggcctgtactatgatgagtacctgaagcaggtgattgatgtgctggagacagacaagcacttccgggagaagctgcagaaggctgacatcgaggagatcaagagcggccgcctgagcaaggagctggacctggtgagccaccacgtgaggaccaagctggatgagctgaagaggcaggaggtgggccgcctgaggatgctgatcaaggccaagctggacagcctgcaggacatcggcatggaccaccaggccctgctgaagcagtttgaccacctgaaccacctgaacccagacaagtttgagagcacagacctggacatgctgatcaaggccgccaccagtgacctggagcactatgacaagaccaggcatgaggagttcaagaagtatgagatgatgaaggagcacgagcggcgggagtacctgaagaccctgtag

SEQ ID NO: 312465 - DNA, 597 bp, Artificial Sequence
  derived and/or modified sequence
atgcgctggaggaccatcctgctgcagtactgcttcctgctgatcacctgcctgctgacagccctggaggccgtgcccattgatattgacaagaccaaggtgcagaacatccaccctgtggagagcgccaagattgagcccccagacaccggcctgtactatgatgagtacctgaagcaggtgattgatgtgctggagacagacaagcacttccgggagaagctgcagaaggctgacatcgaggagatcaagagcggccgcctgagcaaggagctggacctggtgagccaccacgtgaggaccaagctggatgagctgaagaggcaggaggtgggccgcctgaggatgctgatcaaggccaagctggacagcctgcaggacatcggcatggaccaccaggccctgctgaagcagtttgaccacctgaaccacctgaacccagacaagtttgagagcacagacctggacatgctgatcaaggccgccaccagtgacctggagcactatgacaagaccaggcatgaggagttcaagaagtatgagatgatgaaggagcacgagcggcgggagtacctgaagaccctgaatgaggagtag

SEQ ID NO: 312466 - DNA, 120 bp, Artificial Sequence
  derived and/or modified sequence
atgcgctggaggaccatcctgctgcagtactgcttcctgctgatcacctgcctgctgacagccctggaggccgtgcccattgatattgacaagaccaaggtgcagaacatccacccctag

SEQ ID NO: 312467 - DNA, 273 bp, Artificial Sequence
  derived and/or modified sequence
atgcgctggaggaccatcctgctgcagtactgcttcctgctgatcacctgcctgctgacagccctggaggccgtgcccattgatattgacaagaccaaggtgcagaacatccaccctgtggagagcgccaagattgagcccccagacaccggcctgtactatgatgagtacctgaagcaggtgattgatgtgctggagacagacaagcacttccgggagaagctgcagaaggctgacatcgaggagatcaagagcggccgcctgagcaagtag

SEQ ID NO: 312468 - DNA, 1173 bp, Artificial Sequence
  derived and/or modified sequence
atgcggtggcggaccatcctgctgcagtactgcttcctgctgatcacctgcctgctgactgccttggaggctgtaccaatcgacatcgataagacaaaggtgcagaatatccatccagtggaatctgccaaaatcgagccacctgacaccggcctctactacgatgagtacctgaagcaggtgatagacgtcttggagaccgataagcatttcagagaaaagttacagaaagcagacatagaagagattaaaagcggtcgcctgagtaaggagctggatctggtgagccatcacgtgcggacgaaactggatgagctaaagagacaggaggttgggagacttcgcatgttgatcaaagcaaagctggattcattacaagacatcgggatggaccaccaggccttattaaagcagtttgaccatctgaaccacctgaatcccgacaaattcgagtcaaccgatctagacatgcttataaaagcggcgactagtgacctcgagcattacgacaagactcggcacgaggagtttaagaaatatgagatgatgaaagagcatgagaggagggagtacctcaagactctaaatgaagagaagagaaaagaagaggagtccaagttcgaggagatgaagaagaaacatgagaaccaccctaaagtgaatcatccagggagcaaagaccagctgaaggaggtttgggaagagaccgacggccttgaccctaatgatttcgatccgaaaacattcttcaagctccacgacgtgaatagcgatggatttctggatgagcaggagctggaggctctgtttactaaagagctcgagaaggtgtatgatcctaagaacgaggaggatgacatggtggagatggaggaggagcgtttgagaatgagagaacacgtgatgagcgagacccttgaccagcagcagttctttacggaggaggaactcaaggagtacgaaaacatcatcgctctccaggagaacgaactgaaaaagaaagctgatgagctgcagaagcagaaagaggaactccagaggcagcacgaccaacttgaggcgcagaagcttgagtaccatcaggttatccaacaaatggagcagaaaaagctgcagcagggaattccgccttcgggccccgccggcgagctaaagttcgagccccatatttag

SEQ ID NO: 312469 - DNA, 210 bp, Artificial Sequence
  derived and/or modified sequence
atgcggtggcggaccatcctgctgcagtactgcttcctgctgatcacctgccttcttacagccttggaagctgtgcctattgatatcgataaaaccaaggttcagaacattcaccccgttgagagtgctaagatagagccaccagatacagggctgtactacgacgagtacctgaagcaggtgatcgatgtgctagagaccgacaaatag

SEQ ID NO: 312470 - DNA, 105 bp, Artificial Sequence
  derived and/or modified sequence
atgcggtggcggaccatcctgctgcagtactgcttcctgctgatcacctgtttacttacagctttggaagctgtgcccatagacatagataagaccaaagtgtag

SEQ ID NO: 312471 - DNA, 588 bp, Artificial Sequence
  derived and/or modified sequence
atgcggtggcggaccatcctgctgcagtactgcttcctgctgatcacctgcctgctgaccgccttagaagctgtgcccatagatatcgacaagactaaagtgcagaacattcaccccgtggagtctgctaaaatcgagcccccagatactggactctactacgacgagtacctgaaacaagtgatcgatgtgctggagacggataagcatttccgcgaaaaactgcagaaggctgacattgaggagattaaatccgggcggctctccaaggaactcgatctcgttagtcaccatgtccgcacaaagttggatgaactgaaaaggcaggaggtggggcgacttaggatgttaattaaagccaagctcgactcattgcaggacatcgggatggatcaccaggccctactgaagcaattcgatcacctgaatcatttgaaccccgacaaatttgagtctaccgatttggacatgctcattaaggccgcaactagcgacctggaacattatgacaaaacccgtcatgaggagtttaaaaagtacgaaatgatgaaagagcacgagcggcgcgagtatctgaaaacattgtag

SEQ ID NO: 312472 - DNA, 597 bp, Artificial Sequence
  derived and/or modified sequence
atgcggtggcggaccatcctgctgcagtactgcttcctgctgatcacatgtttactgactgctttggaagccgtacccattgacattgacaagacaaaggtacagaatatccatcctgtggaaagcgcgaagatcgaacctcctgatacagggctgtactacgatgaatatttaaagcaggtgatagacgttctggagaccgataagcatttccgggaaaaactgcaaaaagcggatatcgaggagataaaatctggccgcctgagcaaagagcttgaccttgtttcgcaccatgtcaggaccaagttggatgagctaaaaaggcaggaagtcggacggctcagaatgctgattaaggcgaagctcgatagcttgcaagacatcggcatggaccaccaggctcttttaaagcaatttgaccacctgaatcacctgaaccctgacaagttcgaaagtacagacctggacatgctcattaaggccgcgacaagtgacctggaacattacgacaaaaccaggcatgaagagttcaaaaagtatgagatgatgaaggaacacgagcgtcgcgagtacctcaagactctcaatgaagagtag

SEQ ID NO: 312473 - DNA, 105 bp, Artificial Sequence
  derived and/or modified sequence
atgcggtggcggaccatcctgctgcagtactgcttcctgctgatcacatgtctattgactgcccttgaggccgtccctattgacatcgataagaccaaggtgtag

SEQ ID NO: 312474 - DNA, 120 bp, Artificial Sequence
  derived and/or modified sequence
atgcggtggcggaccatcctgctgcagtactgcttcctgctgatcacttgtctcctgactgccctcgaagccgtgcctattgatattgacaagacaaaagtgcagaatatccacccctag

SEQ ID NO: 312475 - DNA, 210 bp, Artificial Sequence
  derived and/or modified sequence
atgcggtggcggaccatcctgctgcagtactgcttcctgctgatcacatgtctgctcacagctctcgaagctgtccccattgatatcgacaaaacgaaggtccagaatatccacccagtggagtccgccaaaattgagccgcccgatactggcctgtattacgacgaatatctcaagcaggtgatcgatgtgctggagacagacaaatag

SEQ ID NO: 312476 - DNA, 273 bp, Artificial Sequence
  derived and/or modified sequence
atgcggtggcggaccatcctgctgcagtactgcttcctgctgatcacctgcctgctcaccgcactggaggccgtgcctattgatattgacaaaaccaaggtgcagaacatccatcctgtggagtctgctaaaatagaaccgccagataccggcctgtactatgacgagtacttaaagcaggtcatagacgtgttggagaccgacaagcattttcgcgaaaaactgcagaaagcagatattgaagaaatcaagagcggtagactgagcaagtag

SEQ ID NO: 312477 - DNA, 1204 bp, Artificial Sequence
  derived and/or modified sequence
atgaggtggaggaccatcctgctacagtattgctttctcttgattacatgtttacttactgctcttgaagctgtgcctattgacatagacaagacaaaagtacaaaatattcaccctgtggaaagtgcgaagatagaaccaccagatactggactttattatgatgaatatctcaagcaagtgattgatgtgctggaaacagataaacacttcagagaaaagctccagaaagcagacatagaggaaataaagagtgggaggctaagcaaagaactggatttagtaagtcaccatgtgaggacaaaacttgatgaactgaaaaggcaagaagtaggaaggttaagaatgttaattaaagctaagttggattcccttcaagatataggcatggaccaccaagctcttctaaaacaatttgatcacctaaaccacctgaatcctgacaagtttgaatccacagatttagatatgctaatcaaagcggcaacaagtgatctggaacactatgacaagactcgtcatgaagaatttaaaaaatatgaaatgatgaaggaacatgaaaggagagaatatttaaaaacattgaatgaagaaaagagaaaagaagaagagtctaaatttgaagaaatgaagaaaaagcatgaaaatcaccctaaagttaatcacccaggaagcaaagatcaactaaaagaggtatgggaagagactgatggattggatcctaatgactttgaccccaagacatttttcaaattacatgatgtcaatagtgatggattcctggatgaacaagaattagaagccctatttactaaagagttggagaaagtatatgaccctaaaaatgaagaggatgatatggtagaaatggaagaagaaaggcttagaatgagggaacatgtaatgagtgagacattagatcagcaacagttcttcacagaggaagaactaaaagaatatgaaaatattattgctttacaagaaaatgaacttaagaagaaggcagatgagcttcagaaacaaaaagaagagctacaacgtcagcatgatcaactggaggctcagaagctggaatatcatcaggtcatacagcagatggaacaaaaaaaattacaacaaggaattcctccatcagggccagctggagaattgaagtttgagccacacatttaaagtctgaagtccaccagaacttggaagaaag

SEQ ID NO: 312478 - DNA, 496 bp, Artificial Sequence
  derived and/or modified sequence
agtttctcagctgagccaaaggaaatcaagaaatctcctggaatcaaggaaatcaaggaatcaattacttacaccaagctgagcaagagacaacatgaaggcagaggtagcagtaatcagacaggatttccaagaacgtgttacgagtcagtttttagtgaaaaaacattgagctaggagccaagacccatctcttcactattttggtattgtgcaagtcatcttacctctctggatctcagttgtctcatctgtaaaaaggagataaaaattatttacctgcctgaacatgaggtggaggaccatcctgctacagtattgctttctcttgattacatgtttacttactgctcttgaagctgtgcctattgacatagacaagacaaaagtacaaaatattcaccctgtggaaagtgcgaagatagaaccaccagatactggactttattatgatgaatatctcaagcaagtgattgatgtgctggaaacagataaa

SEQ ID NO: 312479 - DNA, 530 bp, Artificial Sequence
  derived and/or modified sequence
ctctcccgaggaatgctgagcaggctctggacgcctctccgtgcacaccccagacctggggaggggagctctccggacaccccagctggccgcccctcgggccctgagtccgaagacccgctaaacagggcccgggcactgaagtaccctattgttctcatcccctctcccgggaccccgcaccctcctccatctaggctgaggttcccagatttgtgtcttggcccctggcggcgccgagattactttgtgattggaagactgaaaggaacagaacgtgttacgagtcagtttttagtgaaaaaacattgagctaggagccaagacccatctcttcactattttggtattgtgcaagtcatcttacctctctggatctcagttgtctcatctgtaaaaaggagataaaaattatttacctgcctgaacatgaggtggaggaccatcctgctacagtattgctttctcttgattacatgtttacttactgctcttgaagctgtgcctattgacatagacaagacaaaagt

SEQ ID NO: 312480 - DNA, 937 bp, Artificial Sequence
  derived and/or modified sequence
tcccagcgcgagccggaggcgctgggttccctctgctccactcgcagctgggcacccgagctttcttcggggtcgaggagggtggctggctcttggcggggagcaggagaggaacgtgttacgagtcagtttttagtgaaaaaacattgagctaggagccaagacccatctcttcactattttggtattgtgcaagtcatcttacctctctggatctcagttgtctcatctgtaaaaaggagataaaaattatttacctgcctgaacgtccgtatctctcttatgaaagaagagggtgataaaggaaaggagaaggccattcttactgacctgatagtggaagaaaagtagatgaggtggaggaccatcctgctacagtattgctttctcttgattacatgtttacttactgctcttgaagctgtgcctattgacatagacaagacaaaagtacaaaatattcaccctgtggaaagtgcgaagatagaaccaccagatactggactttattatgatgaatatctcaagcaagtgattgatgtgctggaaacagataaacacttcagagaaaagctccagaaagcagacatagaggaaataaagagtgggaggctaagcaaagaactggatttagtaagtcaccatgtgaggacaaaacttgatgaactgaaaaggcaagaagtaggaaggttaagaatgttaattaaagctaagttggattcccttcaagatataggcatggaccaccaagctcttctaaaacaatttgatcacctaaaccacctgaatcctgacaagtttgaatccacagatttagatatgctaatcaaagcggcaacaagtgatctggaacactatgacaagactcgtcatgaagaatttaaaaaatatgaaatgatgaaggaacatgaaaggagagaatatttaaaaacattga

SEQ ID NO: 312481 - DNA, 1837 bp, Artificial Sequence
  derived and/or modified sequence
atattattgcaagcctttgcacatctctttgtatcatccccctatgacatcatgtgttaatctcatctcaggactgcaacccaagattgcagtgagtgggaagatacaatttttacagcatcaccaaaaaggataaggttatttggagatggggacttgctatgttgctcaggctggtttcgaactcttggcctcaagtgattttcctgccttggcctctcaaaacacaggaatgcaggtcaaacacattttgagtttctcagctgagccaaaggaaatcaagaaatctcctggaatcaaggaaatcaaggaatcaattacttacaccaagctgagcaagagacaacatgaaggcagaggtagcagtaatcagacaggatttccaagacagggtctcactctgtggcacaatgatcatggttcactgcagcctcggccttctgagctcaagtgatcctcccgcctctgcctccgcctcctgagtagctgggactacagatgtgcgacacagcacctggcaaatttttaagtattttcttcagactgaaacatcattgtgttaaagataaaaaagtaaaaaatattcttgtagagataggatctcactgttgtccagattggtctcaaatttttgagctcaagccatcctcctgccttggcctcccaaagtgctggcattacagggtgaaaaaaactaatcggcaggatgaaacttcgtaaacagcctgtggctccaaaagcttctggaaggctcaagctacccatgtgcatctttgagcctcagtttccccatctttaaaatgaggggtttggaatagatgtctgttctctggggcaggatgcagaggaaagagctgtctgcgaatgggcaagagagaagaacgtgttacgagtcagtttttagtgaaaaaacattgagctaggagccaagacccatctcttcactattttggtattgtgcaagtcatcttacctctctggatctcagttgtctcatctgtaaaaaggagataaaaattatttacctgcctgaacgtccgtatctctcttatgaaagaagagggtgataaaggaaaggagaaggccattcttactgacctgatagtggaagaaaaatttctccttaaaaatatcagtcttggccgggcacggtggctcaggcctgtaatcccagcactttgggaggctgaggcgggcagatcacctgaggtcaggagttcaagaccagcctggccaacatgatgaggtggaggaccatcctgctacagtattgctttctcttgattacatgtttacttactgctcttgaagctgtgcctattgacatagacaagacaaaagtacaaaatattcaccctgtggaaagtgcgaagatagaaccaccagatactggactttattatgatgaatatctcaagcaagtgattgatgtgctggaaacagataaacacttcagagaaaagctccagaaagcagacatagaggaaataaagagtgggaggctaagcaaagaactggatttagtaagtcaccatgtgaggacaaaacttgatgaactgaaaaggcaagaagtaggaaggttaagaatgttaattaaagctaagttggattcccttcaagatataggcatggaccaccaagctcttctaaaacaatttgatcacctaaaccacctgaatcctgacaagtttgaatccacagatttagatatgctaatcaaagcggcaacaagtgatctggaacactatgacaagactcgtcatgaagaatttaaaaaatatgaaatgatgaaggaacatgaaaggagagaatatttaaaaacattgaatgaagaaaa

SEQ ID NO: 312482 - DNA, 463 bp, Artificial Sequence
  derived and/or modified sequence
aaggccggtggccgcgcgaacgtgttacgagtcagtttttagtgaaaaaacattgagctaggagccaagacccatctcttcactattttggtattgtgcaagtcatcttacctctctggatctcagttgtctcatctgtaaaaaggagataaaaattatttacctgcctgaacctctgaaatctgtaagctgtgataaccactcatagaagcttctataatttgccatggcagagatataagtctgactattaactacagaaggaaataatcttcatgtccgtatctctcttatgaaagaagagggtgataaaggaaaggagaaggccattcttactgacctgatagtggaagaaaagtagatgaggtggaggaccatcctgctacagtattgctttctcttgattacatgtttacttactgctcttgaagctgtgcctattgacatagacaagacaaaagta

SEQ ID NO: 312483 - DNA, 514 bp, Artificial Sequence
  derived and/or modified sequence
ggggcagagcggagcggtgggccgggggctggaggacaggtttgtgcgctggacgcaagcaccaggcgcagcctcgctcgccgagacccggccaggtaaggccggtggccgcgcgaacgtgttacgagtcagtttttagtgaaaaaacattgagctaggagccaagacccatctcttcactattttggtattgtgcaagtcatcttacctctctggatctcagttgtctcatctgtaaaaaggagataaaaattatttacctgcctgaacatttctccttaaaaatatcagtcttggccgggcacggtggctcaggcctgtaatcccagcactttgggaggctgaggcgggcagatcacctgaggtcaggagttcaagaccagcctggccaacatgatgaggtggaggaccatcctgctacagtattgctttctcttgattacatgtttacttactgctcttgaagctgtgcctattgacatagacaagacaaaagtacaaaatattcaccctg

SEQ ID NO: 312484 - DNA, 536 bp, Artificial Sequence
  derived and/or modified sequence
agagcggagcggtgggccgggggctggaggacaggtttgtgcgctggacgcaagcaccaggcgcagcctcgctcgccgagacccggccagaacgtgttacgagtcagtttttagtgaaaaaacattgagctaggagccaagacccatctcttcactattttggtattgtgcaagtcatcttacctctctggatctcagttgtctcatctgtaaaaaggagataaaaattatttacctgcctgaacgtccgtatctctcttatgaaagaagagggtgataaaggaaaggagaaggccattcttactgacctgatagtggaagaaaagtagatgaggtggaggaccatcctgctacagtattgctttctcttgattacatgtttacttactgctcttgaagctgtgcctattgacatagacaagacaaaagtacaaaatattcaccctgtggaaagtgcgaagatagaaccaccagatactggactttattatgatgaatatctcaagcaagtgattgatgtgctggaaacagataaa

SEQ ID NO: 312485 - DNA, 498 bp, Artificial Sequence
  derived and/or modified sequence
actcgcagctgggcacccgagctttcttcggggtcgaggagggtggctggctcttggcggggagcaggagaggaacgtgttacgagtcagtttttagtgaaaaaacattgagctaggagccaagacccatctcttcactattttggtattgtgcaagtcatcttacctctctggatctcagttgtctcatctgtaaaaaggagataaaaattatttacctgcctgaacatgaggtggaggaccatcctgctacagtattgctttctcttgattacatgtttacttactgctcttgaagctgtgcctattgacatagacaagacaaaagtacaaaatattcaccctgtggaaagtgcgaagatagaaccaccagatactggactttattatgatgaatatctcaagcaagtgattgatgtgctggaaacagataaacacttcagagaaaagctccagaaagcagacatagaggaaataaagagtgggaggctaagcaaa

SEQ ID NO: 312486 - DNA, 1173 bp, Artificial Sequence
  derived and/or modified sequence
atgcgctggcggactatcctacttcagtactgttttctgctgatcacatgccttttgaccgcactggaggctgtccccatcgatattgataagactaaggtgcaaaacatacacccagtggaatctgctaaaattgaaccccctgacaccgggctttattatgacgagtatcttaaacaggtgatagacgtgctcgaaacagataaacattttcgcgagaagctgcagaaagcggacatcgaggaaatcaagtccggcagactctctaaggagttggacctggtgtctcaccatgtccgaaccaagctcgacgagcttaagaggcaggaggtcggtcgcttgcggatgttgattaaggctaaactggacagcctgcaagatatcggaatggaccaccaggcacttctaaaacagttcgaccatctgaatcacctgaatcctgataagttcgagtcgaccgacctggatatgctgattaaggcagccacgtctgacctggagcactatgacaagacgcggcacgaagaattcaagaagtacgagatgatgaaagagcacgagcgtagggagtatctgaagaccttgaacgaggagaaacgcaaggaggaggagtctaaatttgaagaaatgaagaagaagcatgagaatcacccgaaagtgaaccatcccggttcaaaggaccagcttaaagaggtttgggaggagacagacggacttgacccaaacgacttcgaccccaagacattctttaagctgcacgatgtgaatagcgatggcttcttggacgagcaagagctggaggcactctttaccaaggagttagaaaaggtgtacgatccaaaaaacgaggaagacgatatggtggaaatggaagaggaaagactaagaatgagggaacatgtgatgtccgagaccctggatcaacagcagtttttcaccgaggaagagctcaaagaatacgaaaatattatcgcccttcaggaaaacgagctaaaaaaaaaggccgatgagttgcagaaacagaaggaggagctccagcggcagcatgatcagcttgaggcacaaaaactggagtatcaccaggtgatccaacagatggaacagaaaaagctccagcaaggcatccccccaagcggaccagccggtgaactaaagttcgaaccacacatctag

SEQ ID NO: 312487 - DNA, 210 bp, Artificial Sequence
  derived and/or modified sequence
atgcgctggcgcaccattctgctgcagtactgcttcctcctgatcacctgtcttctgacggcactggaagccgttcccatcgatatcgacaagacaaaggtccagaacatccaccccgtagagagcgcaaagattgaaccacccgacacggggctttactacgacgaatacttgaaacaagtgatagatgtcctcgaaaccgacaaatag

SEQ ID NO: 312488 - DNA, 105 bp, Artificial Sequence
  derived and/or modified sequence
atgcgatggcggacaattctgctgcaatattgcttcttgctgattacctgcttgctgacagcactggaagcagtcccaattgacatcgataagaccaaagtatag

SEQ ID NO: 312489 - DNA, 588 bp, Artificial Sequence
  derived and/or modified sequence
atgcgatggcggacaatacttctacagtactgctttctgctaattacctgtctcctgaccgctttagaagcagtgcctatagacattgacaagactaaggttcagaacatccatccagtggagtcagcaaagattgagccacccgacaccggtttgtattatgatgagtatcttaaacaagtgattgatgtgctggaaaccgacaagcatttcagagaaaaactgcagaaggccgacatcgaagaaatcaagagcggacgcctctctaaagagcttgacctggtatctcatcatgtcaggaccaagctggatgagcttaaacggcaggaggttgggaggttacgaatgctaatcaaggcgaagctcgactcattgcaggatatcgggatggaccatcaagccctcttgaaacagttcgatcacctgaatcaccttaaccccgataagttcgaaagcactgatttggatatgctgattaaagcagccactagcgatcttgagcactatgataaaaccagacatgaggaattcaagaaatatgagatgatgaaggaacatgagaggcgcgaatacctgaaaaccttatag

SEQ ID NO: 312490 - DNA, 597 bp, Artificial Sequence
  derived and/or modified sequence
atgaggtggagaactattctgcttcagtactgttttttgttaattacttgtctactaactgctctggaggctgtgcctattgatatagacaaaactaaagtccaaaatatacatccagtggagtcagctaagattgagcctcccgacacaggcctctattatgatgagtaccttaagcaggttatagacgtcctggagactgataaacatttcagggagaagctgcagaaagcagatatagaggagatcaaaagcggaaggctgtcaaaggagcttgaccttgtttcccaccatgttaggaccaagctggacgagctgaagcgccaggaggtcgggagattaaggatgcttattaaggcaaaactcgacagtctgcaggacattggaatggaccatcaggccctgctgaaacagttcgaccatctgaaccatctgaatccagataaattcgagtccacagatctggatatgctgattaaggccgcaacaagcgatcttgaacactatgataagacacgccacgaagaattcaaaaaatatgaaatgatgaaagagcatgagaggagggaatacctcaaaaccttaaatgaggagtag

SEQ ID NO: 312491 - DNA, 105 bp, Artificial Sequence
  derived and/or modified sequence
atgagatggcggactattctgcttcagtactgctttctgctgatcacctgcctgctcacggcgctcgaagccgtgccaattgatatcgacaagactaaggtgtag

SEQ ID NO: 312492 - DNA, 120 bp, Artificial Sequence
  derived and/or modified sequence
atgcgctggcgtactattcttctgcagtactgttttctcttgatcacgtgtctccttaccgccctggaggccgtccccattgatattgataaaacaaaggtgcaaaatatccacccgtag

SEQ ID NO: 312493 - DNA, 210 bp, Artificial Sequence
  derived and/or modified sequence
atgaggtggcgaacaatacttctgcagtactgctttctgctcattacatgcttactgacggctttggaagctgtcccaattgatatagataaaaccaaggttcagaacattcatcccgtagagtccgccaagatcgagccacccgacacagggctatattatgacgagtatctcaaacaggtaatcgacgtgctggaaaccgacaagtag

SEQ ID NO: 312494 - DNA, 273 bp, Artificial Sequence
  derived and/or modified sequence
atgcgctggcggaccatcctgttgcagtactgcttcttgctaatcacttgtttactgacagcactggaggccgtgccaatcgacatcgataagacgaaagtgcaaaatattcatccggtggagtccgccaaaattgaaccgcctgacaccgggctgtactacgatgagtacttaaaacaggtcattgatgttctcgagactgataaacatttccgggagaagctccagaaggcagacatcgaggagattaagtctgggaggctctccaaatag

SEQ ID NO: 312495 - DNA, 1173 bp, Artificial Sequence
  derived and/or modified sequence
atgagatggagaaccatcctgctgcagtactgcttcctgctgatcacctgcctgctgaccgccctggaggccgtgcccatcgacatcgacaagaccaaggtgcagaacatccaccccgtggagagcgccaagatcgagccccccgacaccggcctgtactacgacgagtacctgaagcaggtgatcgacgtgctggagaccgacaagcacttcagagagaagctgcagaaggccgacatcgaggagatcaagagcggcagactgagcaaggagctggacctggtgagccaccacgtgagaaccaagctggacgagctgaagagacaggaggtgggcagactgagaatgctgatcaaggccaagctggacagcctgcaggacatcggcatggaccaccaggccctgctgaagcagttcgaccacctgaaccacctgaaccccgacaagttcgagagcaccgacctggacatgctgatcaaggccgccaccagcgacctggagcactacgacaagaccagacacgaggagttcaagaagtacgagatgatgaaggagcacgagagaagagagtacctgaagaccctgaacgaggagaagagaaaggaggaggagagcaagttcgaggagatgaagaagaagcacgagaaccaccccaaggtgaaccaccccggcagcaaggaccagctgaaggaggtgtgggaggagaccgacggcctggaccccaacgacttcgaccccaagaccttcttcaagctgcacgacgtgaacagcgacggcttcctggacgagcaggagctggaggccctgttcaccaaggagctggagaaggtgtacgaccccaagaacgaggaggacgacatggtggagatggaggaggagagactgagaatgagagagcacgtgatgagcgagaccctggaccagcagcagttcttcaccgaggaggagctgaaggagtacgagaacatcatcgccctgcaggagaacgagctgaagaagaaggccgacgagctgcagaagcagaaggaggagctgcagagacagcacgaccagctggaggcccagaagctggagtaccaccaggtgatccagcagatggagcagaagaagctgcagcagggcatcccccccagcggccccgccggcgagctgaagttcgagccccacatctag

SEQ ID NO: 312496 - DNA, 210 bp, Artificial Sequence
  derived and/or modified sequence
atgagatggagaaccatcctgctgcagtactgcttcctgctgatcacctgcctgctgaccgccctggaggccgtgcccatcgacatcgacaagaccaaggtgcagaacatccaccccgtggagagcgccaagatcgagccccccgacaccggcctgtactacgacgagtacctgaagcaggtgatcgacgtgctggagaccgacaagtag

SEQ ID NO: 312497 - DNA, 105 bp, Artificial Sequence
  derived and/or modified sequence
atgagatggagaaccatcctgctgcagtactgcttcctgctgatcacctgcctgctgaccgccctggaggccgtgcccatcgacatcgacaagaccaaggtgtag

SEQ ID NO: 312498 - DNA, 588 bp, Artificial Sequence
  derived and/or modified sequence
atgagatggagaaccatcctgctgcagtactgcttcctgctgatcacctgcctgctgaccgccctggaggccgtgcccatcgacatcgacaagaccaaggtgcagaacatccaccccgtggagagcgccaagatcgagccccccgacaccggcctgtactacgacgagtacctgaagcaggtgatcgacgtgctggagaccgacaagcacttcagagagaagctgcagaaggccgacatcgaggagatcaagagcggcagactgagcaaggagctggacctggtgagccaccacgtgagaaccaagctggacgagctgaagagacaggaggtgggcagactgagaatgctgatcaaggccaagctggacagcctgcaggacatcggcatggaccaccaggccctgctgaagcagttcgaccacctgaaccacctgaaccccgacaagttcgagagcaccgacctggacatgctgatcaaggccgccaccagcgacctggagcactacgacaagaccagacacgaggagttcaagaagtacgagatgatgaaggagcacgagagaagagagtacctgaagaccctgtag

SEQ ID NO: 312499 - DNA, 597 bp, Artificial Sequence
  derived and/or modified sequence
atgagatggagaaccatcctgctgcagtactgcttcctgctgatcacctgcctgctgaccgccctggaggccgtgcccatcgacatcgacaagaccaaggtgcagaacatccaccccgtggagagcgccaagatcgagccccccgacaccggcctgtactacgacgagtacctgaagcaggtgatcgacgtgctggagaccgacaagcacttcagagagaagctgcagaaggccgacatcgaggagatcaagagcggcagactgagcaaggagctggacctggtgagccaccacgtgagaaccaagctggacgagctgaagagacaggaggtgggcagactgagaatgctgatcaaggccaagctggacagcctgcaggacatcggcatggaccaccaggccctgctgaagcagttcgaccacctgaaccacctgaaccccgacaagttcgagagcaccgacctggacatgctgatcaaggccgccaccagcgacctggagcactacgacaagaccagacacgaggagttcaagaagtacgagatgatgaaggagcacgagagaagagagtacctgaagaccctgaacgaggagtag

SEQ ID NO: 312500 - DNA, 120 bp, Artificial Sequence
  derived and/or modified sequence
atgagatggagaaccatcctgctgcagtactgcttcctgctgatcacctgcctgctgaccgccctggaggccgtgcccatcgacatcgacaagaccaaggtgcagaacatccacccctag

SEQ ID NO: 312501 - DNA, 273 bp, Artificial Sequence
  derived and/or modified sequence
atgagatggagaaccatcctgctgcagtactgcttcctgctgatcacctgcctgctgaccgccctggaggccgtgcccatcgacatcgacaagaccaaggtgcagaacatccaccccgtggagagcgccaagatcgagccccccgacaccggcctgtactacgacgagtacctgaagcaggtgatcgacgtgctggagaccgacaagcacttcagagagaagctgcagaaggccgacatcgaggagatcaagagcggcagactgagcaagtag

SEQ ID NO: 312502 - protein, 937 aa, Artificial Sequence
  derived and/or modified sequence
MFNKSFGTPFGGGTGGFGTTSTFGQNTGFGTTSGGAFGTSAFGSSNNTGGLFGNSQTKPGGLFGTSSFSQPATSTSTGFGFGTSTGTANTLFGTASTGTSLFSSQNNAFAQNKPTGFGNFGTSTSSGGLFGTTNTTSNPFGSTSGSLFGPSSFTAAPTGTTIKFNPPTGTDTMVKAGVSTNISTKHQCITAMKEYESKSLEELRLEDYQANRKGPQNQVGAGTTTGLFGSSPATSSATGLFSSSTTNSGFAYGQNKTAFGTSTTGFGTNPGGLFGQQNQQTTSLFSKPFGQATTTQNTGFSFGNTSTIGQPSTNTMGLFGVTQASQPGGLFGTATNTSTGTAFGTGTGLFGQTNTGFGAVGSTLFGNNKLTTFGSSTTSAPSFGTTSGGLFGNKPTLTLGTNTNTSNFGFGTNTSGNSIFGSKPAPGTLGTGLGAGFGTALGAGQASLFGNNQPKIGGPLGTGAFGAPGFNTTTATLGFGAPQAPVALTDPNASAAQQAVLQQHINSLTYSPFGDSPLFRNPMSDPKKKEERLKPTNPAAQKALTTPTHYKLTPRPATRVRPKALQTTGTAKSHLFDGLDDDEPSLANGAFMPKKSIKKLVLKNLNNSNLFSPVNRDSENLASPSEYPENGERFSFLSKPVDENHQQDGDEDSLVSHFYTNPIAKPIPQTPESAGNKHSNSNSVDDTIVALNMRAALRNGLEGSSEETSFHDESLQDDREEIENNSYHMHPAGIILTKVGYYTIPSMDDLAKITNEKGECIVSDFTIGRKGYGSIYFEGDVNLTNLNLDDIVHIRRKEVVVYLDDNQKPPVGEGLNRKAEVTLDGVWPTDKTSRCLIKSPDRLADINYEGRLEAVSRKQGAQFKEYRPETGSWVFKVSHFSKYGLQDSDEEEEEHPSKTSTKKLKTAPLPPASQTTPLQMALNGKPAPPPQVEKKGQ

SEQ ID NO: 312503 - DNA, 1628 bp, Artificial Sequence
  derived and/or modified sequence
ggcgattgcaaagcgcgagggctggaactcagacccagaggggcggtccctgttgcaagtcatctcccgaaagggcggggccggggctcatcccggaaggaccggtgtctaggtcaccctggagcgctcaccccaccggcacccgtgcccaagcccgcccctgcaaaggcaggcaaggccaggcgggtgctgcctgggacccagtgactcagcacccctgcccggatcaactggacttttgccccctgctccgccagcctcctgcttggatctctcctgggtctccctgctgcgcctgtccaggatgcagggagctcgggctcccagggaccagggccggtcccccggcaggatgagcgctctaggccggtcctcggtcatcttgcttacctacgtgctggccgccacagaacttacctgcctcttcatgcagttctccatcgtgccatacctgtctcggaaactgggcctggattccattgccttcggctacctgcaaaccaccttcggggtgctgcagctgctgggcgggccggtatttggcaggttcgcagaccagcgcggggcgcgggcggcgctcacgctctccttcctggctgccttggcgctctacctgctcctggcggccgcctccagcccggccctgcccggggtctacctgctcttcgcctcgcgcctgcccggagcgctcatgcacacgctgccagccgcccagatggtcatcacggacctgtcggcacccgaggagcggcccgcggccctgggccggctgggcctctgcttcggcgtcggagtcatcctcggctccctgctgggcgggaccctggtctccgcgtacgggattcagtgcccggccatcctggctgccctggccaccctcctgggagctgtcctcagcttcacctgcatccccgccagcaccaaaggggccaaaactgacgcccaggctccactgccaggcggcccccgggccagtgtgttcgacctgaaggccatcgcctccctgctgcggctgccagacgtcccgaggatcttcctggtgaaggtggcctccaactgccccacagggctcttcatggtcatgttctccatcatctccatggacttcttccagctggaggccgcccaagctggctacctcatgtccttcttcgggctcctccagatggtgacccagggcctggtcatcgggcagctgagcagccacttctcggaggaggtgctgctccgggccagcgtgctggtcttcatcgtggtgggcctggccatggcctggatgtccagcgtcttccacttctgcctcctggtgcccggcctggtgttcagcctctgcaccctcaacgtggtcaccgacagcatgctgatcaaggctgtctccacctcggacacagggaccatgctgggcctctgcgcctctgtacaaccactgctccgaactctgggacccacggtcggcggcctcctgtaccgcagctttggcgtccccgtcttcggccacgtgcaggttgctatcaatacccttgtcctcctggtcctctggaggaaacctatgccccagaggaaggacaaagtccggtgaccgctgcccagacacagactggcaataaactcctactaaatccctccga

SEQ ID NO: 312504 - DNA, 1542 bp, Artificial Sequence
  derived and/or modified sequence
gacaaaaaaaaaggtctctccgatttcctctgctcaaccagttccctggctacctgaggccctgcttcacctggaggaagacagtggcaaggccaggcgggtgctgcctgggacccagtgactcagcacccctgcccggatcaactggacttttgccccctgctccgccagcctcctgcttggatctctcctgggtctccctgctgcgcctgtccaggatgcagggagctcgggctcccagggaccagggccggtcccccggcaggatgagcgctctaggccggtcctcggtcatcttgcttacctacgtgctggccgccacagaacttacctgcctcttcatgcagttctccatcgtgccatacctgtctcggaaactgggcctggattccattgccttcggctacctgcaaaccaccttcggggtgctgcagctgctgggcgggccggtatttggcaggttcgcagaccagcgcggggcgcgggcggcgctcacgctctccttcctggctgccttggcgctctacctgctcctggcggccgcctccagcccggccctgcccggggtctacctgctcttcgcctcgcgcctgcccggagcgctcatgcacacgctgccagccgcccagatggtcatcacggacctgtcggcacccgaggagcggcccgcggccctgggccggctgggcctctgcttcggcgtcggagtcatcctcggctccctgctgggcgggaccctggtctccgcgtacgggattcagtgcccggccatcctggctgccctggccaccctcctgggagctgtcctcagcttcacctgcatccccgccagcaccaaaggggccaaaactgacgcccaggctccactgccaggcggcccccgggccagtgtgttcgacctgaaggccatcgcctccctgctgcggctgccagacgtcccgaggatcttcctggtgaaggtggcctccaactgccccacagggctcttcatggtcatgttctccatcatctccatggacttcttccagctggaggccgcccaagctggctacctcatgtccttcttcgggctcctccagatggtgacccagggcctggtcatcgggcagctgagcagccacttctcggaggaggtgctgctccgggccagcgtgctggtcttcatcgtggtgggcctggccatggcctggatgtccagcgtcttccacttctgcctcctggtgcccggcctggtgttcagcctctgcaccctcaacgtggtcaccgacagcatgctgatcaaggctgtctccacctcggacacagggaccatgctgggcctctgcgcctctgtacaaccactgctccgaactctgggacccacggtcggcggcctcctgtaccgcagctttggcgtccccgtcttcggccacgtgcaggttgctatcaatacccttgtcctcctggtcctctggaggaaacctatgccccagaggaaggacaaagtccggtgaccgctgcccagacacagactggcaataaactcctactaaatccctccga

SEQ ID NO: 312505 - DNA, 635 bp, Artificial Sequence
  derived and/or modified sequence
aaaagtggaggagggggaccccctgatgtgtcctctaaggtccaggtagcaggagagctccactggggagggggtcctgcagtgctgtcctctcttgcaggcaaggccaggcgggtgctgcctgggacccagtgactcagcacccctgcccggatcaactggacttttgccccctgctccgccagcctcctgcttggatctctcctgggtctccctgctgcgcctgtccaggatgcagggagctcgggctcccagggaccagggccggtcccccggcaggatgagcgctctaggccggtcctcggtcatcttgcttacctacgtgctggccgccacagaacttacctgcctcttcatgcagttctccatcgtgccatacctgtctcggaaactgggcctggattccattgccttcggctacctgcaaaccaccttcggggtgctgcagctgctgggcgggccggtatttggcaggttcgcagaccagcgcggggcgcgggcggcgctcacgctctccttcctggctgccttggcgctctacctgctcctggcggccgcctccagcccggccctgcccggggtctacctgctcttcgcctcgcgcctgcccggagcgctcatgcacacgctgccag

SEQ ID NO: 312506 - DNA, 405 bp, Artificial Sequence
  derived and/or modified sequence
atgcagggcgccagagcccccagagaccagggcagaagccccggcagaatgagcgccctgggcagaagcagcgtgatcctgctgacctacgtgctggccgccaccgagctgacctgcctgttcatgcagttcagcatcgtgccctacctgagcagaaagctgggcctggacagcatcgccttcggctacctgcagaccaccttcggcgtgctgcagctgctgggcggccccgtgttcggcagattcgccgaccagagaggcgccagagccgccctgaccctgagcttcctggccgccctggccctgtacctgctgctggccgccgccagcagccccgccctgcccggcgtgtacctgctgttcgccagcagactgcccggcgccctgatgcacaccctgccctag

SEQ ID NO: 312507 - DNA, 405 bp, Artificial Sequence
  derived and/or modified sequence
atgcaaggtgcccgcgccccaagggaccagggtcgaagccctgggcgcatgagcgctctgggtcgatcatcagtaattctacttacttacgttctcgctgccaccgagctcacatgcctgtttatgcaatttagcatcgtaccttatctgagtcgtaaactaggtctggatagcattgccttcggatatcttcagaccacttttggcgtcctgcagctattgggcggccccgtgttcggtcggttcgcagaccagagaggagctcgggcagccctcaccctgtcattcttggcggccctggcgctgtacttacttttggcagctgcgagctctcccgctttaccaggggtgtatcttctatttgcgtcacggctccctggcgcacttatgcatacactcccctag

SEQ ID NO: 312508 - DNA, 405 bp, Artificial Sequence
  derived and/or modified sequence
atgcagggcgcccgggccccccgggaccagggccgcagccctggccgcatgtctgccctgggccgcagcagcgtcatcctgctgacctacgtgctggccgccacagagctgacctgcctcttcatgcagttcagcatcgtgccctacctgagcaggaagctgggcctggacagcatcgccttcggctacctgcagaccaccttcggcgtgctgcagctgctgggcggccctgtgtttggccgctttgctgaccagagaggagcccgggccgccctgaccctgtccttcctggccgccctggccctgtacctgctgctggccgccgccagcagccctgccctgcccggggtgtacctgctgtttgccagccggctgcccggggccctgatgcacaccctgccctag

SEQ ID NO: 312509 - DNA, 405 bp, Artificial Sequence
  derived and/or modified sequence
atgcagggcgcccgggccccccgggaccagggccggagccccggcaggatgagtgctctggggaggtcaagcgtaatcctgctgacatacgtgctagccgcaacagagctgacttgcctgtttatgcagttttctatcgtcccttatcttagtcgtaaactggggctggacagcattgcgtttggctacctgcagacaactttcggagtcctacagctcctaggggggcctgtctttggtcgatttgccgaccagcgcggtgccagggctgctctgaccctttcctttcttgccgcccttgccctttaccttttgttggcagccgcaagctccccggccttacctggagtgtatctgctgttcgcaagtagattacctggcgctcttatgcacacactcccttag

SEQ ID NO: 312510 - DNA, 405 bp, Artificial Sequence
  derived and/or modified sequence
atgcagggggctcgggcaccgcgagaccaggggaggagccctggcagaatgtccgcattaggtcgttcatcagttatcttgctgacctacgtactcgctgcaacagaattaacatgtctcttcatgcagttttcaatcgtcccttacctgtcccggaagttaggtttggatagcatcgcttttgggtatctccagacaacattcggcgttttgcagctgctcggtggtcccgtctttgggagattcgcggaccagcgaggagcaagagctgccttgactctcagcttccttgcagcacttgcactctatctcctgttggcagctgctagttcaccagctctgcccggtgtgtacttattatttgccagcaggctgccaggtgcactcatgcatacgcttccctag

SEQ ID NO: 312511 - protein, 66 aa, Artificial Sequence
  derived and/or modified sequence
MQNSHSGVNQLGGVFVNGRPLPDSTRQKIVELAHSGARPCDISRILQTHADAKVQVLDNQNVSNGC

SEQ ID NO: 312512 - protein, 124 aa, Artificial Sequence
  derived and/or modified sequence
MQNSHSGVNQLGGVFVNGRPLPDSTRQKIVELAHSGARPCDISRILQTHADAKVQVLDNQNVSNGCVSSINRVLRNLASEKQQMGADGMYDKLRMLNGQTGSWGTRPGWYPGTSVPGQPTQDGC

SEQ ID NO: 312513 - DNA, 201 bp, Artificial Sequence
  derived and/or modified sequence
atgcagaacagccattccggggtcaatcaactcggaggcgtgtttgtaaatggacggccactccccgacagcacacgccagaagatagtggagctggcccactccggcgctaggccttgcgatatttctcggatcctgcagactcacgccgatgccaaagtccaggtactggacaatcagaacgtatccaatggatgctag

SEQ ID NO: 312514 - DNA, 375 bp, Artificial Sequence
  derived and/or modified sequence
atgcaaaattcgcacagcggagtcaaccagctgggaggcgtgtttgtcaatgggcggcctttgccagacagcacccgtcagaaaatcgtagaactcgcccactccggagctcgtccatgcgatatttcccggattctccaaacccacgccgatgctaaagtccaggtactcgacaaccagaatgtatcaaacggctgcgtttccagcatcaacagagtcttgcgaaaccttgcctccgagaaacagcaaatgggagccgatgggatgtacgataagctgcgaatgctgaacggacagaccgggtcctggggcacgcggcccggctggtaccccggaacttccgtccctggtcagccgacccaggacggctgttag

SEQ ID NO: 312515 - DNA, 651 bp, Artificial Sequence
  derived and/or modified sequence
attgacatttaaactctggggcaggtcctcgcgtagaacgcggctgtcagatctgccacttcccctgccgagcggcggtgagaagtgtgggaaccggcgctgccaggctcacctgcctccccgccctccgctcccaggaatctgagaattgctctcacacaccaacccagcaacatccgtggagaaaactctcaccagcaactcctttaaaacaccgtcatttcaaaccattgtggtcttcaagcaacaacagcagcacaaaaaaccccaaccaaacaaaactcttgacagaagctgtgacaaccagaaaggatgcctcataaagggggaagactttaactaggggcgcgcagatgtgtgaggccttttattgtgagagtggacagacatccgagatttcagagccccatattcgagccccgtggaatcccgcggcccccagccagagccagcatgcagaacagtcacagcggagtgaatcagctcggtggtgtctttgtcaacgggcggccactgccggactccacccggcagaagattgtagagctagctcacagcggggcccggccgtgcgacatttcccgaattctgcagacccatgcagatgcaaaagtccaagtgctggacaatcaaaacgtgtccaacggatgt

SEQ ID NO: 312516 - DNA, 497 bp, Artificial Sequence
  derived and/or modified sequence
aagactttaactaggggcgcgcagatgtgtgaggccttttattgtgagagtggacagacatccgagatttcagagccccatattcgagccccgtggaatcccgcggcccccagccagagccagcatgcagaacagtcacagcggagtgaatcagctcggtggtgtctttgtcaacgggcggccactgccggactccacccggcagaagattgtagagctagctcacagcggggcccggccgtgcgacatttcccgaattctgcagacccatgcagatgcaaaagtccaagtgctggacaatcaaaacgtgtccaacggatgtgtgtcatcaataaacagagttcttcgcaacctggctagcgaaaagcaacagatgggcgcagacggcatgtatgataaactaaggatgttgaacgggcagaccggaagctggggcacccgccctggttggtatccggggacttcggtgccagggcaacctacgcaagatggctgcc

SEQ ID NO: 312517 - DNA, 201 bp, Artificial Sequence
  derived and/or modified sequence
atgcagaacagccacagcggcgtgaaccagctgggcggcgtgtttgtgaatggccggcccctgcctgacagcacccggcagaagatcgtggagctggcccacagcggggcccggccctgtgacatcagccgcatcctgcagacccatgctgatgccaaggtgcaggtgctggacaaccagaatgtgtccaatggctgctag

SEQ ID NO: 312518 - DNA, 375 bp, Artificial Sequence
  derived and/or modified sequence
atgcagaacagccacagcggcgtgaaccagctgggcggcgtgtttgtgaatggccggcccctgcctgacagcacccggcagaagatcgtggagctggcccacagcggggcccggccctgtgacatcagccgcatcctgcagacccatgctgatgccaaggtgcaggtgctggacaaccagaatgtgtccaatggctgtgtgagcagcatcaacagagtgctgaggaacctggccagcgagaagcagcagatgggcgcagatggcatgtatgacaagctgaggatgctgaatggccagacaggctcctggggcaccaggcctggctggtacccaggcacctctgtgcccggccagcccacccaggacggctgctag

SEQ ID NO: 312519 - DNA, 201 bp, Artificial Sequence
  derived and/or modified sequence
atgcagaacagccacagcggcgtgaaccagctgggcggcgtgttcgttaacggaaggccactccctgatagtacgcgccaaaaaatcgtggaactggcacactcaggcgctagaccctgcgatatttcccgcatcctccagacacatgcggacgcaaaggtccaggtgctcgacaatcaaaatgtgtccaacggctgctag

SEQ ID NO: 312520 - DNA, 375 bp, Artificial Sequence
  derived and/or modified sequence
atgcagaacagccacagcggcgtgaaccagctgggcggcgtgttcgttaacggcaggcctctgccagacagcaccagacagaagatcgtggagcttgcacactcaggggctagaccctgtgacatttcccggattctgcaaacccatgccgatgccaaggtgcaggtcttggacaatcagaacgtatctaacggatgcgtgtcctccattaacagggttcttcgaaatctggcgagtgagaaacaacagatgggcgccgacggcatgtatgacaaactgaggatgctcaacggccagaccgggagttggggcactaggcccggctggtatcccggcacctcagtcccggggcagccaacacaggacggctgctag

SEQ ID NO: 312521 - DNA, 201 bp, Artificial Sequence
  derived and/or modified sequence
atgcagaatagtcattctggcgtgaatcaattagggggtgtgttcgtaaatggacgccctctccccgatagtacacgccaaaaaatagttgaactggcccattccggcgcacgtccttgtgacatcagtaggatcttacagacccacgccgatgccaaggtgcaggttttagacaatcagaacgtaagcaatggctgttag

SEQ ID NO: 312522 - DNA, 375 bp, Artificial Sequence
  derived and/or modified sequence
atgcagaactctcattctggtgtcaaccagctgggtggggtgtttgtaaacgggagacctcttcccgatagcactcggcaaaaaatagttgagcttgcgcactccggcgcacgcccatgtgatatatcaagaattctgcagactcacgcagatgcaaaggttcaggtgttggacaatcaaaacgtcagtaatgggtgcgtgtcttcaattaacagggtgttgcgcaacctggcttccgaaaaacagcagatgggggctgacggtatgtatgataagctgagaatgcttaacgggcagactggctcatggggtaccagaccaggttggtacccaggcacttctgtcccagggcagccaacccaggatgggtgctag

SEQ ID NO: 312523 - DNA, 201 bp, Artificial Sequence
  derived and/or modified sequence
atgcagaacagccacagcggcgtgaaccagctgggcggcgtgttcgtgaacggcagacccctgcccgacagcaccagacagaagatcgtggagctggcccacagcggcgccagaccctgcgacatcagcagaatcctgcagacccacgccgacgccaaggtgcaggtgctggacaaccagaacgtgagcaacggctgctag

SEQ ID NO: 312524 - DNA, 375 bp, Artificial Sequence
  derived and/or modified sequence
atgcagaacagccacagcggcgtgaaccagctgggcggcgtgttcgtgaacggcagacccctgcccgacagcaccagacagaagatcgtggagctggcccacagcggcgccagaccctgcgacatcagcagaatcctgcagacccacgccgacgccaaggtgcaggtgctggacaaccagaacgtgagcaacggctgcgtgagcagcatcaacagagtgctgagaaacctggccagcgagaagcagcagatgggcgccgacggcatgtacgacaagctgagaatgctgaacggccagaccggcagctggggcaccagacccggctggtaccccggcaccagcgtgcccggccagcccacccaggacggctgctag

SEQ ID NO: 312525 - protein, 259 aa, Artificial Sequence
  derived and/or modified sequence
MRRAVAYMAIKIEVQGHQSFAIPSGTFWLWRSLLSQDKEHPRYLIPELCKQFYHLGWVTGTGGGISLKHGDEIYIAPSGVQKERIQPEDMFVCDINEKDISGPSPSKKLKKSQCTPLFMNAYTMRGAGAVIHTHSKAAVMATLLFPGREFKITHQEMIKGIKKCTSGGYYRYDDMLVVPIIENTPEEKDLKDRMAHAMNEYPDSCAVLVRRHGVYVWGETWEKAKTMCECYDYLFDIAVSMKKVGLDPSQLPVGENGIV

SEQ ID NO: 312526 - DNA, 780 bp, Artificial Sequence
  derived and/or modified sequence
atgcgacgggctgtcgcctatatggccattaagatagaagtgcagggccatcagtcctttgcaatcccttctggcacgttctggctctggaggtcacttctcagtcaggacaaggaacatcccagatacttgattcctgagctgtgtaagcagttctatcatctagggtgggtgacagggactggaggcggaattagtctgaagcacggagatgagatctacatcgcaccatccggagtgcaaaaagaacggatccagcccgaagacatgtttgtgtgtgatatcaacgaaaaagatattagcgggccatcaccctccaaaaagctaaaaaaatcacagtgtactcctctgttcatgaacgcctacaccatgaggggggccggagccgtgatccacacgcacagcaaagcagcagtcatggctaccctcctgttccccggacgagagtttaaaattacgcatcaggagatgattaaggggataaaaaaatgtacaagcggaggctattacaggtatgacgatatgctcgtggtcccaataatcgagaacactcccgaggaaaaggatctgaaggatagaatggcgcacgccatgaacgagtacccggactcttgcgctgtcctggtcagaaggcatggtgtgtatgtctggggcgagacctgggaaaaagctaaaactatgtgtgaatgttatgattacctcttcgatatagccgtttcaatgaaaaaggtaggcctggacccctcccagctgcccgtgggagaaaatggcatcgtctag

SEQ ID NO: 312527 - DNA, 780 bp, Artificial Sequence
  derived and/or modified sequence
atgagaagagctgtggcctacatggccatcaagattgaggtgcagggccaccagagctttgccatccccagcggcaccttctggctgtggaggagcctgctgagccaggacaaggagcacccccgctacctgatccctgagctgtgcaagcagttctaccacctgggctgggtgactggaactggaggcggcatcagcctgaagcatggagatgagatctacatcgcccccagcggcgtgcagaaggagcgcatccagcctgaggacatgtttgtgtgtgacatcaatgagaaggacatcagcggccccagccccagcaagaagctgaagaagagccagtgcacccccctcttcatgaatgcctacaccatgagaggagctggagctgtgatccacacccacagcaaggctgctgtgatggccaccctgctcttccctggccgggagttcaagatcacccaccaggagatgatcaagggcatcaagaagtgcaccagcggcggctactaccgctatgatgacatgctggtggtgcccatcatcgagaacaccccagaggagaaggacctgaaggacaggatggcccacgccatgaatgagtacccagacagctgtgctgtgctggtgagaagacatggagtgtatgtgtggggcgagacctgggagaaggccaagaccatgtgtgaatgttatgactacctgtttgatattgctgtgtccatgaagaaggtgggcctggaccccagccagctgcctgtgggagaaaatggcatcgtgtag

SEQ ID NO: 312528 - DNA, 780 bp, Artificial Sequence
  derived and/or modified sequence
atgcggcgggccgtggcctacatggccatcaagatcgaggtgcaggggcatcaaagcttcgctataccctcaggaactttctggctgtggcggagcctcctaagccaggacaaggagcatcccaggtatctgatcccggagctgtgcaaacagttttatcacttaggctgggtaaccgggaccggaggaggcatcagcctcaagcacggcgacgagatttatattgccccttccggtgtgcaaaaagaacgtatacagcctgaagatatgttcgtttgtgatataaacgaaaaagatatttccggacccagcccttccaagaagctgaaaaaatctcagtgtacaccactctttatgaacgcatataccatgagaggcgccggggccgtcattcacacacatagcaaggccgccgtcatggccactctgctgtttcccggccgagaattcaagattacgcaccaggaaatgatcaaggggatcaaaaaatgcacgtccggcggctactaccgatacgacgacatgctcgtagtgcctattatcgaaaacacccccgaggagaaagatctgaaggacagaatggctcacgcgatgaacgagtatcccgactcctgtgcagtgctggtacggaggcacggagtgtatgtatggggagaaacttgggagaaagccaagactatgtgtgaatgttatgactatctgttcgacatagcagtcagtatgaagaaagtgggtctggacccctcacagttacctgtgggggaaaacgggattgtctag

SEQ ID NO: 312529 - DNA, 780 bp, Artificial Sequence
  derived and/or modified sequence
atgcggagggcagtcgcttacatggccatcaaaattgaagtgcagggtcaccagtccttcgctattccatctggaactttttggttgtggcgcagcctgctgtcccaggacaaggaacacccgagatatttgattcccgagttgtgtaaacagttttatcacttgggatgggtgacaggtaccggtgggggaattagcttgaagcatggcgatgaaatttatattgctccatcaggcgttcaaaaggaaaggattcagcctgaggacatgtttgtgtgcgacataaacgagaaggacatctccggccctagcccgtccaaaaaactcaagaagtcccagtgcaccccgctcttcatgaatgcttacactatgaggggtgctggagctgtaatacacacccatagcaaggccgcagttatggccaccttgctgtttcccggtagagagtttaaaatcactcaccaggaaatgattaaggggatcaagaagtgtaccagcgggggatattacaggtatgatgacatgctggtcgtccccattatcgagaacacacccgaggagaaggacttgaaagatcgaatggcacatgctatgaacgagtatcccgacagttgtgccgtcctggtgaggcgacatggcgtgtacgtgtggggagagacctgggagaaagctaagaccatgtgtgaatgctacgactatttgtttgacatcgccgtgtccatgaagaaggtcgggctggatccctctcagctgcctgtgggagaaaacggcattgtttag

SEQ ID NO: 312530 - DNA, 1012 bp, Artificial Sequence
  derived and/or modified sequence
gcgcgcaaagccgtgcggagattggaggccgcgcgggtccctggtctgggccatgtctggctgtgatgctcgggagggagactgttgttcccggagatgcggcgcgcagtggcttacatggctatcaaaattgaagttcaaggtcaccagagttttgcaataccttcaggaacattctggctttggcgctcacttctctcccaggacaaggagcatccaagatacctgatcccagaactttgcaaacagttttaccatttaggctgggtcactgggactggaggaggaattagcttgaagcatggcgatgaaatctacattgctccttcaggagtgcaaaaggaacgaattcagcctgaagacatgtttgtttgtgatataaatgaaaaggacataagtggaccttcgccatcgaagaagctaaaaaaaagccagtgtactcctcttttcatgaatgcttacacaatgagaggagcaggtgcagtgattcatacccactctaaagctgctgtgatggccacacttctctttccaggacgggagtttaaaattacacatcaagagatgataaaaggaataaagaaatgtacttccggagggtattatagatatgatgatatgttagtggtacccattattgagaatacacctgaggagaaagacctcaaagatagaatggctcatgcaatgaatgaatacccagactcctgtgcagtactggtcagacgtcatggagtatatgtgtggggggaaacatgggagaaggccaaaaccatgtgtgagtgttatgactatttatttgatattgccgtatcaatgaagaaagtaggacttgatccttcacagctcccagttggagaaaatggaattgtctaagccaaaagaaagtctaattatatacagagataaagctaaacgtccctcccacaacacggaattatgggagctacaagatgagatttgagtggggacacagagccaaaccatatcatccagcgtccaggaagattca

SEQ ID NO: 312531 - DNA, 780 bp, Artificial Sequence
  derived and/or modified sequence
atgagaagagccgtggcctacatggccatcaagatcgaggtgcagggccaccagagcttcgccatccccagcggcaccttctggctgtggagaagcctgctgagccaggacaaggagcaccccagatacctgatccccgagctgtgcaagcagttctaccacctgggctgggtgaccggcaccggcggcggcatcagcctgaagcacggcgacgagatctacatcgcccccagcggcgtgcagaaggagagaatccagcccgaggacatgttcgtgtgcgacatcaacgagaaggacatcagcggccccagccccagcaagaagctgaagaagagccagtgcacccccctgttcatgaacgcctacaccatgagaggcgccggcgccgtgatccacacccacagcaaggccgccgtgatggccaccctgctgttccccggcagagagttcaagatcacccaccaggagatgatcaagggcatcaagaagtgcaccagcggcggctactacagatacgacgacatgctggtggtgcccatcatcgagaacacccccgaggagaaggacctgaaggacagaatggcccacgccatgaacgagtaccccgacagctgcgccgtgctggtgagaagacacggcgtgtacgtgtggggcgagacctgggagaaggccaagaccatgtgcgagtgctacgactacctgttcgacatcgccgtgagcatgaagaaggtgggcctggaccccagccagctgcccgtgggcgagaacggcatcgtgtag

SEQ ID NO: 312532 - DNA, 81 bp, Artificial Sequence
  derived and/or modified sequence
atggaacttcagaccctgcaggaagccttgaaggttgaaatccaggttcatcagaaacttgtggcacagatgaaacagtag

SEQ ID NO: 312533 - DNA, 36 bp, Artificial Sequence
  derived and/or modified sequence
atggagctgcagacactccaggaggccctaaaatag

SEQ ID NO: 312534 - DNA, 81 bp, Artificial Sequence
  derived and/or modified sequence
atggagctgcagaccctgcaggaggccctgaaggtggagatccaggtccaccagaaactcgtggctcagatgaaacagtag

SEQ ID NO: 312535 - DNA, 81 bp, Artificial Sequence
  derived and/or modified sequence
atggagctgcagacattgcaggaagcactgaaggtggaaatacaagtgcatcaaaaattagtggcccaaatgaagcaatag

SEQ ID NO: 312536 - DNA, 36 bp, Artificial Sequence
  derived and/or modified sequence
atggaacttcagactctccaagaagccttgaagtag

SEQ ID NO: 312537 - DNA, 81 bp, Artificial Sequence
  derived and/or modified sequence
atggagctgcagaccctgcaggaggccctgaaggtggagatccaggtgcaccagaagctggtggcccagatgaagcagtag

SEQ ID NO: 312538 - DNA, 36 bp, Artificial Sequence
  derived and/or modified sequence
atggagctgcagaccctgcaggaggccctgaagtag

SEQ ID NO: 312539 - DNA, 306 bp, Artificial Sequence
  derived and/or modified sequence
atggagctccagacactccaagaagcgctgaaagtggaaatccaggtccaccagaagctcgtcgcccaaatgaagcaagatccacagaacgctgatctgaaaaaacagctccatgaactacaggctaagatcactgccttaagcgaaaagcagaaacgcgtggtggaacaattaagaaaaaacttaattgttaagcaggaacagcctgataagttccagatacaaccactgccccagtccgagaacaaacttcagaccgcccagcagcagcctcttcaacagctacagcagcagcagcagtattag

SEQ ID NO: 312540 - DNA, 156 bp, Artificial Sequence
  derived and/or modified sequence
atggagctccagaccttgcaagaggcgctcaaagtggagatccaagtgcaccagaaactggttgcacagatgaagcaggatccgcagaatgccgacctgaaaaagcagctgcacgagcttcaggctaaaataaccgcattaagtgagaagcagtag

SEQ ID NO: 312541 - DNA, 306 bp, Artificial Sequence
  derived and/or modified sequence
atggagctgcagaccctgcaggaggccctgaaggtggagatccaggtgcaccagaagctggtggcccagatgaagcaggacccccagaatgctgacctgaagaagcagctgcacgagctgcaggccaagatcacagccctgtctgagaagcagaagagggtggtggagcagctgaggaagaacctgattgtgaagcaggagcagcctgacaagttccagatccagcccctgccccagagcgagaacaagctgcagacagcccagcagcagcccctgcagcagctgcagcagcagcagcagtactag

SEQ ID NO: 312542 - DNA, 156 bp, Artificial Sequence
  derived and/or modified sequence
atggagctgcagaccctgcaggaggccctgaaggtggagatccaggtgcaccagaagctggtggcccagatgaagcaggacccccagaatgctgacctgaagaagcagctgcacgagctgcaggccaagatcacagccctgtctgagaagcagtag

SEQ ID NO: 312543 - DNA, 306 bp, Artificial Sequence
  derived and/or modified sequence
atggagctgcagaccctgcaggaggccctgaaggtggagatccaggttcatcaaaagcttgttgcgcagatgaaacaggatccccagaatgccgacctcaaaaagcagctccatgagttacaggccaagattactgccttatctgaaaaacaaaaacgggttgtggagcagctgcgcaaaaacttgatcgtgaaacaagaacagcctgataagttccaaatccagccgctgccacagagcgaaaacaaactccagaccgcccagcaacagccacttcagcagctgcagcagcaacagcagtattag

SEQ ID NO: 312544 - DNA, 156 bp, Artificial Sequence
  derived and/or modified sequence
atggagctgcagaccctgcaggaggccctgaaggtggagatccaggtccaccagaagcttgtggcccaaatgaagcaggacccacagaacgctgatctgaaaaagcaacttcatgagctgcaggcaaaaatcaccgctctgtctgaaaaacagtag

SEQ ID NO: 312545 - DNA, 557 bp, Artificial Sequence
  derived and/or modified sequence
atctaaaaagtgcgagaggcccagagcagcagcagaagcagcagcagcagctccagcttcttccctccctccccatgaagaagagttccctcctcctcctcctcctgcttctcctgctcagagttcctgcctccagctgccaggggggacagccagccagcagcaggaggctgcagtgagaagaggagtttgttactttaaacagaggctgaagaaactatagaattagcagagaaagtggagaaggtagaggatggagttgcagactctacaggaggctcttaaagtggaaattcaggttcaccagaaactggttgctcaaatgaagcaggatccacagaatgctgacttaaagaaacagcttcatgaactccaagccaaaatcacagctttgagtgagaaacagaaaagagtagttgaacagctacggaagaacctgatagtaaagcaagaacaaccggacaagttccaaatacagccattgccacaatctgaaaacaaactacaaacagcacagcagcaaccactacagcaactacaacaacagcagcagtacc

SEQ ID NO: 312546 - DNA, 466 bp, Artificial Sequence
  derived and/or modified sequence
gtttggtccagccccgtcgtgcacgcagttcccaacacttctcgtcatcctctctttggtctctttattctgctgagcggtgctgttaggatttcttttttttttttttcccctgaccacgttcgcgatgcattgttggaaactgttactacatttttactggaaatactattattcattttaattttgggggctagagagctgaaggagagccagtttccccaaaattgctgcagtgagaagaggagtttgttactttaaacagaggctgaagaaactatagaattagcagagaaagtggagaaggtagaggatggagttgcagactctacaggaggctcttaaagtggaaattcaggttcaccagaaactggttgctcaaatgaagcaggatccacagaatgctgacttaaagaaacagcttcatgaactccaagccaaaatcacagctttgagtgagaaacag

SEQ ID NO: 312547 - DNA, 306 bp, Artificial Sequence
  derived and/or modified sequence
atggagctgcaaaccctccaggaggctctgaaagttgaaatacaggtccaccagaagctcgtcgcacagatgaagcaagatcctcagaacgctgatctgaagaaacaactacacgagttgcaggcaaagatcacagcccttagcgagaagcaaaagagggttgtggaacagcttcgcaaaaaccttatcgtcaagcaggaacagccggacaaattccagatccagcctctcccgcagagcgagaacaaactgcagacagcccagcagcagccacttcagcaacttcagcagcagcagcagtattag

SEQ ID NO: 312548 - DNA, 156 bp, Artificial Sequence
  derived and/or modified sequence
atggaactccaaacactccaagaggcactgaaagtggaaatccaggttcaccagaaattagtggcgcagatgaaacaggatcctcagaatgctgacctcaagaagcagcttcatgagttgcaggcaaaaattacagctctaagcgaaaagcaatag

SEQ ID NO: 312549 - DNA, 306 bp, Artificial Sequence
  derived and/or modified sequence
atggagctgcagaccctgcaggaggccctgaaggtggagatccaggtgcaccagaagctggtggcccagatgaagcaggacccccagaacgccgacctgaagaagcagctgcacgagctgcaggccaagatcaccgccctgagcgagaagcagaagagagtggtggagcagctgagaaagaacctgatcgtgaagcaggagcagcccgacaagttccagatccagcccctgccccagagcgagaacaagctgcagaccgcccagcagcagcccctgcagcagctgcagcagcagcagcagtactag

SEQ ID NO: 312550 - DNA, 156 bp, Artificial Sequence
  derived and/or modified sequence
atggagctgcagaccctgcaggaggccctgaaggtggagatccaggtgcaccagaagctggtggcccagatgaagcaggacccccagaacgccgacctgaagaagcagctgcacgagctgcaggccaagatcaccgccctgagcgagaagcagtag

SEQ ID NO: 312551 - protein, 26 aa, Artificial Sequence
  derived and/or modified sequence
MELQTLQEALKVEIQVHQKLVAQMKQ

SEQ ID NO: 312552 - DNA, 577 bp, Artificial Sequence
  derived and/or modified sequence
agccccgtcgtgcacgcagttcccaacacttctcgtcatcctctctttggtctctttattctgctgagcggtgctgttaggatttcttttttttttttttcccctgaccacgttcgcgatgcattgttggaaactgttactacatttttactggaaatactattattcattttaattttgtcttctggaaggagctgcctctgaaatactcttcttctgcttacatgaagatctctaaatgctatccagcaggaggtgctacagcaagataaaggaaatttttgaattttgagggtcttgctacttattacagctctgcttagcttcagctaagcaacaggattaacaccttaaagttccagaaagattttgaggggctagagagctgaaggagagccagtttccccaaaattgctgcagtgagaagaggagtttgttactttaaacagaggctgaagaaactatagaattagcagagaaagtggagaaggtagaggatggagttgcagactctacaggaggctcttaaagtggaaattcaggttcaccagaaactggttgctcaaatgaagcagga

SEQ ID NO: 312553 - protein, 483 aa, Artificial Sequence
  derived and/or modified sequence
MAQISSNSGFKECPSSHPEPTRAKDVDKEEALQMEAEALAKLQKDRQVTDNQRGFELSSSTRKKAQVYNKQDYDLMVFPESDSQKRALDIDVEKLTQAELEKLLLDDSFETKKTPVLPVTPILSPSFSAQLYFRPTIQRGQWPPGLPGPSTYALPSIYPSTYSKQAAFQNGFNPRMPTFPSTEPIYLSLPGQSPYFSYPLTPATPFHPQGSLPIYRPVVSTDMAKLFDKIASTSEFLKNGKARTDLEITDSKVSNLQVSPKSEDISKFDWLDLDPLSKPKVDNVEVLDHEEEKNVSSLLAKDPWDAVLLEERSTANCHLERKVNGKSLSVATVTRSQSLNIRTTQLAKAQGHISQKDPNGTSSLPTGSSLLQEVEVQNEEMAAFCRSITKLKTKFPYTNHRTNPGYLLSPVTAQRNICGENASVKVSIDIEGFQLPVTFTCDVSSTVEIIIMQALCWVHDDLNQVDVGSYVLKVCGQEEVLQK

SEQ ID NO: 312554 - protein, 648 aa, Artificial Sequence
  derived and/or modified sequence
MAQISSNSGFKECPSSHPEPTRAKDVDKEEALQMEAEALAKLQKDRQVTDNQRGFELSSSTRKKAQVYNKQDYDLMVFPESDSQKRALDIDVEKLTQAELEKLLLDDSFETKKTPVLPVTPILSPSFSAQLYFRPTIQRGQWPPGLPGPSTYALPSIYPSTYSKQAAFQNGFNPRMPTFPSTEPIYLSLPGQSPYFSYPLTPATPFHPQGSLPIYRPVVSTDMAKLFDKIASTSEFLKNGKARTDLEITDSKVSNLQVSPKSEDISKFDWLDLDPLSKPKVDNVEVLDHEEEKNVSSLLAKDPWDAVLLEERSTANCHLERKVNGKSLSVATVTRSQSLNIRTTQLAKAQGHISQKDPNGTSSLPTGSSLLQEVEVQNEEMAAFCRSITKLKTKFPYTNHRTNPGYLLSPVTAQRNICGENASVKVSIDIEGFQLPVTFTCDVSSTVEIIIMQALCWVHDDLNQVDVGSYVLKVCGQEEVLQNNHCLGSHEHIQNCRKWDTEIRLQLLTFSAMCQNLARTAEDDETPVDLNKHLYQIEKPCKEAMTRHPVEELLDSYHNQVELALQIENQHRAVDQVIKAVRKICSALDGVETLAITESVKKLKRAVNLPRSKTADVTSLFGGEDTSRSSTRGSLNPENPVQVSINQL

SEQ ID NO: 312555 - protein, 130 aa, Artificial Sequence
  derived and/or modified sequence
MAQISSNSGFKECPSSHPEPTRAKDVDKEEALQMEAEALAKLQKDRQVTDNQRGFELSSSTRKKAQVYNKQDYDLMVFPESDSQKRALDIDVEKLTQAELEKLLLDDSFETKKTPVLPVTPILSPSFSAQ

SEQ ID NO: 312556 - DNA, 1452 bp, Artificial Sequence
  derived and/or modified sequence
atggcccagatcagcagcaacagcggcttcaaggagtgccccagcagccaccccgagcccaccagagccaaggacgtggacaaggaggaggccctgcagatggaggccgaggccctggccaagctgcagaaggacagacaggtgaccgacaaccagagaggcttcgagctgagcagcagcaccagaaagaaggcccaggtgtacaacaagcaggactacgacctgatggtgttccccgagagcgacagccagaagagagccctggacatcgacgtggagaagctgacccaggccgagctggagaagctgctgctggacgacagcttcgagaccaagaagacccccgtgctgcccgtgacccccatcctgagccccagcttcagcgcccagctgtacttcagacccaccatccagagaggccagtggccccccggcctgcccggccccagcacctacgccctgcccagcatctaccccagcacctacagcaagcaggccgccttccagaacggcttcaaccccagaatgcccaccttccccagcaccgagcccatctacctgagcctgcccggccagagcccctacttcagctaccccctgacccccgccacccccttccacccccagggcagcctgcccatctacagacccgtggtgagcaccgacatggccaagctgttcgacaagatcgccagcaccagcgagttcctgaagaacggcaaggccagaaccgacctggagatcaccgacagcaaggtgagcaacctgcaggtgagccccaagagcgaggacatcagcaagttcgactggctggacctggaccccctgagcaagcccaaggtggacaacgtggaggtgctggaccacgaggaggagaagaacgtgagcagcctgctggccaaggacccctgggacgccgtgctgctggaggagagaagcaccgccaactgccacctggagagaaaggtgaacggcaagagcctgagcgtggccaccgtgaccagaagccagagcctgaacatcagaaccacccagctggccaaggcccagggccacatcagccagaaggaccccaacggcaccagcagcctgcccaccggcagcagcctgctgcaggaggtggaggtgcagaacgaggagatggccgccttctgcagaagcatcaccaagctgaagaccaagttcccctacaccaaccacagaaccaaccccggctacctgctgagccccgtgaccgcccagagaaacatctgcggcgagaacgccagcgtgaaggtgagcatcgacatcgagggcttccagctgcccgtgaccttcacctgcgacgtgagcagcaccgtggagatcatcatcatgcaggccctgtgctgggtgcacgacgacctgaaccaggtggacgtgggcagctacgtgctgaaggtgtgcggccaggaggaggtgctgcagaagtag

SEQ ID NO: 312557 - DNA, 1452 bp, Artificial Sequence
  derived and/or modified sequence
atggcacagatatcctcaaattccggctttaaggagtgtccaagctcgcatcccgagccgactcgcgcaaaagatgtggacaaggaagaggcattgcagatggaagctgaggctctagccaaactgcagaaggatcgccaagtgacagacaaccagcgcggtttcgaactgtctagttccacacgaaagaaagcccaggtgtataacaagcaggattatgacttgatggtttttcctgagtccgattctcaaaagagggctctggatattgacgttgagaaactaacacaagccgagctggagaagctactcttagacgactctttcgaaaccaaaaagacacctgtcctgccggtgaccccaatcctctctcctagcttctcagctcagttatactttcgaccgactattcagcgcggccagtggcctcctgggctgccaggaccctccacctacgcactgccaagtatataccccagcacttacagcaaacaggccgccttccagaacggttttaacccccggatgcctactttcccttccaccgagcctatttacctctcactccctggacaatctccctatttttcttatccactgacgcccgcgacaccattccatccacaaggaagtttgcccatctaccggcccgtggtgagtactgacatggctaaactgttcgacaagatcgcatctaccagtgaattcttgaagaatggtaaagcacgcactgaccttgagattactgactctaaggtcagcaaccttcaggtcagccctaagtcggaagatatttcaaaattcgactggctcgacctggatcctctgagcaagcccaaggttgacaacgtggaagtgctggaccacgaggaggagaaaaacgtttcctctctgttggcaaaagatccctgggatgctgtactgcttgaagagcgtagtaccgccaattgccaccttgaaagaaaggttaatgggaaatcattgagcgtggcaaccgtaacaaggtcgcagagtctgaatattcgaaccacacagctagctaaagcccaaggacatatctctcaaaaggaccctaatgggacctcttcgcttccaactggtagctccctgttgcaggaagtggaggtgcagaatgaagaaatggcagccttttgccggtcgattacaaagctaaagacaaaatttccatacacaaaccaccgaactaatcctggctacttactctcccccgtcaccgcccaaaggaacatctgcggggaaaatgccagcgtgaaggtgtccattgacatcgagggcttccaactcccagtgacattcacctgcgacgtgtcatccacagtggaaatcattataatgcaggccctctgttgggtgcacgacgatctaaatcaggttgatgtcggtagttatgtccttaaagtctgtgggcaggaagaagtcctgcagaaatag

SEQ ID NO: 312558 - DNA, 1452 bp, Artificial Sequence
  derived and/or modified sequence
atggcccagatcagcagcaacagcggcttcaaggagtgccccagcagccaccctgagcccacccgggccaaggatgtggacaaggaggaggccctgcagatggaggccgaggccctggccaagctgcagaaggaccggcaggtgacagacaaccagaggggctttgagctgagcagcagcaccaggaagaaggcccaggtgtacaacaagcaggactatgacctgatggtgtttcctgagagtgacagccagaagagggccctggacattgatgtggagaagctgacccaggccgagctggagaagctgctgctggatgacagctttgagaccaagaagacccctgtgctgcctgtgacccccatcctgagccccagcttcagcgcccagctgtacttccggcccaccatccagaggggccagtggcccccaggcctgcccggccccagcacctacgccctgcccagcatctaccccagcacctacagcaagcaggccgccttccagaatggcttcaaccccaggatgcccaccttccccagcacagagcccatctacctgagcctgcccggccagagcccctacttctcctaccccctgaccccagccacccccttccacccccagggcagcctgcccatctacagacctgtggtgtccacagacatggccaagctgtttgacaagatcgccagcaccagcgagttcctgaagaatggcaaggccaggacagacctggagatcacagacagcaaggtgagcaacctgcaggtgagccccaagtctgaggacatcagcaagtttgactggctggacctggaccccctgagcaagcccaaggtggacaacgtggaggtgctggaccacgaggaggagaagaatgtgagcagcctgctggccaaggacccctgggatgctgtgctgctggaggagaggagcacagccaactgccacctggagaggaaggtgaatggcaagagcctgtctgtggccaccgtgaccaggagccagagcctgaacatccgcaccacccagctggccaaggcccagggccacatcagccagaaggaccccaacggcaccagcagcctgcccaccggcagcagcctgctgcaggaggtggaggtgcagaatgaggagatggccgccttctgccgcagcatcaccaagctgaagaccaagttcccctacaccaaccacaggaccaaccctggctacctgctgagccctgtgacagcccagaggaacatctgtggggagaatgcctctgtgaaggtgtccattgacatcgagggcttccagctgcctgtgaccttcacctgtgatgtgagcagcacagtggagatcatcatcatgcaggccctgtgctgggtgcatgatgacctgaaccaggtggatgtgggcagctatgtgctgaaggtgtgtggccaggaggaggtgctgcagaagtag

SEQ ID NO: 312559 - DNA, 1452 bp, Artificial Sequence
  derived and/or modified sequence
atggcccagatcagcagcaacagcggcttcaaggagtgccccagctcccatccagagccaaccagggcaaaagacgtggataaagaggaggccttacagatggaggccgaagctttggcaaagctgcagaaggaccggcaggtgacagacaatcaaagagggttcgaactgtcgagctcaacacgaaagaaggctcaggtatacaataagcaagattacgatttgatggtatttccagagtctgattcgcagaaaagggcactcgacatcgacgtcgaaaagctgacccaggccgagttagagaagctgctcctggatgattccttcgaaaccaagaaaacgcccgtgctgcccgtgacgcccattttgagcccctccttcagcgcccaactgtattttcggcctactatacagcgaggtcagtggccaccagggcttccgggcccatcaacctatgccctgccttctatctacccaagcacttactccaaacaagctgcctttcagaatggatttaatccaagaatgcctacgttcccatctaccgagcccatctacctgtccttgcctgggcagtccccctatttctcatatccactcaccccagccacgcctttccacccgcagggatccctcccgatttaccgcccggtggttagcacggacatggctaagctgttcgacaaaattgcaagtacgtccgagttcttaaagaatgggaaagcaagaactgatctggagattacagatagcaaagtttccaatttacaggttagccccaaatcagaagacatttctaaattcgactggctggacttagaccctctcagcaagcctaaagtggataatgttgaagtgttggaccacgaggaagagaagaacgtgtcgtccctgctcgccaaagacccttgggatgcagtccttcttgaggagcggagcaccgccaactgccacctcgaaagaaaagttaacggtaaaagcctgtccgtggcaacagtgactcgttctcaatcattgaacattcgcaccacacaactcgcaaaagcccaaggccacatctcacagaaggatcccaatggaacaagttccctgcccactggatccagtcttctccaagaggtcgaagtccagaatgaggagatggcggctttctgtcgtagcatcacaaagctgaaaacgaagttcccctacactaatcatcggaccaaccccggatatttgctgagtcccgtgactgcccaacggaatatctgcggggagaatgctagcgttaaagtgagtattgatattgaagggttccagttacctgtcacattcacctgcgacgtgtccagcactgtagagattattatcatgcaggcattatgttgggtgcacgacgatttgaatcaggtggatgtcggcagctatgtgctgaaagtttgcggccaggaggaagttttgcaaaaatag

SEQ ID NO: 312560 - DNA, 1452 bp, Artificial Sequence
  derived and/or modified sequence
atggcccaaatctcaagcaattctggtttcaaggagtgcccctctagtcaccccgagcccacaagagccaaggacgtcgataaggaggaggcacttcaaatggaggcggaagcactggcgaagctacaaaaagaccggcaggtgacagataaccagagagggtttgaactgtctagcagcaccaggaaaaaggcacaagtgtataacaaacaggattacgacctcatggtgtttcctgaatctgacagccagaagcgggcactggatattgacgtcgaaaagctcacacaagctgagttggaaaaactgctgctcgatgacagtttcgagactaaaaagacacctgtgttacctgtgaccccaatcctatcccccagcttttccgctcagctttatttcaggcctaccattcagcgtggacagtggccccctggcttacctggtcccagtacttatgcccttcccagcatctacccttctacgtattccaaacaggccgcattccagaatggcttcaaccctagaatgcccacttttccttctacagagccaatttaccttagcctccctggtcagagtccatacttttcctacccccttacgcctgccacccctttccatccgcagggttcgctcccgatttatcgacccgtggtgagtacagacatggctaaactgtttgacaagattgcatctacttcagagtttctgaagaatggcaaagctagaacagatttggaaatcacggacagcaaggtctctaacctgcaggtcagccccaagtccgaggatatttccaagttcgactggctcgacttggacccactcagcaaacctaaggtagacaatgttgaagtcctggatcatgaagaggagaaaaacgtcagctccctcctagccaaagatccatgggacgctgtccttctggaggaaaggtctacagccaactgccatctcgagaggaaagtcaacggcaagtctctgtcggtggcgacggtcacccgaagtcaatcactgaacattcgtaccacccagctggccaaagcgcagggtcatatttctcaaaaggaccctaatgggaccagctcgctcccaacaggatcatccttgctccaggaggtggaggttcagaatgaagaaatggctgcattttgcagatctataacaaagttgaaaaccaagtttccctacacgaaccacaggaccaaccccggttatctcttaagccctgtgactgcccagcggaatatatgcggggagaacgccagcgtcaaagtcagcatcgacattgaagggttccagttgcctgtaacatttacttgtgatgtctcgtcaacagtagagataattattatgcaagcactgtgttgggtccacgacgatctcaaccaggtcgatgtgggcagttatgttttaaaagtgtgtggtcaggaggaggtgttgcagaaatag

SEQ ID NO: 312561 - DNA, 2101 bp, Artificial Sequence
  derived and/or modified sequence
tttcggcggcggctgagccagctgaggggaaaaatggctcggactgtggcggcttcggcggctcaggttgtggtagaggcggaggctcaggcagcttgaggccttgctattttggaagctacaagaaaaaaatagaggaaggaaggtttggtctttttagtggacatggctcagatatctagcaacagcggatttaaagaatgtccatcttcacatccggaaccaacaagagcaaaagatgtggacaaagaagaagcattacagatggaagcagaggctttagcaaaactgcaaaaggatagacaagtgactgacaatcagagaggctttgagttgtcaagcagcaccagaaaaaaagcacaggtttataacaagcaggattatgatctcatggtgtttcctgaatcagattcccaaaaaagagcattagatattgatgtagaaaagctcacccaagctgaacttgagaaactattgctggatgacagtttcgagactaaaaaaacacctgtattaccagttactcctattctgagcccttccttttcagcacagctctattttagacctactattcagagaggacagtggccacctggattacctgggccttccacttatgctttaccttctatttatccttctacttacagtaaacaggctgcattccaaaatggcttcaatccaagaatgcccacttttccatctacagaacctatatatttaagtcttccgggacaatctccatatttctcatatcctttgacacctgccacaccctttcatccacaaggaagcttacctatctatcgtccagtagtcagtactgacatggcaaaactatttgacaaaatagctagtacatcagaatttttaaaaaatgggaaagcaaggactgatttggagataacagattcaaaagtcagcaatctacaggtatctccaaagtctgaggatatcagtaaatttgactggttagacttggatcctctaagtaagcctaaggtggataatgtggaggtattagaccatgaggaagagaaaaatgtttcaagtttgctagcaaaggatccttgggatgctgttcttcttgaagagagatcgacagcaaattgtcatcttgaaagaaaggtgaatggaaaatccctttctgtggcaactgttacaagaagccagtctttaaatattcgaacaactcagcttgcaaaagcccagggccatatatctcagaaagacccaaatgggaccagtagtttgccaactggaagttctcttcttcaagaagttgaagtacagaatgaggagatggcagctttttgtcgatccattacaaaattgaagaccaaatttccatataccaatcaccgcacaaacccaggctatttgttaagtccagtcacagcacaaagaaacatatgcggagaaaatgctagtgtgaaggtctccattgacattgaaggatttcagctaccagttacttttacgtgtgatgtgagttctactgtagaaatcattataatgcaagccctttgctgggtacatgatgacttgaatcaagtagatgttggcagctatgttctaaaagtttgtggtcaagaggaagtgctgcagaagtaagtttatttaactactgagcaacatccttggaaatttcatttttaatggtttaatctagaaaaatttcaagttaaatttataatgcagaaatacattggatcctattgaattgatttattgaatcaataaacttttattgaaatatataatgtctaagatgtcatgtctaagacagtggtggggtttcagagataagtgagacattgtattcccttaaggagcttgtagtctttacaggaagagtttcaggcagttggttaataagtgatataatgggtctttcttactgtaaagagtcaatagtcacatcattatagactatattcctcttgcaacatgcactgttactttatgcacagtagtcagctgtgatttccttttagttgcctgaaataatcattatatgaatctttttcttacccaggagaattggttgaaaccgggaggcagaggttgcagtgagctgagatcacactgctgcagt

SEQ ID NO: 312562 - DNA, 447 bp, Artificial Sequence
  derived and/or modified sequence
atgagcgtgcccaagctggtgaaccacggctgggagaccgagccctgcaaccccgaccccgccctgctgctgaccggcgccgtgcccggcgagggcgagaccaccctggagagagccctgcccagagtggtgggcgagcaggagctgggcagctggagagagagagccaacagcacccccgagagaagactgagccccgccctgaagcacgtgagcgccagacccaccagcatccccgagacccccggcgagagaggcgccagaaccagaagagacagagccggcagagccagaaagggcgagggcgccgccgccagcaccctgagcagcctgagaggcgccgcccccgaggccggcagaggcgccgaggcccccgagtggagcgtgagcggcggcgccgacgccgtgcccctggagggcgcccccgccgtgagaagcaagagctag

SEQ ID NO: 312563 - DNA, 1464 bp, Artificial Sequence
  derived and/or modified sequence
atgggaagttgggcactgctgtggccgcccctgttgttcaccggactgctcgttaggccccccggtacaatggctcaagcacagtattgtagcgtaaataaagatatatttgaagtcgaggagaacactaacgtgacagaacctctggtggatattcatgtgcccgagggacaggaagtgacccttggagccttatctacccctttcgcattcagaatacaagggaatcagctgttcctaaacgtaacgcctgattatgaggagaaatccttgttggaagcgcagcttctgtgtcagtcaggcgggacactcgtgacccagctccgcgtgttcgtgagcgtcctcgatgtaaatgataatgcccccgagtttcctttcaaaaccaaagaaattagggtagaagaggataccaaggtgaatagcactgtgattcctgaaacccaactccaggctgaagaccgagataaggacgacattctgttctatacactccaagagatgacagcgggagcctccgactacttcagcctcgtgagcgtcaatcggccagcactgcggctggatcgccctctggacttttatgagagacctaatatgactttttggctcctagtccgcgacacccccggggaaaatgtggagccttctcacacagcaacggctacactagtgctgaacgtcgtgccagctgaccttcgtcccccttggttcctcccttgcacattctctgacggatacgtgtgtatccaggcacaatatcacggggccgttcccacagggcacattctgccttcacctttggtgttgaggcctggccccatttatgctgaggatggggaccgtgggattaatcaacccattatctactccatcttccgggggaacgtcaacggtacttttatcattcaccctgactctggcaacctcaccgttgcccggtcggtcccaagccctatgacctttctgctactggtgaaaggccagcaagcagacctggctaggtacagtgttacacaggtcaccgtggaggcagtggccgccgcaggcagccccccaaggtttccacaacgactctaccgaggaaccgttgcccggggggccggcgctggagtggtcgtgaaggacgccgctgcccctagtcaacctctgagaatccaggcccaggaccctgaattctctgacctgaactccgcaatcacgtaccgaataacaaaccacagtcacttccgtatggagggagaggttgtccttactaccaccactctagctcaggcaggggccttctacgccgagccaccgacatgcacgggcgacctccgccaccctgcacacctcaggcccccagccccagatcccactcagcgtcttcctggtgaagccgaagaacctatgcagacccctaaagctacccacctgggcgctggagggctgaaacatctcccaggagttctcgtccctttctag

SEQ ID NO: 312564 - DNA, 1464 bp, Artificial Sequence
  derived and/or modified sequence
atgggctcctgggccctgctgtggccacccctgctcttcaccggcctgctggtgcggcccccaggcaccatggcccaggcccagtactgcagcgtgaacaaggacatctttgaggtggaggagaacaccaacgtgacagagcccctggtggacatccacgtgcctgagggccaggaggtgaccctgggcgccctgagcaccccatttgccttccgcatccagggcaaccagctgttcctgaatgtgaccccagactatgaggagaagagcctgctggaggcccagctgctgtgccagagcggcggcaccctggtgacccagctgcgggtgtttgtgtctgtgctggatgtgaatgacaatgcccctgagttccccttcaagaccaaggagatccgggtggaggaggacaccaaggtgaacagcaccgtcatccctgagacccagctgcaggccgaggaccgggacaaggatgacatcctcttctacaccctgcaggagatgacagctggggccagtgactacttcagcctggtgtctgtgaacagacctgccctgcggctggaccggcccctggacttctatgaaagacccaacatgaccttctggctgctggtgcgggacaccccaggagaaaatgtggagcccagccacacagccacagccaccctggtgctgaatgtggtgcctgctgacctgcggcccccctggttcctgccctgcaccttcagtgatggctacgtgtgcatccaggcccagtaccacggggctgtgcccaccggccacatcctgcccagccccctggtgctgcggcccggccccatctatgcagaagatggagaccggggcatcaaccagcccatcatctacagcatcttcagaggaaatgtgaatggcaccttcatcatccacccagacagcggcaacctgactgtggcccggtctgtgcccagccccatgaccttcctgctgctggtgaagggccagcaggccgacctggcccgctacagcgtgacccaggtgacagtggaggccgtggccgccgccggcagccccccacgcttcccccagaggctgtaccggggcaccgtggcccggggagctggagctggggtggtggtgaaggatgctgctgcccccagccagcccctgcgcatccaggcccaggaccctgagttcagtgacctgaacagcgccatcacctaccgcatcaccaaccacagccacttcaggatggagggggaggtggtgctgaccaccaccaccctggcccaggccggggccttctacgccgagccccccacctgcaccggggacctgcggcacccagcccacctgcggcccccagccccagaccccacccagaggctgcctggagaggccgaggagcccatgcagacccccaaggccacccacctgggcgctgggggcctgaagcacctgcccggggtgctggtgcccttctag

SEQ ID NO: 312565 - DNA, 1464 bp, Artificial Sequence
  derived and/or modified sequence
atgggcagctgggccctgctgtggccccccctgctgttcaccggcttgctggttagaccccctggcaccatggcccaggcacagtattgctcagtcaacaaagatattttcgaagtcgaagagaacactaacgtaaccgagccacttgttgatatccacgttccagagggacaagaagtaactctgggtgcactcagcacacctttcgcttttcgcatacagggcaaccagctgtttctgaacgttacccccgactatgaggaaaagtccctactggaagctcagctgctgtgccagagtggaggaactctggtaacacagctgagggtcttcgtatccgtcttggacgtaaatgataatgcacctgagtttccttttaaaacaaaggagattagggtggaggaagataccaaagtgaactctaccgtgatccctgagacacagctgcaagcggaggatagggataaggacgacattctgttttataccttacaggaaatgacggcaggcgcttctgactatttctcccttgtgtcagtgaacaggccagctctgcgactggataggccacttgatttctacgagcgtcctaatatgacgttctggctgcttgtgcgggatacccctggcgaaaatgtggaacctagtcacacggccacagccactcttgtgctaaacgttgttcctgcagatttgcgacctccctggtttttaccatgtacattttcagacggttacgtctgtatccaggctcagtaccacggtgctgtcccaaccggtcatatcctgccctctcccctggtgcttagacccggacctatttatgctgaggatggggacagagggatcaaccaacctataatctactcgatcttccgagggaacgtcaatggcaccttcattatccaccccgatagtgggaacctgaccgtggcgcgcagtgttcctagtccgatgacattcctgctgcttgttaagggacagcaggccgatcttgcccgctactccgtgactcaagtgacggtagaggctgtggctgctgcaggctcccccccccgattcccgcagcgcctgtatagaggtaccgtagcgaggggagcaggagccggagtggtcgtgaaggatgcggccgctccgtcccagccactccgtattcaagcacaggaccccgagttctccgacctgaactccgccatcacttatcgaatcactaatcatagccactttcggatggaaggggaagttgtcctcaccacgactactctggcacaagccggcgccttttacgcggaaccgccaacatgtaccggtgatctgcggcatcctgcccacctgcggcctcctgcacctgatcctacacagcggcttcccggagaggccgaggagcctatgcaaacccccaaggccactcatctcggcgccgggggacttaaacatttgcctggtgttctggtgcccttttag

SEQ ID NO: 312566 - DNA, 1464 bp, Artificial Sequence
  derived and/or modified sequence
atgggatcttgggcactcctctggcctccgctcctctttactggcctgcttgtgagaccaccaggaacaatggcccaagcacagtattgctccgtcaataaggacatcttcgaggtagaggaaaacactaacgttactgagccactggtcgacatccatgttcccgaaggccaggaggtgaccctgggcgctttgagtactccctttgccttccgtattcagggtaaccagttgttcctgaatgtcacgccagactacgaggaaaaaagccttctagaagctcagctgctatgccagagcggcggaacgttggtaacccagctacgcgttttcgtgagtgttctagatgtgaatgataatgcccctgaatttccatttaagaccaaggagattagagtggaggaagatactaaggtgaactctacagttattcccgaaactcagctgcaggccgaggatcgcgacaaagatgatatactgttctacacgttgcaggaaatgactgccggagcctcagattatttctcactggtctcggtcaatagacctgcactgcgcctggatcgacccctcgatttttacgagcgaccaaatatgactttctggctcctcgtgagagataccccgggtgagaacgtcgagccatctcacaccgcaaccgccaccctcgtactgaatgtcgtcccagcagacttgaggcctccttggttcctcccatgcaccttttccgatggctatgtgtgtatccaggctcagtatcacggcgcagtgcccacaggtcacattttgccatcaccattggtcctgcgacccggacccatctacgcagaggacggagatagaggcatcaaccagccaatcatttattccattttccggggtaacgttaatggcacatttattattcatcctgatagcggaaaccttacagtcgctagaagtgtcccaagccctatgacctttctgctgctggtgaaaggccaacaagcggatctcgccaggtatagcgtgacgcaagtcacagttgaagctgtggcagccgcaggctcacctccaagattccctcagcgactttacagaggtaccgttgccaggggtgcgggagctggagttgtggtcaaggatgctgcggcaccatcacaaccccttaggattcaagcccaggatcccgaattttcagatctgaactctgctatcacgtatcgcatcacaaatcattcccattttcgcatggagggcgaggttgtgctcaccactactactctggcgcaggccggtgcattctacgccgaaccccctacttgtaccggagacctgcgtcatcccgctcacctgagaccccctgcaccggatcctactcaaaggcttcccggagaggcagaagaacctatgcagaccccaaaggcaactcacctgggagccggtggtttaaagcatttgcccggagtattagtccccttctag

SEQ ID NO: 312567 - DNA, 1629 bp, Artificial Sequence
  derived and/or modified sequence
tgggctggaccagccggccagcgggagcccccttggcagaagccggtcgtaaaggatcataaactgggcggcgtctggctggggcgaaggtcgctgaggtaggaactgcgccagtcctagacgccagacccgctcagaccctcctgccaggtgacagccgccaagatggggtcttgggccctgctgtggcctcccctgctgttcaccgggctgctcgtccgacccccggggaccatggcccaggcccagtactgctctgtgaacaaggacatctttgaagtagaggagaacacaaatgtcaccgagccgctggtggacatccacgtcccggagggccaggaggtgaccctcggagccttgtccaccccctttgcatttcggatccagggaaaccagctgtttctcaacgtgactcctgattacgaggagaagtcactgcttgaggctcagctgctgtgtcagagcggaggcacattggtgacccagctaagggtgttcgtgtcagtgctggacgtcaatgacaatgcccccgaattcccctttaagaccaaggagataagggtggaggaggacacgaaagtgaactccaccgtcatccccgagacgcaactgcaggctgaggaccgcgacaaggacgacattctgttctacaccctccaggaaatgacagcaggtgccagtgactacttctccctggtgagtgtaaaccgtcccgccctgaggctggaccggcccctggacttctacgagcggccgaacatgaccttctggctgctggtgcgggacactccgggggagaatgtggaacccagccacactgccaccgccacactagtgctgaacgtggtgcccgccgacctgcggcccccgtggttcctgccctgcaccttctcagatggctacgtctgcattcaagctcagtaccacggggctgtccccacggggcacatactgccatctcccctcgtcctgcgtcccggacccatctacgctgaggacggagaccgcggcatcaaccagcccatcatctacagcatctttaggggaaacgtgaatggtacattcatcatccacccagactcgggcaacctcaccgtggccaggagtgtccccagccccatgaccttccttctgctggtgaagggccaacaggccgaccttgcccgctactcagtgacccaggtcaccgtggaggctgtggctgcggccgggagcccgccccgcttcccccagagactgtatcgtggcaccgtggcgcgtggcgctggagcgggcgttgtggtcaaggatgcagctgccccttctcagcctctgaggatccaggctcaggacccggagttctcggacctcaactcggccatcacatatcgaattaccaaccactcacacttccggatggagggagaggttgtgctgaccaccaccacactggcacaggcgggagccttctacgcagagcccccgacctgcaccggagatctcaggcacccggctcatctcagacctcccgctcccgaccctacacagagattgcctggggaggctgaggagccgatgcaaacccccaaggcgacgcacttgggagccggtggtctcaaacacctgccgggggtcctagtccccttctga

SEQ ID NO: 312568 - DNA, 1464 bp, Artificial Sequence
  derived and/or modified sequence
atgggcagctgggccctgctgtggccccccctgctgttcaccggcctgctggtgagaccccccggcaccatggcccaggcccagtactgcagcgtgaacaaggacatcttcgaggtggaggagaacaccaacgtgaccgagcccctggtggacatccacgtgcccgagggccaggaggtgaccctgggcgccctgagcacccccttcgccttcagaatccagggcaaccagctgttcctgaacgtgacccccgactacgaggagaagagcctgctggaggcccagctgctgtgccagagcggcggcaccctggtgacccagctgagagtgttcgtgagcgtgctggacgtgaacgacaacgcccccgagttccccttcaagaccaaggagatcagagtggaggaggacaccaaggtgaacagcaccgtgatccccgagacccagctgcaggccgaggacagagacaaggacgacatcctgttctacaccctgcaggagatgaccgccggcgccagcgactacttcagcctggtgagcgtgaacagacccgccctgagactggacagacccctggacttctacgagagacccaacatgaccttctggctgctggtgagagacacccccggcgagaacgtggagcccagccacaccgccaccgccaccctggtgctgaacgtggtgcccgccgacctgagacccccctggttcctgccctgcaccttcagcgacggctacgtgtgcatccaggcccagtaccacggcgccgtgcccaccggccacatcctgcccagccccctggtgctgagacccggccccatctacgccgaggacggcgacagaggcatcaaccagcccatcatctacagcatcttcagaggcaacgtgaacggcaccttcatcatccaccccgacagcggcaacctgaccgtggccagaagcgtgcccagccccatgaccttcctgctgctggtgaagggccagcaggccgacctggccagatacagcgtgacccaggtgaccgtggaggccgtggccgccgccggcagcccccccagattcccccagagactgtacagaggcaccgtggccagaggcgccggcgccggcgtggtggtgaaggacgccgccgcccccagccagcccctgagaatccaggcccaggaccccgagttcagcgacctgaacagcgccatcacctacagaatcaccaaccacagccacttcagaatggagggcgaggtggtgctgaccaccaccaccctggcccaggccggcgccttctacgccgagccccccacctgcaccggcgacctgagacaccccgcccacctgagaccccccgcccccgaccccacccagagactgcccggcgaggccgaggagcccatgcagacccccaaggccacccacctgggcgccggcggcctgaagcacctgcccggcgtgctggtgcccttctag

SEQ ID NO: 312569 - protein, 1025 aa, Artificial Sequence
  derived and/or modified sequence
MHRKKVDNRIRILIENGVAERQRSLFVVVGDRGKDQVVILHHMLSKATVKARPSVLWCYKKELGFSSHRKKRMRQLQKKIKNGTLNIKQDDPFELFIAATNIRYCYYNETHKILGNTFGMCVLQDFEALTPNLLARTVETVEGGGLVVILLRTMNSLKQLYTVTMDVHSRYRTEAHQDVVGRFNERFILSLASCKKCLVIDDQLNILPISSHVATMEALPPQTPDESLGPSDLELRELKESLQDTQPVGVLVDCCKTLDQAKAVLKFIEGISEKTLRSTVALTAARGRGKSAALGLAIAGAVAFGYSNIFVTSPSPDNLHTLFEFVFKGFDALQYQEHLDYEIIQSLNPEFNKAVIRVNVFREHRQTIQYIHPADAVKLGQAELVVIDEAAAIPLPLVKSLLGPYLVFMASTINGYEGTGRSLSLKLIQQLRQQSAQSQVSTTAENKTTTTARLASARTLYEVSLQESIRYAPGDAVEKWLNDLLCLDCLNITRIVSGCPLPEACELYYVNRDTLFCYHKASEVFLQRLMALYVASHYKNSPNDLQMLSDAPAHHLFCLLPPVPPTQNALPEVLAVIQVCLEGEISRQSILNSLSRGKKASGDLIPWTVSEQFQDPDFGGLSGGRVVRIAVHPDYQGMGYGSRALQLLQMYYEGRFPCLEEKVLETPQEIHTVSSEAVSLLEEVITPRKDLPPLLLKLNERPAERLDYLGVSYGLTPRLLKFWKRAGFVPVYLRQTPNDLTGEHSCIMLKTLTDEDEADQGGWLAAFWKDFRRRFLALLSYQFSTFSPSLALNIIQNRNMGKPAQPALSREELEALFLPYDLKRLEMYSRNMVDYHLIMDMIPAISRIYFLNQLGDLALSAAQSALLLGIGLQHKSVDQLEKEIELPSGQLMGLFNRIIRKVVKLFNEVQEKAIEEQMVAAKDVVMEPTMKTLSDDLDEAAKEFQEKHKKEVGKLKSMDLSEYIIRGDDEEWNEVLNKAGPNASIISLKSDKKRKLEAKQEPKQSKKLKNRETKNKKDMKLKRKK

SEQ ID NO: 312570 - protein, 953 aa, Artificial Sequence
  derived and/or modified sequence
MRQLQKKIKNGTLNIKQDDPFELFIAATNIRYCYYNETHKILGNTFGMCVLQDFEALTPNLLARTVETVEGGGLVVILLRTMNSLKQLYTVTMDVHSRYRTEAHQDVVGRFNERFILSLASCKKCLVIDDQLNILPISSHVATMEALPPQTPDESLGPSDLELRELKESLQDTQPVGVLVDCCKTLDQAKAVLKFIEGISEKTLRSTVALTAARGRGKSAALGLAIAGAVAFGYSNIFVTSPSPDNLHTLFEFVFKGFDALQYQEHLDYEIIQSLNPEFNKAVIRVNVFREHRQTIQYIHPADAVKLGQAELVVIDEAAAIPLPLVKSLLGPYLVFMASTINGYEGTGRSLSLKLIQQLRQQSAQSQVSTTAENKTTTTARLASARTLYEVSLQESIRYAPGDAVEKWLNDLLCLDCLNITRIVSGCPLPEACELYYVNRDTLFCYHKASEVFLQRLMALYVASHYKNSPNDLQMLSDAPAHHLFCLLPPVPPTQNALPEVLAVIQVCLEGEISRQSILNSLSRGKKASGDLIPWTVSEQFQDPDFGGLSGGRVVRIAVHPDYQGMGYGSRALQLLQMYYEGRFPCLEEKVLETPQEIHTVSSEAVSLLEEVITPRKDLPPLLLKLNERPAERLDYLGVSYGLTPRLLKFWKRAGFVPVYLRQTPNDLTGEHSCIMLKTLTDEDEADQGGWLAAFWKDFRRRFLALLSYQFSTFSPSLALNIIQNRNMGKPAQPALSREELEALFLPYDLKRLEMYSRNMVDYHLIMDMIPAISRIYFLNQLGDLALSAAQSALLLGIGLQHKSVDQLEKEIELPSGQLMGLFNRIIRKVVKLFNEVQEKAIEEQMVAAKDVVMEPTMKTLSDDLDEAAKEFQEKHKKEVGKLKSMDLSEYIIRGDDEEWNEVLNKAGPNASIISLKSDKKRKLEAKQEPKQSKKLKNRETKNKKDMKLKRKK

SEQ ID NO: 312571 - DNA, 3078 bp, Artificial Sequence
  derived and/or modified sequence
atgcaccgcaaaaaagtggacaatcgaatccgtatcctcatcgaaaacggcgtggccgaaaggcagagaagccttttcgtggtggtgggagatcgggggaaggaccaggtcgtgatcctacaccacatgttgtcaaaagctacagtaaaagctcgaccaagcgtgttatggtgctataagaaggaactgggctttagctctcaccgcaagaagcggatgaggcagctccaaaaaaagattaaaaacggtaccctgaacatcaaacaggacgacccttttgaactgtttatcgccgcgactaacatcaggtactgctactacaatgaaacgcacaagatcctgggaaatactttcggcatgtgcgttctccaggatttcgaagccttaacgcctaacctgctggcccgtaccgtggaaaccgtggaggggggtgggctagtggtgatcttgctacggacgatgaactccctgaaacagctgtatacagtaactatggatgtgcattcaaggtatagaactgaagctcaccaggacgtggtgggccgcttcaacgagcgattcatcctgtctctggctagctgcaagaagtgcctggttattgacgaccaattgaatattctgcccatctccagccacgttgcaacgatggaagccctgcccccccagaccccagatgagtccctggggccctctgatctggaactgcgggagttgaaggagtctctgcaggacacccagcctgtaggggtgctcgtggactgctgcaaaacattagatcaagccaaggcggtgcttaagttcatcgagggcatctccgaaaaaacattgaggtcaaccgttgctctaactgcagccagaggtagaggcaaatcagccgctctcggattagccatcgcaggggccgtcgcctttgggtactccaacatcttcgtgacatccccaagccccgataatttgcatactttattcgagttcgtgtttaagggtttcgatgccttgcagtaccaggagcacctcgactatgagatcatacagagcctcaatcccgaattcaataaagccgttatcagggtaaatgtcttcagggaacaccggcagacaatccagtacatccatcccgccgatgccgtgaaattaggccaggccgaattggtggtcattgacgaggctgccgctattcccctcccactagtgaagtcactgctgggaccttatcttgtgtttatggcttcaacaatcaacggctacgaaggaaccgggcggagcctgagcttaaaattaattcaacaactaagacagcaatccgcccaatcacaagttagcactaccgccgagaacaagaccaccaccaccgcgaggctcgcttctgctaggaccttgtacgaagtgtcgctgcaagagagcattcgatatgctcctggagatgccgtggagaaatggctaaatgacctcctctgcctggactgtctcaacatcacccggatcgtgagcggctgccctctgccagaggcatgcgagctgtactatgtcaatcgagacaccctgttttgttaccacaaggctagtgaggtgtttctgcagcgccttatggccctttacgttgcatcccattataaaaactctccaaacgacctgcagatgctgagcgacgcaccggcccaccatttgttctgcttgctgccacctgtgccgccaacacaaaatgccttgccagaagtgctggctgtgatccaggtctgtctagaaggcgagattagtagacagtctatcctcaactcgttgagccgggggaagaaagcatccggtgaccttatcccatggacagtctccgaacaattccaggacccagactttggtgggctgtcaggtggccgcgtagtcagaatcgcggtccatcccgactaccagggtatggggtatgggagccgggccctccaacttttacagatgtattatgaagggaggttcccttgcttggaggaaaaggtcctggagaccccccaggagatacataccgtatcttccgaggcggtgagtctgctagaagaggttatcacccctaggaaagacctgcccccactgctcctcaaacttaacgagaggcctgccgagcggcttgattatctgggggtcagctatggccttaccccaagattactgaaattctggaagcgcgcaggcttcgttccagtatacttacggcagactccaaatgacttgacaggggaacattcctgtataatgttgaaaacattgaccgatgaagacgaggccgaccaagggggctggttggcggccttttggaaggactttcgtaggcggttcctggcgctcctgtcctaccagttctctacattctccccctcattggctctaaatattatacagaacaggaatatgggtaaaccagcgcagcctgcccttagtcgcgaagaactagaggccctgttcctgccctacgatctcaagcgtttggaaatgtactcaagaaacatggtggactatcatctgatcatggatatgatacccgccatatctagaatctactttcttaatcagttaggggatctagccctctcagcagctcagtcagccctgttgctgggcattggactgcaacacaaatcagtagaccagctggagaaagagatcgagcttccatcgggtcaactcatgggcttattcaaccggatcatccgaaaggtggttaagttatttaatgaggtgcaggagaaggctatcgaggaacaaatggtagctgccaaggatgtggttatggaacctactatgaagacactgtcggatgacctggacgaggccgcaaaggagttccaagagaaacacaagaaagaggtgggaaagctcaagtcgatggacctgagtgaatatatcatacgcggcgatgacgaagagtggaatgaggttctgaataaagccggcccaaatgcgtcgattatttcactcaagtctgataagaagagaaaactcgaagccaaacaggagccaaaacagtccaaaaagctgaagaaccgagagactaagaataaaaaggatatgaagctgaagcggaagaaatag

SEQ ID NO: 312572 - DNA, 2862 bp, Artificial Sequence
  derived and/or modified sequence
atgcggcagttacagaaaaagatcaagaacggcactcttaacattaagcaggacgacccattcgagctttttattgcagcgaccaacatcaggtattgttattataatgaaacacacaagatacttggcaacacatttgggatgtgcgtgttacaagactttgaggctttaactccaaacctgctcgcgagaacggtagagactgtggaggggggggggctggtcgtcattctactgcggacaatgaacagcttgaaacagctttatactgtgaccatggacgtgcattctagataccgaacagaggcccatcaggacgtcgttggacggttcaacgagagatttatcttatccctggcaagctgcaagaagtgccttgtgatcgatgaccaactcaatatcctgccaatatcgtcccacgtggccaccatggaagccttgcccccccaaacgcctgatgagagtctggggcccagcgatctggaactgagggagctaaaggagagcctgcaggacactcagccagtgggcgtgctggtcgattgttgcaagacactggatcaggccaaagctgtgctaaagtttatagaggggatctccgagaagacgcttagatccactgtggccctgactgctgctcgcggtcgaggaaagagcgccgctctcggactggcaatcgctggagccgtggcctttggttatagcaatatcttcgttacctccccgtcccccgacaatttacacaccttgtttgagttcgtctttaagggattcgatgccctgcaatatcaagaacatctcgactacgaaatcatacaaagcctgaacccagagttcaacaaggctgtcatcagggttaacgtgttccgcgagcaccgccagaccattcagtacatccaccctgctgacgccgtgaagctcggtcaggctgagctggttgtgatcgatgaggctgccgctattccactgcccctcgtcaagagcttactaggcccttacctggtttttatggcttccacaatcaacggctacgaaggtacaggcagatcactatccctaaagctgatccagcagctgcgtcagcagagcgcccagtcccaggtaagcaccacagcggagaataagactactaccacagctaggctcgcttcggcgagaacactctacgaagtcagtcttcaggagagcatacggtacgcacccggcgacgcggtagagaaatggctgaatgatcttctgtgcctggactgtctgaatattactagaatagtatctgggtgtccactacccgaggcctgtgagctatactacgtgaaccgtgacactctgttctgttatcataaagctagcgaagtgtttttacaacggctgatggctctctacgtggcctcacattataaaaattctcctaacgacctgcagatgttatctgatgcccctgctcatcatctgttctgtctgcttccgccggtgcctcctacccagaacgctctgccagaggtgctggccgtgatccaggtctgtctggagggtgagatatcgcgccagtcaattctaaattccttgagcagagggaaaaaggccagtggagatttgattccttggaccgtgagcgaacagttccaggaccctgattttgggggcctatcagggggaagggtggtccggatcgcagtgcaccccgactatcagggcatgggctacggctctagagccttgcagctcctgcaaatgtactatgagggacggtttccttgtcttgaggagaaggtattggagacacctcaagagatccatacggtgtccagtgaagccgtcagtttgctggaggaggttatcacaccaagaaaggatctgccaccgctgttgctcaaattgaacgaacggccggcagaaaggctggattacctgggggtgtcttatgggctaacacctcggttgcttaaattctggaagcgggcaggctttgtgcccgtttaccttaggcagacccccaatgacctgacaggcgaacactcctgtataatgcttaagacacttaccgacgaggacgaggcagatcagggagggtggttggccgctttttggaaggatttccgtagacggttcctcgccctactatcttaccagttcagtactttcagtcctagtctggcgctcaacattatacagaatcggaatatgggcaagcctgcccaacccgcactaagccgtgaggaactggaggcgctcttcctgccatatgatcttaagcgtttggaaatgtattcaagaaacatggtagattaccatttgattatggatatgattcctgccatttcgcggatctactttctgaaccagcttggtgatctggccctgagcgccgcccagagcgcgctactacttgggataggacttcagcacaaatccgtcgaccagctcgaaaaggaaatcgaattgccatctggccagctgatgggcctatttaacagaattatcaggaaggtggtgaagttgttcaacgaggttcaagagaaagccatcgaagaacagatggtcgctgctaaggacgtcgtgatggaaccgacgatgaaaacgcttagtgacgaccttgacgaagccgcaaaggaattccaggaaaagcacaaaaaggaggtgggtaaactcaagtctatggacctgagcgagtatatcatcaggggcgatgacgaggaatggaacgaggtcctgaacaaggcaggccccaacgcatccattatatccctgaaatcagacaagaagcgcaaactggaggccaagcaagaaccaaagcagtccaaaaagcttaaaaatagggaaacaaagaacaaaaaagatatgaaactcaagcggaagaagtag

SEQ ID NO: 312573 - DNA, 4002 bp, Artificial Sequence
  derived and/or modified sequence
aatgcgcttgcgcacgtgctgtctaccagttcctgagagggacgcgtgccgcggagccaggcttactacgtgacccggacaccaggcatacgctaggggcagtcagctgtgccttctctttcggagttgttccgtgctcccacgtgcttccccttctccactggctgggatcccccgggctcggggcgcagtaataatttttcaccatgcatcggaaaaaggtggataaccgaatccggattctcattgagaatggagtagctgagcggcaaagatctctctttgttgtagttggggatcgaggaaaagatcaggtggtaatacttcatcacatgttatccaaagcaactgtgaaggctcggccttcagtgctgtggtgttataagaaagagctggggtttagcagtcaccggaagaaaagaatgcgacagctgcagaagaaaataaagaatggaacactgaacataaagcaggacgacccctttgaactcttcatagcagccacaaacattcgctactgctactacaacgagacccacaagatcctgggcaataccttcggcatgtgtgtgctgcaggattttgaagccttaactccaaacttgctggccaggactgtagaaacagtggaaggtggtgggctagtggtcatcctcctacggaccatgaactcactcaagcaattgtacacagtgactatggatgtgcattccaggtacagaactgaggcccatcaggatgtggtgggaagatttaatgaaaggtttattctgtctctggcctcttgtaagaagtgtctcgtcattgatgaccagctcaacatcctgcccatctcctcccacgttgccaccatggaggccctgcctccccagactccggatgagagtcttggtccttctgatctggagctgagggagttgaaggagagcttgcaggacacccagcctgtgggtgtgttggtggactgctgtaagactctagaccaggccaaagctgtcttgaaatttatcgagggcatctctgaaaagaccctgaggagtactgttgcactcacagctgctcgaggacggggaaaatctgcagccctgggattggcgattgctggggcggtggcatttgggtactccaatatctttgttacctccccaagccctgataacctccatactctgtttgaatttgtatttaaaggatttgatgctctgcaatatcaggaacatctggattatgagattatccagtctctaaatcctgaatttaacaaagcagtgatcagagtgaatgtatttcgagaacacaggcagactattcagtatatacatcctgcagatgctgtgaagctgggccaggctgaactagttgtgattgatgaagctgccgccatccccctccccttggtgaagagcctacttggcccctaccttgttttcatggcatccaccatcaatggctatgagggcactggccggtcactgtccctcaagctaattcagcagctccgtcaacagagcgcccagagccaggtcagcaccactgctgagaataagaccacgacgacagccagattggcatcagcgcggacactgtatgaggtttccctccaggagtcaatccgatacgcccctggggatgcagtggagaagtggctgaatgacttgctgtgcctggattgcctcaacatcactcggatagtctcaggctgccccttgcctgaagcttgtgaactgtactatgttaatagagataccctcttttgctaccacaaggcctctgaagttttcctccaacggcttatggccctctacgtggcttctcactacaagaactctcccaatgatctccagatgctctccgatgcacctgctcaccatctcttctgccttctgcctcccgtgccccccacccagaatgcccttccagaagtgcttgctgttatccaggtgtgccttgaaggggagatttctcgccagtccatcttgaacagtctgtctcgaggcaagaaggcttcaggggacctgattccatggacagtgtcagaacagttccaagatccagactttggtggtctgtctggtggaagggtcgttcgcattgctgttcacccagattatcaagggatgggctatggcagccgtgctctgcagctgctgcagatgtactatgaaggcaggtttccttgtctggaggaaaaggtccttgagacaccacaggaaattcacaccgtaagcagcgaggctgtcagcttgttggaagaggtcatcactccccggaaggacctgcctcctttactcctcaaattgaatgagaggcctgccgaacgcctggattacctgggtgtttcctatggcttgacccccaggctcctcaagttctggaaacgagctggatttgttcctgtttatctgagacagaccccgaatgacctgaccggagagcactcgtgcatcatgctgaagacgctcactgatgaggatgaggctgaccagggaggctggcttgcagccttctggaaagatttccgacggcggttcctagccttgctctcctaccagttcagtaccttctctccttccctggctctgaacatcattcagaacaggaacatggggaagccagcccagcctgccctgagccgggaggagctggaagcactcttcctcccctatgacctgaagcggctggagatgtattcacggaatatggtggactatcacctcatcatggacatgatcccggccatctctcgcatctatttcctgaaccagctgggggacctggccctgtctgcggctcagtcggctcttctcttggggattggcctgcagcataagtctgtggaccagctggaaaaggagattgagctgccctcgggccagttgatgggacttttcaaccggatcatccgcaaagttgtgaagctatttaatgaagttcaggaaaaggccattgaggagcagatggtggcagcgaaggatgtggtcatggagcccacgatgaagaccctcagtgacgacctagatgaagcagcaaaggaatttcaggagaaacacaagaaggaagtagggaagctgaagagcatggacctctctgaatacataatccgtggggacgatgaagagtggaatgaagttttgaacaaagctgggccgaacgcctcgatcatcagcctgaaaagtgacaagaaaaggaagttagaggccaaacaagaacccaaacagagcaagaagttgaagaacagagagacaaagaacaaaaaagatatgaaactgaagcggaagaaatagtgaagagaaactcgggcatctgtgtttgatcatgggaagatactctcactaactgaaccctctctggctggactgttaaaagcaacgagaggccccggcacacctggaagctggccgcgaattcggcctctgggcctgtgtgtctgtgagctcaacctggctaaaggcagagtcactcccaaatgggtctctttagaacttgatggctgggcactgccatctctagaattgccacgagtctctctcttcctgcccagtccagggccctcctttcctataagttcatattttgctttgagccagctttttagtctcattcccacacatgtggaagccacgttgcctctcgaccgcctgaggcccttaagtacatcgctttctggtggtgcccaggaggctgctgctgggccgctgggtctctctttgtggacttgtacctggagcaggaggaactccagtccgtcccggcatccatggcagcccgcggttaggtgcgccagggtttgctgatgttgtcttgtgctgttccactcttggctccagcagacccactgtcccagaaaagcctgatcctgtagtttatgtagaatgccacatctgcgtcctcaagacctgtttcatccatttgggaaaagatgttgggaaaggccactttgctcgcaggggtgaggggaaggatagagaatctatttttaataaataacattctagaaagatc

SEQ ID NO: 312574 - DNA, 3436 bp, Artificial Sequence
  derived and/or modified sequence
gtgctgtctaccagttcctgagagggacgcgtgccgcggagccaggcttactacgtgacccggacaccaggcatacgctaggggcagtcagctgtgccttctctttcggagttgttccgtgctcccacgtgcttccccttctccactggctgggatcccccgggctcggggcgcagtcaccggaagaaaagaatgcgacagctgcagaagaaaataaagaatggaacactgaacataaagcaggacgacccctttgaactcttcatagcagccacaaacattcgctactgctactacaacgagacccacaagatcctgggcaataccttcggcatgtgtgtgctgcaggattttgaagccttaactccaaacttgctggccaggactgtagaaacagtggaaggtggtgggctagtggtcatcctcctacggaccatgaactcactcaagcaattgtacacagtgactatggatgtgcattccaggtacagaactgaggcccatcaggatgtggtgggaagatttaatgaaaggtttattctgtctctggcctcttgtaagaagtgtctcgtcattgatgaccagctcaacatcctgcccatctcctcccacgttgccaccatggaggccctgcctccccagactccggatgagagtcttggtccttctgatctggagctgagggagttgaaggagagcttgcaggacacccagcctgtgggtgtgttggtggactgctgtaagactctagaccaggccaaagctgtcttgaaatttatcgagggcatctctgaaaagaccctgaggagtactgttgcactcacagctgctcgaggacggggaaaatctgcagccctgggattggcgattgctggggcggtggcatttgggtactccaatatctttgttacctccccaagccctgataacctccatactctgtttgaatttgtatttaaaggatttgatgctctgcaatatcaggaacatctggattatgagattatccagtctctaaatcctgaatttaacaaagcagtgatcagagtgaatgtatttcgagaacacaggcagactattcagtatatacatcctgcagatgctgtgaagctgggccaggctgaactagttgtgattgatgaagctgccgccatccccctccccttggtgaagagcctacttggcccctaccttgttttcatggcatccaccatcaatggctatgagggcactggccggtcactgtccctcaagctaattcagcagctccgtcaacagagcgcccagagccaggtcagcaccactgctgagaataagaccacgacgacagccagattggcatcagcgcggacactgtatgaggtttccctccaggagtcaatccgatacgcccctggggatgcagtggagaagtggctgaatgacttgctgtgcctggattgcctcaacatcactcggatagtctcaggctgccccttgcctgaagcttgtgaactgtactatgttaatagagataccctcttttgctaccacaaggcctctgaagttttcctccaacggcttatggccctctacgtggcttctcactacaagaactctcccaatgatctccagatgctctccgatgcacctgctcaccatctcttctgccttctgcctcccgtgccccccacccagaatgcccttccagaagtgcttgctgttatccaggtgtgccttgaaggggagatttctcgccagtccatcttgaacagtctgtctcgaggcaagaaggcttcaggggacctgattccatggacagtgtcagaacagttccaagatccagactttggtggtctgtctggtggaagggtcgttcgcattgctgttcacccagattatcaagggatgggctatggcagccgtgctctgcagctgctgcagatgtactatgaaggcaggtttccttgtctggaggaaaaggtccttgagacaccacaggaaattcacaccgtaagcagcgaggctgtcagcttgttggaagaggtcatcactccccggaaggacctgcctcctttactcctcaaattgaatgagaggcctgccgaacgcctggattacctgggtgtttcctatggcttgacccccaggctcctcaagttctggaaacgagctggatttgttcctgtttatctgagacagaccccgaatgacctgaccggagagcactcgtgcatcatgctgaagacgctcactgatgaggatgaggctgaccagggaggctggcttgcagccttctggaaagatttccgacggcggttcctagccttgctctcctaccagttcagtaccttctctccttccctggctctgaacatcattcagaacaggaacatggggaagccagcccagcctgccctgagccgggaggagctggaagcactcttcctcccctatgacctgaagcggctggagatgtattcacggaatatggtggactatcacctcatcatggacatgatcccggccatctctcgcatctatttcctgaaccagctgggggacctggccctgtctgcggctcagtcggctcttctcttggggattggcctgcagcataagtctgtggaccagctggaaaaggagattgagctgccctcgggccagttgatgggacttttcaaccggatcatccgcaaagttgtgaagctatttaatgaagttcaggaaaaggccattgaggagcagatggtggcagcgaaggatgtggtcatggagcccacgatgaagaccctcagtgacgacctagatgaagcagcaaaggaatttcaggagaaacacaagaaggaagtagggaagctgaagagcatggacctctctgaatacataatccgtggggacgatgaagagtggaatgaagttttgaacaaagctgggccgaacgcctcgatcatcagcctgaaaagtgacaagaaaaggaagttagaggccaaacaagaacccaaacagagcaagaagttgaagaacagagagacaaagaacaaaaaagatatgaaactgaagcggaagaaatagtgaagagaaactcgggcatctgtgtttgatcatgggaagatactctcactaactgaaccctctctggctggactgttaaaagcaacgagaggccccggcacacctggaagctggccgcgaattcggcctctgggcctgtgtgtctgtgagctcaacctggctaaaggcagagtcactcccaaatgggtctctttagaacttgatggctgggcactgccatctctagaattgccacgagtctctctcttcctgcccagtccagggccctcctttcctataagttcatattttgctttgagccagctttttagtctcattcccacacatgtggaagccacgttgcctctcgaccgcctgaggcccttaagtacatcgctttctg

SEQ ID NO: 312575 - DNA, 3078 bp, Artificial Sequence
  derived and/or modified sequence
atgcacaggaagaaggtggacaaccgcatccgcatcctgattgaaaatggagtggccgagcggcagaggagcctgtttgtggtggtgggggaccggggcaaggaccaggtggtgatcctgcaccacatgctgagcaaggccaccgtgaaggcccggcccagcgtgctgtggtgctacaagaaggagctgggcttcagcagccacaggaagaagaggatgaggcagctgcagaagaagatcaagaatggcaccctgaacatcaagcaggatgacccctttgagctgttcatcgccgccaccaacatccgctactgctactacaatgagacccacaagatcctgggcaacaccttcggcatgtgtgtgctgcaggactttgaggccctgacccccaacctgctggccaggacagtggagaccgtggagggcggcggcctggtggtgatcctgctgcggaccatgaacagcctgaagcagctgtacacagtgaccatggatgtgcacagccgctacagaacagaggcccaccaggatgtggtgggccgcttcaatgaacgcttcatcctgagcctggccagctgcaagaagtgcctggtgattgatgaccagctgaacatcctgcccatcagcagccacgtggccaccatggaggccctgcccccccagaccccagatgagagcctgggccccagcgacctggagctgcgggagctgaaggagagcctgcaggacacccagcctgtgggcgtgctggtggactgctgcaagaccctggaccaggccaaggctgtgctgaagttcatcgagggcatcagcgagaagaccctgcggagcacagtggccctgacagctgcccggggccggggcaagtctgctgccctgggcctggccatcgccggggctgtggccttcggctacagcaacatctttgtgaccagccccagcccagacaacctgcacaccctgtttgaatttgtgttcaagggctttgatgccctgcagtaccaggagcacctggactatgagatcatccagagcctgaaccctgagttcaacaaggccgtcatccgggtgaatgtgttccgggagcaccggcagaccatccagtacatccacccagcagatgctgtgaagctgggccaggccgagctggtggtgattgatgaggccgccgccatccccctgcccctggtgaagagcctgctgggcccctacctggtgttcatggccagcaccatcaatggctatgagggcaccggccgcagcctgagcctgaagctgatccagcagctgcggcagcagagcgcccagagccaggtgtccaccacagctgagaacaagaccaccaccacagcccggctggccagcgcccggaccctgtatgaggtgtccctgcaggagagcatccgctatgcccctggagatgctgtggagaagtggctgaatgacctgctgtgcctggactgcctgaacatcaccagaattgtgtctggctgccccctgcctgaggcctgtgagctgtactacgtgaacagagacaccctcttctgctaccacaaggccagcgaggtgttcctgcagaggctgatggccctgtatgtggccagccactacaagaacagccccaatgacctgcagatgctgagtgatgccccagcccaccacctgttctgcctgctgccccctgtgccccccacccagaatgccctgcctgaggtgctggccgtcatccaggtgtgcctggagggggagatcagccggcagagcatcctgaacagcctgagccggggcaagaaggccagcggggacctgatcccctggacagtgtctgagcagttccaggaccctgactttggaggcctgagcggcggccgggtggtgagaattgctgtgcacccagactaccagggcatgggctacggcagccgggccctgcagctgctgcagatgtactatgagggccgcttcccctgcctggaggagaaggtgctggagaccccccaggagatccacacagtgtcctctgaggccgtgtccctgctggaggaggtgatcacccccaggaaggacctgccccccctgctgctgaagctgaatgaaagacctgctgagcggctggactacctgggcgtgtcctatggcctgaccccccggctgctgaagttctggaagagagctggctttgtgcctgtgtacctgcggcagaccccaaatgacctgactggagagcacagctgcatcatgctgaagaccctgacagatgaagatgaggccgaccagggcggctggctggccgccttctggaaggacttcagaagacgcttcctggccctgctgagctaccagttcagcaccttcagccccagcctggccctgaacatcatccagaacagaaacatgggcaagccagcccagcctgccctgagccgggaggagctggaggccctcttcctgccctatgacctgaagaggctggagatgtacagcaggaacatggtggactaccacctgatcatggacatgatcccagccatcagccgcatctacttcctgaaccagctgggggacctggccctgtctgctgcccagagcgccctgctgctgggcatcggcctgcagcacaagtctgtggaccagctggagaaggagattgagctgcccagcggccagctgatgggcctcttcaaccgcatcatcaggaaggtggtgaagctgttcaatgaggtgcaggagaaggccatcgaggagcagatggtggccgccaaggatgtggtgatggagcccaccatgaagaccctgagtgatgacctggatgaggccgccaaggagttccaggagaagcacaagaaggaggtgggcaagctgaagtccatggacctgtctgagtacatcatcagaggagatgatgaggagtggaatgaggtgctgaacaaggccggccccaatgccagcatcatcagcctgaagagtgacaagaagaggaagctggaggccaagcaggagcccaagcagagcaagaagctgaagaaccgggagaccaagaacaagaaggacatgaagctgaagaggaagaagtag

SEQ ID NO: 312576 - DNA, 2862 bp, Artificial Sequence
  derived and/or modified sequence
atgaggcagctgcagaagaagatcaagaatggcaccctgaacatcaagcaggatgacccctttgagctgttcatcgccgccaccaacatccgctactgctactacaatgagacccacaagatcctgggcaacaccttcggcatgtgtgtgctgcaggactttgaggccctgacccccaacctgctggccaggacagtggagaccgtggagggcggcggcctggtggtgatcctgctgcggaccatgaacagcctgaagcagctgtacacagtgaccatggatgtgcacagccgctacagaacagaggcccaccaggatgtggtgggccgcttcaatgaacgcttcatcctgagcctggccagctgcaagaagtgcctggtgattgatgaccagctgaacatcctgcccatcagcagccacgtggccaccatggaggccctgcccccccagaccccagatgagagcctgggccccagcgacctggagctgcgggagctgaaggagagcctgcaggacacccagcctgtgggcgtgctggtggactgctgcaagaccctggaccaggccaaggctgtgctgaagttcatcgagggcatcagcgagaagaccctgcggagcacagtggccctgacagctgcccggggccggggcaagtctgctgccctgggcctggccatcgccggggctgtggccttcggctacagcaacatctttgtgaccagccccagcccagacaacctgcacaccctgtttgaatttgtgttcaagggctttgatgccctgcagtaccaggagcacctggactatgagatcatccagagcctgaaccctgagttcaacaaggccgtcatccgggtgaatgtgttccgggagcaccggcagaccatccagtacatccacccagcagatgctgtgaagctgggccaggccgagctggtggtgattgatgaggccgccgccatccccctgcccctggtgaagagcctgctgggcccctacctggtgttcatggccagcaccatcaatggctatgagggcaccggccgcagcctgagcctgaagctgatccagcagctgcggcagcagagcgcccagagccaggtgtccaccacagctgagaacaagaccaccaccacagcccggctggccagcgcccggaccctgtatgaggtgtccctgcaggagagcatccgctatgcccctggagatgctgtggagaagtggctgaatgacctgctgtgcctggactgcctgaacatcaccagaattgtgtctggctgccccctgcctgaggcctgtgagctgtactacgtgaacagagacaccctcttctgctaccacaaggccagcgaggtgttcctgcagaggctgatggccctgtatgtggccagccactacaagaacagccccaatgacctgcagatgctgagtgatgccccagcccaccacctgttctgcctgctgccccctgtgccccccacccagaatgccctgcctgaggtgctggccgtcatccaggtgtgcctggagggggagatcagccggcagagcatcctgaacagcctgagccggggcaagaaggccagcggggacctgatcccctggacagtgtctgagcagttccaggaccctgactttggaggcctgagcggcggccgggtggtgagaattgctgtgcacccagactaccagggcatgggctacggcagccgggccctgcagctgctgcagatgtactatgagggccgcttcccctgcctggaggagaaggtgctggagaccccccaggagatccacacagtgtcctctgaggccgtgtccctgctggaggaggtgatcacccccaggaaggacctgccccccctgctgctgaagctgaatgaaagacctgctgagcggctggactacctgggcgtgtcctatggcctgaccccccggctgctgaagttctggaagagagctggctttgtgcctgtgtacctgcggcagaccccaaatgacctgactggagagcacagctgcatcatgctgaagaccctgacagatgaagatgaggccgaccagggcggctggctggccgccttctggaaggacttcagaagacgcttcctggccctgctgagctaccagttcagcaccttcagccccagcctggccctgaacatcatccagaacagaaacatgggcaagccagcccagcctgccctgagccgggaggagctggaggccctcttcctgccctatgacctgaagaggctggagatgtacagcaggaacatggtggactaccacctgatcatggacatgatcccagccatcagccgcatctacttcctgaaccagctgggggacctggccctgtctgctgcccagagcgccctgctgctgggcatcggcctgcagcacaagtctgtggaccagctggagaaggagattgagctgcccagcggccagctgatgggcctcttcaaccgcatcatcaggaaggtggtgaagctgttcaatgaggtgcaggagaaggccatcgaggagcagatggtggccgccaaggatgtggtgatggagcccaccatgaagaccctgagtgatgacctggatgaggccgccaaggagttccaggagaagcacaagaaggaggtgggcaagctgaagtccatggacctgtctgagtacatcatcagaggagatgatgaggagtggaatgaggtgctgaacaaggccggccccaatgccagcatcatcagcctgaagagtgacaagaagaggaagctggaggccaagcaggagcccaagcagagcaagaagctgaagaaccgggagaccaagaacaagaaggacatgaagctgaagaggaagaagtag

SEQ ID NO: 312577 - DNA, 3078 bp, Artificial Sequence
  derived and/or modified sequence
atgcaccggaagaaggtggacaaccggatccggatcctgatcgagaacggcgtggcagagcgccagaggagtttgtttgtggtagtgggagatcgaggtaaagatcaggtggtgatccttcaccacatgctgagcaaggccacggtgaaggctcgaccttccgtgctgtggtgctacaaaaaagaactgggcttctcaagccacaggaagaaaaggatgagacagctccagaagaaaatcaaaaacggcactcttaatattaagcaagacgacccattcgaactgtttatcgcagcaacgaatatcagatactgttattacaatgagactcacaaaatcctaggtaacacctttggcatgtgtgtgctacaggacttcgaggctctgacacctaatcttcttgctcgcacagtagagactgtggagggaggcggtttggtggttattctgctccgcacaatgaatagcctgaagcaactttacactgtcactatggacgttcattcaaggtaccgcacagaagcacatcaagacgttgtcggacgcttcaacgagaggtttatcctcagccttgcgtcatgtaagaagtgcctggttattgatgaccagttaaatatacttcctatttcttcccatgtggccacgatggaagccttaccacctcagaccccggacgagagtttaggtccatccgatttggagctgagggaactgaaagagtcgctgcaagatactcagcccgtgggcgtgttggttgattgctgtaaaacactggatcaggcaaaagccgtcctcaaatttattgaaggtattagcgagaaaactctgcggagtacagtggcgctcactgctgcaagaggacggggcaaatctgccgccctgggcctagctatcgctggagcagtcgcttttggctattccaacatattcgtcacatccccctctccggataatctccatacgttattcgagtttgtgtttaagggctttgacgcactgcagtatcaagagcatctagactacgagattattcagtccctgaacccggaattcaataaggccgtgatccgggttaatgtgtttcgggagcatcggcaaactattcagtatattcatcccgctgacgctgtgaagctggggcaggccgagctggtggtcattgatgaagccgccgcaatccctctgccactcgtgaagtccctactgggtccttatttggtgtttatggctagcactataaacggctacgaaggaaccggacggtctctgtctctgaagttgatacaacagctccgacagcaatccgctcagtctcaggtcagcacgacagccgagaacaaaactacgaccactgcacggttagcttcagcacgcacgctctatgaggtgtcccttcaggaatcgatcagatacgccccaggggatgcagtagaaaagtggttgaatgatcttctttgtctcgactgcctgaacatcacgaggattgtgtctggatgtcccttacccgaagcgtgtgagctgtattacgtgaatcgggacaccctcttctgctaccacaaggcttccgaggtcttcctccagagactgatggccctctatgtcgcgtcacactataaaaactcccctaacgatcttcagatgctgtcagacgctcctgcacatcatctgttctgcttgctgccaccagtcccaccaacccagaatgctctccctgaagtgctcgctgtaatccaggtctgcctcgagggtgagatttctcgccagtccattttgaacagcctgtccagagggaagaaggcatctggggaccttataccatggaccgtgtctgagcaattccaggatcctgatttcggtgggttgagcggtgggcgggtggtcagaatcgcggttcacccagactatcagggtatgggctatggctctcgggccctgcagctcttgcagatgtactacgaaggacgatttccatgtttggaggaaaaggtgctcgaaactccgcaggaaatccacacggtgtcatccgaagccgtaagtttactcgaggaggttattacccccagaaaggatctgccacctctgctgcttaaacttaacgaaagacctgccgagcgcctagactaccttggggttagctatggccttacaccccggttgctgaaattctggaagcgggccggttttgtccccgtctatttaagacaaactcctaacgacttaacaggagaacactcttgtattatgctcaagactttgaccgatgaggacgaagctgaccagggagggtggctggccgctttctggaaggattttcggcgcaggtttctcgcattgctgtcttaccagttttcgacattctccccatctctcgccttgaacataattcaaaatcggaacatggggaagcccgcacaacctgccctatctagggaggagttagaggccctatttcttccatacgatctcaaaagacttgagatgtacagccgcaatatggtcgattaccacctcattatggacatgatacccgctatctcgagaatctacttccttaatcagctgggcgatttggctctgagcgctgctcagtctgctctgctgctgggaatcggcctgcagcataagtccgtagaccagctcgagaaggaaatcgaactgccgagtgggcagcttatggggctatttaacagaattattcgcaaagtagttaagctatttaatgaggttcaggagaaggcaatcgaggaacagatggtggccgccaaagatgtagttatggagcctacaatgaaaacattgtctgacgacctggacgaggcggcaaaggaatttcaagagaaacataaaaaggaggtcggtaaactaaagtccatggacctaagcgaatatatcataaggggcgacgacgaggagtggaatgaagtcctgaacaaagccggtcctaacgcctcaatcattagcctgaaaagcgataagaagagaaaattagaggctaagcaggaaccaaagcagtccaagaagttgaaaaacagagaaaccaagaataagaaagatatgaagttgaagcggaaaaaatag

SEQ ID NO: 312578 - DNA, 2862 bp, Artificial Sequence
  derived and/or modified sequence
atgcggcagctgcagaagaagatcaagaacggcaccctgaacatcaaacaggacgatccttttgagctgtttattgcagcaacaaatatcaggtactgctattataatgagacgcataaaattctgggaaataccttcggaatgtgtgtactgcaggattttgaagcgctcacaccaaatctgctggcccggacagtagagacggtggagggaggcgggctggtggtgatccttcttaggacgatgaattcgctcaaacaactgtatacagttaccatggatgtgcattcccggtacaggacagaagcacaccaggacgtggtcggacggttcaatgagcgcttcattctgtccctcgcaagttgtaaaaaatgcttggtgatagatgaccaattaaacattctgcctatctcaagccacgttgctactatggaagccctgccacctcagaccccggacgaatcccttggacctagtgacctggagctgagggaactgaaggagtccttgcaggacactcagcctgttggcgtacttgtcgattgttgcaagaccctcgaccaggctaaggctgtcctaaagtttatcgaagggatcagcgaaaaaaccttgaggtctaccgttgcgctgactgccgcaaggggcagaggcaagtccgcagctctcggtctggcgatcgctggagcagtggccttcggctactctaatatatttgtgaccagtccaagtcccgacaatcttcacaccctctttgaatttgtgtttaagggattcgatgctctccaataccaggaacacctcgattatgaaattatccagtctctgaaccccgaatttaacaaagcagtgatccgggttaacgttttcagggagcaccggcagactatccagtatattcacccagcagatgctgttaagctcggtcaagccgaactggtggtaatagacgaagctgcagctatcccattgccgttggtcaagagtcttctcgggccatacctggtgtttatggcatcaaccataaacgggtatgaaggaacaggtcggagcctgagcctgaagctgatccagcagctgcggcagcagagcgcccagtcccaagtgtctacaacagctgagaataagaccacaacaaccgctcgcttggcatcagcccggacgctgtacgaggtgtcacttcaggagtcaataagatacgctcccggagacgccgtggagaagtggctgaacgatctgttgtgtctcgactgcctgaatattacccgtattgtgagtgggtgcccactccccgaagcctgcgaactttactatgttaatagagacaccctgttttgctaccataaagcatccgaagtcttcctccagagactaatggccctgtatgtggccagccattacaaaaactcaccaaacgacctgcagatgctttctgacgcacccgcccaccacttattttgccttctaccacccgtgccacctacccaaaatgccttgcccgaagtgctggccgttattcaggtttgtctggagggcgagatttcgaggcagtctattcttaattctctctcacgggggaaaaaggcgtccggggatctgattccttggactgtctccgaacagttccaggaccccgattttgggggactgtccggcggacgcgtggttcggatcgctgttcatccagattaccaaggaatgggatacgggtctcgcgctttacagctgcttcagatgtattatgagggaagatttccatgcctggaagaaaaggttctcgaaaccccccaggaaattcacaccgtaagctccgaagctgtctccctcctagaggaagtcattactcccagaaaagacctaccccccttgctcctgaaactcaatgagcggccagcagagaggttagattacctgggagtgtcatatggcctcaccccccggcttttaaagttttggaagcgcgctgggtttgtgcccgtctatctgcggcaaacacctaacgatctcaccggagaacacagctgcattatgcttaagaccctgacagacgaggatgaggcagaccaggggggctggctcgcagccttttggaaggattttcgacgcagatttctggcacttctttcttatcaatttagcaccttcagcccgagcttggctttgaacatcatacaaaaccgcaacatggggaaaccagctcaacccgccttgtcccgggaagagttggaagcgctctttcttccttatgatcttaagaggttagaaatgtactctcgaaatatggttgattatcacctgataatggatatgatcccggccattagccggatctattttctcaatcaactgggggacctagcattgagtgctgcccagtcagctttgctcctggggatcgggcttcaacacaaaagcgtggatcagttagaaaaagagatcgagcttcccagcggtcaattgatgggcctcttcaacagaatcattagaaaggtcgtgaaactgttcaacgaggtgcaggaaaaagctattgaggagcaaatggttgcggcaaaagacgtcgtcatggagcctactatgaagaccctcagtgatgatctcgatgaggccgcaaaagagtttcaggaaaaacataagaaagaggtgggtaagctgaaaagtatggatctaagcgagtatatcattaggggtgacgacgaggaatggaacgaggtgctgaataaagcaggtcccaacgcaagcatcatttccctgaagtcagacaaaaagcgcaaacttgaggctaaacaggagcctaaacaaagcaaaaaactgaaaaatagagagaccaaaaacaagaaagacatgaagctgaagaggaaaaagtag

SEQ ID NO: 312579 - DNA, 3078 bp, Artificial Sequence
  derived and/or modified sequence
atgcatagaaagaaagtggacaaccgcatacggatcctgattgaaaacggcgtcgccgagaggcagcgatcgctattcgtggttgtcggtgaccgtggcaaggatcaggttgtgattctgcaccacatgctgagcaaagctacagtcaaggctagacccagtgtcttgtggtgttacaagaaggagttgggattctcttcccaccgcaagaaacgaatgcgtcagctccaaaagaagatcaagaatggaacactcaatattaagcaggacgacccctttgagttatttatagccgctaccaacatccgctactgttattacaacgagacccataagatacttggcaacaccttcggaatgtgtgtgctgcaggatttcgaggcattaactcctaacctgctggcgcgtacggtggagacagtagaaggtggcggactggtggtcatactactccggacgatgaacagcttgaagcaactgtataccgtgaccatggacgttcacagtagatataggactgaggcacaccaggacgtcgtcgggaggttcaatgagagatttatcctgtctctagcgagctgcaaaaagtgcctcgtgatcgatgatcagctcaacatcctgcccatctcaagtcacgtcgctactatggaggccctcccacctcagacccctgacgagagtcttggcccatccgatttagaattgagggagcttaaggaatctctgcaagacactcaacctgtcggcgtgctcgtggactgttgcaaaacactggatcaggcgaaagcagttctgaagttcatcgagggcatttcagagaagactcttcgatccaccgtggccctgacagcagccagaggacgcggtaagtcagcagcacttggattggctattgctggcgctgtagcgtttggctacagcaatatctttgtgacctcaccaagccctgacaacttgcacaccctgttcgagttcgtttttaaagggttcgacgcgctacagtaccaggagcacttagattacgaaatcattcagtctcttaatcctgagttcaataaggcggtgattagagtcaacgttttccgcgagcacaggcagactatacaatatatccaccccgctgatgctgtcaaactcggacaggccgagctggtggtgattgatgaggcagcagcgatccctctccctttagtaaagagcctattaggaccttacttggtgttcatggcatctacaatcaacggctacgaaggaaccggtcgatccctgtctctgaagctcattcagcagttgagacagcagagcgctcaatctcaagtgagtacaacagctgaaaacaagacaactacaaccgcgcgtcttgcttccgccagaactttgtacgaagtaagtctgcaggagagcattcggtacgcaccaggcgacgcagtcgagaaatggctgaacgacctcctatgtctcgactgtctcaacatcacacgaattgtctcaggctgtcccctcccagaagcgtgtgagctgtactacgtcaatcgggacacactcttttgctaccacaaggccagcgaggtgtttctgcaaaggctaatggcactctacgtagcctcacactataaaaactctcctaatgatctccagatgctatctgacgcccctgcacatcatctgttttgtcttctcccgcctgtgcctccaacccagaacgctctccccgaggtgttagccgtcattcaggtgtgtctggaaggtgaaatcagtagacaaagtattctcaatagcctgagccgtggaaagaaggcttccggtgatctcattccctggaccgtgagcgagcagtttcaagaccctgactttgggggtctttctggaggcagggtggttcgtatcgcagttcaccctgattaccaaggtatgggttacggaagtcgagcgctgcagctcctgcagatgtattacgaaggcaggtttccttgcctggaggagaaggtccttgaaaccccccaggaaatccatactgttagttctgaggctgttagcttacttgaggaagtaatcactcctaggaaggacttgccaccactcctgctgaagctgaacgaacgaccggcagagaggttggactatctgggcgtgtcctatgggctgaccccacgtctgctgaagttttggaagcgcgctggcttcgtccctgtgtacctgcgccagaccccaaatgacctgacaggtgaacacagttgtattatgctgaagacacttactgatgaagatgaagccgatcagggtggatggctcgcagccttttggaaagactttagaaggcgattccttgcccttctcagttaccagttctcaacattttctccgtcgctcgcactgaatataatccagaatcgcaacatgggaaaacccgctcagccggcactgagccgggaggaactggaagcgcttttcctgccgtatgaccttaagcggctcgagatgtatagccggaacatggtggattaccacctcattatggacatgatcccagcaataagtcgcatttatttcctgaaccaactcggggacctggctctgagcgccgctcagtcagcgctccttcttggtataggcctgcagcataaatcagtcgaccagttagaaaaggagatagaactgccttctggtcagttgatggggctgttcaatagaatcattcggaaggtggtgaagctgtttaatgaagtccaagagaaggccatagaagaacagatggtcgctgctaaggatgtggtaatggaaccgaccatgaaaacgttatctgacgacttggacgaggccgctaaggaatttcaagaaaagcacaagaaagaggtcggaaaactcaagtccatggacctgtccgagtacatcattcggggagatgacgaggaatggaacgaagtgcttaacaaagccggaccaaatgccagcattatttcactcaagtcggataaaaaaagaaagttggaggccaaacaggaacctaagcagagtaaaaagctgaagaaccgagaaacaaaaaacaaaaaagatatgaagcttaagagaaagaagtag

SEQ ID NO: 312580 - DNA, 2862 bp, Artificial Sequence
  derived and/or modified sequence
atgcgccagctgcagaaaaaaataaagaatggaaccctcaatatcaagcaggacgatccatttgagttgttcatcgctgctacaaatatccgctattgttattataacgagactcacaagatactcggcaatacctttggcatgtgtgtcttacaggacttcgaagcccttacaccaaatcttctggcgagaacggtcgaaaccgtggagggaggaggattagtggtgatccttttaagaacaatgaattccttgaaacagctgtacacggtcaccatggatgtacacagtagataccgtactgaagcacaccaggacgttgtcgggagatttaacgagcggtttattctgtctttagcgtcctgcaaaaaatgtttagtgatcgacgaccagttaaacattctccctatctcatctcatgtggcaaccatggaggccctcccgccacagacaccggacgagagcctgggtccaagcgacctcgagttaagggaactgaaggaatctttgcaggatactcagccagtgggcgtattggtggactgttgcaagacgttggatcaggccaaagctgtgctcaaattcatcgaaggtatctcagaaaagacccttaggagtactgttgccttaactgccgctcgaggtcgtggcaaatccgccgctctgggactggccatcgccggtgcagttgctttcggatactccaacattttcgtgactagtccaagccctgataacctacacacccttttcgagtttgtctttaaagggtttgacgccctccaataccaggagcacctcgactacgaaatcattcaatccttaaatcctgagtttaacaaggccgtgatcagagtaaatgtgttccgggagcatcgtcagacaatacagtatatccaccctgctgacgccgttaaattgggccaggctgagctggttgtcattgacgaggccgcagccattccgctgcctttggtgaaatctttgcttggcccttacctggtatttatggcctccacaatcaacgggtacgaagggacaggcagatcactgagtcttaagctcatccagcagcttcggcagcagtctgcccagtcccaggttagtactaccgcggagaataagaccacaactaccgccaggctggccagcgccagaactctatacgaagtcagtctacaggagagtatccgctatgccccaggcgatgctgtcgagaagtggttgaatgacctgctgtgcctggattgtctgaatataactcggattgtgagcggctgtccccttccggaggcatgcgagctttattacgttaatagagatacattgttctgttatcataaagcatcggaggtattcttgcagaggctgatggctctctatgtggccagccactacaaaaactcaccaaacgatctgcagatgctgtccgacgcaccagcgcatcatctcttttgcctgttgccaccggtgccgcctactcagaatgctcttcctgaggtcctggcggtaattcaggtctgccttgaaggagaaattagcaggcaaagtatcctgaattcgctgtctcgagggaagaaggcctccggggatctaattccatggacggtgagcgagcagtttcaggaccctgactttggtggattaagtggaggacgtgtggtccggatcgccgttcacccagattaccaggggatgggttatgggagccgcgctctccagctgctgcagatgtactatgaaggtcgatttccgtgtctggaggagaaggtactggaaacgccccaggaaatccacacagtgtcttctgaagccgtgagtttacttgaggaggtcatcacacccaggaaggacttgccacctcttctcctgaaactgaacgaaaggccagctgagcgtctcgactatttaggcgtgagctatggattgacccccaggttactaaagttttggaagagagccggattcgtgccagtctatctgaggcagacgcccaatgatctgaccggagagcatagctgcattatgttaaaaactctcacagacgaagatgaggccgaccagggcggttggcttgcagctttctggaaggatttcaggagacgttttctggccctgttgagctatcagttctcgacgttcagccctagtctagctcttaatattattcagaaccggaatatgggaaagcctgcacagcccgctctgtctcgcgaagagctggaagcattgtttctcccttacgatctaaagaggttggaaatgtattccaggaacatggtggactatcacctgattatggacatgattcccgctatttcccggatctattttctgaatcagttgggggacctcgccctaagcgctgcccagagtgctcttttattaggaattggcctccaacacaagtccgtggaccaactcgagaaagagattgagctcccttctggtcagcttatggggctgtttaaccgaataatcagaaaagtggtgaaactgtttaacgaggttcaggagaaggcaattgaggagcagatggtcgcagctaaagacgttgtgatggagccaaccatgaaaacactgtccgacgacctggatgaggccgcaaaagagtttcaagagaaacacaaaaaggaagtagggaagctcaaaagtatggacttatcagaatacatcatccgcggtgatgatgaagaatggaatgaggttctgaataaagcgggacccaatgcaagcattatcagcctgaagagtgacaaaaagcgcaagctggaagccaaacaagagccaaagcagtctaaaaagttgaagaaccgagaaactaagaataagaaagacatgaagctgaagagaaagaagtag

SEQ ID NO: 312581 - DNA, 3078 bp, Artificial Sequence
  derived and/or modified sequence
atgcacagaaagaaggtggacaacagaatcagaatcctgatcgagaacggcgtggccgagagacagagaagcctgttcgtggtggtgggcgacagaggcaaggaccaggtggtgatcctgcaccacatgctgagcaaggccaccgtgaaggccagacccagcgtgctgtggtgctacaagaaggagctgggcttcagcagccacagaaagaagagaatgagacagctgcagaagaagatcaagaacggcaccctgaacatcaagcaggacgaccccttcgagctgttcatcgccgccaccaacatcagatactgctactacaacgagacccacaagatcctgggcaacaccttcggcatgtgcgtgctgcaggacttcgaggccctgacccccaacctgctggccagaaccgtggagaccgtggagggcggcggcctggtggtgatcctgctgagaaccatgaacagcctgaagcagctgtacaccgtgaccatggacgtgcacagcagatacagaaccgaggcccaccaggacgtggtgggcagattcaacgagagattcatcctgagcctggccagctgcaagaagtgcctggtgatcgacgaccagctgaacatcctgcccatcagcagccacgtggccaccatggaggccctgcccccccagacccccgacgagagcctgggccccagcgacctggagctgagagagctgaaggagagcctgcaggacacccagcccgtgggcgtgctggtggactgctgcaagaccctggaccaggccaaggccgtgctgaagttcatcgagggcatcagcgagaagaccctgagaagcaccgtggccctgaccgccgccagaggcagaggcaagagcgccgccctgggcctggccatcgccggcgccgtggccttcggctacagcaacatcttcgtgaccagccccagccccgacaacctgcacaccctgttcgagttcgtgttcaagggcttcgacgccctgcagtaccaggagcacctggactacgagatcatccagagcctgaaccccgagttcaacaaggccgtgatcagagtgaacgtgttcagagagcacagacagaccatccagtacatccaccccgccgacgccgtgaagctgggccaggccgagctggtggtgatcgacgaggccgccgccatccccctgcccctggtgaagagcctgctgggcccctacctggtgttcatggccagcaccatcaacggctacgagggcaccggcagaagcctgagcctgaagctgatccagcagctgagacagcagagcgcccagagccaggtgagcaccaccgccgagaacaagaccaccaccaccgccagactggccagcgccagaaccctgtacgaggtgagcctgcaggagagcatcagatacgcccccggcgacgccgtggagaagtggctgaacgacctgctgtgcctggactgcctgaacatcaccagaatcgtgagcggctgccccctgcccgaggcctgcgagctgtactacgtgaacagagacaccctgttctgctaccacaaggccagcgaggtgttcctgcagagactgatggccctgtacgtggccagccactacaagaacagccccaacgacctgcagatgctgagcgacgcccccgcccaccacctgttctgcctgctgccccccgtgccccccacccagaacgccctgcccgaggtgctggccgtgatccaggtgtgcctggagggcgagatcagcagacagagcatcctgaacagcctgagcagaggcaagaaggccagcggcgacctgatcccctggaccgtgagcgagcagttccaggaccccgacttcggcggcctgagcggcggcagagtggtgagaatcgccgtgcaccccgactaccagggcatgggctacggcagcagagccctgcagctgctgcagatgtactacgagggcagattcccctgcctggaggagaaggtgctggagaccccccaggagatccacaccgtgagcagcgaggccgtgagcctgctggaggaggtgatcacccccagaaaggacctgccccccctgctgctgaagctgaacgagagacccgccgagagactggactacctgggcgtgagctacggcctgacccccagactgctgaagttctggaagagagccggcttcgtgcccgtgtacctgagacagacccccaacgacctgaccggcgagcacagctgcatcatgctgaagaccctgaccgacgaggacgaggccgaccagggcggctggctggccgccttctggaaggacttcagaagaagattcctggccctgctgagctaccagttcagcaccttcagccccagcctggccctgaacatcatccagaacagaaacatgggcaagcccgcccagcccgccctgagcagagaggagctggaggccctgttcctgccctacgacctgaagagactggagatgtacagcagaaacatggtggactaccacctgatcatggacatgatccccgccatcagcagaatctacttcctgaaccagctgggcgacctggccctgagcgccgcccagagcgccctgctgctgggcatcggcctgcagcacaagagcgtggaccagctggagaaggagatcgagctgcccagcggccagctgatgggcctgttcaacagaatcatcagaaaggtggtgaagctgttcaacgaggtgcaggagaaggccatcgaggagcagatggtggccgccaaggacgtggtgatggagcccaccatgaagaccctgagcgacgacctggacgaggccgccaaggagttccaggagaagcacaagaaggaggtgggcaagctgaagagcatggacctgagcgagtacatcatcagaggcgacgacgaggagtggaacgaggtgctgaacaaggccggccccaacgccagcatcatcagcctgaagagcgacaagaagagaaagctggaggccaagcaggagcccaagcagagcaagaagctgaagaacagagagaccaagaacaagaaggacatgaagctgaagagaaagaagtag

SEQ ID NO: 312582 - DNA, 2862 bp, Artificial Sequence
  derived and/or modified sequence
atgagacagctgcagaagaagatcaagaacggcaccctgaacatcaagcaggacgaccccttcgagctgttcatcgccgccaccaacatcagatactgctactacaacgagacccacaagatcctgggcaacaccttcggcatgtgcgtgctgcaggacttcgaggccctgacccccaacctgctggccagaaccgtggagaccgtggagggcggcggcctggtggtgatcctgctgagaaccatgaacagcctgaagcagctgtacaccgtgaccatggacgtgcacagcagatacagaaccgaggcccaccaggacgtggtgggcagattcaacgagagattcatcctgagcctggccagctgcaagaagtgcctggtgatcgacgaccagctgaacatcctgcccatcagcagccacgtggccaccatggaggccctgcccccccagacccccgacgagagcctgggccccagcgacctggagctgagagagctgaaggagagcctgcaggacacccagcccgtgggcgtgctggtggactgctgcaagaccctggaccaggccaaggccgtgctgaagttcatcgagggcatcagcgagaagaccctgagaagcaccgtggccctgaccgccgccagaggcagaggcaagagcgccgccctgggcctggccatcgccggcgccgtggccttcggctacagcaacatcttcgtgaccagccccagccccgacaacctgcacaccctgttcgagttcgtgttcaagggcttcgacgccctgcagtaccaggagcacctggactacgagatcatccagagcctgaaccccgagttcaacaaggccgtgatcagagtgaacgtgttcagagagcacagacagaccatccagtacatccaccccgccgacgccgtgaagctgggccaggccgagctggtggtgatcgacgaggccgccgccatccccctgcccctggtgaagagcctgctgggcccctacctggtgttcatggccagcaccatcaacggctacgagggcaccggcagaagcctgagcctgaagctgatccagcagctgagacagcagagcgcccagagccaggtgagcaccaccgccgagaacaagaccaccaccaccgccagactggccagcgccagaaccctgtacgaggtgagcctgcaggagagcatcagatacgcccccggcgacgccgtggagaagtggctgaacgacctgctgtgcctggactgcctgaacatcaccagaatcgtgagcggctgccccctgcccgaggcctgcgagctgtactacgtgaacagagacaccctgttctgctaccacaaggccagcgaggtgttcctgcagagactgatggccctgtacgtggccagccactacaagaacagccccaacgacctgcagatgctgagcgacgcccccgcccaccacctgttctgcctgctgccccccgtgccccccacccagaacgccctgcccgaggtgctggccgtgatccaggtgtgcctggagggcgagatcagcagacagagcatcctgaacagcctgagcagaggcaagaaggccagcggcgacctgatcccctggaccgtgagcgagcagttccaggaccccgacttcggcggcctgagcggcggcagagtggtgagaatcgccgtgcaccccgactaccagggcatgggctacggcagcagagccctgcagctgctgcagatgtactacgagggcagattcccctgcctggaggagaaggtgctggagaccccccaggagatccacaccgtgagcagcgaggccgtgagcctgctggaggaggtgatcacccccagaaaggacctgccccccctgctgctgaagctgaacgagagacccgccgagagactggactacctgggcgtgagctacggcctgacccccagactgctgaagttctggaagagagccggcttcgtgcccgtgtacctgagacagacccccaacgacctgaccggcgagcacagctgcatcatgctgaagaccctgaccgacgaggacgaggccgaccagggcggctggctggccgccttctggaaggacttcagaagaagattcctggccctgctgagctaccagttcagcaccttcagccccagcctggccctgaacatcatccagaacagaaacatgggcaagcccgcccagcccgccctgagcagagaggagctggaggccctgttcctgccctacgacctgaagagactggagatgtacagcagaaacatggtggactaccacctgatcatggacatgatccccgccatcagcagaatctacttcctgaaccagctgggcgacctggccctgagcgccgcccagagcgccctgctgctgggcatcggcctgcagcacaagagcgtggaccagctggagaaggagatcgagctgcccagcggccagctgatgggcctgttcaacagaatcatcagaaaggtggtgaagctgttcaacgaggtgcaggagaaggccatcgaggagcagatggtggccgccaaggacgtggtgatggagcccaccatgaagaccctgagcgacgacctggacgaggccgccaaggagttccaggagaagcacaagaaggaggtgggcaagctgaagagcatggacctgagcgagtacatcatcagaggcgacgacgaggagtggaacgaggtgctgaacaaggccggccccaacgccagcatcatcagcctgaagagcgacaagaagagaaagctggaggccaagcaggagcccaagcagagcaagaagctgaagaacagagagaccaagaacaagaaggacatgaagctgaagagaaagaagtag

SEQ ID NO: 312583 - DNA, 1492 bp, Artificial Sequence
  derived and/or modified sequence
agcggcttccgtcctgcagcaagtccggaagaaggtccgggggctggagtcctgggacctagctcgggaccggcctggagatggagttcgactgcgagggcctgagacggctgcttggcaagtttttaaagatagttctcagaaagacctgctgaattttactggcacaattcctgtgatgtatcagggtaatacatataacataccaattcgtttctggattttggattctcaccctttcgctccccctatttgcttcttgaagccaactgcaaatatgggaatcttagtcggaaaacatgtggatgctcaaggcagaatatatttgccctatctccaaaactggagccattttggagatgaagtctcattctgttgcccaagctggagtatagtggtgcaaccataactcactgcatctgaaactcctgggctcaagtaatactcctgcctcaacaaaggtgtttcagatacaaattcaaagagctgggcaaatcatgagaataaaacagtcaataaaattactgtggttggaggtggagaactcggtattgcctgcacattagcaatttcagcaaagggtattgcagacaggcttgtcctcttagacctctcagaagggactaaaggagccacgatggaccttgaaatcttcaaccttcctaatgtggagatcagcaaagatttgtctgcctctgctcattccaaggtggtgatcttcacagtcaactctttgggtagttctcagtcgtaccttgatgtggtacagagcaatgtggatatgttcagagcccttgtcccagctctgggacattatagtcaacacagtgtcctgctcgttgcatctcaaccagtggaaatcatgacctatgtaacatggaaactgagtacatttcctgcaaatcgagtgatcggaattggatgtaatctggattcacagagattacagtatattattacaaatgttttgaaggcacagacttcaggcaaagaagtatgggttattggcgagcaaggagaagacaaagtgctcacatggagtggccaagaagaagtagtgagtcatacctctcaagtgcagctgtccaacagagccatggaactgctaagagtaaaaggtcaaagatcctggtctgttggactatcagtagctgacatggttgacagtattgtaaacaataagaagaaagtgcattctgtatcagctttagcaaagggatattatgatataaatagtgaagtgtttttaagtttgccttgcatccttggaaccaatggagtatctgaagttatcaaaaccacactgaaagaagatacagttactgagaaactccaaagcagtgcatcctcaatccacagtctccaacaacagttaaaactttgattctcaaatgcaatttgagaggctggacttctacctaaagggaaaagtcatttaattttacctatatataggtttgaggatttctgtatcctgctacttacttttaca

SEQ ID NO: 312584 - DNA, 747 bp, Artificial Sequence
  derived and/or modified sequence
atggacctggagatcttcaacctgcccaacgtggagatcagcaaggacctgagcgccagcgcccacagcaaggtggtgatcttcaccgtgaacagcctgggcagcagccagagctacctggacgtggtgcagagcaacgtggacatgttcagagccctggtgcccgccctgggccactacagccagcacagcgtgctgctggtggccagccagcccgtggagatcatgacctacgtgacctggaagctgagcaccttccccgccaacagagtgatcggcatcggctgcaacctggacagccagagactgcagtacatcatcaccaacgtgctgaaggcccagaccagcggcaaggaggtgtgggtgatcggcgagcagggcgaggacaaggtgctgacctggagcggccaggaggaggtggtgagccacaccagccaggtgcagctgagcaacagagccatggagctgctgagagtgaagggccagagaagctggagcgtgggcctgagcgtggccgacatggtggacagcatcgtgaacaacaagaagaaggtgcacagcgtgagcgccctggccaagggctactacgacatcaacagcgaggtgttcctgagcctgccctgcatcctgggcaccaacggcgtgagcgaggtgatcaagaccaccctgaaggaggacaccgtgaccgagaagctgcagagcagcgccagcagcatccacagcctgcagcagcagctgaagctgtag

SEQ ID NO: 312585 - DNA, 747 bp, Artificial Sequence
  derived and/or modified sequence
atggacctcgagattttcaatctgccaaacgtggagatctctaaggatctcagcgctagcgctcactctaaagtggttattttcactgtgaattccctgggctcgtctcagtcttatctggacgtcgtccagagcaacgtagatatgtttcgcgccctggtgccagctctgggccattattcacagcactcagtcctcctcgtggcgtctcagcccgtggaaatcatgacttacgtcacatggaaattgtcaacattcccagcaaatcgtgtcatcggtataggctgcaatcttgactcacagagactgcaatatataattaccaacgtgctgaaggcccaaacaagcggaaaggaggtgtgggtcatcggcgagcagggagaggataaagtgctgacctggagcggacaggaggaagtggtgagtcatactagtcaggttcagctatctaatcgcgctatggaactgctgagggtgaagggccagaggagctggagcgtggggctttcagtggctgatatggtcgatagcattgtgaacaacaaaaaaaaggtgcatagcgtttccgctctggctaagggctactatgacataaattctgaagtgttccttagtctgccctgtatcctcggcacaaacggggtgtccgaagtgatcaagaccactctcaaggaagatacagtgacagaaaaactacaatctagcgctagttcaattcatagtctccagcaacagctgaagctgtag

SEQ ID NO: 312586 - DNA, 747 bp, Artificial Sequence
  derived and/or modified sequence
atggacctggagatcttcaacctgcccaacgtggagatcagcaaggacctgagcgccagcgcccacagcaaggtggtgatcttcaccgtgaacagcctgggcagcagccagagctacctggatgtggtgcagagcaatgtggacatgttccgggccctggtgcctgccctgggccactacagccagcacagcgtgctgctggtggccagccagcctgtggagatcatgacctacgtgacctggaagctgagcaccttccctgccaacagagtcatcggcatcggctgcaacctggacagccagaggctgcagtacatcatcaccaacgtgctgaaggcccagaccagcggcaaggaggtgtgggtgattggagagcagggcgaggacaaggtgctgacctggagcggccaggaggaggtggtgagccacaccagccaggtgcagctgagcaacagagccatggagctgctgcgggtgaagggccagaggtcctggagcgtgggcctgtctgtggccgacatggtggacagcatcgtgaacaacaagaagaaggtgcacagcgtgtctgccctggccaagggctactatgacatcaacagcgaggtgttcctgagcctgccctgcatcctgggcaccaatggagtgtctgaggtgatcaagaccaccctgaaggaggacacagtgacagagaagctgcagagcagcgccagcagcatccacagcctgcagcagcagctgaagctgtag

SEQ ID NO: 312587 - DNA, 747 bp, Artificial Sequence
  derived and/or modified sequence
atggacctggagatcttcaacctgcccaacgtggagatcagcaaggacctgagtgcaagcgcacattcaaaagtggtaatattcaccgtgaattccttggggtcttcccagtcttatctggacgtggttcagagcaatgtggatatgtttagggctctggtccctgcgctgggccactattcccaacacagcgtcctactagtggccagtcaacccgtggagatcatgacgtatgtcacttggaaattgtcaacatttccagccaatcgcgtcattggtatcggctgcaacctcgattctcagcggctgcagtacataatcaccaatgtccttaaggctcagacctctggtaaggaggtgtgggttatcggcgagcagggcgaagataaagtcctgacatggagtggtcaggaagaggttgtgagtcacaccagccaagtccaactgtccaatcgggctatggaacttttaagggtgaagggacagcggtcttggtccgtgggcctttccgtcgctgacatggtcgactcaatcgtcaataataagaagaaggttcactctgttagcgcgctggccaaaggatattatgacatcaactcggaggtcttcctgtccctgccatgcattttaggaaccaatggggtaagcgaagtgattaaaacaacgctgaaggaggatacagtgaccgagaagctccagtcgtccgctagttccatccactccttgcagcaacagcttaaattatag

SEQ ID NO: 312588 - DNA, 747 bp, Artificial Sequence
  derived and/or modified sequence
atggacttggagatatttaatcttcctaacgttgagatcagcaaagatctgtcagcatccgcccactctaaggttgttatcttcacagtcaactcgctgggttctagccagagttacctggatgttgtacaaagcaacgtggatatgttcagggcgttggtacctgcattgggacactacagtcagcacagcgtcctgttggtggccagccagcctgtggagatcatgacctatgtgacttggaaattgtcaacattcccagccaatcgagtcatcggcatcgggtgcaatcttgattcacagcgtctgcagtacataattacaaacgtcctgaaggcacagaccagtgggaaagaagtgtgggtcattggcgaacagggtgaggacaaggtcttaacctggagcggtcaggaggaagtagtgtcccataccagtcaagtgcagctctctaaccgagcgatggaattactccgggtaaaaggccagagaagctggtccgtcggacttagcgtagcagacatggttgactctatcgtgaacaacaagaagaaggttcacagcgtgtcagccctcgccaagggctattacgacatcaattctgaggtgttcctaagcctgccttgcattctaggcacgaacggcgtttccgaggttatcaagactactttgaaggaggacactgttacagaaaaattacagagctctgcgagcagtattcactcactccagcagcagttgaaactgtag

SEQ ID NO: 312589 - protein, 72 aa, Artificial Sequence
  derived and/or modified sequence
MALTGASDPSAEAEANGEKPFLLRALQIALVVSLYWVTSISMVFLNKYLLDSPSLRLDTPIFVTFYQCLVTT

SEQ ID NO: 312590 - DNA, 219 bp, Artificial Sequence
  derived and/or modified sequence
atggccctgacaggagcctccgatccgtctgccgaggcggaagccaatggcgagaagcctttcttattgagggcactacaaatcgccctcgttgtaagtctgtactgggttacaagtatctctatggtgtttctgaacaaatatttactcgatagcccgagcttacgcttggacaccccaatctttgttaccttctatcaatgcttagtaacaacctag

SEQ ID NO: 312591 - DNA, 498 bp, Artificial Sequence
  derived and/or modified sequence
atggccctaaccggcgcgtccgatccttctgcagaagcagaggctaacggcgagaaaccgtttctcctccgcgcactccagattgcactagtggtctctctgtattgggtgacctcaatttccatggtctttcttaacaaatacctcttggattccccctccctgcgtctggacaccccgatcttcgtgaccttctaccagtgtttggtgacaaccctactgtgcaagggtttgagcgccttggcggcctgttgcccaggagccgtcgacttcccctctctgaggctggaccttcgggtcgctcgctcagtcctacccttgagcgtagtgttcattggcatgattacgttcaacaatctatgtttaaaatacgtaggcgtagcattttacaacgtgggtagatcccttacaacggtgtttaatgttttgctgtcataccttctactgaagcaaactaccagtttttacgcactgctgacttgcggaattatcatatag

SEQ ID NO: 312592 - DNA, 219 bp, Artificial Sequence
  derived and/or modified sequence
atggccctgaccggggccagtgaccccagcgctgaggccgaggccaacggggagaagcccttcctgctgcgggccctgcagatcgccctggtggtgtccctgtactgggtgaccagcatctccatggtgttcctgaacaagtacctgctggacagccccagcctgcggctggacacccccatctttgtgaccttctaccagtgcctggtgaccacctag

SEQ ID NO: 312593 - DNA, 498 bp, Artificial Sequence
  derived and/or modified sequence
atggccctgaccggggccagtgaccccagcgctgaggccgaggccaacggggagaagcccttcctgctgcgggccctgcagatcgccctggtggtgtccctgtactgggtgaccagcatctccatggtgttcctgaacaagtacctgctggacagccccagcctgcggctggacacccccatctttgtgaccttctaccagtgcctggtgaccaccctgctgtgcaagggcctgagcgccctggccgcctgctgccctggagctgtggacttccccagcctgcggctggacctgcgggtggcccggtctgtgctgcccctgtctgtggtgttcatcggcatgatcaccttcaacaacctgtgcctgaagtatgtgggcgtggccttctacaacgtgggccgcagcctgaccaccgtcttcaacgtgctgctgagctacctgctgctgaagcagaccaccagcttctacgccctgctgacctgtggcatcatcatctag

SEQ ID NO: 312594 - DNA, 219 bp, Artificial Sequence
  derived and/or modified sequence
atggccctgaccggcgccagcgaccccagcgccgaggccgaggccaatggcgaaaaaccctttctcctccgggccctgcagattgcgctggtggttagcctgtattgggttacctccatttctatggtcttcctcaacaagtacctgttggattctccttcacttcgcttagacacacccattttcgtgaccttttatcagtgtctcgtgacgacatag

SEQ ID NO: 312595 - DNA, 498 bp, Artificial Sequence
  derived and/or modified sequence
atggccctgaccggcgccagcgaccccagcgccgaggccgaggccaatggagagaagcctttcttgctgcgagctctccaaatcgccctcgtcgtgtccctgtattgggtgacaagcatttcaatggtcttcctgaacaagtatctgttagactctccgtcattgaggttggatactcccatcttcgtcaccttctatcagtgcttggtcaccacactcttgtgtaaaggcctgagtgctctggccgcctgctgtcccggggcagttgattttcctagcctacgcctggacctccgtgtagctcgtagcgttctgcccctgagcgtggtattcataggcatgatcacatttaataatctgtgtctgaagtacgtcggtgtggccttctataatgttgggaggagtctgacaaccgtcttcaacgtgctactgtcataccttctgctgaaacaaaccacaagcttctacgccctcctgacatgtgggataatcatctag

SEQ ID NO: 312596 - DNA, 219 bp, Artificial Sequence
  derived and/or modified sequence
atggctttaactggtgcatcagacccttcagccgaggccgaggcgaacggcgagaaaccctttctgctccgggcactgcagatcgccctggttgtgtccttatactgggtaacctctatctctatggtgtttctgaataaatacctgctcgacagccctagcctgagactcgacactcctatctttgtaaccttttatcagtgcctggtgacgacgtag

SEQ ID NO: 312597 - DNA, 498 bp, Artificial Sequence
  derived and/or modified sequence
atggccttaacgggtgccagtgatccatctgcagaagctgaagcaaatggggaaaaacccttccttttgcgagctctccagatagcactagtcgtttcactgtactgggtcaccagtatcagtatggtatttctcaacaagtacctgctggattcaccctctctccgtcttgatacacctatctttgtgacattttaccagtgcttggtaacaacccttctgtgcaaaggactctccgctctggctgcctgttgcccgggtgcagtcgattttccatctttgcggctggacctaagagttgcgaggagtgtgctccctttgtctgtcgtgtttatcggaatgattaccttcaataatttgtgcttaaaatatgtgggagtagccttctacaatgtgggaaggtccctcacaacagtctttaacgtcttactatcctacttactcttgaaacaaactacttccttttacgctctgctgacgtgtggtatcattatctag

SEQ ID NO: 312598 - DNA, 582 bp, Artificial Sequence
  derived and/or modified sequence
tctggaagtgcaagccggtagcgcggcgggccagggatacagccaagtcccgggacgtgccagctgcggtaactgaagccgggtcccgggcgggcgggggtaccagggacaggagtagccttggaaagaggagagggcctcctcccacgaccgtccggatcaccgcctctccgccggcacccccggggcccatgccgcgaacaggccggcgaggctggcaaggtgcccgggcccggggcggaaagcaggaagtcgatcccgcgggcgcggcccagggtgcggcgctgcagatgcagcacggggtcgcggggcgggcgcccagtgcaccggaggagggcccctctgaagcggtccaggatcctgcacatggcgctgaccggggcctcagacccctctgcagaggcagaggccaacggggagaagccctttctgctgcgggcattgcagatcgcgctggtggtctccctctactgggtcacctccatctccatggtgttccttaataagtacctgctggacagcccctccctgcggctggacacccccatcttcgtcaccttctaccagtgcctggtgaccacg

SEQ ID NO: 312599 - DNA, 695 bp, Artificial Sequence
  derived and/or modified sequence
ctcggatgtccggaggctcctgggctgagccggcgacagagcccgggaaggcagcgagacgtgggcgccggcccagccccctcccgcgtccttcagccccaagccccgagcccctctgacccttccgcagccctccctccagccgcgcccggcctccggcagctccctggcccctctgaagcggtccaggatcctgcacatggcgctgaccggggcctcagacccctctgcagaggcagaggccaacggggagaagccctttctgctgcgggcattgcagatcgcgctggtggtctccctctactgggtcacctccatctccatggtgttccttaataagtacctgctggacagcccctccctgcggctggacacccccatcttcgtcaccttctaccagtgcctggtgaccacgctgctgtgcaaaggcctcagcgctctggccgcctgctgccctggtgccgtggacttccccagcttgcgcctggacctcagggtggcccgcagcgtcctgcccctgtcggtggtcttcatcggcatgatcaccttcaataacctctgcctcaagtacgtcggtgtggccttctacaatgtgggccgctcactcaccaccgtcttcaacgtgctgctctcctacctgctgctcaagcagaccacctccttctatgccctgctcacctgcggtatcatcatcg

SEQ ID NO: 312600 - DNA, 219 bp, Artificial Sequence
  derived and/or modified sequence
atggccctgaccggcgccagcgaccccagcgccgaggccgaggccaacggcgagaagcccttcctgctgagagccctgcagatcgccctggtggtgagcctgtactgggtgaccagcatcagcatggtgttcctgaacaagtacctgctggacagccccagcctgagactggacacccccatcttcgtgaccttctaccagtgcctggtgaccacctag

SEQ ID NO: 312601 - DNA, 498 bp, Artificial Sequence
  derived and/or modified sequence
atggccctgaccggcgccagcgaccccagcgccgaggccgaggccaacggcgagaagcccttcctgctgagagccctgcagatcgccctggtggtgagcctgtactgggtgaccagcatcagcatggtgttcctgaacaagtacctgctggacagccccagcctgagactggacacccccatcttcgtgaccttctaccagtgcctggtgaccaccctgctgtgcaagggcctgagcgccctggccgcctgctgccccggcgccgtggacttccccagcctgagactggacctgagagtggccagaagcgtgctgcccctgagcgtggtgttcatcggcatgatcaccttcaacaacctgtgcctgaagtacgtgggcgtggccttctacaacgtgggcagaagcctgaccaccgtgttcaacgtgctgctgagctacctgctgctgaagcagaccaccagcttctacgccctgctgacctgcggcatcatcatctag

SEQ ID NO: 312602 - protein, 54 aa, Artificial Sequence
  derived and/or modified sequence
MSENLDKSNVNEAGKSKSNDSEEGLEDAVEGADEALQKAIKSDSSSPQRVQRPH

SEQ ID NO: 312603 - DNA, 165 bp, Artificial Sequence
  derived and/or modified sequence
atgagcgagaacctggacaagagcaacgtgaacgaggccggcaagagcaagagcaacgacagcgaggagggcctggaggacgccgtggagggcgccgacgaggccctgcagaaggccatcaagagcgacagcagcagcccccagagagtgcagagaccccactag

SEQ ID NO: 312604 - DNA, 435 bp, Artificial Sequence
  derived and/or modified sequence
atgagcgagaacctggacaagagcaacgtgaacgaggccggcaagagcaagagcaacgacagcgaggagggcctggaggacgccgtggagggcgccgacgaggccctgcagaaggccatcaagagcgacagcagcagcccccagagagtgcagagaccccacagcagcccccccagattcgtgaccgtggaggagctgctggagaccgccagaggcgtgaccaacatggccctggcccacgagatcgtggtgaacggcgacttccagatcaagcccgtggagctgcccgagaacagcctgaagaagagagtgaaggagatcgtgcacaaggccttctgggactgcctgagcgtgcagctgagcgaggacccccccgcctacgaccacgccatcaagctggtgggcgagatcaaggagaccctgctgagcttctag

SEQ ID NO: 312605 - DNA, 165 bp, Artificial Sequence
  derived and/or modified sequence
atgagcgaaaatctagacaagtctaacgtcaacgaggcaggaaagagcaaatcgaacgattccgaagagggcctcgaagacgccgtggaaggggcagatgaagccctccaaaaggcgattaagtccgatagcagtagtcctcagcgagtccagcggccacattag

SEQ ID NO: 312606 - DNA, 435 bp, Artificial Sequence
  derived and/or modified sequence
atgtccgagaatcttgataaaagtaatgtgaacgaagccggcaagtccaaatctaacgactctgaggagggactagaggacgccgtagagggcgccgatgaagcccttcagaaggctattaagtccgacagctcatctcctcagagagtccagcgcccccacagttcccctcctaggttcgtaactgtcgaggagttgctggagactgcgcgaggggtcaccaatatggcattggctcacgagatcgttgtgaatggggacttccagattaagcctgtagaacttcccgagaacagcttgaaaaaacgggtcaaagagattgtccataaagcattctgggattgcctgagtgtgcaacttagcgaggatcccccagcctatgaccacgcaatcaagctggtcggtgagataaaggaaactttgttgtcgttctag

SEQ ID NO: 312607 - DNA, 165 bp, Artificial Sequence
  derived and/or modified sequence
atgtctgagaacctggacaagagcaatgtgaatgaagctgggaagagcaagagcaatgattctgaggagggcctggaggatgctgtggagggcgcagatgaggccctgcagaaggccatcaagagtgacagcagcagcccccagagggtgcagaggccccactag

SEQ ID NO: 312608 - DNA, 435 bp, Artificial Sequence
  derived and/or modified sequence
atgtctgagaacctggacaagagcaatgtgaatgaagctgggaagagcaagagcaatgattctgaggagggcctggaggatgctgtggagggcgcagatgaggccctgcagaaggccatcaagagtgacagcagcagcccccagagggtgcagaggccccacagcagccccccaagatttgtgacagtggaggagctgctggagacagcccggggcgtgaccaacatggccctggcccacgagatcgtggtgaatggagacttccagatcaagcctgtggagctgcctgagaacagcctgaagaagagggtgaaggagatcgtgcacaaggccttctgggactgcctgtctgtgcagctgtctgaggaccccccagcctatgaccacgccatcaagctggtgggggagatcaaggagaccctgctgtccttctag

SEQ ID NO: 312609 - DNA, 165 bp, Artificial Sequence
  derived and/or modified sequence
atgagcgagaacctggacaagagcaacgtgaacgaggccggcaagtcaaagtctaatgattctgaagaggggctggaggacgcagtggagggcgcagacgaagccctccagaaagcaataaaatctgattcttcctccccacagagagtccaacgaccacattag

SEQ ID NO: 312610 - DNA, 435 bp, Artificial Sequence
  derived and/or modified sequence
atgagcgagaacctggacaagagcaacgtgaacgaggccggcaagtcaaagtctaatgattccgaagaaggcctggaggacgcagttgaaggtgcggatgaagctctccagaaagcaatcaagagcgattccagtagtcctcagagggtccagcggccacactcctctcctccacgatttgtcactgtcgaagagcttctggagaccgctaggggcgtgactaatatggcccttgcacatgagatagtggtgaacggcgactttcagataaagcccgtagagctccccgagaactcccttaagaagcgcgtgaaggaaatagtgcataaagccttctgggattgtctatccgtccaacttagcgaagatccaccagcctacgatcatgcaatcaagctggtcggagaaattaaagagactttgttgtccttttag

SEQ ID NO: 312611 - DNA, 165 bp, Artificial Sequence
  derived and/or modified sequence
atgagtgagaatctggacaaatctaacgttaatgaggctggaaagtcaaagtccaatgatagcgaggaggggcttgaagatgcagtagagggggcagatgaggcactgcagaaagccattaagagcgattcaagcagcccacaacgtgtgcagcgtccccactag

SEQ ID NO: 312612 - DNA, 435 bp, Artificial Sequence
  derived and/or modified sequence
atgtctgagaatcttgataaaagtaatgtgaatgaagcaggtaagtctaaaagtaatgactcagaagagggactcgaggatgcagtggaaggcgcagatgaggccctccaaaaagccatcaaatcggactctagcagcccccagcgagttcagagaccccactcctcccctccccgtttcgtgactgtggaggaacttctcgagacagctaggggcgtcacaaacatggctttggcgcacgaaattgtggtgaatggtgattttcagatcaaacccgtagaactccccgagaatagccttaaaaaaagggtgaaggagatagtgcataaggcattttgggactgccttagtgtgcaactgagcgaggacccccctgcctacgaccacgcgataaagctcgtaggggagataaaagaaactttactaagcttctag

SEQ ID NO: 312613 - DNA, 547 bp, Artificial Sequence
  derived and/or modified sequence
gtttacaacggaatccggacgccgggcgcgagtggagctcagtgccagaggaggggattcccggcgccgggggacagagccccttttttcttttgccgaaagaccctttctgctggggagcctcttgtgtccagcctaggcccgcgtgcagcgccgacggatgaccgtcttcttggcaagtgcgaggatcctcctcccctcggctctctttttagacacagtgggggttgaatggatgcgcgcgatataagcaaattaaatggttcgtggccgcatcctagagccctttaattagagttaccatttgtagaaggcctgccgtgcacaatccctcgtttcatctccccccaaaccgagcaggaaagtgaataaacttaattgagaatgtctgaaaaccttgacaagtccaatgtaaatgaagcaggaaaatcaaaatccaatgattctgaggaaggcctcgaagatgctgtggaaggtgctgatgaagccttacaaaaagcaataaagtcagactcctccagcccccaaagagtgcagagacctcact

SEQ ID NO: 312614 - DNA, 905 bp, Artificial Sequence
  derived and/or modified sequence
atgttttccacctctccctgaggaaacacggcgccgcccagctgcgagtcaccgcttactgaaccccttcggcaagcaggggaaagaccctcccgcctttccgtacgaagacatggcgctgccctatattgggctggcgcctcccggccaagagcagtctcctccttcctgatgctgagaagcggccgctctgaccgctgcccacccgagtcgggctgggaggaccgcccgccgcgtggcgagggatgcggcctcggaggggcagaggctgaaccgcccctgcctgccgcgcatccctccggcttccgccgcggcgccagcccgcgcctgattcgcggcgggagcggcaggagggagaacgccgactccgtggcagaccctttctgctggggagcctcttgtgtccagcctaggcccgcgtgcagcgccgacggatgaccgtcttcttggaaagtgaataaacttaattgagaatgtctgaaaaccttgacaagtccaatgtaaatgaagcaggaaaatcaaaatccaatgattctgaggaaggcctcgaagatgctgtggaaggtgctgatgaagccttacaaaaagcaataaagtcagactcctccagcccccaaagagtgcagagacctcactctagtcctcctcgctttgtgacagtagaagaacttctagagacagcgagaggtgtcaccaacatggctctagcccatgaaattgtagtaaatggagactttcagattaaaccagttgaattaccagaaaacagcttgaagaagagagtaaaggagattgtacataaagcgttttgggattgcttgagtgtgcagctaagtgaagatcccccagcatatgaccatgctatcaaacttgtaggagaaatcaaagagactctcttatctttc

SEQ ID NO: 312615 - DNA, 2886 bp, Artificial Sequence
  derived and/or modified sequence
ctgcagcttccccgggcgctgcctggacaggcctgcctgcgtgctgggacatgtctggcctccaaggaccgtcggtgggcgatggctgcaacggtggaggggccagagctggaggcagctgctgccgcaggagatgcttcagaggattcggacgcagggtccagggcgctgcctttcctgggcggcaaccggctgagcttggacctgtaccccgggggctgccagcagctgctgcacctgtgtgtccagcagcctctgcagctgctgcaggtggaattcttgcgtctgagcactcacgaggaccctcagctgctggaggccaccctggcccagctgcctcagagcctgtcctgcctccgctccctggtcctcaaaggagggcaacgccgggacacactgggtgcctgtctccggggtgccctgaccaacctgcccgctggtctgagtggcctggcccatctggcccacctggacctgagcttcaacagcctggagacactgccggcctgtgtcctgcagatgcgaggtctgggtgcgctcttgctgtctcacaactgcctctctgagctgcctgaggctctgggggccctccccgccctcaccttcctcacagtgacacacaaccgcctgcagacgctgcccccagcactgggggccctatccaccctgcagcgcctcgatctctctcagaatctgctggacacgctacctcctgagattggaggcctgggcagcctcctggagctcaacctggcctccaaccggctgcagagcctcccagcctctctggcgggacttcggtccttgcggctccttgtcctgcacagcaacctcctggcctctgtgccagctgacttggcccgccttccactcctcacccggctcgacctgagggacaaccagctccgggacctgccccctgagctgctagacgccccctttgtgcgcctgcaggggaaccccctgggtgaggcctcgccagacgccccgagttcaccagtggcagccctcattccagaaatgcccagactgttcctgacctcagatttggacagctttcctgtgacccctcaaggctgctcagtgaccctggcctgtggcgtccgcctgcagttcccagcgggagccaccgccacccccatcaccatccgctatcggctgctgctgccggagccaggcctcgtccccctgggtcctcatgacgccctgctcagccatgtgctggagctgcagccccatggggtggccttccagcaggatgtggggctgtggctgctcttcaccccaccgcaggcccggcgctgccgtgaagtggtggtcaggacccggaatgacaacagctggggtgacctggagacctacctggaggaagaggcaccccagcggctctgggctcactgccaggtgccccacttctcctggttccttgtggtttcccgccctgtgtccaatgcctgcctggtgccaccggaggggacactgctgtgctcctcgggtcatcctggggtcaaagtcatcttcccccctggggccactgaggagcctcgtcgagtctccatgcaggtggtgcgcatggctggccgagagctgcaggccctcctgggagaaccagaggctgcagtgagccccctgctgtgcctgtcacagagcggtccccccagcttcctccaaccggtcaccgtgcagctgcctctgccctctggcatcacaggcctcagtctggaccgctcccgcctgcacctgttgtactgggcccctcctgcagccacctgggatgacatcacagctcaggtggtcctggagctcacccacctgtacgcacgcttccaggtcacacacttctcctggtactggctctggtacaccaccaagaactgtgtgggaggcctggctcggaaggcctgggagcggctgcggctgcaccgtgtgaacctcatcgctctgcagcggcgccgggaccctgagcaggtcctgctgcagtgcctgccccgaaacaaggtggacgccacccttcggcggctgctggagcggtaccggggccccgagccctctgacacggtggagatgttcgagggcgaagagttctttgcggccttcgagcgcggcatcgacgtggatgctgaccgccctgactgtgtggagggcagaatctgctttgtcttctactcgcacctgaagaatgtgaaggaggtgtccttctaccgtggcgcggtgcctgtgcgggtgcccgaggaggctgaggctgcccggcagaggaagggcgcagacgccctgtggatggccactctgcccatcaagctgccgagacttcgagggtccgaggggccacggcggggggctggcctctccttggcacccttgaatctgggagatgccgagaccggctttctgacgcagagcaacctgctgagtgtggctgggcgtctgggtctggactggccagccgtggccctgcacctgggggtgtcctaccgggaggtgcagcgcatccggcacgagttccgggatgatctggatgagcagatccgtcacatgctcttctcctgggctgagcgccaggctgggcagccaggggctgtggggctcctggtgcaggccctggagcagagtgaccggcaggacgtggctgaagaggtgcgcgcagtcttggagctcggccgccgcaagtaccaggacagcatccgacgcatgggcttggcccccaaggaccccgctctgcctggctcctcggctccacagcccccagagcctgcccaggcctaggccccacagacttttaggctggcccagatattccccagtggatgggcagagcccccaccttcaagtctctccagtgtgtggggacgggtccctgtgagcaacaaaactgcactgtttctttca

SEQ ID NO: 312616 - protein, 910 aa, Artificial Sequence
  derived and/or modified sequence
MAATVEGPELEAAAAAGDASEDSDAGSRALPFLGGNRLSLDLYPGGCQQLLHLCVQQPLQLLQVEFLRLSTHEDPQLLEATLAQLPQSLSCLRSLVLKGGQRRDTLGACLRGALTNLPAGLSGLAHLAHLDLSFNSLETLPACVLQMRGLGALLLSHNCLSELPEALGALPALTFLTVTHNRLQTLPPALGALSTLQRLDLSQNLLDTLPPEIGGLGSLLELNLASNRLQSLPASLAGLRSLRLLVLHSNLLASVPADLARLPLLTRLDLRDNQLRDLPPELLDAPFVRLQGNPLGEASPDAPSSPVAALIPEMPRLFLTSDLDSFPVTPQGCSVTLACGVRLQFPAGATATPITIRYRLLLPEPGLVPLGPHDALLSHVLELQPHGVAFQQDVGLWLLFTPPQARRCREVVVRTRNDNSWGDLETYLEEEAPQRLWAHCQVPHFSWFLVVSRPVSNACLVPPEGTLLCSSGHPGVKVIFPPGATEEPRRVSMQVVRMAGRELQALLGEPEAAVSPLLCLSQSGPPSFLQPVTVQLPLPSGITGLSLDRSRLHLLYWAPPAATWDDITAQVVLELTHLYARFQVTHFSWYWLWYTTKNCVGGLARKAWERLRLHRVNLIALQRRRDPEQVLLQCLPRNKVDATLRRLLERYRGPEPSDTVEMFEGEEFFAAFERGIDVDADRPDCVEGRICFVFYSHLKNVKEVYVTTTLDREAQAVRGQVSFYRGAVPVRVPEEAEAARQRKGADALWMATLPIKLPRLRGSEGPRRGAGLSLAPLNLGDAETGFLTQSNLLSVAGRLGLDWPAVALHLGVSYREVQRIRHEFRDDLDEQIRHMLFSWAERQAGQPGAVGLLVQALEQSDRQDVAEEVRAVLELGRRKYQDSIRRMGLAPKDPALPGSSAPQPPEPAQA

SEQ ID NO: 312617 - DNA, 2733 bp, Artificial Sequence
  derived and/or modified sequence
atggccgccaccgtggagggccccgagctggaggccgccgccgccgccggcgacgccagcgaggacagcgacgccggcagcagagccctgcccttcctgggcggcaacagactgagcctggacctgtaccccggcggctgccagcagctgctgcacctgtgcgtgcagcagcccctgcagctgctgcaggtggagttcctgagactgagcacccacgaggacccccagctgctggaggccaccctggcccagctgccccagagcctgagctgcctgagaagcctggtgctgaagggcggccagagaagagacaccctgggcgcctgcctgagaggcgccctgaccaacctgcccgccggcctgagcggcctggcccacctggcccacctggacctgagcttcaacagcctggagaccctgcccgcctgcgtgctgcagatgagaggcctgggcgccctgctgctgagccacaactgcctgagcgagctgcccgaggccctgggcgccctgcccgccctgaccttcctgaccgtgacccacaacagactgcagaccctgccccccgccctgggcgccctgagcaccctgcagagactggacctgagccagaacctgctggacaccctgccccccgagatcggcggcctgggcagcctgctggagctgaacctggccagcaacagactgcagagcctgcccgccagcctggccggcctgagaagcctgagactgctggtgctgcacagcaacctgctggccagcgtgcccgccgacctggccagactgcccctgctgaccagactggacctgagagacaaccagctgagagacctgccccccgagctgctggacgcccccttcgtgagactgcagggcaaccccctgggcgaggccagccccgacgcccccagcagccccgtggccgccctgatccccgagatgcccagactgttcctgaccagcgacctggacagcttccccgtgaccccccagggctgcagcgtgaccctggcctgcggcgtgagactgcagttccccgccggcgccaccgccacccccatcaccatcagatacagactgctgctgcccgagcccggcctggtgcccctgggcccccacgacgccctgctgagccacgtgctggagctgcagccccacggcgtggccttccagcaggacgtgggcctgtggctgctgttcacccccccccaggccagaagatgcagagaggtggtggtgagaaccagaaacgacaacagctggggcgacctggagacctacctggaggaggaggccccccagagactgtgggcccactgccaggtgccccacttcagctggttcctggtggtgagcagacccgtgagcaacgcctgcctggtgccccccgagggcaccctgctgtgcagcagcggccaccccggcgtgaaggtgatcttcccccccggcgccaccgaggagcccagaagagtgagcatgcaggtggtgagaatggccggcagagagctgcaggccctgctgggcgagcccgaggccgccgtgagccccctgctgtgcctgagccagagcggcccccccagcttcctgcagcccgtgaccgtgcagctgcccctgcccagcggcatcaccggcctgagcctggacagaagcagactgcacctgctgtactgggccccccccgccgccacctgggacgacatcaccgcccaggtggtgctggagctgacccacctgtacgccagattccaggtgacccacttcagctggtactggctgtggtacaccaccaagaactgcgtgggcggcctggccagaaaggcctgggagagactgagactgcacagagtgaacctgatcgccctgcagagaagaagagaccccgagcaggtgctgctgcagtgcctgcccagaaacaaggtggacgccaccctgagaagactgctggagagatacagaggccccgagcccagcgacaccgtggagatgttcgagggcgaggagttcttcgccgccttcgagagaggcatcgacgtggacgccgacagacccgactgcgtggagggcagaatctgcttcgtgttctacagccacctgaagaacgtgaaggaggtgtacgtgaccaccaccctggacagagaggcccaggccgtgagaggccaggtgagcttctacagaggcgccgtgcccgtgagagtgcccgaggaggccgaggccgccagacagagaaagggcgccgacgccctgtggatggccaccctgcccatcaagctgcccagactgagaggcagcgagggccccagaagaggcgccggcctgagcctggcccccctgaacctgggcgacgccgagaccggcttcctgacccagagcaacctgctgagcgtggccggcagactgggcctggactggcccgccgtggccctgcacctgggcgtgagctacagagaggtgcagagaatcagacacgagttcagagacgacctggacgagcagatcagacacatgctgttcagctgggccgagagacaggccggccagcccggcgccgtgggcctgctggtgcaggccctggagcagagcgacagacaggacgtggccgaggaggtgagagccgtgctggagctgggcagaagaaagtaccaggacagcatcagaagaatgggcctggcccccaaggaccccgccctgcccggcagcagcgccccccagccccccgagcccgcccaggcctag

SEQ ID NO: 312618 - DNA, 2998 bp, Artificial Sequence
  derived and/or modified sequence
gccggcgggatcccaggcgccgagcgcccgctgagcagccaccctttgcgcgccgcctgcagcgcagcttccccgggcgctgcctggacaggcctgcctgcgtgctgggacatgtctggcctccaaggaccgtcggtgggcgatggctgcaacggtggaggggccagagctggaggcagctgctgccgcaggagatgcttcagaggattcggacgcagggtccagggcgctgcctttcctgggcggcaaccggctgagcttggacctgtaccccgggggctgccagcagctgctgcacctgtgtgtccagcagcctctgcagctgctgcaggtggaattcttgcgtctgagcactcacgaggaccctcagctgctggaggccaccctggcccagctgcctcagagcctgtcctgcctccgctccctggtcctcaaaggagggcaacgccgggacacactgggtgcctgtctccggggtgccctgaccaacctgcccgctggtctgagtggcctggcccatctggcccacctggacctgagcttcaacagcctggagacactgccggcctgtgtcctgcagatgcgaggtctgggtgcgctcttgctgtctcacaactgcctctctgagctgcctgaggctctgggggccctccccgccctcaccttcctcacagtgacacacaaccgcctgcagacgctgcccccagcactgggggccctatccaccctgcagcgcctcgatctctctcagaatctgctggacacgctacctcctgagattggaggcctgggcagcctcctggagctcaacctggcctccaaccggctgcagagcctcccagcctctctggcgggacttcggtccttgcggctccttgtcctgcacagcaacctcctggcctctgtgccagctgacttggcccgccttccactcctcacccggctcgacctgagggacaaccagctccgggacctgccccctgagctgctagacgccccctttgtgcgcctgcaggggaaccccctgggtgaggcctcgccagacgccccgagttcaccagtggcagccctcattccagaaatgcccagactgttcctgacctcagatttggacagctttcctgtgacccctcaaggctgctcagtgaccctggcctgtggcgtccgcctgcagttcccagcgggagccaccgccacccccatcaccatccgctatcggctgctgctgccggagccaggcctcgtccccctgggtcctcatgacgccctgctcagccatgtgctggagctgcagccccatggggtggccttccagcaggatgtggggctgtggctgctcttcaccccaccgcaggcccggcgctgccgtgaagtggtggtcaggacccggaatgacaacagctggggtgacctggagacctacctggaggaagaggcaccccagcggctctgggctcactgccaggtgccccacttctcctggttccttgtggtttcccgccctgtgtccaatgcctgcctggtgccaccggaggggacactgctgtgctcctcgggtcatcctggggtcaaagtcatcttcccccctggggccactgaggagcctcgtcgagtctccatgcaggtggtgcgcatggctggccgagagctgcaggccctcctgggagaaccagaggctgcagtgagccccctgctgtgcctgtcacagagcggtccccccagcttcctccaaccggtcaccgtgcagctgcctctgccctctggcatcacaggcctcagtctggaccgctcccgcctgcacctgttgtactgggcccctcctgcagccacctgggatgacatcacagctcaggtggtcctggagctcacccacctgtacgcacgcttccaggtcacacacttctcctggtactggctctggtacaccaccaagaactgtgtgggaggcctggctcggaaggcctgggagcggctgcggctgcaccgtgtgaacctcatcgctctgcagcggcgccgggaccctgagcaggtcctgctgcagtgcctgccccgaaacaaggtggacgccacccttcggcggctgctggagcggtaccggggccccgagccctctgacacggtggagatgttcgagggcgaagagttctttgcggccttcgagcgcggcatcgacgtggatgctgaccgccctgactgtgtggagggcagaatctgctttgtcttctactcgcacctgaagaatgtgaaggaggtatacgtgaccaccactctggaccgggaggctcaggctgtgcggggccaggtgtccttctaccgtggcgcggtgcctgtgcgggtgcccgaggaggctgaggctgcccggcagaggaagggcgcagacgccctgtggatggccactctgcccatcaagctgccgagacttcgagggtccgaggggccacggcggggggctggcctctccttggcacccttgaatctgggagatgccgagaccggctttctgacgcagagcaacctgctgagtgtggctgggcgtctgggtctggactggccagccgtggccctgcacctgggggtgtcctaccgggaggtgcagcgcatccggcacgagttccgggatgatctggatgagcagatccgtcacatgctcttctcctgggctgagcgccaggctgggcagccaggggctgtggggctcctggtgcaggccctggagcagagtgaccggcaggacgtggctgaagaggtgcgcgcagtcttggagctcggccgccgcaagtaccaggacagcatccgacgcatgggcttggcccccaaggaccccgctctgcctggctcctcggctccacagcccccagagcctgcccaggcctaggccccacagacttttaggctggcccagatattccccagtggatgggcagagcccccaccttcaagtctctccagtgtgtggggacgggtccctgtgagcaacaaaactgcactgtttctttca

SEQ ID NO: 312619 - DNA, 2733 bp, Artificial Sequence
  derived and/or modified sequence
atggctgcaactgtcgaggggcctgaactcgaagcggctgctgccgcaggcgacgcttcggaggactctgatgctggatccagagcccttccatttctgggcggcaatcgactgtctctggacctctatcctggcggttgccagcagttgctccacctgtgcgtgcagcagcctcttcagctccttcaggtcgagttcctgcggttgtccacacacgaggatccccaactgctggaggcaacactggcccagctgccacagagcctgtcctgtctccggtccctcgtgcttaaggggggccaacgaagggacactctcggggcctgtctcagaggcgcactcactaacttacccgcaggtttgagtggactagcccacttggcccatctggatctctcttttaactcgcttgagaccctgccagcatgcgtgctccagatgcgaggcttaggggccttgctgttgagccataattgtctatctgaactgcccgaggcccttggcgcccttccagctctgacattcctgacagtcacacacaatcggttgcagaccctccctccagctctgggtgccttgagcacacttcagagactcgaccttagtcagaacttgctcgacaccctccctcccgagataggagggctgggaagtctcttagaattaaacttggcctccaacagattacagtccctgcccgcctctctggccggtttgcgcagcctgcgattgttggtcctacacagtaatctactagcgtctgttccagccgacctcgctaggctgcctctgctcacgaggctggatttgcgcgacaaccagctccgggatcttccccccgaactactcgatgcgccttttgtaaggctgcaggggaatcctctgggtgaagcaagtccagacgccccatcaagtccagtggctgcgttgattccagaaatgcccagactgtttctgaccagcgatctggactcatttccagtgactccacaggggtgctccgttacgctggcttgcggagtgagattgcagtttccagctggagctacggctacacctatcaccataaggtacaggctgctgttgccggagccaggactggtacccttaggaccacacgacgcactgctttctcatgtactcgagttgcagccccatggggtcgcttttcagcaagatgtgggcctgtggctgctgtttacacccccccaggctcggagatgcagagaagtggtggttcgaacacgcaatgataactcttggggtgatctggaaacctaccttgaagaagaggcacctcagcgcttgtgggcccattgccaagtcccccatttctcctggtttttagtggtaagcagacccgtgagtaacgcctgcctggttcctcccgagggcaccttactttgctctagcggccatcccggggtgaaggtcatcttcccccccggggcgacagaagagcccagacgcgtttcaatgcaagtagtgagaatggccggtagggagttacaggccctgcttggagagcctgaggcagccgtctcccccctcctctgccttagccagtcggggccaccctcgttcctgcagccagtcaccgttcagctgcccctcccctctgggattaccggcctgtccttggatcggtcccgcctccacctgctatattgggcccctcccgccgccacttgggatgatatcaccgcccaagtcgtgctcgaattaacacacctgtacgccagattccaggtcactcactttagttggtattggctgtggtatacaacaaagaattgtgtcggtgggctggcaaggaaagcctgggaacgtctgagactccacagggtgaacctaatcgcactgcagaggaggcgagaccccgagcaagtcctgttgcaatgcttgccacgtaacaaggtggacgccacgctgagaaggcttctcgagaggtaccggggacctgagcctagcgacacagtggagatgtttgaaggggaggagttttttgcagcattcgaacgtggcatcgacgtggacgctgatcgccccgactgcgtggaggggcgcatctgcttcgtgttctacagccatttgaagaatgtcaaagaagtctacgttacaaccacactggatagggaagcccaggcggtcagagggcaggtgtccttctacaggggtgcagtgcccgttcgtgttcccgaggaggctgaggccgccagacagcggaagggggctgatgcactgtggatggccactttgccaattaaacttccaagactccgcggcagcgagggcccccggcgaggtgcaggcctgtcactggccccactgaacttaggggatgccgaaaccggctttctcacccagagcaacttgctttccgtagctgggcgcctagggctagattggcctgctgtggccctgcacctcggcgtgtcatacagggaggtgcagcgcattcgacacgagttcagagatgatctagacgagcagataagacatatgctgttttcttgggctgaaagacaggccggacagcctggtgccgtaggactgctggtgcaagctctggaacagtcagacagacaagacgtcgcagaagaggtccgggctgtgcttgaactgggccgacggaagtatcaggacagcatacgaagaatggggctagccccaaaagatccggcgctgccgggctcttctgcgcctcagcccccggaacccgctcaggcctag

SEQ ID NO: 312620 - DNA, 2733 bp, Artificial Sequence
  derived and/or modified sequence
atggccgccaccgtggagggccctgagctggaggccgctgctgctgctggagatgcctctgaagattctgatgctggcagccgggccctgcccttcctgggcggcaaccggctgagcctggacctgtacccaggcggctgccagcagctgctgcacctgtgtgtgcagcagcccctgcagctgctgcaggtggagttcctgcggctgagcacccatgaggacccccagctgctggaggccaccctggcccagctgccccagagcctgagctgcctgcggagcctggtgctgaagggcggccagaggcgggacaccctgggcgcctgcctgcggggggccctgaccaacctgcctgctggcctgagcggcctggcccacctggcccacctggacctgtccttcaacagcctggagaccctgcctgcctgtgtgctgcagatgaggggcctgggcgccctgctgctgagccacaactgcctgtctgagctgcctgaggccctgggcgccctgcctgccctgaccttcctgactgtgacccacaaccggctgcagaccctgcccccagccctgggcgccctgagcaccctgcagaggctggacctgagccagaacctgctggacaccctgcccccagaaattggaggcctgggcagcctgctggagctgaacctggccagcaaccggctgcagagcctgcctgccagcctggccggcctgcggagcctgcggctgctggtgctgcacagcaacctgctggcctctgtgcctgctgacctggcccggctgcccctgctgacccggctggacctgcgggacaaccagctgcgggacctgcccccagagctgctggatgccccctttgtgcggctgcagggcaaccccctgggggaggccagcccagatgcccccagcagccctgtggccgccctgatccctgagatgcccaggctcttcctgaccagtgacctggacagcttccctgtgaccccccagggctgcagcgtgaccctggcctgtggggtgcggctgcagtttcctgctggggccacagccacccccatcaccatccgctaccgcctgctgctgcctgagcccggcctggtgcccctgggcccccatgatgccctgctgagccacgtgctggagctgcagccccacggcgtggccttccagcaggatgtgggcctgtggctgctcttcaccccaccccaggcccggcgctgccgggaggtggtggtgaggaccagaaatgacaacagctggggagacctggagacctacctggaggaggaggccccccagaggctgtgggcccactgccaggtgccccacttctcctggttcctggtggtgtccaggcctgtgtccaatgcctgcctggtgcccccagagggcaccctgctgtgcagcagcggccaccctggggtgaaggtgatcttccccccaggggccacagaggagcccaggagagtgtccatgcaggtggtgaggatggccggccgggagctgcaggccctgctgggggagcctgaggccgctgtgagccccctgctgtgcctgagccagagcggccccccatccttcctgcagcctgtgacagtgcagctgcccctgcccagcggcatcaccggcctgagcctggacaggagccggctgcacctgctgtactgggcccctcctgctgccacctgggatgacatcacagcccaggtggtgctggagctgacccacctgtatgcccgcttccaggtgacccacttctcctggtactggctgtggtacaccaccaagaactgtgtgggcggcctggccaggaaggcctgggagcggctgcggctgcaccgggtgaacctgattgccctgcagaggcggcgggaccctgagcaggtgctgctgcagtgcctgcccaggaacaaggtggatgccaccctgcggcggctgctggagcgctaccggggccctgagcccagcgacacagtggagatgtttgaaggagaggagttctttgctgcctttgagcggggcattgatgtggatgctgacagaccagactgtgtggagggccgcatctgctttgtgttctacagccacctgaagaatgtgaaggaggtgtatgtgaccaccaccctggaccgggaggcccaggccgtgcggggccaggtgtccttctacagaggagctgtgcctgtgcgggtgcctgaggaggccgaggccgcccggcagaggaaaggagcagatgccctgtggatggccaccctgcccatcaagctgccccggctgcggggcagcgagggccccaggagaggagctggcctgagcctggcccccctgaacctgggagatgctgagaccggcttcctgacccagagcaacctgctgtctgtggccggccgcctgggcctggactggccagctgtggccctgcacctgggcgtgtcctaccgggaggtgcagaggatcagacatgagttcagagatgacctggatgagcagatccgccacatgctgttctcctgggccgagcggcaggccggccagcctggagctgtgggcctgctggtgcaggccctggagcagagcgaccggcaggatgtggccgaggaggtgcgggctgtgctggagctgggccgcaggaagtaccaggacagcatccggaggatgggcctggcccccaaggaccctgccctgcccggcagcagcgccccccagcccccagagcccgcccaggcctag

SEQ ID NO: 312621 - DNA, 2733 bp, Artificial Sequence
  derived and/or modified sequence
atggccgccaccgtggagggccccgagctggaggccgccgccgccgccggtgacgccagtgaagacagcgatgctggcagcagggcactgcccttcctggggggtaatcgcttatcattggatttatacccaggcgggtgtcagcagctgcttcatctctgtgtgcagcaacccttgcagttgcttcaggtggaattcttgcgactttcaactcacgaggaccctcaattgctggaggcaacgttagcgcagttgccccagtctttgagttgcctgcgcagcctcgtgttaaagggtggtcagcggagggacacactgggtgcttgcttgagaggggcactcacaaacctgccagctgggctctccggcttggctcatttggcacacttagatctgtcttttaatagcctggaaacactgcctgcctgtgttttgcagatgcgcggactaggagccctccttctttcacacaattgtctttccgaactgcctgaggcgttgggggccctgcccgcacttacttttttgaccgtcacccataaccgactgcagacactgccaccagctctgggtgctctgagcaccctccagagactggatctttcccagaacttgctggatacactaccaccggaaatcggggggttgggcagtctgctcgagctgaacctggcctctaaccggctgcaatccttgcctgcctccctagcaggactccgcagtctgagacttcttgtcctgcacagtaacctcctggcatcagtccctgctgatttggctaggctcccactcctcacgcggcttgatctgcgcgataaccagttacgcgatctcccccctgaacttctggatgcaccattcgtcagactccaaggaaacccgctcggcgaggccagtcctgacgccccctcttcacctgtagcagctctgatcccagaaatgccccggctatttctgacctcggacctcgactcatttcccgtcacaccacagggctgtagcgtgacgctagcgtgcggggtacggcttcagtttccagcaggcgccactgctactccgattactattaggtacaggctactgctgccagagcccggcctcgttcctctgggcccccatgacgcattactgtcgcacgtcctggagctccagccccacggagttgcttttcaacaggatgttggactctggctgctcttcaccccaccccaggccaggagatgcagggaagtggtggttagaactaggaacgacaattcgtggggtgaccttgagacatacctggaagaggaagcgccccaacgactctgggctcactgccaggttcctcacttttcctggtttcttgtcgtctctaggcccgtatcgaacgcatgtcttgtccctccggagggcactctcctgtgctcgtccggccacccgggagtaaaagtgatcttccccccaggcgccacagaggaaccacgccgcgtgtctatgcaggtcgtgagaatggctggtagggagttgcaagcactgctgggcgaacccgaagccgctgtctcaccgcttctgtgtctgtcacaatcgggacccccctccttcctccagcccgtcacagtacaactcccattgccgtccggtatcacaggcttgtcccttgacagaagccggctgcacctgctatattgggccccacctgctgctacttgggatgatatcacggcacaggtggtgctcgaactgacccacctatatgcccgcttccaggttactcacttcagctggtactggctgtggtacactacaaaaaactgcgtgggtggcctcgcacggaaagcctgggaacgtctccgactgcatcgggtgaacctgatcgctctccaaagacggagggatccagagcaggtcctgctccagtgtttgccacgcaataaagttgatgccaccctgcggcgcctcctggagcgatatcgaggcccagaaccttccgataccgtagaaatgtttgaaggcgaggaatttttcgctgctttcgagcgtgggatcgacgtagacgctgaccgccccgactgcgtggagggaagaatttgcttcgttttctatagccatctgaagaacgtgaaagaggtatacgtcaccacaaccctggacagagaagctcaagccgtgagaggccaagtgtcgttttatcggggagcagtgcccgtcagagtccccgaagaggcagaagccgcgagacaaaggaagggtgcagacgccctatggatggccactcttcctatcaagctcccgcggttaaggggtagcgaagggccccggagaggcgccggactgagcctcgcaccattaaatctaggcgatgcagagaccggatttttaactcaatctaatctgctttcagtagccggccggctcggactggattggcccgccgttgccctgcacttaggcgtttcctatcgtgaagtccagagaatccggcacgaatttcgcgatgacctggatgaacagataagacacatgctgttctcatgggccgagaggcaggctggccaacctggggccgtgggcctgttggtgcaggccctggagcagtcggatcgacaggatgtcgccgaggaagtgcgcgcagtcctcgagttgggccggcgcaaatatcaggatagcatccgcaggatgggccttgccccaaaggaccccgccttgcccggaagttctgctcctcaaccacccgagcccgcccaggcctag

SEQ ID NO: 312622 - DNA, 2733 bp, Artificial Sequence
  derived and/or modified sequence
atggccgctaccgtggaagggcctgaactggaggcggctgctgctgccggagatgcaagcgaagacagtgacgcaggatcgcgggctcttccatttctcggtggtaaccggctgtccctggatttatatccagggggatgccaacaactgttgcacctgtgcgtgcagcaaccccttcagcttctgcaggtggagttcctgcgcctgtcgacacacgaagatccccagcttctcgaggcaactctggcccagctgccgcaatccctgtcttgccttcgatcactcgtcctgaaaggtggccagaggcgcgacactctcggagcatgcttaagaggtgcactaacaaatctgcctgccggtctgagtgggctcgcacatctggcccacctcgacctctccttcaattcactggagacgctgcccgcatgtgtccttcagatgcgtggactcggggcattacttctgtcacacaattgcctctccgaacttcctgaggctttgggagcactgcccgctctcacttttctcacagttacacataaccgcctccagaccttacccccagcactcggcgctctgagcacccttcagcgactggacttgtcccaaaacctcctggacaccctgcccccagaaatcggaggtctgggctctcttctcgagctaaacctggcctctaaccgcttgcagtccctgcctgccagtcttgctgggctaagaagccttcggttgctcgttctccacagcaatttactcgcgagtgtacctgccgaccttgcacgcctccctctcctgacgaggttagacctgagagataaccaactacgcgatttaccaccagaactgctggatgcccctttcgtgaggcttcaggggaatccccttggcgaagcttctcctgacgcaccatcgtccccggtggcggcactaatacctgaaatgccacgattgttcctgaccagtgatctcgacagctttcccgttacccctcaagggtgcagtgtaactctggcatgcggcgtgcgcctccagtttcccgctggggcaaccgctactcctattaccatcaggtacaggcttctactgcccgaaccaggcctagtccctttagggccacacgacgctcttttgagccatgtgctggaactgcaaccacacggggtggcctttcagcaagacgttggcctatggctcctgtttacccctccccaagctaggaggtgccgcgaggtggtggttagaactaggaatgacaactcttggggggatctggagacttatctggaggaggaagcccctcagcgactgtgggctcactgtcaggtcccacacttctcctggttcctggtggtaagtcgccctgtgagcaacgcttgtttggtcccacctgaagggactctcctgtgctcttcaggccatcccggagtgaaggtaatcttcccaccaggcgcaacagaagaacctagacgcgtgagtatgcaggtggttcggatggcaggccgagagttgcaggcactactcggggagccggaggccgcagtaagtcccctgctgtgcctgagccagtcaggaccccctagctttctccagcctgtgactgtacagttgcctcttcccagcggtattactggcctgtctctggaccggtctcgccttcacttattatactgggctcccccagctgccacatgggatgatataacagcacaggtcgtcctggaactcacacatttgtacgctcgttttcaggtgacccacttctcttggtactggctgtggtataccacgaaaaattgtgttgggggtctggcaagaaaggcttgggagagacttcgactgcaccgcgtgaacctgatcgccctgcagcgaagacgtgaccccgaacaggtgctgctccaatgcctgcctcgcaacaaggtagatgcaacgctccggagactcttagagagataccgtggccctgaaccgtctgacaccgtggagatgttcgaaggcgaagagttctttgctgctttcgagagaggtatagacgtcgacgccgaccgtccagattgcgttgaaggtcgcatttgtttcgtgttctatagccacctgaagaacgtgaaggaagtgtacgtcacaactaccctcgaccgggaagcccaagcggtacggggtcaggtatcattctataggggtgcagttcccgttcgcgtgcccgaagaagccgaggccgcacgacagcggaagggagccgacgccctgtggatggctacactgccgatcaaactcccgagactcagaggatccgaaggacctcgcaggggtgccggtctctcgctcgccccactcaatctcggggatgctgaaacaggcttcctgacacagtccaatttgttatcagtggccggaaggctcggactagattggccagctgttgcactacatttgggggtgtcctaccgtgaagtacaacggattcgccacgaatttagagatgaccttgatgagcagattcgacacatgttgttctcatgggcagaacgccaggcgggacagcccggtgctgttgggttgcttgtgcaggcccttgaacaatccgatcggcaagacgtggctgaagaggttagggctgtcttggaattaggaaggcggaagtatcaggactccatacgaaggatgggcttggctccgaaggatccggctctccctggctccagtgcccctcagcctcctgaaccagcccaggcctag

SEQ ID NO: 312623 - protein, 893 aa, Artificial Sequence
  derived and/or modified sequence
MAATVEGPELEAAAAAGDASEDSDAGSRALPFLGGNRLSLDLYPGGCQQLLHLCVQQPLQLLQVEFLRLSTHEDPQLLEATLAQLPQSLSCLRSLVLKGGQRRDTLGACLRGALTNLPAGLSGLAHLAHLDLSFNSLETLPACVLQMRGLGALLLSHNCLSELPEALGALPALTFLTVTHNRLQTLPPALGALSTLQRLDLSQNLLDTLPPEIGGLGSLLELNLASNRLQSLPASLAGLRSLRLLVLHSNLLASVPADLARLPLLTRLDLRDNQLRDLPPELLDAPFVRLQGNPLGEASPDAPSSPVAALIPEMPRLFLTSDLDSFPVTPQGCSVTLACGVRLQFPAGATATPITIRYRLLLPEPGLVPLGPHDALLSHVLELQPHGVAFQQDVGLWLLFTPPQARRCREVVVRTRNDNSWGDLETYLEEEAPQRLWAHCQVPHFSWFLVVSRPVSNACLVPPEGTLLCSSGHPGVKVIFPPGATEEPRRVSMQVVRMAGRELQALLGEPEAAVSPLLCLSQSGPPSFLQPVTVQLPLPSGITGLSLDRSRLHLLYWAPPAATWDDITAQVVLELTHLYARFQVTHFSWYWLWYTTKNCVGGLARKAWERLRLHRVNLIALQRRRDPEQVLLQCLPRNKVDATLRRLLERYRGPEPSDTVEMFEGEEFFAAFERGIDVDADRPDCVEGRICFVFYSHLKNVKEVSFYRGAVPVRVPEEAEAARQRKGADALWMATLPIKLPRLRGSEGPRRGAGLSLAPLNLGDAETGFLTQSNLLSVAGRLGLDWPAVALHLGVSYREVQRIRHEFRDDLDEQIRHMLFSWAERQAGQPGAVGLLVQALEQSDRQDVAEEVRAVLELGRRKYQDSIRRMGLAPKDPALPGSSAPQPPEPAQA

SEQ ID NO: 312624 - DNA, 2682 bp, Artificial Sequence
  derived and/or modified sequence
atggccgccaccgtggagggccccgagctggaggccgccgccgccgccggcgacgccagcgaggacagcgacgccggcagcagagccctgcccttcctgggcggcaacagactgagcctggacctgtaccccggcggctgccagcagctgctgcacctgtgcgtgcagcagcccctgcagctgctgcaggtggagttcctgagactgagcacccacgaggacccccagctgctggaggccaccctggcccagctgccccagagcctgagctgcctgagaagcctggtgctgaagggcggccagagaagagacaccctgggcgcctgcctgagaggcgccctgaccaacctgcccgccggcctgagcggcctggcccacctggcccacctggacctgagcttcaacagcctggagaccctgcccgcctgcgtgctgcagatgagaggcctgggcgccctgctgctgagccacaactgcctgagcgagctgcccgaggccctgggcgccctgcccgccctgaccttcctgaccgtgacccacaacagactgcagaccctgccccccgccctgggcgccctgagcaccctgcagagactggacctgagccagaacctgctggacaccctgccccccgagatcggcggcctgggcagcctgctggagctgaacctggccagcaacagactgcagagcctgcccgccagcctggccggcctgagaagcctgagactgctggtgctgcacagcaacctgctggccagcgtgcccgccgacctggccagactgcccctgctgaccagactggacctgagagacaaccagctgagagacctgccccccgagctgctggacgcccccttcgtgagactgcagggcaaccccctgggcgaggccagccccgacgcccccagcagccccgtggccgccctgatccccgagatgcccagactgttcctgaccagcgacctggacagcttccccgtgaccccccagggctgcagcgtgaccctggcctgcggcgtgagactgcagttccccgccggcgccaccgccacccccatcaccatcagatacagactgctgctgcccgagcccggcctggtgcccctgggcccccacgacgccctgctgagccacgtgctggagctgcagccccacggcgtggccttccagcaggacgtgggcctgtggctgctgttcacccccccccaggccagaagatgcagagaggtggtggtgagaaccagaaacgacaacagctggggcgacctggagacctacctggaggaggaggccccccagagactgtgggcccactgccaggtgccccacttcagctggttcctggtggtgagcagacccgtgagcaacgcctgcctggtgccccccgagggcaccctgctgtgcagcagcggccaccccggcgtgaaggtgatcttcccccccggcgccaccgaggagcccagaagagtgagcatgcaggtggtgagaatggccggcagagagctgcaggccctgctgggcgagcccgaggccgccgtgagccccctgctgtgcctgagccagagcggcccccccagcttcctgcagcccgtgaccgtgcagctgcccctgcccagcggcatcaccggcctgagcctggacagaagcagactgcacctgctgtactgggccccccccgccgccacctgggacgacatcaccgcccaggtggtgctggagctgacccacctgtacgccagattccaggtgacccacttcagctggtactggctgtggtacaccaccaagaactgcgtgggcggcctggccagaaaggcctgggagagactgagactgcacagagtgaacctgatcgccctgcagagaagaagagaccccgagcaggtgctgctgcagtgcctgcccagaaacaaggtggacgccaccctgagaagactgctggagagatacagaggccccgagcccagcgacaccgtggagatgttcgagggcgaggagttcttcgccgccttcgagagaggcatcgacgtggacgccgacagacccgactgcgtggagggcagaatctgcttcgtgttctacagccacctgaagaacgtgaaggaggtgagcttctacagaggcgccgtgcccgtgagagtgcccgaggaggccgaggccgccagacagagaaagggcgccgacgccctgtggatggccaccctgcccatcaagctgcccagactgagaggcagcgagggccccagaagaggcgccggcctgagcctggcccccctgaacctgggcgacgccgagaccggcttcctgacccagagcaacctgctgagcgtggccggcagactgggcctggactggcccgccgtggccctgcacctgggcgtgagctacagagaggtgcagagaatcagacacgagttcagagacgacctggacgagcagatcagacacatgctgttcagctgggccgagagacaggccggccagcccggcgccgtgggcctgctggtgcaggccctggagcagagcgacagacaggacgtggccgaggaggtgagagccgtgctggagctgggcagaagaaagtaccaggacagcatcagaagaatgggcctggcccccaaggaccccgccctgcccggcagcagcgccccccagccccccgagcccgcccaggcctag

SEQ ID NO: 312625 - DNA, 2682 bp, Artificial Sequence
  derived and/or modified sequence
atggccgccacagttgagggccctgagctggaggccgctgctgctgccggggatgcttctgaggacagcgatgccggaagcagggctttgcctttcttgggcggcaaccggttgtccctcgacctgtaccctggtggttgccagcagctgctgcacctctgcgttcagcagcctctgcagcttcttcaggtggagtttctgcgcctctcgactcacgaggatcctcaactgcttgaggccacactcgctcagcttccccagagtctgagctgcctgcggtctctcgtcctcaaaggtgggcaaaggcgggataccctcggcgcctgtttaagaggcgctctcactaatctgccagcgggactaagcggactggcccacttagctcatctcgacttgagctttaacagtttagaaaccttgccagcttgtgtgcttcagatgagggggctgggtgccctcttgctttcacataattgcttaagtgagctccctgaagctctaggcgccctgcccgccctcacatttctgaccgtaactcacaatcgcctgcagaccctgccccccgcattgggggccctgtccacactgcagcggttggatctgagccaaaacttactagacaccttaccacccgagatcgggggcctggggagtttactcgaactcaatttggcttctaatagattacagtctctgcccgcaagcctggctggtttaagatctctgcggctcctggtgctgcatagcaatcttctggccagcgtgcctgcggacttagctagactgcctctgctaacacggttggatctgcgcgataatcaacttagagacctgccgcctgaattgctagatgctcctttcgtgcggttacaggggaaccctctgggagaggcatcgcccgacgccccgtccagtcccgtggccgcactgatacctgagatgcccagattgttcctgacttcagatcttgactcctttcctgtaactcctcagggctgttccgtcacccttgcctgtggcgttcgcctgcagttccctgcgggcgccactgctacgccgatcacgattaggtatagactcctgttgcctgaaccaggtctggtgcccctgggaccccatgacgctctgctgtctcacgtgctggagctccaaccccatggggttgcctttcagcaggatgtcggtctctggctgctgttcactccccctcaggcacgcagatgcagggaagtcgtcgtcagaacaagaaatgacaactcatggggagacttggagacttatctggaggaagaggctccacagcggttgtgggcccattgccaggtgccgcacttctcctggttcttggtggttagccggccagtgagtaatgcttgccttgtaccacctgaagggacattgctgtgtagcagcggacaccctggcgtcaaggttatctttccccctggcgctacggaagagcctagacgggtgtcaatgcaggtcgttcgtatggctggcagggagttgcaggccctcctaggtgaacccgaagctgctgtttcccccttactgtgtctgagtcagtccggcccccctagctttctgcaaccagtgaccgtgcaacttccgctgccgtcgggcattactggcctctccttagaccgctccaggctgcatttattgtactgggccccacccgccgccacatgggacgacattacggcacaggttgttctagaattgacccatctgtatgcacgttttcaggtcacccacttttcctggtattggctgtggtacacaaccaagaactgtgtcggtggtctggctagaaaggcctgggaacgtctgcggttgcatcgggttaacctcattgccctccagcgaaggagggatccagaacaggtgctcctccagtgcctcccccgcaacaaagtggatgccactctaagacggttgctggaaagatataggggccctgaacccagcgatactgtagagatgttcgagggtgaggagttttttgcggcttttgaacggggcatcgatgtcgatgcagacagacccgattgcgtggaaggcagaatctgttttgtgttctatagccatctcaaaaatgtcaaagaagtctcattctataggggggcagtccccgtacgcgttcctgaggaggccgaggctgcgaggcagcggaagggcgcagacgccctgtggatggcgaccctccctatcaagttacctcgtcttaggggaagcgaggggccacgaagaggtgctggtctgagtttagcaccgttgaatctcggggatgctgagactggcttcctgacccagtctaatttattgtcagtggcaggccggctcggtcttgattggcccgccgtcgccttgcacctcggtgtgagctatcgcgaggtgcagagaatcaggcacgaatttcgggacgatttggatgagcagattcgccacatgctgttttcatgggcagaacgacaagccggccaacccggcgctgtaggtctgctggtgcaggccttggaacagtccgataggcaggatgtggcggaagaggtgcgagctgtactcgagttgggaagaaggaagtaccaagatagtatcaggcgaatgggcctggccccgaaggatccggctctgcctgggtcatctgccccacaacctccagagcccgcccaagcttag

SEQ ID NO: 312626 - DNA, 2682 bp, Artificial Sequence
  derived and/or modified sequence
atggccgccaccgtggagggccctgagctggaggccgctgctgctgctggagatgcctctgaagattctgatgctggcagccgggccctgcccttcctgggcggcaaccggctgagcctggacctgtacccaggcggctgccagcagctgctgcacctgtgtgtgcagcagcccctgcagctgctgcaggtggagttcctgcggctgagcacccatgaggacccccagctgctggaggccaccctggcccagctgccccagagcctgagctgcctgcggagcctggtgctgaagggcggccagaggcgggacaccctgggcgcctgcctgcggggggccctgaccaacctgcctgctggcctgagcggcctggcccacctggcccacctggacctgtccttcaacagcctggagaccctgcctgcctgtgtgctgcagatgaggggcctgggcgccctgctgctgagccacaactgcctgtctgagctgcctgaggccctgggcgccctgcctgccctgaccttcctgactgtgacccacaaccggctgcagaccctgcccccagccctgggcgccctgagcaccctgcagaggctggacctgagccagaacctgctggacaccctgcccccagaaattggaggcctgggcagcctgctggagctgaacctggccagcaaccggctgcagagcctgcctgccagcctggccggcctgcggagcctgcggctgctggtgctgcacagcaacctgctggcctctgtgcctgctgacctggcccggctgcccctgctgacccggctggacctgcgggacaaccagctgcgggacctgcccccagagctgctggatgccccctttgtgcggctgcagggcaaccccctgggggaggccagcccagatgcccccagcagccctgtggccgccctgatccctgagatgcccaggctcttcctgaccagtgacctggacagcttccctgtgaccccccagggctgcagcgtgaccctggcctgtggggtgcggctgcagtttcctgctggggccacagccacccccatcaccatccgctaccgcctgctgctgcctgagcccggcctggtgcccctgggcccccatgatgccctgctgagccacgtgctggagctgcagccccacggcgtggccttccagcaggatgtgggcctgtggctgctcttcaccccaccccaggcccggcgctgccgggaggtggtggtgaggaccagaaatgacaacagctggggagacctggagacctacctggaggaggaggccccccagaggctgtgggcccactgccaggtgccccacttctcctggttcctggtggtgtccaggcctgtgtccaatgcctgcctggtgcccccagagggcaccctgctgtgcagcagcggccaccctggggtgaaggtgatcttccccccaggggccacagaggagcccaggagagtgtccatgcaggtggtgaggatggccggccgggagctgcaggccctgctgggggagcctgaggccgctgtgagccccctgctgtgcctgagccagagcggccccccatccttcctgcagcctgtgacagtgcagctgcccctgcccagcggcatcaccggcctgagcctggacaggagccggctgcacctgctgtactgggcccctcctgctgccacctgggatgacatcacagcccaggtggtgctggagctgacccacctgtatgcccgcttccaggtgacccacttctcctggtactggctgtggtacaccaccaagaactgtgtgggcggcctggccaggaaggcctgggagcggctgcggctgcaccgggtgaacctgattgccctgcagaggcggcgggaccctgagcaggtgctgctgcagtgcctgcccaggaacaaggtggatgccaccctgcggcggctgctggagcgctaccggggccctgagcccagcgacacagtggagatgtttgaaggagaggagttctttgctgcctttgagcggggcattgatgtggatgctgacagaccagactgtgtggagggccgcatctgctttgtgttctacagccacctgaagaatgtgaaggaggtgtccttctacagaggagctgtgcctgtgcgggtgcctgaggaggccgaggccgcccggcagaggaaaggagcagatgccctgtggatggccaccctgcccatcaagctgccccggctgcggggcagcgagggccccaggagaggagctggcctgagcctggcccccctgaacctgggagatgctgagaccggcttcctgacccagagcaacctgctgtctgtggccggccgcctgggcctggactggccagctgtggccctgcacctgggcgtgtcctaccgggaggtgcagaggatcagacatgagttcagagatgacctggatgagcagatccgccacatgctgttctcctgggccgagcggcaggccggccagcccggggctgtgggcctgctggtgcaggccctggagcagagcgaccggcaggatgtggccgaggaggtgcgggctgtgctggagctgggccgcaggaagtaccaggacagcatccggaggatgggcctggcccccaaggaccctgccctgcccggcagcagcgccccccagcccccagagcccgcccaggcctag

SEQ ID NO: 312627 - DNA, 2682 bp, Artificial Sequence
  derived and/or modified sequence
atggccgccaccgtggagggccccgagctggaggccgccgccgccgcaggagacgccagcgaagacagcgacgccgggtcccgcgctctgcctttcttgggcggaaaccgcttgtcactggacctatatcctggcggatgtcagcagctgcttcatctgtgcgtgcaacagcctctgcagctccttcaggtagagttccttcgcctctcaacccatgaggaccctcagcttctggaagcaacactagctcagctgccacagtcacttagctgtttaagaagcttggttcttaagggggggcaaagaagggacactctgggggcctgtttacgaggggccctgacaaacctgcctgccggtcttagcggactcgctcatctcgcacacctggacctgtccttcaactccctggagaccctcccggcctgtgtgcttcagatgaggggcctgggcgccttactcctttcccacaattgtctgagtgagctgcccgaggcactgggtgctctgccggccctgaccttcctcaccgtcacacacaatagactgcaaaccctaccaccagctttgggagccttgtccactctgcagagactggatttgagtcaaaacctcttggacaccttaccccccgaaatcggcggtctcgggagtctgctggagctcaatttggcgtccaacaggttgcagtcactgcctgcttctctcgctggactgcgatctctcagactgcttgtacttcattctaacctgcttgcatctgtgcctgcagatttggctcgactcccactcctgacacgactggacttgcgcgacaaccagctgcgggacttgcctcctgagcttctggatgcacctttcgtgaggctgcagggaaacccgcttggcgaggcctcccctgatgctccctcatctcccgtcgcggcgcttatcccggagatgccaagattattcctgacaagcgatctggattcttttcccgtgaccccgcagggatgctcagtgactttggcctgcggggttcgactccaatttcctgccggcgcaaccgctacaccaataactatccggtacagacttttgctgcccgagcccggcctagtccccctggggccacacgacgcgctattgtcgcacgtgcttgaattgcagccacacggtgtcgcttttcagcaggacgtgggtctgtggttacttttcacgcctcctcaagcacggagatgtcgggaggtggtggtgaggacgcgcaatgataattcatggggcgacctggagacctacctcgaggaggaagcccctcagcggctctgggcgcactgtcaggtgccccacttctcctggttccttgtcgtatctcggccagttagtaacgcctgtcttgtccctcccgagggaacactcttatgctcatcgggacaccctggcgtcaaggtgatctttcccccaggggccacagaggaaccgcggagggtgagtatgcaagtcgttagaatggcggggagggaattacaggcacttctcggggagcccgaagccgccgtgagccctctgctgtgcctgagtcaaagcgggccaccttctttcctacagccagtcacagtgcaactgcccctcccatctggaatcactggtctgtctctggatcgatcccgcctccacctcctgtattgggcccctccagctgccacctgggatgatattacagctcaggtagtacttgagcttacacacctttacgcgcgattccaagtcacacatttcagttggtactggctctggtacacaacaaaaaactgtgttggtgggcttgcccggaaagcatgggagaggttacggctccatagggtgaacttgatcgcactccagcggcgtcgtgacccagagcaggtccttctgcagtgcctcccgcggaacaaggtggacgcgacgctgagacgccttctcgagaggtatcgtggcccagagccctccgatacagtggaaatgttcgaaggcgaggagttttttgctgcttttgagcgggggattgatgtcgacgctgaccgtcccgactgcgtcgaaggcagaatctgcttcgtgttttacagccacctgaaaaacgttaaggaggtgtcattttaccgcggtgcagtcccggtcagagttcccgaggaggctgaggcagcacggcagagaaagggagcagatgcactctggatggccacgctaccaatcaagcttccgcggctcaggggttccgagggccctcgcaggggagctggcctgtctctagcacccttgaacctgggggacgctgaaactggctttctaacacagtccaatttactcagcgtcgcagggcggctaggccttgattggcctgcagttgcactgcatctcggagttagctacagggaagtgcagcggatcagacacgaatttcgggatgacttagatgagcagatcaggcacatgttgttctcttgggcagagcggcaggcggggcaaccaggtgctgtgggcctgctcgtccaagcactcgaacagagtgatcggcaggatgtagctgaggaggtgcgcgccgtcctggaacttggtcggcgcaagtaccaggactcaatacgccgcatgggactcgcgcccaaggacccagcactgcctgggtcgagcgcgccccagccgccggaaccagcacaggcttag

SEQ ID NO: 312628 - DNA, 2682 bp, Artificial Sequence
  derived and/or modified sequence
atggctgcaaccgtggagggtcccgaacttgaagccgcagccgctgccggagatgcctccgaagattcagatgcagggagccgtgctctaccttttctcgggggtaacagactatccttagacttatatccaggtggatgtcagcagctccttcatttatgcgtacagcagcctctccagctgcttcaagtcgagttcttgcgcctcagcactcacgaagaccctcagctactggaagccactctggcccaactaccccagtctctaagctgcctcagaagcctagtgctgaaaggtggccaaaggagagataccctaggagcatgtctgaggggagcactgacaaatttgccggctggactgagcgggctcgctcacctggctcacctcgatctaagcttcaactcacttgaaaccctccctgcctgtgtgctacaaatgcggggactgggtgcacttctgctgtcccataactgcctaagtgagttgccggaagctctcggagccctgccagccctaacctttcttactgtcacacataatagactccagaccctccctccggctctgggcgcattatcaacactgcagcggctggacctgtcccaaaatctcctggacaccttgcctccagaaatcggagggctcggatccctgctggagctcaaccttgcctcaaatagactgcagagtttgccggcatccttggcaggcttacgatcacttaggctcctcgttctgcattcaaatttgctagcctctgtgcctgctgatttggcgagactgcctctgctgacaagactcgatttgcgggacaatcagctgcgcgacttgccccctgaactgctcgacgccccatttgtgaggctccagggtaaccccttgggagaagcaagcccagacgcaccatccagcccagtggcagccctgattccggaaatgccgagactgttcctaacctccgatctcgacagctttccagtgacccctcaaggctgttcagtgacccttgcctgcggcgttcgactgcaatttccggcaggcgctaccgccactccgatcactataagataccgacttcttctccccgaacccggactagtaccactcggtccacacgacgcgctactgtcccacgtcctggaactgcagccacacggggtggcattccagcaagacgtcggactatggttactttttacaccccctcaggctcgcagatgtcgtgaagtggtcgtacgcacccgaaacgataacagttggggcgatctcgagacgtatctggaggaggaggccccacagagactgtgggcccactgccaggtcccccatttctcttggtttctggtcgtctctcgcccagtgtctaacgcatgcctcgtgcctcctgagggtacattactgtgctcctcggggcacccgggtgttaaggtaatcttccctccaggagctactgaggaaccacgtagagtaagcatgcaagtagttcggatggctggaagagaattgcaagcccttttgggtgagcccgaagccgctgtcagcccactcctctgtttgtctcaaagcgggccaccctccttccttcagcccgtgaccgtgcagcttcccctgccaagcgggatcaccggccttagcctcgaccggagtcgcctgcaccttctttattgggctcccccagccgctacctgggacgacatcactgcacaggtggttttagagttaacgcacttatacgctaggtttcaagtcacgcattttagttggtactggctgtggtatacaaccaaaaactgtgtcggcggtttagctaggaaggcgtgggaacgactgcgtttgcacagggtgaatctcatcgcgcttcaacggcgtagagatccagaacaagtgctcctgcaatgtttacccaggaacaaagtcgatgccactctccgaaggctgctggagaggtacaggggccctgaacccagtgatactgtagaaatgtttgagggcgaagaatttttcgccgcattcgaacggggaattgatgtggacgccgacaggcccgattgcgttgaaggaaggatctgtttcgtgttctactcccacctgaaaaacgtgaaggaggtttcattttacagaggcgctgtcccggtgcgggtccctgaggaggctgaagccgctagacagagaaagggggcagatgccctttggatggccacccttcctattaagctacctcgtttgcgaggatccgaaggtccacggagaggcgctggcctgagcctcgcgcctctcaaccttggagatgcagagactggttttcttactcagtcaaatttgttaagtgtggctggcaggttgggattggattggcctgcagtggccctccacctgggtgtctcctaccgcgaagtgcaaagaattaggcacgaattcagggacgatttggacgagcaaatacgccatatgctgttttcctgggcagaaagacaagcgggacagcctggcgcagttgggcttttggtacaagcactggagcagagcgatagacaggacgtggccgaggaggttcgggctgtgttggaactcggccgtaggaaatatcaggactcaattagacgtatggggctagcgccaaaggaccccgctttacccggttccagcgccccacagcctccagagcccgcacaagcgtag

SEQ ID NO: 312629 - protein, 24 aa, Artificial Sequence
  derived and/or modified sequence
MKVVPEKNAVRILWGRERGARAMG

SEQ ID NO: 312630 - DNA, 522 bp, Artificial Sequence
  derived and/or modified sequence
gagctgtttttcggcgctcggctgtggttccttgaacgattgcttgggcgttcctcctttgatgtctggggcgttcttgtattcggtgatcttttgcgccgtcttcttgcttgatgtctcctgagcggcggcggcgccgggtcgagggctgagttgtccgcgaggccccgcgctcaagccgccttctcctgccggtcggtagaacggaccccttcctttattcctgtctcctctttctttttccctgtggctcagcccgttcgctggactgcaaaccgagctcccgtctgccttgcagtggagaagagaaagagaaaatgagtgagaaagatttccatgaggacaacttacaaggacctgtatggcctcattttagctgcttcagtgtgttggagctgttacttgctccttcatttcctgggcctggtgtgacagtggctactgagcgccatgaaggttgtcccagaaaagaatgctgtccggatactctgggggcgagaacggggtgctcgggccatggga

SEQ ID NO: 312631 - protein, 461 aa, Artificial Sequence [sequence omitted]

SEQ ID NO: 312632 - protein, 199 aa, Artificial Sequence
  derived and/or modified sequence
MSLDIQSLDIQCEELSDARWAELLPLLQQCQVVRLDDCGLTEARCKDISSALRVNPALAELNLRSNELGDVGVHCVLQGLQTPSCKIQKLSLQNCCLTGAGCGVLSSTLRTLPTLQELHLSDNLLGDAGLQLLCEGLLDPQCRLEKLQLEYCSLSAASCEPLASVLRAKPDFKELTVSNNDINEAGVRVLCQGLKDSPC

SEQ ID NO: 312633 - protein, 189 aa, Artificial Sequence
  derived and/or modified sequence
MSLDIQSLDIQCEELSDARWAELLPLLQQCQVVRLDDCGLTEARCKDISSALRVNPALAELNLRSNELGDVGVHCVLQGLQTPSCKIQKLSLQNCCLTGAGCGVLSSTLRTLPTLQELHLSDNLLGDAGLQLLCEGLLDPQCRLEKLQLEYCSLSAASCEPLASVLRAKPDFKELTVSNNDINEAGVRV

SEQ ID NO: 312634 - protein, 194 aa, Artificial Sequence
  derived and/or modified sequence
MSLDIQSLDIQCEELSDARWAELLPLLQQCQVVRLDDCGLTEARCKDISSALRVNPALAELNLRSNELGDVGVHCVLQGLQTPSCKIQKLSLQNCCLTGAGCGVLSSTLRTLPTLQELHLSDNLLGDAGLQLLCEGLLDPQCRLEKLQLEYCSLSAASCEPLASVLRAKPDFKELTVSNNDINEAGVRVLCQGL

SEQ ID NO: 312635 - protein, 40 aa, Artificial Sequence
  derived and/or modified sequence
MSLDIQSLDIQCEELSDARWAELLPLLQQCQVVRLDDCGL

SEQ ID NO: 312636 - DNA, 1722 bp, Artificial Sequence
  derived and/or modified sequence
cgagccggctcgaacacgcccgcgccgctgactggcgggtggggttgtcgacacgttcaacccgttctgctggctcgagaacgaagtaggccgtctcgctctgggtctccaggcccgcgaccgtccgccagtcgtcccgaggccactcttcacctccaccatgagcctggacatccagagcctggacatccagtgtgaggagctgagcgacgctagatgggccgagctcctccctctgctccagcagtgccaagtggtcaggctggacgactgtggcctcacggaagcacggtgcaaggacatcagctctgcacttcgagtcaaccctgcactggcagagctcaacctgcgcagcaacgagctgggcgatgtcggcgtgcattgcgtgctccagggcctgcagaccccctcctgcaagatccagaagctgagcctccagaactgctgcctgacgggggccggctgcggggtcctgtccagcacactacgcaccctgcccaccctgcaggagctgcacctcagcgacaacctcttgggggatgcgggcctgcagctgctctgcgaaggactcctggacccccagtgccgcctggaaaagctgcagctggagtattgcagcctctcggctgccagctgcgagcccctggcctccgtgctcagggccaagccggacttcaaggagctcacggttagcaacaacgacatcaatgaggctggcgtccgtgtgctgtgccagggcctgaaggactccccctgccagctggaggcgctcaagctggagagctgcggtgtgacatcagacaactgccgggacctgtgcggcattgtggcctccaaggcctcgctgcgggagctggccctgggcagcaacaagctgggtgatgtgggcatggcggagctgtgcccagggctgctccaccccagctccaggctcaggaccctgtggatctgggagtgtggcatcactgccaagggctgcggggatctgtgccgtgtcctcagggccaaggagagcctgaaggagctcagcctggccggcaacgagctgggggatgagggtgcccgactgctgtgtgagaccctgctggaacctggctgccagctggagtcgctgtgggtgaagtcctgcagcttcacagccgcctgctgctcccacttcagctcagtgctggcccagaacaggtttctcctggagctacagataagcaacaacaggctggaggatgcgggcgtgcgggagctgtgccagggcctgggccagcctggctctgtgctgcgggtgctctggttggccgactgcgatgtgagtgacagcagctgcagcagcctcgccgcaaccctgttggccaaccacagcctgcgtgagctggacctcagcaacaactgcctgggggacgccggcatcctgcagctggtggagagcgtccggcagccgggctgcctcctggagcagctggtcctgtacgacatttactggtctgaggagatggaggaccggctgcaggccctggagaaggacaagccatccctgagggtcatctcctgaggctcttcctgctgctgctctccctggacgaccggcctcgaggcaaccctggggcccaccagcccctgccatgctctcaccctgcatatcctaggtttgaagagaaacgctcagatccgcttatttctgccagtatattttggacactttataatcattaaagcactttcttggca

SEQ ID NO: 312637 - DNA, 1864 bp, Artificial Sequence
  derived and/or modified sequence
ggctgcgcctgcgtggttcgtcctcacgtggccgtcaagccctctagtgccttagattccagcgagctacgcaagcaatcctggcccagccgagcttgcttccccaaatcccgtaatccttgaccttattcccccaaagaagcggcctcccgggaaggagcgccctggcggagaagactcgaacggctcccacagccgggcgttgggggaaagaatctccggcctgtgaaactgtgaggggattcggccaagacgtcctcttccctctgcctcccacccaggccactcttcacctccaccatgagcctggacatccagagcctggacatccagtgtgaggagctgagcgacgctagatgggccgagctcctccctctgctccagcagtgccaagtggtcaggctggacgactgtggcctcacggaagcacggtgcaaggacatcagctctgcacttcgagtcaaccctgcactggcagagctcaacctgcgcagcaacgagctgggcgatgtcggcgtgcattgcgtgctccagggcctgcagaccccctcctgcaagatccagaagctgagcctccagaactgctgcctgacgggggccggctgcggggtcctgtccagcacactacgcaccctgcccaccctgcaggagctgcacctcagcgacaacctcttgggggatgcgggcctgcagctgctctgcgaaggactcctggacccccagtgccgcctggaaaagctgcagctggagtattgcagcctctcggctgccagctgcgagcccctggcctccgtgctcagggccaagccggacttcaaggagctcacggttagcaacaacgacatcaatgaggctggcgtccgtgtgctgtgccagggcctgaaggactccccctgccagctggaggcgctcaagctggagagctgcggtgtgacatcagacaactgccgggacctgtgcggcattgtggcctccaaggcctcgctgcgggagctggccctgggcagcaacaagctgggtgatgtgggcatggcggagctgtgcccagggctgctccaccccagctccaggctcaggaccctgtggatctgggagtgtggcatcactgccaagggctgcggggatctgtgccgtgtcctcagggccaaggagagcctgaaggagctcagcctggccggcaacgagctgggggatgagggtgcccgactgctgtgtgagaccctgctggaacctggctgccagctggagtcgctgtgggtgaagtcctgcagcttcacagccgcctgctgctcccacttcagctcagtgctggcccagaacaggtttctcctggagctacagataagcaacaacaggctggaggatgcgggcgtgcgggagctgtgccagggcctgggccagcctggctctgtgctgcgggtgctctggttggccgactgcgatgtgagtgacagcagctgcagcagcctcgccgcaaccctgttggccaaccacagcctgcgtgagctggacctcagcaacaactgcctgggggacgccggcatcctgcagctggtggagagcgtccggcagccgggctgcctcctggagcagctggtcctgtacgacatttactggtctgaggagatggaggaccggctgcaggccctggagaaggacaagccatccctgagggtcatctcctgaggctcttcctgctgctgctctccctggacgaccggcctcgaggcaaccctggggcccaccagcccctgccatgctctcaccctgcatatcctaggtttgaagagaaacgctcagatccgcttatttctgccagtatattttggacactttataatcattaaagcactttcttggcagg

SEQ ID NO: 312638 - DNA, 2014 bp, Artificial Sequence
  derived and/or modified sequence
cctcacgtggccgtcaagccctctagtgccttagattccagcgagctacgcaagcaatcctggcccagccgagcttgcttccccaaatcccgtaatccttgaccttattcccccaaagaagcggcctcccgggaaggagcgccctggcggagaagactcgaacggctcccacagccgggcgttgggggaaaggcatgaagaactcttgactgacagaaacggagggtgtgtccaaagttttgaggacggccgagcggcgctccaaaacccgtcctcacagcctcgccccgttcgcctcagctacaacaaatcatcgtcaacctgttccaccttctccagtctggtagcaaaaaggggtgtctcagaatctccggcctgtgaaactgtgaggggattcggccaagacgtcctcttccctctgcctcccacccaggccactcttcacctccaccatgagcctggacatccagagcctggacatccagtgtgaggagctgagcgacgctagatgggccgagctcctccctctgctccagcagtgccaagtggtcaggctggacgactgtggcctcacggaagcacggtgcaaggacatcagctctgcacttcgagtcaaccctgcactggcagagctcaacctgcgcagcaacgagctgggcgatgtcggcgtgcattgcgtgctccagggcctgcagaccccctcctgcaagatccagaagctgagcctccagaactgctgcctgacgggggccggctgcggggtcctgtccagcacactacgcaccctgcccaccctgcaggagctgcacctcagcgacaacctcttgggggatgcgggcctgcagctgctctgcgaaggactcctggacccccagtgccgcctggaaaagctgcagctggagtattgcagcctctcggctgccagctgcgagcccctggcctccgtgctcagggccaagccggacttcaaggagctcacggttagcaacaacgacatcaatgaggctggcgtccgtgtgctgtgccagggcctgaaggactccccctgccagctggaggcgctcaagctggagagctgcggtgtgacatcagacaactgccgggacctgtgcggcattgtggcctccaaggcctcgctgcgggagctggccctgggcagcaacaagctgggtgatgtgggcatggcggagctgtgcccagggctgctccaccccagctccaggctcaggaccctgtggatctgggagtgtggcatcactgccaagggctgcggggatctgtgccgtgtcctcagggccaaggagagcctgaaggagctcagcctggccggcaacgagctgggggatgagggtgcccgactgctgtgtgagaccctgctggaacctggctgccagctggagtcgctgtgggtgaagtcctgcagcttcacagccgcctgctgctcccacttcagctcagtgctggcccagaacaggtttctcctggagctacagataagcaacaacaggctggaggatgcgggcgtgcgggagctgtgccagggcctgggccagcctggctctgtgctgcgggtgctctggttggccgactgcgatgtgagtgacagcagctgcagcagcctcgccgcaaccctgttggccaaccacagcctgcgtgagctggacctcagcaacaactgcctgggggacgccggcatcctgcagctggtggagagcgtccggcagccgggctgcctcctggagcagctggtcctgtacgacatttactggtctgaggagatggaggaccggctgcaggccctggagaaggacaagccatccctgagggtcatctcctgaggctcttcctgctgctgctctccctggacgaccggcctcgaggcaaccctggggcccaccagcccctgccatgctctcaccctgcatatcctaggtttgaagagaaacgctcagatccgcttatttctgccagtatattttggacactttataatcattaaagcactttcttggca

SEQ ID NO: 312639 - DNA, 1386 bp, Artificial Sequence
  derived and/or modified sequence
atgtccttagatattcagtccctagacatccaatgcgaagaactgagcgatgccaggtgggcggagttgctccccctgcttcagcagtgccaagttgtgagactggatgattgtggattgaccgaagctagatgtaaggacatttccagcgcactgagggtgaacccagcattggcagaattaaatctgagaagcaacgagttgggggatgtgggagttcactgtgtgttgcagggcctgcagactccttcatgtaagattcagaagctgagcctacagaattgttgtttaacaggcgcaggctgtggtgtgctgtcatccaccctgcgcacattgccaacactccaggaattgcatttgtctgataacctgctcggggatgccggtctccagttattgtgtgaaggactcctggatcctcaatgccgactggagaaactccagctggaatattgctcactgagcgccgctagctgtgaaccccttgcgtcagtgcttagggcgaaacccgacttcaaggaactgactgtgagcaacaatgacatcaacgaggccggagtcagagtcctgtgccagggtttaaaggatagtccatgtcagttagaagcgctgaaactcgaatcctgtggggtgacctcggacaattgtcgagacctctgtgggatcgtggcttcaaaggctagtcttagggaacttgctcttggctcgaataagttaggagatgtcgggatggctgagttatgtccagggttactccacccctcatcacgccttcgcactctctggatatgggagtgcggtattactgcgaaaggatgtggcgatctttgtagggtgctgagagcgaaagagtctctgaaggaactctcccttgccggaaatgagctaggagacgagggcgctcgactcttgtgcgagaccttgctggaacccggatgtcaactggagtctctctgggtgaaaagttgttctttcacagctgcctgctgctcccacttttcatctgttctggcgcagaacaggtttctcctcgagctacagatctctaacaataggctagaagatgccggagttcgcgagttgtgccagggccttgggcaacccggttcagtgctgcgagtactctggctggctgactgcgacgtatctgatagctcatgctcaagtcttgcggctaccctccttgcaaaccactcccttcgcgagttggacttgagcaacaactgcctgggagatgctggaatcctgcagctcgttgaatcagtgagacagccaggatgcctgttggagcaactcgttctgtacgacatttattggagcgaggaaatggaggatcggctgcaggccctcgagaaggacaagccatctctacgagtgatcagttag

SEQ ID NO: 312640 - DNA, 1386 bp, Artificial Sequence
  derived and/or modified sequence
atgtctctggatatacaatctctcgacattcagtgcgaggagttgagtgatgcaagatgggccgagttgctgccccttctgcagcagtgtcaggtggtgaggctggatgattgtggcctgactgaggctcgatgtaaagatatcagctctgcgcttagggtcaacccggctctcgccgagctgaatttacgcagcaatgaactaggcgacgtgggggtgcattgcgtccttcagggcctgcagacccccagttgcaaaatccagaagttgagcctgcagaactgctgtttgaccggggctgggtgtggcgtgttgtcttctacgttacgcacgcttccgactttgcaagagttgcatctgtccgacaaccttctgggtgatgcaggcctgcaactcctgtgcgaagggctccttgatcctcaatgcaggctggaaaaactgcagttagaatattgcagcttgtcagcagcctcctgtgagccactggcaagcgttctccgtgcgaaacctgactttaaggaactgactgttagtaataatgacatcaacgaagccggtgtgagggttctatgtcagggacttaaagacagcccctgtcagctggaagcgctaaaactggagagttgtggagtgacatcagacaactgccgcgacttatgtggcatcgtggcctcaaaagcctccctgcgggaacttgcgctgggatccaacaaactgggagatgttggcatggctgagctctgtccaggactgttgcacccaagcagcaggttgaggacactgtggatctgggagtgcgggatcactgccaaaggctgcggggacttgtgccgggtgttgcgcgcaaaggagtccctgaaggagctctccctagcaggcaatgaattaggcgacgagggagcgaggctgctgtgcgagacccttttagagccagggtgccagctcgagtctctgtgggttaaaagctgctcctttactgctgcctgctgcagccacttcagttccgtattagcgcagaaccggttcctgctggagctgcaaatttcaaacaaccgccttgaggacgcaggggtacgtgagctttgtcagggcctgggccagcccggttccgtcttgcgcgtgctttggttggcagactgcgatgtctctgattccagctgctcatcgttggctgctaccttgcttgccaatcatagtcttcgcgaactggacctgagtaacaactgtctaggggacgccggaatcctacagttagtggagagtgtgcgacagccagggtgtctgctcgagcagctggttctctatgacatatattggtcagaggagatggaggatcgactccaagccctggagaaggataaaccctccctgagggtaattagctag

SEQ ID NO: 312641 - DNA, 1386 bp, Artificial Sequence
  derived and/or modified sequence
atgagcttagacattcagagccttgatatccagtgcgaagaactgtctgatgcacgctgggcagagctgctgcctttactacagcagtgtcaagtcgtgaggctggatgattgcgggctcactgaagctagatgtaaggacatttcctcagcactgagggtgaacccagctctggctgagctcaatttgcggtcgaacgagctgggcgatgtcggggtccactgcgtgctccaaggcctccagaccccgtcctgcaagatccagaagctttcccttcagaattgttgccttacaggcgctggatgcggggtgctctcatccactcttcggactcttcctacactacaagagctgcacctgtccgataatctgctgggagacgccggactgcagctgctctgtgagggcctgctggatcctcagtgcagacttgaaaagttgcaactggagtattgcagtctttcagctgcctcctgtgaaccactggcgtctgtgttgcgcgctaagcctgacttcaaagaactgacagtcagcaacaacgatatcaacgaagcaggcgttagagttctgtgccagggtctgaaggatagcccatgtcagctggaagctcttaagctcgagtcatgtggggtgacttccgataactgcagagatctctgcggaatagtggcctcaaaggcgtccttgcgtgaactggctctggggagcaataagttaggggacgtgggcatggcagagctttgcccaggtctgttgcatccgtccagccgtttgaggaccctctggatctgggagtgcggcatcacagccaaaggctgtggggacttgtgtagggttctgcgggcaaaggagagcttgaaggagttgtcactggctggcaacgagctgggagatgagggagccaggttgctgtgcgagaccctgctggaacctggttgccagctggaatcactctgggtcaaaagctgctcctttactgccgcttgttgttctcatttttcctctgtgcttgctcagaaccgattcctgctggagctgcaaatatctaataacaggttggaagatgcaggggtacgggagttgtgccagggcctgggacaaccgggtagtgttcttcgagttctgtggctggctgactgtgacgtgtcagattccagttgctccagcctagcggcaactctgctcgccaatcatagccttcgggaactcgacctgagcaacaactgtctcggagacgcaggcatcctgcaactagtcgaaagcgtgagacagcccggatgcctcttggagcagttggtgctatatgacatatattggagcgaggaaatggaagaccgcctgcaggcgttggagaaagacaaaccttccctgagagtgatttcttag

SEQ ID NO: 312642 - DNA, 1386 bp, Artificial Sequence
  derived and/or modified sequence
atgagtcttgatattcagagcctggatatacagtgtgaggagctgtcggatgctagatgggcagaactcctccctttgttgcaacagtgtcaggtggtgagactggatgactgcggactcactgaggctaggtgtaaggatatctcctcggcactgcgggtcaaccctgctctggccgaactcaatctgaggagcaacgaactcggggacgttggagtgcactgtgtgttgcaaggactccagacgccctcctgtaaaatccagaagctgagcctacaaaattgctgtctgactggagccggttgcggggtgctatcctccacccttaggactctccccaccttgcaggagttgcacctctctgataacttactgggagacgccggtctacagctgctgtgcgagggcctgctggatccccagtgcaggctggaaaagctgcagcttgaatactgttctctatccgcagcctcatgcgagccactagccagcgtgttgagggctaaacccgactttaaggaactgactgtcagcaataatgatatcaacgaggctggggtgagagtgctgtgtcaaggcctgaaggatagtccctgtcagttagaggccctgaagctggaatcatgtggagtgacctccgacaactgcagggatctgtgtgggatagtggccagcaaagccagtctgcgcgagctggccctggggagcaacaagctgggcgacgtcggtatggccgagctctgccctggccttctgcaccctagttctcggcttaggacattatggatttgggaatgtggaattactgcaaaagggtgtggggatctttgtagagtgctgagagctaaggagagcttgaaagaactgtctctggccggaaacgagctgggggacgaaggcgcacgtctcctgtgtgagacgctactggagccgggttgccagctggagtcgctttgggtgaagtcctgcagcttcaccgctgcctgctgcagtcattttagctccgttctggcacaaaacagatttctcctcgagcttcagatatcgaataatcgccttgaagacgccggtgtccgtgagctgtgccagggtctggggcagccaggcagcgtgttacgcgtactctggcttgcagactgtgatgtctctgacagcagctgtagtagtctggccgcaacacttttagccaaccattccttgagagaattagacctgtctaataattgcctcggcgatgctggcatcctgcagctggtcgagtctgttcgacagcctggctgtctcctcgagcaactggtcctgtatgatatctactggtctgaagaaatggaggaccgcctgcaggctctggaaaaagacaaaccctctcttcgtgttatcagctag

SEQ ID NO: 312643 - DNA, 1386 bp, Artificial Sequence
  derived and/or modified sequence
atgagtctcgacatccagtcgctagacatccagtgcgaggaacttagcgatgcgagatgggccgagctcctgcccctactgcaacaatgccaggtcgtgcggttagatgattgtggattgaccgaagccagatgtaaggatatcagttccgctctccgagtgaatccggctttggcagagttaaatctccgaagtaacgagctcggggacgttggggtccactgtgtcctccaagggctgcagaccccttcctgtaaaatacagaaactgtccctgcagaattgttgcctcaccggggcaggctgtggcgtgctttcttccacccttcgcacactcccaacccttcaggagctgcacctgagcgataacctgctgggggacgctggacttcagcttctttgcgaaggcttactcgatccacagtgtagattggaaaagctccagctggaatattgtagcctgagcgcggcatcttgcgaacccctggctagcgtgctcagagccaagcccgatttcaaggaacttactgtctccaacaatgacattaacgaagcgggagtcagagtgctgtgtcaagggcttaaggacagtccatgccagttggaagcgctaaaattagagagttgtggagtgacatcagacaactgtagggatttgtgtggcatcgttgcttctaaagctagtctgagagaactggctttaggaagtaacaaactcggggatgtcggtatggctgaactctgtcctggcctattgcacccctcttccagactccgcacgttgtggatttgggagtgcggcataactgcaaagggttgcggagacctgtgccgagtgcttagggctaaagaatctctgaaagagctctccctggcgggaaatgagctcggcgacgagggcgctcggctcctgtgcgaaaccttgctggaacctgggtgtcagctggaaagcttatgggtcaagagttgtagctttacagccgcttgctgcagtcacttctcatctgtgctcgcccagaacagattcctgctggagttgcagataagtaataaccggcttgaggacgcaggcgtgcgcgaactgtgccaggggctgggacagccaggtagcgttcttcgcgtactgtggcttgcggactgcgacgtgtccgactctagttgcagcagtctggcggctacccttctcgccaaccattctttgcgcgagctggatctgtcaaataattgcctcggtgacgccggaattctgcagcttgtggagagcgtgcggcagccaggatgcttgctagaacagcttgtactatatgatatttactggagcgaggagatggaggatcggctgcaagcactggaaaaagacaagcccagccttcgagtgatttcttag

SEQ ID NO: 312644 - DNA, 1386 bp, Artificial Sequence
  derived and/or modified sequence
atgtccctggacatccagagtctggacattcagtgtgaggaactgtcagacgcaaggtgggccgagctactccccctcttacagcagtgccaggtcgttaggctcgatgattgcgggctcacggaggccaggtgtaaggacataagttctgcacttcgagtaaaccccgcactggcagaattaaacctgcgcagcaatgaattaggcgatgtgggcgtacactgtgttcttcagggcctacagacaccatcttgcaaaattcaaaagctaagcctgcagaattgctgtctgactggtgctggatgtggagtactaagctcgaccctccgcacccttcccacactccaggagctacacctgtcagataatctcctgggcgatgccggactccaactgctttgcgagggcctgctggatcctcagtgccgattggagaaacttcaacttgaatactgtagcttatccgccgcaagttgcgagcctctcgcgtcggttttgcgcgcaaagccagacttcaaggaacttactgtgtcaaacaacgacatcaatgaggccggagttagagttctctgtcagggactcaaagacagtccgtgccaactggaagcactgaagctagagtcctgtggagtaactagcgacaactgccgcgatctgtgtggaattgtcgcttcaaaagcttcactgagagaactggcccttggcagcaacaagctgggggacgtgggcatggcggaattgtgccccggactactccacccgtcatccagattaaggaccctctggatttgggagtgtggcatcacagccaaaggctgcggagatctgtgccgggtattacgggctaaagagtcccttaaagaactctcattagcaggtaacgagttgggggacgaaggtgcgaggttgctttgtgaaacgctgttggagcccggttgccagctcgaaagcctgtgggtcaagtcctgctcctttactgccgcttgctgtagtcacttcagttcggttctggcacagaatcggttcctgctggagctgcaaatctcaaacaatcgattggaggatgccggagtgagggagttgtgtcaaggcttggggcagcctgggtccgtcctccgcgtcctgtggctggcggattgcgacgtgagcgatagcagctgttccagtcttgccgcaacactcctggcaaatcactcactgcgcgaactagatctgagcaataattgcttgggtgacgccggaattctccaactggtggagagcgtgcggcaaccaggctgcctgttggagcagctcgtcctgtacgacatttattggagcgaagaaatggaggacaggctacaggctctcgaaaaagacaagcccagcctgcgtgtcatcagctag

SEQ ID NO: 312645 - DNA, 600 bp, Artificial Sequence
  derived and/or modified sequence
atgagtttggacatccagagtctcgacatccagtgtgaagaattgtctgacgcccgttgggctgaactcctgcccctcttacagcagtgtcaagtggttaggctggatgattgtgggctaaccgaggccagatgcaaggacataagtagtgctcttagggttaacccagcccttgcagagctcaatctgcgcagcaatgagctcggggacgtgggagtccactgtgttttgcaggggctgcagactccatcatgtaaaatccagaagttgtcattacagaattgttgtttgaccggcgctggctgcggagtgctttcttctaccttgagaacgctccccacccttcaggagctccacttgtctgataatctcctgggcgatgccggactgcaactgctatgtgagggtctcctcgacccacagtgtcggctagaaaaactgcagctggaatactgttcacttagcgcagctagttgcgagcccttggctagcgtccttagggcaaagccggactttaaggagcttactgtgtccaacaatgacataaacgaagccggagtgcgcgtgctgtgccagggcttgaaagatagcccttgctag

SEQ ID NO: 312646 - DNA, 570 bp, Artificial Sequence
  derived and/or modified sequence
atgtctttagacatccagtctctggatatccagtgtgaagagctcagtgacgcacgatgggcagagctgttacctttgcttcagcagtgccaagtggtcaggctggacgactgcgggttaacagaggccagatgcaaagatatttcaagtgcgttgagagtgaatcccgctctggcagagctgaacctacggagcaatgaactcggagatgttggggtgcattgcgtgttgcaggggctgcagacgccgtcatgtaaaatccaaaaactgtccttacagaactgttgcctgacaggggcaggatgcggagtgctttcttccacactccgaactttacctacactacaagagctgcacttaagcgacaacttactgggcgacgccggacttcagctgctgtgcgaaggtctgttggacccccagtgtcgcctcgagaagctccagcttgagtattgtagcctgtctgcagcctcctgtgaacctcttgccagcgtattacgggcaaaacccgattttaaagagctcactgtatctaataacgacattaatgaggccggtgttcgggtctag

SEQ ID NO: 312647 - DNA, 585 bp, Artificial Sequence
  derived and/or modified sequence
atgtctttagatatccagtcgcttgatatccagtgtgaggagctcagcgatgctagatgggctgagctgcttcctttgctgcagcaatgccaggtggttcggctcgatgactgcgggttaacagaggctcgctgcaaagatataagctccgccctaagggttaatccagctctggctgaactcaacctgaggagcaatgagctaggtgacgtcggagtgcactgtgtcctgcaaggtctgcagacgccgtcttgtaaaatccaaaagctgtcacttcaaaactgctgtctaacgggtgcaggctgcggcgttctgtccagtacactacgaaccttacctacgctccaggagctgcacctgtccgacaatctgttgggggacgccggattgcaactgctatgcgaaggcctgctcgacccccagtgccggctggagaaactgcagctggagtactgttccttgtctgctgccagctgcgagccactggcctctgtgctgagagcgaaaccggacttcaaagagcttacagtttcaaacaatgatatcaacgaagccggagtccgtgtcctctgtcagggactctag

SEQ ID NO: 312648 - DNA, 123 bp, Artificial Sequence
  derived and/or modified sequence
atgtctctcgacatacagtctctggatattcaatgcgaggagctctccgacgcgagatgggcggagctgctacctttgctgcaacagtgccaggtggtcagactcgacgactgcgggttatag

SEQ ID NO: 312649 - DNA, 1386 bp, Artificial Sequence
  derived and/or modified sequence
atgagcctcgatatccaatctctcgatattcagtgcgaggaactatcagacgcgaggtgggcagagctcttgccgctattgcagcagtgccaagtcgtgcggttggacgactgtggcttgaccgaggctcgctgcaaggatatttcctctgcgctgagagtgaatccagccctggctgaacttaatttgaggtctaatgagttgggcgacgttggcgtacactgcgtcctacagggactgcagaccccgagctgtaaaatccaaaagctgtctctccagaattgttgtctgacaggcgcagggtgtggagtactgtccagcacccttcgcaccctccccactctgcaggagctgcacctgtcagataacctcttaggagatgctggcctccagctgctgtgtgaaggactgctggacccacaatgccgcttggagaagttgcagcttgaatattgcagcctcagtgcggcttcttgcgaaccactagcatctgtgttgcgcgcaaaaccagactttaaagaacttaccgtttcgaataacgatatcaacgaggcaggcgtcagggtgttgtgtcaggggttgaaggacagtccatgtcagctggaggcgctcaagctcgaaagttgcggcgtcacaagcgataactgtcgtgatctctgtggcattgtggcgtctaaggccagtctgagggagctggccctggggtcaaacaaactgggagatgtagggatggcggagctctgtcctggccttctgcaccctagtagtcgactgagaaccctgtggatctgggagtgcggcataacagccaaagggtgcggagatctatgtagagtgctgagagccaaggaatccttgaaagagctgagtttagcagggaatgaactgggcgacgagggcgcacggctcctctgcgagacattgctggaaccgggatgccagctcgaaagcctgtgggtgaagtcctgctctttcacagcggcttgttgttcccatttttcctctgtactggcccagaacagattcctgctggagctccaaatatccaataataggttagaggacgctggggtgagagaactgtgtcagggcctgggacaacccggatctgtgcttcgggtgctctggctggcggactgtgatgtctctgactcaagttgcagcagcctcgccgcaaccttgttagccaatcatagcttgagagaactggacctcagtaataattgcctgggtgatgccggtatcctgcagctcgtcgagtccgtgaggcaacccggatgtctcctcgagcagttggtcctctacgatatctactggtccgaggagatggaggatcgactgcaggctctggaaaaggacaaacctagccttcgtgtcatttcttag

SEQ ID NO: 312650 - DNA, 1386 bp, Artificial Sequence
  derived and/or modified sequence
atgagtttagacatacagtccctggacattcaatgcgaagaactgtctgacgcaagatgggccgagcttctcccattgctgcagcagtgtcaggtggtccggctggacgactgtggcctcacagaggcacgttgcaaggacatctcctcagcactgcgggtgaatcctgcactggccgagcttaatctgcggtccaatgaactgggggacgtgggagtgcattgtgtccttcagggattgcagacgccatcttgtaagattcagaaattgtcactgcagaactgttgcttaacaggcgcagggtgtggggtgttatcatccacgctgaggacattgcccaccctgcaagaactccacctcagcgacaacctgctcggggacgcaggcctgcagttgctgtgcgaaggcctgctggatcctcagtgtcgattggagaagttgcagctggaatattgctcactcagtgcagcctcctgcgaaccgctcgcttctgtcctccgcgcaaagcccgactttaaggaactgaccgtctctaacaatgacatcaatgaggcgggagtacgtgttctttgtcaaggactgaaagattccccctgccagttggaagctctgaagttggaaagttgtggcgttacctctgataattgccgcgatctgtgcggaatagtggcctcaaaagcttccctgcgcgagctggcactcggtagtaataagctaggagatgtgggcatggccgagctgtgtccaggcctgcttcacccctcatcacgcctccgcaccttatggatctgggaatgcgggattacggctaagggatgcggtgatctttgtcgtgtactgcgcgctaaagagagcttgaaggagctgagccttgccggaaatgagttaggtgatgagggtgccagattactttgtgagaccctactggaacccggttgccaactggaatccttatgggtgaagagctgttctttcacggcggcatgttgttcgcatttcagcagtgtgcttgctcaaaacagattcctgttagaattacaaatttccaacaacagattggaggacgctggtgtgcgcgaactgtgtcagggactcggccagcctggcagtgtgctgcgggtgttgtggttagcggactgcgatgtttccgactcatcgtgtagctcgttagccgctactcttctggccaatcattctctccgcgagctggacctgtcgaacaattgtctgggcgatgccggtattctccaattggtagagtcggtgaggcaacccggatgtctgctggagcagttggttctttacgatatatactggtcggaggagatggaggatagactgcaagctctagagaaggataaacccagcctgcgtgttatcagttag

SEQ ID NO: 312651 - DNA, 1386 bp, Artificial Sequence
  derived and/or modified sequence
atgtccttggacattcagagtcttgacatccagtgcgaagagttatccgatgccagatgggcagagttacttccacttctgcagcaatgtcaggtggttaggctggacgattgtgggttgactgaggctcgatgcaaagacatctctagcgctctgcgagttaatcccgcgctagccgaactgaatttaaggtcaaatgaactgggcgatgtgggtgtgcactgtgtgcttcaagggctgcagactcccagctgcaaaattcagaagttatccctgcagaattgttgtctcacaggggctggctgtggcgttttgagctccactctgagaactcttccgactctgcaggaactccacctgtctgacaatctgctcggcgacgccggcctacagctcctgtgcgaaggcctgttagacccccagtgcagactggaaaaattgcagctcgaatactgctccttaagtgctgcttcttgtgagccactcgcttctgtgctgcgtgccaaaccggacttcaaggagttgaccgtgtcaaacaacgatattaacgaagccggagtgagggtgctctgtcagggcctcaaagactctccttgtcagctagaagccttaaagctggagtcatgcggcgtcaccagcgataattgtcgtgacctatgcggaatcgtggcatccaaagcaagtctacgcgagctggctctgggctcgaataaactcggcgatgttggaatggctgagctctgccctggactacttcatccaagctctcggctgcggaccctgtggatctgggagtgcggtataaccgcgaaagggtgcggtgacttatgccgggttttaagagctaaggagtccctaaaggagttaagtctcgctggcaacgagctgggtgatgaaggtgcccgtcttttgtgcgaaacgttgctcgagcctgggtgtcaacttgagagcctgtgggtcaagtcttgctcattcacagccgcctgctgttctcactttagcagcgttctcgcacagaaccggtttctgctagaactgcaaatcagcaataacaggctggaggacgccggggtgcgggaactttgtcaagggctggggcagcctggttccgtactcagagttctttggttggcggattgtgacgtgtctgattcaagctgctcttccttggcagcaactctgctggcaaaccactccctgcgtgaactcgatttatccaacaattgcttgggcgatgctggcattcttcagttggtcgagtcagtgcgccaacccggatgtttactggagcaacttgttctttatgacatttattggtcagaagaaatggaggatcggcttcaggccctggaaaaagacaaaccatcactgcgagttatcagctag

SEQ ID NO: 312652 - DNA, 1386 bp, Artificial Sequence
  derived and/or modified sequence
atgagtctggatatacagtcactggacattcaatgtgaagaactctccgatgcacggtgggccgagcttctgcctttactccaacagtgtcaagtggttagattggacgactgtggtctgactgaggccagatgcaaggacataagttctgccctgagagtgaatcccgccctagccgaactgaacctccggtctaacgaattgggagatgtgggcgtccattgcgtgctgcagggtttgcaaacaccaagctgtaagattcagaagctgtcactgcaaaactgttgcttgacaggggccggctgcggcgtgctcagctctaccctacgtaccctgccaacccttcaggaattgcacctatccgataacttactcggagatgcaggattgcaactgctgtgcgagggtctcctcgacccccaatgtagattggagaaactacagttggaatattgtagcctgtccgcggcatcatgtgagcctctcgcttctgttctgagggcaaagccagattttaaggagctgactgtgtccaacaacgacatcaacgaagccggggtccgcgtcctgtgccagggactgaaggactctccctgccagctggaggcccttaaactcgaatcatgcggcgtaacatcagacaactgtcgggacctgtgcggcattgtcgcttctaaggcgtctctcagagagttggcactgggtagcaataagctgggcgatgtgggaatggctgagctttgtccgggacttctgcatccctccagccgactacgtaccctgtggatttgggagtgcggtatcactgctaagggctgtggcgacttatgccgggtacttcgcgctaaagagtccctaaaagagctgtctctggctggcaacgagctaggggatgaaggcgcccgcctactgtgtgaaaccctgctggagccaggctgccagctcgaatccctatgggtgaagtcgtgttctttcaccgccgcatgctgttcacacttctcatctgtgcttgctcaaaatcgatttctgctggagctacagatttccaataatagacttgaggatgccggagtcagagagctctgccagggactcgggcaacctggcagcgtgctacgggtgctgtggctggcagactgtgatgtctccgactcgagctgctctagtctcgctgccaccctccttgcgaaccactccttacgtgagttggacctcagcaataactgcctcggggatgccggcatactgcagctggttgagagcgtccgacagccgggatgcctcctggaacagcttgtgctgtatgatatctactggagcgaagaaatggaagatagactgcaggctctcgagaaggataaaccatccctccgagtgataagttag

SEQ ID NO: 312653 - DNA, 1386 bp, Artificial Sequence
  derived and/or modified sequence
atgtccctcgatattcaaagcttagatatccaatgtgaggagttatccgatgctagatgggccgagctcctgccccttcttcagcagtgccaggtggtgagactcgacgattgcgggttgacagaagctagatgcaaagatatttcctccgccctgcgtgtgaatccagcgctggcagaactaaatctgcggagcaatgagcttggtgatgtgggcgtgcactgcgtcctccagggtttgcagacaccctcttgcaagattcagaagctgagcctacagaattgctgcctgaccggtgctgggtgcggtgtgctctcaagtactctcagaacactgccaactctgcaggagctgcacttgtcagataacctgctgggagatgctggtctgcaactgttgtgtgagggattgctcgacccccagtgccgcctggaaaaactgcagctggagtattgttcactgtctgccgcctcctgcgaacccttggcttccgtactccgtgctaaacccgattttaaggaactcactgtgtcgaataacgatatcaacgaggccggcgtgagagtgttgtgccagggactgaaagactccccctgccagttggaggctctgaaattggagtcatgcggggtgacatccgacaactgccgggacctgtgcggcattgtggccagcaaggcttccctccgagaactagcactcggttcgaacaaactcggtgatgtggggatggccgagctgtgccccggattgttgcatccttcatctcggctgcgtaccctgtggatatgggaatgtggaatcaccgctaagggatgcggggatttatgtcgcgtgctacgggcaaaggaaagcttgaaggagctgtccctggctggtaatgagctgggcgatgagggagctaggctcttgtgcgaaacccttctggagccaggatgtcagctggaatccctgtgggtaaagtcctgctccttcaccgctgcctgctgctcacacttctcttcagtattggcacagaacaggttcttactggagctccaaatcagcaataacagacttgaagatgctggtgtgcgtgaattatgccaagggctggggcagcctggctccgtgctgcgggtgttgtggcttgcagactgtgatgtcagcgacagctcctgttccagcctggctgccactcttctggctaatcactctctccgcgaattagatctttccaataactgcctgggagatgcgggtatcctgcaactagtggaatccgtgcgccagcctggttgcctgctcgaacaacttgtgttatacgacatctattggtcggaagaaatggaggatcggttacaggccttagaaaaagacaaaccgagtctgagagtgatttcttag

SEQ ID NO: 312654 - DNA, 1386 bp, Artificial Sequence
  derived and/or modified sequence
atgtctcttgatattcaaagtctcgacattcagtgcgaggagttatctgatgcccggtgggctgaactgctaccgctgctgcagcagtgtcaggtggtgagattagacgattgtgggttgaccgaggcacgttgcaaggacatctcatccgcattacgtgtgaaccccgccctcgccgaactgaatctgcgttccaacgagctgggtgacgtgggagtgcactgtgtgctccagggactgcagactccctcatgtaaaatacaaaaattgagcctccagaattgttgtcttacaggcgccggatgtggggttctgagctccaccttaagaacactccccacgctacaggagctgcacctctccgataacctcctcggcgacgctgggctgcaactactgtgtgaggggctgcttgatcctcagtgccggctagagaaattgcagctggagtattgttccctgtccgctgcttcctgcgaaccccttgccagtgtgttgagagcgaagccggactttaaggagctgactgtctccaacaacgatatcaatgaagccggtgttcgggtactctgtcaagggctgaaggacagcccatgccaactggaggccttgaaactcgagtcctgtggagtgacaagtgataactgtagagacttatgtggaatagttgctagcaaggctagtctccgagagttagcgctcggcagcaacaaactaggggatgtgggcatggccgaactctgccccgggcttttgcatccctcgagcagattgcgcacactgtggatttgggaatgcggcattaccgcgaaagggtgtggagacctctgtcgcgtgctgcgggccaaagaaagcctcaaggagctctcgctcgctggcaatgagctcggcgacgagggagcaagactcctctgcgaaaccctcctggagccaggatgccagctcgagtccctctgggtgaaaagttgctcctttacggctgcctgctgctcgcacttctcttcagtactcgcacaaaatcgctttcttcttgagttacaaatttcgaacaatcgtctggaagacgcaggcgtccgagaattatgccaaggccttggccagcccgggagtgtgttacgggttctgtggttggcagactgcgacgtttcagactcttcttgttctagcctcgccgccaccctcctggcgaatcattcccttcgagagttggatctgagtaataattgtctgggcgacgccgggatcctgcagctcgtggagagtgttaggcagccagggtgcctgctagagcagctggttctctatgacatctattggtcagaagaaatggaagaccgcctccaggctctggagaaggacaaaccaagtttaagggttatctcctag

SEQ ID NO: 312655 - DNA, 1386 bp, Artificial Sequence
  derived and/or modified sequence
atgtctctcgacattcagtccctggatatacagtgtgaagagttgtccgacgcgaggtgggcggagttgctacccttgctgcaacaatgtcaagtggtgcggttggacgactgcggcctgactgaagctcggtgtaaggacatcagctccgcgctgagagtgaaccccgccctggccgaattgaacttgcgtagcaacgagttgggtgatgttggagttcactgcgtacttcagggccttcagaccccatcttgtaaaatccagaaactctctctccaaaattgttgtcttactggagccggatgcggtgtcttgtcctctacccttcgcacgttgcccacactgcaggagctccatttgtcagacaacctcttaggcgatgcagggctccaactactgtgcgagggacttctggatccccagtgtagactcgagaaattacagcttgaatactgttctcttagtgctgcatcatgtgaaccactggctagcgttttacgagccaaacccgactttaaagaactgaccgtatcaaataatgatatcaacgaagcaggcgtgagggtactgtgtcagggcctgaaggattccccgtgccaacttgaggctctgaagcttgaatcttgtggtgtaactagtgacaattgtagggacctgtgcggaatagtcgcctccaaggcatctttacgagagctggcattggggagtaacaaacttggcgatgtgggtatggccgagctctgtcccgggctactccacccctcttcacgtcttcggaccctgtggatctgggagtgcggaattaccgcaaaaggttgcggcgacctgtgccgggtgctaagagctaaagagtcactaaaggagctgagccttgccggaaacgaattgggcgatgagggtgccagactgctttgtgagacccttttggaaccggggtgccagttggagagtttatgggtgaaatcgtgttcctttacggcggcgtgctgctcacatttcagtagtgttcttgcccagaataggtttcttcttgagcttcaaatctcaaacaataggctcgaagatgcaggggtgcgcgagttgtgccaaggactgggacagcctgggagcgtactcagagtgctctggcttgcagattgcgacgtgagcgattcatcatgctcctccctcgccgccactctcctggcaaaccacagcctgcgggagctggatctttccaataactgcctgggcgatgctggcatccttcaactggtagaatcagttcgccagccagggtgcctcctggaacagcttgttctctacgacatttactggtcagaggagatggaggacagactgcaagccctcgagaaagacaaacccagcctccgtgtcattagctag

SEQ ID NO: 312656 - DNA, 1386 bp, Artificial Sequence
  derived and/or modified sequence
atgtcactggacatccagtcacttgacatccagtgcgaggaactgtcagacgcacgttgggccgagttactgccgctccttcagcagtgccaggtcgtacggctcgatgactgtgggctgaccgaggcaagatgcaaagatatatccagcgccctgagggtgaatcctgccctggccgaacttaacctgcggtcgaacgagttgggagatgtgggcgttcactgtgtgctgcaaggcctgcagacccctagctgcaagatacagaagctttccttgcagaattgttgtcttacaggagcaggctgcggagttctctcttccacattgcggacacttccaactctgcaggagcttcacctgagtgacaatctgctcggcgatgcaggcttacagcttctgtgcgagggcctgttggatcctcagtgccgcttggagaagcttcaacttgagtactgttccctctcggcagcatcgtgtgagcctttagcttccgtgctgcgcgccaagccggatttcaaggagctgaccgttagcaataacgatattaatgaagcaggtgtaagggttctatgtcaaggccttaaggattctccatgccagctggaagccctgaagctcgaatcttgtggcgtgacatctgacaactgcagagatctgtgcggcatcgtggcctcaaaggcctcactgcgagaattagccctgggctccaacaaacttggggacgtgggaatggccgagctgtgccccggcctcctccatcccagctcaagattgcgcaccctgtggatttgggaatgcggaatcaccgcaaagggttgtggagacttatgtagggtcctcagagctaaggaatccttgaaggagttgtcactggccggcaatgagttaggcgacgaaggtgcccggctgctctgtgagaccttgctcgaacccggctgtcagctggagtcactgtgggtcaagtcctgcagctttaccgccgcttgttgctctcattttagctcagtcctcgctcaaaaccgttttctgctcgaactccagataagcaataatagactcgaggatgccggtgttagggaactgtgtcagggactgggccagcccggatccgtgttgagagtgctgtggctggccgattgtgacgtatctgactcatcatgctcgtccctggctgcaaccctgctggccaatcattcgttgagagaactggacttaagtaacaactgcctcggcgatgctggcatcctgcagctcgtggaatccgtcaggcaacccgggtgtctgctcgaacaactggtcttatacgatatttactggtctgaagagatggaagataggctgcaggcgctagaaaaagataagccatctttacgcgtgatcagttag

SEQ ID NO: 312657 - DNA, 1725 bp, Artificial Sequence
  derived and/or modified sequence
aagccctctagtgccttagattccagcgagctacgcaagcaatcctggcccagccgagcttgcttccccaaatcccgtaatccttgaccttattcccccaaagaagcggcctcccgggaaggagcgccctggcggagaagactcgaacggctcccacagccgggcgttgggggaaaggccactcttcacctccaccatgagcctggacatccagagcctggacatccagtgtgaggagctgagcgacgctagatgggccgagctcctccctctgctccagcagtgccaagtggtcaggctggacgactgtggcctcacggaagcacggtgcaaggacatcagctctgcacttcgagtcaaccctgcactggcagagctcaacctgcgcagcaacgagctgggcgatgtcggcgtgcattgcgtgctccagggcctgcagaccccctcctgcaagatccagaagctgagcctccagaactgctgcctgacgggggccggctgcggggtcctgtccagcacactacgcaccctgcccaccctgcaggagctgcacctcagcgacaacctcttgggggatgcgggcctgcagctgctctgcgaaggactcctggacccccagtgccgcctggaaaagctgcagctggagtattgcagcctctcggctgccagctgcgagcccctggcctccgtgctcagggccaagccggacttcaaggagctcacggttagcaacaacgacatcaatgaggctggcgtccgtgtgctgtgccagggcctgaaggactccccctgccagctggaggcgctcaagctggagagctgcggtgtgacatcagacaactgccgggacctgtgcggcattgtggcctccaaggcctcgctgcgggagctggccctgggcagcaacaagctgggtgatgtgggcatggcggagctgtgcccagggctgctccaccccagctccaggctcaggaccctgtggatctgggagtgtggcatcactgccaagggctgcggggatctgtgccgtgtcctcagggccaaggagagcctgaaggagctcagcctggccggcaacgagctgggggatgagggtgcccgactgctgtgtgagaccctgctggaacctggctgccagctggagtcgctgtgggtgaagtcctgcagcttcacagccgcctgctgctcccacttcagctcagtgctggcccagaacaggtttctcctggagctacagataagcaacaacaggctggaggatgcgggcgtgcgggagctgtgccagggcctgggccagcctggctctgtgctgcgggtgctctggttggccgactgcgatgtgagtgacagcagctgcagcagcctcgccgcaaccctgttggccaaccacagcctgcgtgagctggacctcagcaacaactgcctgggggacgccggcatcctgcagctggtggagagcgtccggcagccgggctgcctcctggagcagctggtcctgtacgacatttactggtctgaggagatggaggaccggctgcaggccctggagaaggacaagccatccctgagggtcatctcctgaggctcttcctgctgctgctctccctggacgaccggcctcgaggcaaccctggggcccaccagcccctgccatgctctcaccctgcatatcctaggtttgaagagaaacgctcagatccgcttatttctgccagtatattttgg

SEQ ID NO: 312658 - DNA, 600 bp, Artificial Sequence
  derived and/or modified sequence
atgtcactcgacatccagagtctcgatattcagtgcgaagagctctctgatgcaagatgggccgagctcttacctctcctccagcagtgccaggtagtgcgactggacgactgtggacttaccgaggcaaggtgtaaagatatctctagcgctctgcgtgttaatccagctttagctgaactcaacctaagatcgaacgaactcggggatgtaggcgttcactgcgtgctacagggtcttcaaaccccttcctgcaaaattcagaaactgagcctccagaactgttgtctgacaggcgccggctgcggggtcctgtcttcaacactgagaacactgccgacactccaggaattgcatctgtctgataatctgcttggcgatgccggtctgcagctgctgtgcgaaggcttactcgatccccagtgcaggttagaaaaactgcagttagagtattgttcactctccgccgcctcatgtgagcctctcgcctccgtcctgcgggccaaacccgatttcaaagaattaacagtgagtaataacgatataaacgaggccggcgttcgggtattatgccagggtttaaaagatagtccttgttag

SEQ ID NO: 312659 - DNA, 570 bp, Artificial Sequence
  derived and/or modified sequence
atgtcactagatatccagtcattagacatccagtgtgaggagttgtcggatgctcggtgggcagagctcttgccgttgcttcaacagtgccaggtggtaagactggatgactgcgggttgacagaagcccgttgtaaagatattagtagtgcacttagagtgaacccagctctggccgagctcaatctcaggagtaacgaactgggcgatgtcggcgtccattgtgtgttacaaggtctccaaactccttcctgtaagattcagaaactgtccctccagaattgctgtctcaccggagcaggatgcggggtcttaagctctacgcttcgcacattgcccactctgcaggagctccacctgtctgacaacctgctgggcgacgcaggccttcagctcttgtgtgagggactgctcgacccgcaatgtagacttgagaagttacagctcgagtattgttctctctcagcggcctcatgcgagccactggcatctgtcttaagggccaaacccgatttcaaagaactcaccgtttctaataatgatataaatgaagctggagtacgggtgtag

SEQ ID NO: 312660 - DNA, 585 bp, Artificial Sequence
  derived and/or modified sequence
atgtctctggacattcagtctctggacattcaatgcgaggaacttagtgacgcgaggtgggccgagttacttcccctgctgcaacagtgccaggtagtgcgactcgacgactgtggactgacggaggcaagatgtaaagacatctcatctgccctacgagtgaatcccgcccttgctgaattgaatctgcggagtaatgaactcggcgatgtcggcgtgcactgcgtgttgcaggggcttcagaccccttcttgtaaaattcagaagttgtccctacaaaattgttgcctgacaggcgcaggttgtggagtgctttcctcaactcttcgaaccttacccaccctccaagagctgcacctgtctgataacttactgggcgatgccggtctgcagttgctgtgcgagggcttgttggacccacagtgtagactagaaaagctccaactggagtattgttctctgagtgctgcctcatgcgaacccctggccagcgtcctgcgtgccaagcccgatttcaaagagctgacagtctccaataacgatatcaacgaagcaggcgtgcgcgtattatgccagggcctgtag

SEQ ID NO: 312661 - DNA, 123 bp, Artificial Sequence
  derived and/or modified sequence
atgtccctagatatccaatcgcttgatatccaatgcgaagaactatccgacgccagatgggcagagttattgccactgttacagcaatgtcaggtagtaagattagatgactgcggcctgtag

SEQ ID NO: 312662 - DNA, 1386 bp, Artificial Sequence
  derived and/or modified sequence
atgtccctggatattcagtctctggacattcaatgcgaagagcttagtgatgctcgctgggcagagctgttgccactgctgcagcaatgtcaggtggtgagattggacgattgtggtcttacagaagcaagatgcaaagatatctcatctgccctgcgtgtcaaccctgctttggctgaactgaatttgcggagcaatgaactgggggatgtgggggtacattgtgtgctgcagggtctgcagacaccctcatgtaaaattcagaaactgtccctgcaaaattgctgtctcaccggtgctggctgcggtgttctgtcttccacactgaggacgctccctaccctccaagaattgcatctgtctgataatctgcttggcgacgcaggcttacagctcctatgcgaaggactcctggaccctcagtgtcgattagagaaacttcagttggaatactgctcattgtccgcggctagctgtgaacctttggccagcgtgctgcgtgcaaaacctgactttaaggagctcactgtcagcaacaacgatataaacgaagcaggcgtcagggtgctttgtcagggcctgaaagattcaccctgtcaacttgaagcactgaaacttgagagttgcggggtgacttcagataattgccgcgacctctgtgggattgttgcatcgaaagcctcgctgcgcgaactcgctctcggctcgaacaagctcggcgacgtgggcatggctgaactgtgcccggggttgctacatccatcatctaggctgagaacattatggatttgggaatgcgggataaccgctaaggggtgcggcgatctttgccgtgtgttacgtgcgaaagaatcactgaaagagctctccctcgccggcaatgagctgggggatgaaggcgcaagactactgtgcgagaccttgttagaaccaggatgccaactggagtctctgtgggttaaatcgtgctctttcacagccgcatgctgttctcatttttcttcagtcctagcccaaaataggtttttattggagctccagattagcaacaaccgcctcgaggatgctggcgtcagggaactgtgtcagggtttgggccaacccggaagcgtgctacgggtgctctggcttgcagactgtgacgttagtgattctagttgctctagccttgctgcaacactgctcgcaaaccactcactgcgcgaactggatctgtccaataactgcctgggagatgcggggattcttcagctcgtcgaatctgttcgccagcccggttgcctgcttgagcagttggtgctctacgatatctactggagtgaagagatggaggacaggctgcaagccctggagaaggataaaccatcactcagagtaatatcttag

SEQ ID NO: 312663 - DNA, 1386 bp, Artificial Sequence
  derived and/or modified sequence
atgagcttagacattcaaagtctcgacatccagtgtgaggagttgtccgacgcaaggtgggccgaactcctacccctgctgcaacaatgccaggtggtgcggctggacgattgtggcctgactgaggctagatgcaaggatatctcttcagccctaagagtaaatcccgcactggcagaattaaacttgaggtcaaacgaactgggtgatgtgggggtacattgcgtcctgcaggggctgcagacgccaagttgcaagattcagaaactcagcctgcagaattgttgtcttactggagcagggtgtggcgtactttcctccaccctcaggactctccccactctacaggagctgcacctgtctgacaatctgcttggagacgctggattgcaactgctgtgtgagggcctgctagacccgcagtgcagacttgaaaaattgcagttagaatactgtagcctctctgccgcctcgtgcgaacccttagcttctgtgctgcgcgccaaacccgatttcaaggagctgacggtatctaataatgatattaatgaggccggcgtgagggtactttgccagggacttaaggattcaccgtgtcagttggaggctctgaagctggaatcctgtggcgtgaccagtgacaattgtagagacttgtgtggcatcgtggctagtaaagcttcccttagagagctggctctgggatcaaataagctcggagacgtgggaatggctgaattgtgtccgggactcctccatccatcttcgcgactcaggaccctgtggatttgggaatgtggtatcaccgcaaaggggtgtggggatctctgccgagtgctgcgagccaaggagagcctcaaagaactgagcctcgccggaaatgagctgggcgatgagggagctagattactctgtgagacactgctggagccagggtgccagttagaatccttatgggttaagagctgcagttttaccgcagcttgttgtagccacttttctagcgtgcttgcccagaaccgcttcctcctggaactgcagatatccaacaataggttggaagatgcaggcgttcgtgaactgtgtcaaggtctcgggcaacctggctccgtcctgcgcgttctctggctggccgattgtgatgtctccgactcaagttgctcatcactggccgccacccttctagctaaccattcccttcgtgagctcgacttgagcaataactgtctgggcgatgccggaattctccaactagttgagagcgtgaggcagcccggatgtctcctggaacagctagtcctgtatgacatctattggagtgaggagatggaggatagactccaggcccttgagaaagacaaaccttctcttcgcgtgattagttag

SEQ ID NO: 312664 - DNA, 1386 bp, Artificial Sequence
  derived and/or modified sequence
atgtctttagatattcagagccttgacatccagtgtgaagagctaagcgatgctcggtgggctgagctgctccccctgctgcaacagtgtcaggtcgttagactcgacgattgtggccttaccgaggcacgatgcaaggacatatcctccgccctcagggtgaatcctgctttggcagaactgaatttaagatctaatgaactgggcgatgtcggcgttcattgcgtgctgcaagggttacagactccatcctgcaagattcaaaagttatcccttcagaactgttgtctgaccggcgccggatgtggtgtcttatcctccaccttgcgaaccctgccaaccttgcaagagctacacctctcagacaacttactcggggacgccgggctgcagctcctgtgcgaagggttgctggacccccaatgtcgcttagaaaagctgcaacttgaatactgttcattgagtgctgcctcttgcgagccactggccagtgtgctgagagcaaaacctgacttcaaagaactgaccgtatctaataacgacatcaacgaagccggtgtgcgtgtcctgtgtcagggcctgaaagattcgccctgccagttagaggctctgaagttggagagttgcggcgtgacgagcgacaattgccgagatctgtgtggtatagtggcttctaaggcttctctgagggagctggccctgggctctaataagctgggagacgtgggaatggctgaactttgccctggcctgctgcacccatctagcagacttcgaaccctgtggatctgggaatgtggaatcaccgccaagggttgtggcgatctgtgccgcgtcctgagagcaaaagagagtttaaaggaattaagcctggctggcaacgagcttggtgatgaaggagcccgtctgctctgcgagacccttttagaacctggttgtcaattagaatccctgtgggtgaaatcctgtagcttcactgctgcatgttgctcccacttttcctctgtgcttgcccagaatcgcttcctgcttgagcttcagataagcaataataggctggaggacgccggagtgagagagctatgtcagggcctgggccagcccggttccgttctgcgcgtgttatggctcgccgattgtgatgtctcagattcgtcgtgttcaagtttggctgctacgctacttgcaaatcactcacttcgggagcttgatcttagtaataattgtcttggcgatgccggcattctccaactcgttgagtccgtgagacaacctgggtgtctgttggagcaactcgtactctacgatatttattggtctgaggagatggaagacagactgcaggccttagagaaggataaaccatctctgcgcgtaatatcatag

SEQ ID NO: 312665 - DNA, 1386 bp, Artificial Sequence
  derived and/or modified sequence
atgtcacttgatatacaaagtttagatattcagtgtgaagagctttccgatgcccgatgggccgaacttcttcctctacttcagcagtgccaggttgtgcggttggacgactgtggactgactgaggctcgctgtaaagacatatcttccgccctcagggtgaacccggccctggccgaactgaatctcagatcgaatgagcttggcgacgtgggggtccactgtgtccttcagggcctgcagacgccatcttgcaaaatccagaaactctccttgcagaattgctgcctaacaggagctggatgcggagttctttcttctaccctccgaacactgccaacgctgcaggagctgcatctgtctgacaatttgctaggggacgccggactccagctgctttgcgaaggcctgcttgatcctcagtgcagactggaaaaattgcaattagagtactgctcattatctgccgccagctgcgaaccacttgcctcagtgcttagagccaagccagattttaaagagctcacagtctccaacaacgatatcaacgaggcaggggtgcgagttctctgtcagggattgaaagactctccatgccagctggaggctcttaaattagagagctgtggtgtcacctccgataattgtagggacctgtgtggcattgtggcaagtaaagcctctctgcgagaattggcgctcggttcaaacaagctgggggacgttggaatggccgaactctgtccaggacttctgcatccttccagcaggctgagaaccctctggatttgggagtgtggcatcactgctaaagggtgtggcgacttatgtagggtcctgagagctaaagaaagtcttaaagaactctcactcgctggaaatgaactgggagacgaaggtgcacgactgttatgcgagacgcttttggaacccgggtgccagcttgagtcactttgggttaaatcatgctcattcactgccgcttgctgttctcattttagctccgtcctggcacagaaccgattcttactcgaactacagatttctaacaaccggctggaggacgccggtgtgcgcgaactctgccaagggcttggtcagccagggagtgtactgagagtgctttggcttgctgactgcgacgtgtctgactcctcatgtagcagcctcgcagctactctcctggctaatcattctctcagagaactggacctgtcgaataactgtcttggagacgcaggcatattgcagctcgtggaatctgtgcgacaacctggctgccttcttgaacagttagtcctctacgatatctactggagcgaagagatggaggaccgactgcaggcattggagaaagacaaaccttctttacgcgtaatatcatag

SEQ ID NO: 312666 - DNA, 1386 bp, Artificial Sequence
  derived and/or modified sequence
atgtccctcgatattcaaagcttagatatccaatgtgaggagttatccgatgctagatgggccgagctcctgccccttcttcagcagtgccaggtggtgagactcgacgattgcgggttgacagaagctagatgcaaagatatttcctccgccctgcgtgtgaatccagcgctggcagaactaaatctgcggagcaatgagcttggtgatgtgggcgtgcactgcgtcctccagggtttgcagacaccctcttgcaagattcagaagctgagcctacagaattgctgcctgaccggtgctggctgtggcgttctgtcctctacgctacggacactacctaccctccaggagctgcatctaagtgataatcttttgggagatgcgggccttcaactgctgtgcgaagggcttctagatccccagtgtaggctggagaaattgcaattggagtattgttctctgtcagcagcgagttgtgaacccctggcctccgtgctccgtgcaaagcccgactttaaggaactgaccgtgagcaataatgacataaatgaagcaggagtgagagtcctctgccagggcttaaaggattccccatgtcagctggaggccctcaagctggagtcatgtggagttacctcagacaactgcagagatctgtgtggaatcgttgcatcgaaagcgtccctgcgcgaacttgctcttggtagtaacaaactgggcgatgtagggatggccgaactctgccctggattattgcaccctagtagtcggttgaggaccctgtggatttgggagtgcggaataacagcaaagggttgtggtgacttatgccgggtactgcgtgcgaaagaatctttgaaagaactgagcctagctggtaacgagcttggagacgagggtgctcgactgctgtgcgagactttgctggagcccgggtgtcaattagaatctttgtgggtcaagagctgttcttttactgctgcatgctgcagtcatttttcatctgtgttagctcagaatcgatttctgctcgaactgcagatctccaataaccgccttgaggatgctggggtcagggaactgtgtcaagggctaggccaaccgggcagtgtactcagagtgctttggttagctgactgcgacgtttccgattcttcatgctcctctctggctgccactctattggctaaccacagcctgcgcgaattagatctttccaataactgcctgggagatgcgggtatcctgcaactagtggaatccgtgcgccagcctggttgcctgctcgaacaacttgtgttatacgacatctattggtcggaagaaatggaggatcggttacaggccttagaaaaagacaaaccgagtctgagagtgatttcttag

SEQ ID NO: 312667 - DNA, 1386 bp, Artificial Sequence
  derived and/or modified sequence
atgtccttagatattcaatcactggacatccaatgtgaagaactctccgacgcgagatgggccgaactactacccctcctccagcaatgccaggtggtgcgtctggacgactgtggcctaacagaggcgagatgtaaggatatatcaagtgctttgcgagtcaaccctgctctggccgaactgaatttacggtccaatgaactgggtgatgtaggagtgcactgcgtactgcaaggtctccagacaccgagttgcaaaattcagaagctgtccctgcagaattgttgcctaaccggcgccgggtgcggagtgctgagctctacacttaggaccctcccgactctccaggaactgcacctgtcagacaacctactgggcgacgcaggattacaattactgtgtgaaggcctccttgatccgcagtgccgcctagagaagctacaactagagtactgttcactcagcgccgcctcctgcgaaccccttgcctctgtcctacgagctaagccagattttaaagaacttaccgtatctaacaacgacatcaatgaagcaggcgtgcgcgtcctctgccagggccttaaagactcaccatgtcagctggaagcactaaaactggagtcctgcggggttacttcagataactgtagagacctgtgtggcattgtggcaagcaaggcctcccttagagaattagccctcggaagtaacaaactcggggacgtgggaatggcggagctctgtccgggcctgttacacccctctagtcgcttacgcaccctgtggatctgggaatgtggaattactgcaaaaggatgtggcgatctgtgtagagtgctgcgcgccaaggagtcgttgaaagaactgagtctggccgggaatgaacttggagatgagggcgcaagactcctctgcgaaaccctcctggagccaggatgccagctcgagtccctctgggtgaaaagttgctcctttacggctgcctgctgctcgcacttctcttcagtactcgcacaaaatcgctttcttcttgagttacaaatttcgaacaatcgtctggaagacgcaggcgtccgagaattatgccaaggccttggccagcccgggagtgtgttacgggttctgtggttggcagactgcgacgtttcagactcttcttgttctagcctcgccgccaccctcctggcgaatcattcccttagggaactcgacctgagcaacaattgcctcggagatgccggaatcctacagctcgtcgagtcagttcgacaaccaggatgcctcttggaacaactggttctctacgatatctactggtcagaagagatggaagatagattacaggctttggagaaggacaaaccatccctgagggtaatttcatag

SEQ ID NO: 312668 - DNA, 1386 bp, Artificial Sequence
  derived and/or modified sequence
atgagcctcgatatccaaagtttagacatccaatgcgaagaactgagcgacgctcggtgggccgagctgctccccctgctacaacagtgccaggtggtgcgtcttgatgattgcggtctcacagaagcacgatgtaaggatataagttccgccctgagggtgaatcccgctcttgccgagctgaatctacggtctaatgagttaggggatgtgggcgtgcattgcgtgctccagggtttacagaccccttcttgtaaaatccaaaagctgagcctccagaattgttgccttactggcgccgggtgcggcgttctcagctccacactacgaaccctgcccactttacaggagctccacctgtccgataatttgcttggagacgctgggttgcaactgctgtgtgaagggcttctggatcctcagtgcagacttgagaagttgcagctggaatactgttctctctccgcagcttcctgtgaacctctcgctagtgtgttacgtgccaaaccagatttcaaggagcttacagtaagtaataatgacattaacgaagccggcgtgcgggtactgtgtcagggcctgaaggattcgccgtgtcaactcgaggcactgaaactcgagagctgtggcgtcacgagtgataactgcagggacctgtgtgggatcgttgctagcaaagcttcactgcgcgagttggcactgggttctaataaactgggggacgtgggtatggcggagctgtgtccaggccttttacacccaagcagccggttaaggactctgtggatctgggagtgcggtatcacggctaagggctgcggggatctgtgtcgcgtgttgcgggcaaaagaatctttaaaagagctctcactggctggaaatgagctcggcgacgaaggagcgagactactatgtgaaaccttgctggaaccagggtgtcagcttgaaagtctgtgggtgaaatcgtgcagttttaccgcggcctgttgcagccatttttcatctgttcttgcccaaaaccgcttcctgcttgaactgcagatctcaaataacaggttggaagacgctggagtccgcgagttgtgtcaaggcctgggccaacccggttccgtgttacgagtgttatggctagccgattgtgacgtgtccgactcctcatgctcttctctcgcagcgactctacttgctaaccacagcctcagagaacttgatctgagtaataactgcctgggcgatgccggcattctgcagctcgtggagtcagtgcgccagcctggatgcctgttggagcagcttgtgctctatgatatttactggtctgaggaaatggaagatcgtcttcaagcactagaaaaagacaagccatcattacgcgtgatttcttag

SEQ ID NO: 312669 - DNA, 1386 bp, Artificial Sequence
  derived and/or modified sequence
atgtcactggacattcaatcattagatatacaatgcgaagagctttctgacgctagatgggctgaactgctcccattattgcagcaatgccaggtggtgaggctcgacgactgtggcttaacggaggctcgttgtaaggacatctcatccgctttgagagtgaatcctgcgctggcagagctgaacctgcgatctaatgaactcggggatgtcggtgtacattgtgtgttacaagggcttcagaccccatcctgcaaaattcaaaagctgtctctgcaaaactgttgcttgactggtgccggatgcggcgtcctgtcaagcaccctccgcacgctgcctactctgcaggaattgcacttatctgacaatctgctgggtgatgccgggctgcaactgctatgtgaaggactgctagatccacaatgcaggctcgagaagctccagttagagtactgttccctctcagccgcttcttgtgagccgctcgccagcgtcctccgcgcaaaacccgatttcaaagagctgaccgtttccaataatgacattaacgaggccggggtaagagtcctctgtcagggcctgaaagactctccctgtcagctggaggccctcaagctggaatcttgtggggtgacatcagacaattgtagggatttgtgcggaatcgtggccagcaaggcaagcctccgagaactggccctgggatccaataagctgggagacgtaggtatggccgagttatgccctggactgttgcacccaagctctagattgagaaccttgtggatatgggaatgtggaattacagctaaaggttgtggagatctgtgcagagtacttcgcgctaaggagtctctcaaagagctgtcactggccggtaacgagttgggggacgaaggggcccggttactctgtgaaacactcctcgaaccaggatgtcaattagagagtttgtgggtgaagtcctgctcctttaccgcagcttgttgttctcacttttctagtgtgcttgcgcaaaaccgtttcctattagagctccagatctcaaacaacaggttagaagacgccggggtccgggagctgtgtcaaggtttggggcagcccgggagtgtactgcgagtgctctggcttgccgactgtgacgtgtctgactctagctgttcttccctagctgcaactctgcttgcaaaccattcccttagagaattggatctgagtaataattgtctaggagatgcggggattctgcaactggtggagtcagtacgtcagcctgggtgcttattggaacagctcgtgctctatgatatatactggagcgaagaaatggaagatcgtctacaagcactggagaaggataagcccagcctgcgtgtaatttcatag

SEQ ID NO: 312670 - DNA, 600 bp, Artificial Sequence
  derived and/or modified sequence
atgtcactcgacatccagagtctcgatattcagtgcgaagagctctctgatgcaagatgggccgagctcttacctctcctccagcagtgccaggtagtgcgactggacgactgtggacttaccgaggcaaggtgtaaagatatctctagcgctctgcgtgttaatccagctttagctgaactcaacctaagatcgaacgaactcggggatgtaggcgttcactgcgtgctacagggtcttcaaaccccttcctgcaaaattcagaaactgagcctccagaactgttgtctgacaggcgccgggtgcggcgtgctgtcctcgacgctgagaacactgcctacactgcaagagcttcatctctctgataatctgctgggcgacgcaggcctgcagttgctttgcgagggactacttgacccccagtgccgattggaaaaattacagctcgagtattgcagtctttctgccgcatcatgtgaacccttggcctccgtcctgagggcaaaacccgattttaaagaactcactgtaagcaataatgatattaacgaagctggagtgcgtgtcctgtgtcagggacttaaggatagcccctgttag

SEQ ID NO: 312671 - DNA, 570 bp, Artificial Sequence
  derived and/or modified sequence
atgagcctggatattcaatcgctggatattcaatgtgaggaattaagtgacgcaagatgggccgagttactaccattacttcagcaatgtcaggttgtccgtctggacgattgtggcctgaccgaagctcgatgcaaggacatttcctcggcacttcgcgtgaaccctgccctagccgagctgaacctgagatcaaatgagctgggggatgtgggtgtgcactgtgtgctccagggcttacagaccccttcctgcaagattcaaaaactgtctctgcagaattgttgcctgaccggcgcaggatgcggggtattgtccagtactctcagaacactaccgacactacaggagctgcacttatcagacaaccttttgggtgacgcgggcctacagttgctatgcgaggggctacttgatccacaatgtcgattagagaaactgcagctggaatactgctccctgagtgctgcctcttgcgagccactagcctcagttttgagggctaagcccgatttcaaagaactaaccgtgtcaaacaatgacatcaacgaagcaggggttagggtttag

SEQ ID NO: 312672 - DNA, 585 bp, Artificial Sequence
  derived and/or modified sequence
atgtccttagacatccagtccctagacatccagtgcgaagaactgagtgatgccaggtgggctgaattgttacctctgctgcagcagtgtcaggttgtacgattagacgactgcggcttgaccgaagcccgatgtaaggacatttcctctgcacttagggtcaaccccgccttagctgagttgaacctccggagcaacgaactgggtgacgttggtgtgcattgcgttctgcagggccttcagacaccatcctgcaagatccagaagctttctctgcaaaattgctgcctgacgggagccggatgtggcgtgttgtcaagtacactacgcaccctgccaacactccaggaactgcacctgtctgataacctgctcggagatgctgggcttcaattattgtgtgagggcctgttagacccccagtgtcggctggagaaacttcaattggagtattgttcattgagtgccgcctcttgcgaacccctggcctccgtgcttcgagccaaaccggatttcaaggaactgaccgtttcaaataatgacataaacgaagccggcgtaagggtgctctgtcaagggttgtag

SEQ ID NO: 312673 - DNA, 1386 bp, Artificial Sequence
  derived and/or modified sequence
atgagcctcgacattcagagcctcgacattcagtgcgaagagctctccgacgcccgatgggctgagcttcttcccctcctgcagcagtgtcaagtggtcagattagatgactgtggacttacagaggccagatgcaaagatatcagttccgctttgcgcgtcaaccctgccctggccgaactaaatctgagatcaaacgaacttggagacgtgggcgtgcattgcgttcttcaaggattgcagacaccgtcatgcaagattcagaagctctccctgcagaattgctgtcttactggagccggttgcggtgttctgtcttctacacttcgaacattaccaacattgcaagagctgcacctgagcgacaacttattaggcgatgcaggactgcagctgctttgtgagggcctcctggatccccagtgcagactagaaaaacttcagttggaatactgttctttaagcgctgcctcatgtgaacccctggcatctgtcttgcgggccaagcctgacttcaaggaactgaccgtgagcaacaatgatattaacgaggcaggggtgagagtgttatgccagggccttaaagatagcccttgtcagttagaggctctgaaacttgaatcttgtggggttaccagcgataactgcagggatctgtgtggaatcgtagccagcaaagcttctttgcgcgagcttgctttgggatccaataagctcggagatgtgggtatggctgagttgtgccctgggctactgcacccctccagtagactgcgcacactgtggatctgggagtgcggcattaccgcaaaaggctgtggcgatttgtgtcgagtactgagagctaaagagtccttgaaggaactgagcctagccggaaatgagctgggtgatgaaggcgcaagactactgtgcgagaccttgttagaaccaggatgccaactggagtctctgtgggttaaatcgtgctctttcacagccgcatgctgttctcatttttcttcagtcctagcccaaaataggtttttattggagctccagattagcaacaaccgcctcgaggatgctggcgtcagggaactgtgtcagggtttgggccaacccggaagcgtgctacgggtgctctggcttgcagactgtgacgttagtgattctagttgctctagccttgctgcaacactgctcgcaaaccactcactgagagagctcgacttgagtaataattgtctgggcgatgcaggaatcctgcagctcgtggaatctgttagacagcctggttgcttgttggaacagctcgtcctgtacgacatctattggtcagaagaaatggaagacaggttacaagcgctggagaaagacaagccgtcattaagggttatttcatag

SEQ ID NO: 312674 - DNA, 1386 bp, Artificial Sequence
  derived and/or modified sequence
atgtcactggatatccagtccctcgacattcagtgtgaggagctgtcagatgcacgttgggccgaactgctccctctcttgcaacaatgccaggtagtccggctggatgattgcggactaactgaagctcgatgtaaagacatatctagtgctctccgggtaaaccccgccttggccgaacttaacctgaggtcaaacgaactgggagatgtgggtgttcattgcgttcttcaaggactccagaccccttcatgtaaaatccagaaattatcactgcaaaactgttgcctgaccggagcaggatgcggggtcctgtcttctactcttagaaccttacccacactacaggaattacacttatctgacaatctgttaggagatgccggcctccaactcctttgcgagggcctgctcgacccccagtgtcggcttgaaaaactccagctcgaatactgcagtttgtccgcagcatcttgtgagcctcttgcaagcgtattgcgcgctaaacccgactttaaagaactgacggtatctaataatgatatcaatgaggcaggcgtgagagtgctttgccagggactaaaggactcaccctgccagttggaggctctgaagctggaatcctgtggcgtgaccagtgacaattgtagagacttgtgtggcatcgtggctagtaaagcttcccttagagagctggctctgggatcaaataagctcggagacgtgggaatggctgaattgtgtccgggactcctccatccatcttcgcgactcaggaccctgtggatttgggaatgtggtatcaccgcaaaggggtgtggggatctctgccgagtgctgcgagccaaggagagcctcaaagaactgagcctcgccggaaatgagctgggcgatgagggagccagacttttgtgcgagactctccttgaacctggatgccaactggaaagtctttgggttaaatcgtgctcctttaccgccgcttgttgttctcacttctcatccgttctagcccagaacagattcttgctggaacttcaaatctcaaataaccgcttagaagacgccggcgtgcgggagctatgccagggcctgggccaaccggggtcggtgctcagagttctgtggctggccgattgtgacgtctcggactcttcatgttcaagcctggctgctaccctactggccaaccattccctcagagaacttgacctgtcaaataactgtctgggcgacgctggaatactgcagcttgtggagtccgtccggcaacccgggtgcctgctggaacaattagtcttatatgatatatattggagtgaagagatggaggatcgactccaggctctggagaaagataaaccttccctacgcgtgatatcttag

SEQ ID NO: 312675 - DNA, 873 bp, Artificial Sequence
  derived and/or modified sequence
acgtggccgtcaagccctctagtgccttagattccagcgagctacgcaagcaatcctggcccagccgagcttgcttccccaaatcccgtaatccttgaccttattcccccaaagaagcggcctcccgggaaggagcgccctggcggagaagactcgaacggctcccacagccgggcgttgggggaaagaatctccggcctgtgaaactgtgaggggattcggccaagacgtcctcttccctctgcctcccacccaggccactcttcacctccaccatgagcctggacatccagagcctggacatccagtgtgaggagctgagcgacgctagatgggccgagctcctccctctgctccagcagtgccaagtggtcaggctggacgactgtggcctcacggaagcacggtgcaaggacatcagctctgcacttcgagtcaaccctgcactggcagagctcaacctgcgcagcaacgagctgggcgatgtcggcgtgcattgcgtgctccagggcctgcagaccccctcctgcaagatccagaagctgagcctccagaactgctgcctgacgggggccggctgcggggtcctgtccagcacactacgcaccctgcccaccctgcaggagctgcacctcagcgacaacctcttgggggatgcgggcctgcagctgctctgcgaaggactcctggacccccagtgccgcctggaaaagctgcagctggagtattgcagcctctcggctgccagctgcgagcccctggcctccgtgctcagggccaagccggacttcaaggagctcacggttagcaacaacgacatcaatgaggctggcgtccgtgtgctgtgccagggcctgaaggactccccctgcc

SEQ ID NO: 312676 - DNA, 870 bp, Artificial Sequence
  derived and/or modified sequence
cgagctacgcaagcaatcctggcccagccgagcttgcttccccaaatcccgtaatccttgaccttattcccccaaagaagcggcctcccgggaaggagcgccctggcggagaagactcgaacggctcccacagccgggcgttgggggaaagctacaacaaatcatcgtcaacctgttccaccttctccagtctggtagcaaaaaggggtgtctcagaatctccggcctgtgaaactgtgaggggattcggccaagacgtcctcttccctctgcctcccacccaggccactcttcacctccaccatgagcctggacatccagagcctggacatccagtgtgaggagctgagcgacgctagatgggccgagctcctccctctgctccagcagtgccaagtggtcaggctggacgactgtggcctcacggaagcacggtgcaaggacatcagctctgcacttcgagtcaaccctgcactggcagagctcaacctgcgcagcaacgagctgggcgatgtcggcgtgcattgcgtgctccagggcctgcagaccccctcctgcaagatccagaagctgagcctccagaactgctgcctgacgggggccggctgcggggtcctgtccagcacactacgcaccctgcccaccctgcaggagctgcacctcagcgacaacctcttgggggatgcgggcctgcagctgctctgcgaaggactcctggacccccagtgccgcctggaaaagctgcagctggagtattgcagcctctcggctgccagctgcgagcccctggcctccgtgctcagggccaagccggacttcaaggagctcacggttagcaacaacgacatcaatgaggctggcgtccgtgtg

SEQ ID NO: 312677 - DNA, 727 bp, Artificial Sequence
  derived and/or modified sequence
cgactagcgggcgcggcccccagggtggactccccgccagccccggcctggaggctccgcccgcccccgcctgggcggaaggaacgcggagcggctctggccttgggtctgcggcggcggcgtcgggccactcttcacctccaccatgagcctggacatccagagcctggacatccagtgtgaggagctgagcgacgctagatgggccgagctcctccctctgctccagcagtgccaagtggtcaggctggacgactgtggcctcacggaagcacggtgcaaggacatcagctctgcacttcgagtcaaccctgcactggcagagctcaacctgcgcagcaacgagctgggcgatgtcggcgtgcattgcgtgctccagggcctgcagaccccctcctgcaagatccagaagctgagcctccagaactgctgcctgacgggggccggctgcggggtcctgtccagcacactacgcaccctgcccaccctgcaggagctgcacctcagcgacaacctcttgggggatgcgggcctgcagctgctctgcgaaggactcctggacccccagtgccgcctggaaaagctgcagctggagtattgcagcctctcggctgccagctgcgagcccctggcctccgtgctcagggccaagccggacttcaaggagctcacggttagcaacaacgacatcaatgaggctggcgtccgtgtgctgtgccagggcctg

SEQ ID NO: 312678 - DNA, 704 bp, Artificial Sequence
  derived and/or modified sequence
gaggacagtttggcagtgtttcagaagggccttagaaccaggcaggcccccttctaggatggtggaaagcctaaagatctgaaaacggtctcaagtgtcgtcttagcgattggctgactaaaccgaatgcaagccggagactgcacacgatgttgccgttaacagttacactgggccgggcagtcagaggcaggcggatcacctgaggtcaggagttcgagaacagcctggccaacatgaggccaccttcttccatcttcaaaacctactgtctctgcataagaactctcatgattatatgccggccgcccagacaccccagggcatgaagaactcttgactgacagaaacggagggtgtgtccaaagttttgaggacggccgagcggcgctccaaaacccgtcctcacagcctcgccccgttcgcctcagctacaacaaatcatcgtcaacctgttccaccttctccagtctggtagcaaaaaggggtgtctcagaatctccggcctgtgaaactgtgaggggattcggccaagacgtcctcttccctctgcctcccacccaggccactcttcacctccaccatgagcctggacatccagagcctggacatccagtgtgaggagctgagcgacgctagatgggccgagctcctccctctgctccagcagtgccaagtggtcaggctggacgactgtggcctca

SEQ ID NO: 312679 - DNA, 1829 bp, Artificial Sequence
  derived and/or modified sequence
cgggtggggttgtcgacacgttcaacccgttctgctggctcgagaacgaagtaggccgtctcgctctgggtctccaggcccgcgaccgtccgccagtcgtcccgaggcatgaagaactcttgactgacagaaacggagggtgtgtccaaagttttgaggacggccgagcggcgctccaaaacccgtcctcacagcctcgccccgttcgcctcagctacaacaaatcatcgtcaacctgttccaccttctccagtctggtagcaaaaaggggtgtctcaggccactcttcacctccaccatgagcctggacatccagagcctggacatccagtgtgaggagctgagcgacgctagatgggccgagctcctccctctgctccagcagtgccaagtggtcaggctggacgactgtggcctcacggaagcacggtgcaaggacatcagctctgcacttcgagtcaaccctgcactggcagagctcaacctgcgcagcaacgagctgggcgatgtcggcgtgcattgcgtgctccagggcctgcagaccccctcctgcaagatccagaagctgagcctccagaactgctgcctgacgggggccggctgcggggtcctgtccagcacactacgcaccctgcccaccctgcaggagctgcacctcagcgacaacctcttgggggatgcgggcctgcagctgctctgcgaaggactcctggacccccagtgccgcctggaaaagctgcagctggagtattgcagcctctcggctgccagctgcgagcccctggcctccgtgctcagggccaagccggacttcaaggagctcacggttagcaacaacgacatcaatgaggctggcgtccgtgtgctgtgccagggcctgaaggactccccctgccagctggaggcgctcaagctggagagctgcggtgtgacatcagacaactgccgggacctgtgcggcattgtggcctccaaggcctcgctgcgggagctggccctgggcagcaacaagctgggtgatgtgggcatggcggagctgtgcccagggctgctccaccccagctccaggctcaggaccctgtggatctgggagtgtggcatcactgccaagggctgcggggatctgtgccgtgtcctcagggccaaggagagcctgaaggagctcagcctggccggcaacgagctgggggatgagggtgcccgactgctgtgtgagaccctgctggaacctggctgccagctggagtcgctgtgggtgaagtcctgcagcttcacagccgcctgctgctcccacttcagctcagtgctggcccagaacaggtttctcctggagctacagataagcaacaacaggctggaggatgcgggcgtgcgggagctgtgccagggcctgggccagcctggctctgtgctgcgggtgctctggttggccgactgcgatgtgagtgacagcagctgcagcagcctcgccgcaaccctgttggccaaccacagcctgcgtgagctggacctcagcaacaactgcctgggggacgccggcatcctgcagctggtggagagcgtccggcagccgggctgcctcctggagcagctggtcctgtacgacatttactggtctgaggagatggaggaccggctgcaggccctggagaaggacaagccatccctgagggtcatctcctgaggctcttcctgctgctgctctccctggacgaccggcctcgaggcaaccctggggcccaccagcccctgccatgctctcaccctgcatatcctaggtttgaagagaaacgctcagatccgcttatttctgccagtatattttggac

SEQ ID NO: 312680 - DNA, 2973 bp, Artificial Sequence
  derived and/or modified sequence
cacaccctggtcggttttgctcacgtgcttcgggtcggttggattcagttcctccatgtggggccgtgggatgtcaccaccctttgccactgtccttgcaggccgggcgcccaggcgtgtggacccgagcccagccttgcgtctttcctcccagttggtaccaggggcctcttgcctccactcatgcagagtggaccagccgcctctgaagcagccccggggagaggagtgccaggcacacagactcaggaagctgggggtgtcagggcaccaggagcctctcaagcggtcctgttggccgtctttctgaagggcagctggggttgcatcatttccccaagtggatcctgccaactttctggggcttctggatgagagccctctccccaccccacccacccctccccgcattgtggcatcagtgctgctgcttccagggagccttcctggccatccaagcctcctctccaggttcctgccctgctgtagtccccaggccagtgcttggcaggtgctcagggaatgtatccaccaaccaaggtttggggtggctgtctctgcctgaccactttccccaggcccctggcgggtacctgagctgtgctctcagggcctcaggaacctccttccatattcagggcctgtgcctggggaggcttcagggtgtagcagctgtgcccatcccaggctgacccacccagcttgcctggtagcccagcctctgggctagtgtgccgtggggcaggggatgtgctgtagcctggtgcagagtccccaaccccagaagggggccatggaagctgacaccccaagtggccgcccccctgctctgtcttgcttcggacactgtggccgggtccaggatcctggcatcctgggaggtctctggctttgtgggcagcctgcctggcccgcacagtctgcctgtcctgagggtgagacacaggtcaagcccacagacccccttgctcccctgctggggcctccaggctcacagaccaccccaccctaccctgtccttgcccaagcaaatgagaggcaggggcttcccgggctgctgctgtcccgccctctgtggggcaggaggaggtgcccacagaggctgggtggtgatagccaggagatgggctggcatctgcattacccaagctctgctgcccatggtggcctttctgggggtgggtgctggtccctgccccctgccccacccctgatgtctgctccagagacaaaggtggggagggtgctgaagaggaagtgtttgcccagggagaggctgcggctcctcctgaaacatcagccctgtgggtcctgtttgcagaatctccggcctgtgaaactgtgaggggattcggccaagacgtcctcttccctctgcctcccacccaggccactcttcacctccaccatgagcctggacatccagagcctggacatccagtgtgaggagctgagcgacgctagatgggccgagctcctccctctgctccagcagtgccaagtggtcaggctggacgactgtggcctcacggaagcacggtgcaaggacatcagctctgcacttcgagtcaaccctgcactggcagagctcaacctgcgcagcaacgagctgggcgatgtcggcgtgcattgcgtgctccagggcctgcagaccccctcctgcaagatccagaagctgagcctccagaactgctgcctgacgggggccggctgcggggtcctgtccagcacactacgcaccctgcccaccctgcaggagctgcacctcagcgacaacctcttgggggatgcgggcctgcagctgctctgcgaaggactcctggacccccagtgccgcctggaaaagctgcagctggagtattgcagcctctcggctgccagctgcgagcccctggcctccgtgctcagggccaagccggacttcaaggagctcacggttagcaacaacgacatcaatgaggctggcgtccgtgtgctgtgccagggcctgaaggactccccctgccagctggaggcgctcaagctggagagctgcggtgtgacatcagacaactgccgggacctgtgcggcattgtggcctccaaggcctcgctgcgggagctggccctgggcagcaacaagctgggtgatgtgggcatggcggagctgtgcccagggctgctccaccccagctccaggctcaggaccctgtggatctgggagtgtggcatcactgccaagggctgcggggatctgtgccgtgtcctcagggccaaggagagcctgaaggagctcagcctggccggcaacgagctgggggatgagggtgcccgactgctgtgtgagaccctgctggaacctggctgccagctggagtcgctgtgggtgaagtcctgcagcttcacagccgcctgctgctcccacttcagctcagtgctggcccagaacaggtttctcctggagctacagataagcaacaacaggctggaggatgcgggcgtgcgggagctgtgccagggcctgggccagcctggctctgtgctgcgggtgctctggttggccgactgcgatgtgagtgacagcagctgcagcagcctcgccgcaaccctgttggccaaccacagcctgcgtgagctggacctcagcaacaactgcctgggggacgccggcatcctgcagctggtggagagcgtccggcagccgggctgcctcctggagcagctggtcctgtacgacatttactggtctgaggagatggaggaccggctgcaggccctggagaaggacaagccatccctgagggtcatctcctgaggctcttcctgctgctgctctccctggacgaccggcctcgaggcaaccctggggcccaccagcccctgccatgctctcaccctgcatatcctaggtttgaagagaaacgctcagatccgcttatttctgccagtatattttggacactttataatcattaaagcactttcttggcagga

SEQ ID NO: 312681 - DNA, 1386 bp, Artificial Sequence
  derived and/or modified sequence
atgagcctggacatccagagcctggacatccagtgcgaggagctgagcgacgccagatgggccgagctgctgcccctgctgcagcagtgccaggtggtgagactggacgactgcggcctgaccgaggccagatgcaaggacatcagcagcgccctgagagtgaaccccgccctggccgagctgaacctgagaagcaacgagctgggcgacgtgggcgtgcactgcgtgctgcagggcctgcagacccccagctgcaagatccagaagctgagcctgcagaactgctgcctgaccggcgccggctgcggcgtgctgagcagcaccctgagaaccctgcccaccctgcaggagctgcacctgagcgacaacctgctgggcgacgccggcctgcagctgctgtgcgagggcctgctggacccccagtgcagactggagaagctgcagctggagtactgcagcctgagcgccgccagctgcgagcccctggccagcgtgctgagagccaagcccgacttcaaggagctgaccgtgagcaacaacgacatcaacgaggccggcgtgagagtgctgtgccagggcctgaaggacagcccctgccagctggaggccctgaagctggagagctgcggcgtgaccagcgacaactgcagagacctgtgcggcatcgtggccagcaaggccagcctgagagagctggccctgggcagcaacaagctgggcgacgtgggcatggccgagctgtgccccggcctgctgcaccccagcagcagactgagaaccctgtggatctgggagtgcggcatcaccgccaagggctgcggcgacctgtgcagagtgctgagagccaaggagagcctgaaggagctgagcctggccggcaacgagctgggcgacgagggcgccagactgctgtgcgagaccctgctggagcccggctgccagctggagagcctgtgggtgaagagctgcagcttcaccgccgcctgctgcagccacttcagcagcgtgctggcccagaacagattcctgctggagctgcagatcagcaacaacagactggaggacgccggcgtgagagagctgtgccagggcctgggccagcccggcagcgtgctgagagtgctgtggctggccgactgcgacgtgagcgacagcagctgcagcagcctggccgccaccctgctggccaaccacagcctgagagagctggacctgagcaacaactgcctgggcgacgccggcatcctgcagctggtggagagcgtgagacagcccggctgcctgctggagcagctggtgctgtacgacatctactggagcgaggagatggaggacagactgcaggccctggagaaggacaagcccagcctgagagtgatcagctag

SEQ ID NO: 312682 - DNA, 600 bp, Artificial Sequence
  derived and/or modified sequence
atgagcctggacatccagagcctggacatccagtgcgaggagctgagcgacgccagatgggccgagctgctgcccctgctgcagcagtgccaggtggtgagactggacgactgcggcctgaccgaggccagatgcaaggacatcagcagcgccctgagagtgaaccccgccctggccgagctgaacctgagaagcaacgagctgggcgacgtgggcgtgcactgcgtgctgcagggcctgcagacccccagctgcaagatccagaagctgagcctgcagaactgctgcctgaccggcgccggctgcggcgtgctgagcagcaccctgagaaccctgcccaccctgcaggagctgcacctgagcgacaacctgctgggcgacgccggcctgcagctgctgtgcgagggcctgctggacccccagtgcagactggagaagctgcagctggagtactgcagcctgagcgccgccagctgcgagcccctggccagcgtgctgagagccaagcccgacttcaaggagctgaccgtgagcaacaacgacatcaacgaggccggcgtgagagtgctgtgccagggcctgaaggacagcccctgctag

SEQ ID NO: 312683 - DNA, 570 bp, Artificial Sequence
  derived and/or modified sequence
atgagcctggacatccagagcctggacatccagtgcgaggagctgagcgacgccagatgggccgagctgctgcccctgctgcagcagtgccaggtggtgagactggacgactgcggcctgaccgaggccagatgcaaggacatcagcagcgccctgagagtgaaccccgccctggccgagctgaacctgagaagcaacgagctgggcgacgtgggcgtgcactgcgtgctgcagggcctgcagacccccagctgcaagatccagaagctgagcctgcagaactgctgcctgaccggcgccggctgcggcgtgctgagcagcaccctgagaaccctgcccaccctgcaggagctgcacctgagcgacaacctgctgggcgacgccggcctgcagctgctgtgcgagggcctgctggacccccagtgcagactggagaagctgcagctggagtactgcagcctgagcgccgccagctgcgagcccctggccagcgtgctgagagccaagcccgacttcaaggagctgaccgtgagcaacaacgacatcaacgaggccggcgtgagagtgtag

SEQ ID NO: 312684 - DNA, 585 bp, Artificial Sequence
  derived and/or modified sequence
atgagcctggacatccagagcctggacatccagtgcgaggagctgagcgacgccagatgggccgagctgctgcccctgctgcagcagtgccaggtggtgagactggacgactgcggcctgaccgaggccagatgcaaggacatcagcagcgccctgagagtgaaccccgccctggccgagctgaacctgagaagcaacgagctgggcgacgtgggcgtgcactgcgtgctgcagggcctgcagacccccagctgcaagatccagaagctgagcctgcagaactgctgcctgaccggcgccggctgcggcgtgctgagcagcaccctgagaaccctgcccaccctgcaggagctgcacctgagcgacaacctgctgggcgacgccggcctgcagctgctgtgcgagggcctgctggacccccagtgcagactggagaagctgcagctggagtactgcagcctgagcgccgccagctgcgagcccctggccagcgtgctgagagccaagcccgacttcaaggagctgaccgtgagcaacaacgacatcaacgaggccggcgtgagagtgctgtgccagggcctgtag

SEQ ID NO: 312685 - DNA, 123 bp, Artificial Sequence
  derived and/or modified sequence
atgagcctggacatccagagcctggacatccagtgcgaggagctgagcgacgccagatgggccgagctgctgcccctgctgcagcagtgccaggtggtgagactggacgactgcggcctgtag

SEQ ID NO: 312686 - DNA, 1386 bp, Artificial Sequence
  derived and/or modified sequence
atgagcctagatatccaaagtttggatatccagtgcgaggagctgtccgatgcccggtgggccgaattgctgcctctattgcagcagtgtcaagttgtccgattggatgactgcgggctaacagaggcccgatgcaaggacatcagctcggccctaagagtgaaccctgccttggctgaactgaatctcagaagcaatgaactgggagatgtgggtgtgcactgtgtgctgcaaggtctccagactcccagctgtaaaattcagaaactgagcttacaaaactgctgcctgacaggagcaggatgcggtgtcctctctagtacactcagaacactccctactttgcaggagctccatctgagcgataatctactgggagacgcaggactgcagctcctctgcgaaggtctattagatcctcagtgtagactggagaaattgcaactggagtactgctccctctcagcagcaagttgcgagcctctggcctcggtcctgcgggccaagcccgacttcaaggagcttaccgtgtctaataacgatattaatgaagcgggagtgcgggtactgtgccaaggcctaaaggatagcccatgtcagcttgaagccctgaagctggagagttgtggtgtaaccagtgacaattgccgcgatttatgcggcatagtcgccagcaaggcaagcctccgggaactcgctttgggaagcaacaagctgggtgacgtcgggatggccgagctctgtccagggctcctccacccctcttctagactgagaacgctgtggatttgggagtgtggcataaccgctaagggttgcggtgatctatgtagggtgctcagggctaaagagtccctaaaggagctgagcttggccggcaatgagctgggggatgaaggcgcccgcctcctgtgcgaaacactcctggaacccggctgccagctggagtccctctgggtgaagtcttgcagctttactgccgcctgctgctctcattttagctccgttctggcccagaatagattcctattagagctccagatttccaacaatagactggaggatgctggtgtgcgggaactgtgccagggactgggacaaccaggttctgtgctgcgggtgctgtggctggctgactgtgatgtgagtgacagcagttgttccagtctggctgccaccttgctcgcgaaccatagcctgcgggaactggatctgtccaataactgcttaggcgacgcaggcatcctgcagctggtggagagtgtgcggcagcccggctgcttactggaacagttagtactttacgacatttactggagtgaggagatggaggatcgcctgcaggccttggaaaaagataaaccttcgctgagagtaatatcatag

SEQ ID NO: 312687 - DNA, 1386 bp, Artificial Sequence
  derived and/or modified sequence
atgtccctggatatccagtccctggacatccaatgtgaggagctgagcgacgctcgctgggcagagctgctgcccttgctccagcagtgtcaggttgtgaggttggatgattgcgggctgaccgaggctcgatgtaaggatatctcttcagcactgagggtgaatcccgcactcgctgagcttaacttacggagcaacgagctaggcgatgttggtgtgcactgcgtgcttcagggactgcagacaccctcttgcaagatacagaaactgagtctgcaaaattgttgtctgaccggagccgggtgcggtgttctgtcgagcacacttagaacactgcctacactccaagagctacatttgagcgacaacctactaggagatgcaggtctccagttactctgcgagggcttattagaccctcagtgccgtcttgagaaactacagctggagtattgctccctgtcagctgcaagttgtgaacctttagcctccgtgctcagagccaaacctgatttcaaagagttgaccgtttccaataatgacatcaacgaagctggtgtgagagtactgtgccagggcctaaaggactccccctgtcaactggaggcactaaagcttgagtcatgtggggtcacttccgataattgtagagacctctgcggaatcgtcgcctctaaagcctccctcagagaattagccctcggttctaataagctgggagacgtgggcatggctgagctgtgtcctgggctcctgcatcctagttcacggctgcgaactctgtggatctgggagtgtggtataacggctaagggatgcggcgatctatgtagggttttacgcgccaaagagtccctcaaagagctgtcgctggcaggtaacgagctcggcgacgaaggtgcccggctactctgcgaaactctgctcgagccaggatgtcaactggagtcactttgggtcaaaagctgcagctttaccgctgcgtgctgttcccacttttctagcgtactggcgcaaaataggtttctcttagagctgcagatctcaaataatcgacttgaggatgccggcgtccgagagttatgccagggcctcggccaaccaggctccgtcctgcgcgtcctgtggctcgctgactgcgatgtgagcgattcctcatgctcctcgctcgccgcaactcttctagctaaccactcactgcgggaactggatctaagcaataactgtttgggggacgccgggatcttacagctggtggagtcggtgcgccagcccggatgcctcctcgaacagcttgtgctctatgacatctattggagcgaggagatggaagatcgcttgcaggcactcgaaaaagacaagccaagcttacgtgtgatctcatag

SEQ ID NO: 312688 - DNA, 1386 bp, Artificial Sequence
  derived and/or modified sequence
atgtcattggacatccaatctcttgacatccagtgcgaagaactgtctgatgccagatgggccgagctgctgcctttattacagcagtgccaggtcgtacggctcgacgactgcgggctgaccgaggcgagatgcaaagatatctccagtgcgctcagggtaaatcctgccttagccgaactcaacttacggtcaaatgaacttggagacgtcggagtccactgtgtgttgcagggattgcaaactccctcttgtaaaattcagaagctgagtctgcaaaactgctgcctcactggagctggatgcggtgttctcagctccacccttcggactctgccaactctgcaagaactgcacctgagcgataacctactcggcgatgctggtctccaattattgtgcgagggtctgctggatccacaatgtcgactcgagaaattgcagctagaatattgtagtctgtccgcggcttcatgtgagccattagcatctgtcctcagagcaaaacccgattttaaagaattaacagtgtccaataacgacatcaacgaagccggcgtaagagtgctgtgccaagggcttaaggatagtccctgccaactggaagctctgaaattggagagctgtggcgtgaccagtgataattgtcgtgatctatgcggaatcgtcgcgagtaaagcctccctcagggagctggcacttggcagtaacaaactgggcgacgtgggcatggccgagctctgtccaggactgctccatcctagctctcggttgcgcacattatggatctgggaatgtggaattaccgccaaaggttgcggcgatctgtgcagagttcttagggccaaagagtctctcaaggagctttctcttgctggcaacgagctcggagatgaaggcgcaaggctgttgtgtgagacactgcttgaacccggctgccagctagaatccctgtgggtaaaatcttgctcatttacagccgcttgctgcagtcacttcagctcagtcttggctcagaacaggtttcttcttgagctccagattagtaacaataggctagaggatgctggggtgcgggaactgtgccaggggctcggccagcccggctctgtactgagagtgctgtggctggccgattgcgacgtttcggatagctcttgctcatccttggcagccacactcttagcaaatcacagcctacgtgaactcgatctgtctaacaattgcctgggcgatgctggtattctacaactggttgagagtgtgcggcagccagggtgccttctggaacagcttgtactgtacgatatttattggtccgaagagatggaggaccggctgcaggctcttgagaaggataagcctagcctccgcgtcatcagttag

SEQ ID NO: 312689 - DNA, 1386 bp, Artificial Sequence
  derived and/or modified sequence
atgtccttggatatccagtccctcgatatccagtgtgaggagctgagtgacgctcggtgggccgaattgctgcctctgctgcagcaatgtcaagtcgtacgattagatgattgcggccttaccgaagcacggtgtaaagatatttctagcgctctcagagtgaaccctgccctggctgaactgaaccttagatcaaatgagctcggcgatgtaggagttcactgtgtactacaaggacttcagaccccatcttgcaagatccagaagctgtcactacaaaactgttgtctgaccggcgccggttgtggtgtactgtcctccacccttcgcacattacctacactacaagagcttcacctgagtgataacctgcttggtgacgccggcctgcaactgctgtgcgagggattgttggatccccagtgtcgcctcgagaaactccaacttgaatactgcagcctgagcgccgccagttgtgaacctctggctagcgtcctgagagctaaaccagatttcaaagagttaacagtgtccaacaacgatatcaatgaagccggcgtaagggtactctgtcagggattgaaggattcaccctgtcagctcgaagccctgaagcttgagtcctgtggcgtgacatccgacaactgccgtgatctctgcggcatcgtagccagcaaggcctcactccgtgagctggcacttgggagcaacaagctcggggatgttggcatggcagagttgtgtcccggcttgctgcacccttcctccaggctgcgcaccctatggatctgggagtgcggaataaccgctaagggctgtggcgacctctgtcgggtcctgagagcaaaagagtcactgaaagagctgagcctcgccggaaatgagctcggggacgaaggcgctcgcctgctgtgcgaaactctacttgaaccgggctgccagctagaatctttgtgggtgaaaagctgttctttcactgccgcctgttgcagtcatttctctagtgttctagcccagaatagatttctcctcgagctgcagatctcaaacaacagactggaggatgccggagtgagggaactttgccagggtctcggccagcccggatctgtgctgcgtgttctctggctcgctgactgcgacgtatctgatagtagctgttcctccctggctgcgaccctcctggcgaaccactctctgagagagctcgacctctctaataattgccttggagacgccggcattcttcagctggtggaatctgtgcgacagccgggttgtctgttagagcaactcgtgctctacgacatttactggagcgaagagatggaagatagactgcaggccctagaaaaggacaaaccatcgctcagggtgatctcttag

SEQ ID NO: 312690 - DNA, 1386 bp, Artificial Sequence
  derived and/or modified sequence
atgagtctggatatccaatctctcgatatacagtgtgaggagttaagtgatgcaagatgggcagagctgcttcctctcctgcagcagtgccaagtagtgaggctcgatgattgcggcctgactgaagctcgctgtaaggatatttcatcggcgctgcgtgtcaatcccgcactggccgagctcaacctgcgcagcaatgaactcggcgacgtcggagttcactgcgtgttgcaggggctgcagaccccatcttgtaagatccagaaattgtccctgcaaaattgttgcctcactggtgccggatgtggggttcttagtagcacgctcagaaccttgcccacactccaagagctgcacttgagcgacaacctactgggcgacgcgggtctccaactgctgtgcgagggactcctggatcctcagtgtagactggagaaactgcaattggagtattgtagcctctcagccgctagctgtgaacccctggcatctgtgcttcgcgctaaaccggactttaaggaactgaccgtctccaacaacgacatcaatgaagccggagtaagggttttgtgccagggtttaaaggattctccttgccaactcgaagcactcaagctggaatcgtgtggggtcacatcagataactgccgcgatctttgtgggatcgttgcttccaaggcctctctgcgtgaactagcactcggatctaacaaactcggcgacgtcggaatggctgagctgtgtcctgggttattgcatccgtcatcacgtttgaggacactctggatctgggagtgtgggatcaccgctaagggatgtggcgatttgtgtcgggtattgagagcgaaagaatcactgaaggagctgtctctggccgggaacgaattaggagatgagggggcccgtctgctgtgtgagactctgctagaacccggttgccagcttgagtctttgtgggttaagagctgcagcttcacagctgcctgctgtagccatttcagctctgtactggcccaaaatcggttcttgctggagttgcagatttccaataacagattagaagacgctggagtgcgggagctatgccagggactgggtcagcctggcagcgtcttaagagtgctctggctggccgactgtgatgtgtctgattctagctgtagcagccttgccgccaccttactggctaatcactcattacgcgagctggacctgagtaataactgcctcggtgacgccggtatactgcagctcgtcgaaagcgtgcgccaaccaggatgccttttagagcagctggtactgtatgacatctattggtcggaggagatggaggaccgtttgcaagctctggaaaaggataaaccatccctgcgggtaatcagttag

SEQ ID NO: 312691 - DNA, 1894 bp, Artificial Sequence
  derived and/or modified sequence
tggcgggtggggttgtcgacacgttcaacccgttctgctggctcgagaacgaagtaggccgtctcgctctgggtctccaggcccgcgaccgtccgccagtcgtcccgaggcatgaagaactcttgactgacagaaacggagggtgtgtccaaagttttgaggacggccgagcggcgctccaaaacccgtcctcacagcctcgccccgttcgcctcagctacaacaaatcatcgtcaacctgttccaccttctccagtctggtagcaaaaaggggtgtctcagaatctccggcctgtgaaactgtgaggggattcggccaagacgtcctcttccctctgcctcccacccaggccactcttcacctccaccatgagcctggacatccagagcctggacatccagtgtgaggagctgagcgacgctagatgggccgagctcctccctctgctccagcagtgccaagtggtcaggctggacgactgtggcctcacggaagcacggtgcaaggacatcagctctgcacttcgagtcaaccctgcactggcagagctcaacctgcgcagcaacgagctgggcgatgtcggcgtgcattgcgtgctccagggcctgcagaccccctcctgcaagatccagaagctgagcctccagaactgctgcctgacgggggccggctgcggggtcctgtccagcacactacgcaccctgcccaccctgcaggagctgcacctcagcgacaacctcttgggggatgcgggcctgcagctgctctgcgaaggactcctggacccccagtgccgcctggaaaagctgcagctggagtattgcagcctctcggctgccagctgcgagcccctggcctccgtgctcagggccaagccggacttcaaggagctcacggttagcaacaacgacatcaatgaggctggcgtccgtgtgctgtgccagggcctgaaggactccccctgccagctggaggcgctcaagctggagagctgcggtgtgacatcagacaactgccgggacctgtgcggcattgtggcctccaaggcctcgctgcgggagctggccctgggcagcaacaagctgggtgatgtgggcatggcggagctgtgcccagggctgctccaccccagctccaggctcaggaccctgtggatctgggagtgtggcatcactgccaagggctgcggggatctgtgccgtgtcctcagggccaaggagagcctgaaggagctcagcctggccggcaacgagctgggggatgagggtgcccgactgctgtgtgagaccctgctggaacctggctgccagctggagtcgctgtgggtgaagtcctgcagcttcacagccgcctgctgctcccacttcagctcagtgctggcccagaacaggtttctcctggagctacagataagcaacaacaggctggaggatgcgggcgtgcgggagctgtgccagggcctgggccagcctggctctgtgctgcgggtgctctggttggccgactgcgatgtgagtgacagcagctgcagcagcctcgccgcaaccctgttggccaaccacagcctgcgtgagctggacctcagcaacaactgcctgggggacgccggcatcctgcagctggtggagagcgtccggcagccgggctgcctcctggagcagctggtcctgtacgacatttactggtctgaggagatggaggaccggctgcaggccctggagaaggacaagccatccctgagggtcatctcctgaggctcttcctgctgctgctctccctggacgaccggcctcgaggcaaccctggggcccaccagcccctgccatgctctcaccctgcatatcctaggtttgaagagaaacgctcagatccgcttatttctgccagtatatt

SEQ ID NO: 312692 - DNA, 1791 bp, Artificial Sequence
  derived and/or modified sequence
gccgagccccgcccagtagtccccgcccacgcacctgaccacgcccacgagccggctcgaacacgcccgcgccgctgactggcgggtggggttgtcgacacgttcaacccgttctgctggctcgagaacgaagtaggccgtctcgctctgggtctccaggcccgcgaccgtccgccagtcgtcccgagaatctccggcctgtgaaactgtgaggggattcggccaagacgtcctcttccctctgcctcccacccaggccactcttcacctccaccatgagcctggacatccagagcctggacatccagtgtgaggagctgagcgacgctagatgggccgagctcctccctctgctccagcagtgccaagtggtcaggctggacgactgtggcctcacggaagcacggtgcaaggacatcagctctgcacttcgagtcaaccctgcactggcagagctcaacctgcgcagcaacgagctgggcgatgtcggcgtgcattgcgtgctccagggcctgcagaccccctcctgcaagatccagaagctgagcctccagaactgctgcctgacgggggccggctgcggggtcctgtccagcacactacgcaccctgcccaccctgcaggagctgcacctcagcgacaacctcttgggggatgcgggcctgcagctgctctgcgaaggactcctggacccccagtgccgcctggaaaagctgcagctggagtattgcagcctctcggctgccagctgcgagcccctggcctccgtgctcagggccaagccggacttcaaggagctcacggttagcaacaacgacatcaatgaggctggcgtccgtgtgctgtgccagggcctgaaggactccccctgccagctggaggcgctcaagctggagagctgcggtgtgacatcagacaactgccgggacctgtgcggcattgtggcctccaaggcctcgctgcgggagctggccctgggcagcaacaagctgggtgatgtgggcatggcggagctgtgcccagggctgctccaccccagctccaggctcaggaccctgtggatctgggagtgtggcatcactgccaagggctgcggggatctgtgccgtgtcctcagggccaaggagagcctgaaggagctcagcctggccggcaacgagctgggggatgagggtgcccgactgctgtgtgagaccctgctggaacctggctgccagctggagtcgctgtgggtgaagtcctgcagcttcacagccgcctgctgctcccacttcagctcagtgctggcccagaacaggtttctcctggagctacagataagcaacaacaggctggaggatgcgggcgtgcgggagctgtgccagggcctgggccagcctggctctgtgctgcgggtgctctggttggccgactgcgatgtgagtgacagcagctgcagcagcctcgccgcaaccctgttggccaaccacagcctgcgtgagctggacctcagcaacaactgcctgggggacgccggcatcctgcagctggtggagagcgtccggcagccgggctgcctcctggagcagctggtcctgtacgacatttactggtctgaggagatggaggaccggctgcaggccctggagaaggacaagccatccctgagggtcatctcctgaggctcttcctgctgctgctctccctggacgaccggcctcgaggcaaccctggggcccaccagcccctgccatgctctcaccctgcatatcctaggtttgaagagaaacgctcagatccgcttatttctgc

SEQ ID NO: 312693 - DNA, 1386 bp, Artificial Sequence
  derived and/or modified sequence
atgtcgctagacatccaatccttggatatccagtgcgaggagctctctgatgcgagatgggccgagctgctgccgctcctgcaacagtgtcaggtggtacgccttgatgactgcgggctgacagaagcacggtgtaaagatatttcctctgctctacgggttaaccccgccctggctgagctcaacctgaggtccaacgaactcggcgatgtgggtgtgcactgcgttctgcagggactgcagaccccaagttgcaagatacaaaaattgtctcttcagaattgctgcctgaccggagctggatgcggagtccttagcagcacactgcgcaccttgcccacactgcaggagctgcatctgagcgataatctgttgggcgacgctgggctgcagctgttgtgtgagggcctactggatcctcaatgtcgtctggagaaacttcagctagaatactgcagcttgtctgcggcctcctgtgaacccctggccagcgtactccgggccaagcccgattttaaagagttaaccgtgtcaaataacgacatcaatgaggccggagtgagggtgctatgccaagggctgaaagattccccgtgccagctggaggcccttaagctcgaatcatgtggtgtgacgtctgacaattgccgagacctgtgtggtattgtggcctccaaggcaagtttgagggaactggccctaggaagtaataaacttggcgacgtcggcatggctgagctgtgtcctggtcttcttcacccgtcctctcggttaaggactctgtggatctgggagtgcggcatcacagcgaaggggtgtggcgatctgtgccgagtgttaagggctaaggagtctctcaaagagctttcactggccgggaacgagttaggggacgagggcgcccgtctgttgtgcgaaacgttgttggagcccgggtgtcagctcgaaagcctgtgggtgaaatcttgtagcttcactgccgcctgctgctcccatttcagctccgtgctggcccagaaccgtttcctcttagaattgcagatctctaacaatcgtttagaggacgccggcgtgagggagctttgccagggtctcggtcagcccgggtcagtccttagagtcctttggctggccgattgtgacgtgagcgattcctcttgctcctctctggcagctaccctccttgccaatcacagcttgagagaactcgatctctctaataactgcctcggtgacgctgggattctccagttagtggagtcagttcgccaacccggatgcttactcgaacagttggtgctttacgatatatactggtccgaagaaatggaggaccgattacaggccctcgaaaaagataagccatctctgagggttatctcatag

SEQ ID NO: 312694 - DNA, 600 bp, Artificial Sequence
  derived and/or modified sequence
atgtcgctggacatccagtccctggatatccagtgcgaagaactttccgacgccagatgggctgagttgcttcccctattgcagcagtgccaggtagtcaggcttgatgattgcggcctcaccgaggccaggtgtaaggatatcagttctgccctcagagtcaatccggctctcgccgaattgaatcttaggtccaacgaactcggcgacgtgggagtccattgtgtacttcagggactccaaacacctagttgcaaaatccagaaactgagtctgcagaattgctgcttgactggtgccgggtgtggcgtgctttcctcaaccctgcgaacattacccaccctgcaagagctacatctctcggacaacctgctcggagatgccgggctgcagctgctgtgtgagggactgcttgacccacagtgtcgtcttgagaaattacagctcgaatattgtagtctgagtgccgcaagctgcgaacctctggcttctgtactgagggccaagccagacttcaaagagctcacagtgagcaataatgacattaacgaggccggcgtgagggtgctctgtcagggcctgaaagacagcccatgctag

SEQ ID NO: 312695 - DNA, 570 bp, Artificial Sequence
  derived and/or modified sequence
atgtctctggatatccaaagcctggatattcagtgtgaggagttgagcgacgcacgatgggcggagctgcttccattactgcaacaatgtcaggtggtaagattagatgactgtggtctgaccgaagcacgttgcaaggatataagcagcgccctgagagtcaacccagccctggccgaactgaatctgagatctaatgaacttggagatgtgggcgtgcactgcgtcttgcagggtttgcaaaccccttcgtgtaagattcagaagctgagcttacagaattgttgcttgactggagccggttgcggagtcctgtctagcactctgcgcacgttgccgacactacaagaattacacctttccgacaacctattgggagatgcgggcctgcagcttctgtgcgagggtctgctagaccctcagtgtcgcctggagaagctgcagctggagtactgcagcctatccgctgccagctgcgagccgctggcctcagtgttgcgagctaagcccgacttcaaggaactcacggtgtcaaacaacgatattaatgaagcaggggtgcgagtctag

SEQ ID NO: 312696 - DNA, 585 bp, Artificial Sequence
  derived and/or modified sequence
atgtcactagatattcagagtctggacatccagtgcgaagagctgtctgatgcacgatgggccgagttgctcccattactgcagcagtgccaggtagtgcgactagatgattgcgggttaaccgaggctagatgcaaagacatcagcagcgctctgcgagtgaacccagcgctggccgaactcaacctgaggtcaaatgaactaggtgacgttggcgtgcattgcgtactgcagggtctgcaaacaccgagctgtaaaattcagaagctgtcactccagaattgctgcctgacaggtgcaggctgcggtgtactgagttccacactccggacgcttcctaccctgcaagaactccatctgagcgacaatctgctgggcgatgcgggactgcagttgctctgcgagggtctactggatcctcagtgccgcctggagaaactgcagctcgagtactgctcactgtctgctgccagctgcgaacccctcgcctccgtgctccgggccaaacctgactttaaggaacttacagtgagcaacaatgacattaatgaggcgggggtgagggtgctctgccagggactgtag

SEQ ID NO: 312697 - DNA, 123 bp, Artificial Sequence
  derived and/or modified sequence
atgagcctcgatattcagtcgttagacatccagtgtgaggagcttagcgacgcgaggtgggccgagctcctgccgctgctccagcagtgtcaagtggtccgtctcgatgactgtgggttatag

SEQ ID NO: 312698 - DNA, 1386 bp, Artificial Sequence
  derived and/or modified sequence
atgagcctcgacatacagagtttggacatacaatgcgaggagctgtctgatgcgcgctgggccgaattgctaccgttgttgcaacaatgtcaggtcgtacggttagatgactgcggactcacagaggcaaggtgcaaagacatttccagtgccctacgggtgaatcccgctctcgcagagctgaacctcaggtcgaatgagctgggagatgtcggagtgcattgcgtcctgcaaggcttacagacaccaagttgcaagatccagaagttgtccctgcagaattgttgcttgacaggggcagggtgcggcgtgctgtctagtaccctcaggacactgcctaccctccaggaattacacctttcagataatctgctaggggacgcgggcctccaacttctgtgcgaggggctgctggacccacagtgtcgtttagagaagctgcaactggaatactgtagcctgtctgccgccagctgcgagcctctcgccagtgtgctccgtgctaagccagacttcaaagaactaactgtcagtaataatgacatcaacgaggcgggcgtgcgagtgttatgccaagggctgaaagactccccgtgtcaactcgaggccctgaaactggagagctgcggggtgacaagcgacaattgccgagacctgtgtggaatagtggctagtaaggccagcctgcgcgaattggctttgggatccaacaagctgggtgatgtaggcatggccgagctttgtcccggcttgttgcacccctcaagccgtctaagaacactgtggatttgggaatgtggtataactgccaagggatgcggggatctgtgtagggttctccgcgccaaggaatctctcaaagagttgagccttgcaggcaatgaacttggggatgagggcgcacgtctgttgtgtgaaaccctgctagaaccaggctgccaactggagagcctctgggtcaagtcctgttcttttacagctgcctgctgctcgcacttttccagcgtcctagcccagaaccggtttctcttggaactgcagatctctaataaccggctggaagatgccggcgtcagggaactgtgccagggactggggcagcctgggtctgtgcttcgggtcctgtggctggcagactgcgacgtctccgactcctcctgctcgagtcttgcggccactctattagcgaaccactccctgcgtgaactcgacctatcaaataattgcctgggagatgctggcatcctgcaactagtggaatcagtgagacaacctggctgcctgctcgaacagctggtgctgtacgatatttactggtctgaagaaatggaagacaggttgcaggctctggaaaaagacaaacccagcttgagggtcatctcctag

SEQ ID NO: 312699 - DNA, 1386 bp, Artificial Sequence
  derived and/or modified sequence
atgagtctggacattcagtccctggacattcaatgcgaagagctaagcgacgcgcgatgggctgaactgctgccgctcctacagcaatgccaggtggtgaggttggacgactgcggtctgactgaggctcggtgtaaggatatctcctctgccctgagggtgaacccagcgcttgccgaactaaatctgcgcagcaacgagctgggagatgtgggtgttcattgcgtgctgcagggactgcaaaccccctcctgcaagatccagaagctctcactacaaaattgttgcctcactggggcaggctgtggagtactgagctccaccctaagaactcttcccacccttcaggaattgcacctgagcgataaccttctgggagacgccggccttcagctgctctgtgaaggactattagacccacagtgtaggctggagaaattgcaactggaatactgtagcctgagtgcagcttcatgcgaaccgttagcatccgtattgagagccaaacctgactttaaagagctgaccgtgtctaacaatgatattaatgaggctggcgtccgggtgttatgccaaggtctgaaagactcaccctgccagctcgaggctctcaaactggagtcgtgcggggttacctcagacaactgtagagacctttgtggaattgtggcctctaaggcatccttacgtgaattggctctaggttccaacaaacttggcgacgtggggatggcggaactttgccctggactactccacccttccagtaggttacgcaccctgtggatttgggagtgcggaatcacagcaaaaggctgcggagacctgtgccgggtcctaagagctaaagaatctctcaaagaactctccctggctggcaacgagttaggtgacgaaggtgcacgtctcctctgcgaaaccctgttagaacccggctgccagctggagagcctttgggtcaaaagctgtagttttacagccgcatgctgttcacatttttcctccgtcctagcccagaataggttccttctggaactgcaaatctccaataataggctggaagacgcaggggtgagagagttatgccagggcttaggccagcccggatctgtgctgagagtgttgtggctggccgactgtgatgttagcgattcaagctgctccagcctggccgcaacccttctcgctaatcactccctgcgggagcttgatctctccaataattgtttgggggatgccggaatcctgcagcttgtagagagcgtaaggcagcccgggtgtctattggagcagcttgttctttacgacatctattggagcgaggagatggaggatagattacaggccctggagaaggataagccgtcacttcgagtgatctcatag

SEQ ID NO: 312700 - DNA, 1386 bp, Artificial Sequence
  derived and/or modified sequence
atgagcctggacatccagagcctggacatccagtgtgaggagctgagtgatgcccgctgggccgagctgctgcccctgctgcagcagtgccaggtggtgcggctggatgactgtggcctgacagaggcccgctgcaaggacatcagcagcgccctgcgggtgaacccagccctggccgagctgaacctgcggagcaatgagctgggagatgtgggcgtgcactgtgtgctgcagggcctgcagacccccagctgcaagatccagaagctgagcctgcagaactgctgcctgaccggggccggctgcggcgtgctgagcagcaccctgcggaccctgcccaccctgcaggagctgcacctgagtgacaacctgctgggagatgctggcctgcagctgctgtgtgagggcctgctggacccccagtgccgcctggagaagctgcagctggagtactgcagcctgtctgctgccagctgtgagcccctggcctctgtgctgcgggccaagccagacttcaaggagctgactgtgagcaacaatgacatcaatgaagctggggtgcgggtgctgtgccagggcctgaaggacagcccctgccagctggaggccctgaagctggagagctgtggggtgaccagtgacaactgccgggacctgtgtggcatcgtggccagcaaggccagcctgcgggagctggccctgggcagcaacaagctgggagatgtgggcatggccgagctgtgccccggcctgctgcaccccagcagccggctgcggaccctgtggatctgggagtgtggcatcacagccaagggctgtggggacctgtgccgggtgctgcgggccaaggagagcctgaaggagctgagcctggccggaaatgagctgggagatgagggcgcccggctgctgtgtgagaccctgctggagcccggctgccagctggagagcctgtgggtgaagagctgcagcttcaccgctgcctgctgcagccacttcagctctgtgctggcccagaaccgcttcctgctggagctgcagatcagcaacaaccggctggaggatgctggggtgcgggagctgtgccagggcctgggccagcccggctctgtgctgcgggtgctgtggctggccgactgtgatgtgtctgacagcagctgcagcagcctggccgccaccctgctggccaaccacagcctgcgggagctggacctgagcaacaactgcctgggagatgctggcatcctgcagctggtggagagcgtgcggcagcccggctgcctgctggagcagctggtgctgtatgacatctactggagcgaggagatggaggaccggctgcaggccctggagaaggacaagcccagcctgcgggtcatctcctag

SEQ ID NO: 312701 - DNA, 600 bp, Artificial Sequence
  derived and/or modified sequence
atgagcctggacatccagagcctggacatccagtgtgaggagctgagtgatgcccgctgggccgagctgctgcccctgctgcagcagtgccaggtggtgcggctggatgactgtggcctgacagaggcccgctgcaaggacatcagcagcgccctgcgggtgaacccagccctggccgagctgaacctgcggagcaatgagctgggagatgtgggcgtgcactgtgtgctgcagggcctgcagacccccagctgcaagatccagaagctgagcctgcagaactgctgcctgaccggggccggctgcggcgtgctgagcagcaccctgcggaccctgcccaccctgcaggagctgcacctgagtgacaacctgctgggagatgctggcctgcagctgctgtgtgagggcctgctggacccccagtgccgcctggagaagctgcagctggagtactgcagcctgtctgctgccagctgtgagcccctggcctctgtgctgcgggccaagccagacttcaaggagctgactgtgagcaacaatgacatcaatgaagctggggtgcgggtgctgtgccagggcctgaaggacagcccctgctag

SEQ ID NO: 312702 - DNA, 570 bp, Artificial Sequence
  derived and/or modified sequence
atgagcctggacatccagagcctggacatccagtgtgaggagctgagtgatgcccgctgggccgagctgctgcccctgctgcagcagtgccaggtggtgcggctggatgactgtggcctgacagaggcccgctgcaaggacatcagcagcgccctgcgggtgaacccagccctggccgagctgaacctgcggagcaatgagctgggagatgtgggcgtgcactgtgtgctgcagggcctgcagacccccagctgcaagatccagaagctgagcctgcagaactgctgcctgaccggggccggctgcggcgtgctgagcagcaccctgcggaccctgcccaccctgcaggagctgcacctgagtgacaacctgctgggagatgctggcctgcagctgctgtgtgagggcctgctggacccccagtgccgcctggagaagctgcagctggagtactgcagcctgtctgctgccagctgtgagcccctggcctctgtgctgcgggccaagccagacttcaaggagctgactgtgagcaacaatgacatcaatgaagctggggtgcgggtgtag

SEQ ID NO: 312703 - DNA, 585 bp, Artificial Sequence
  derived and/or modified sequence
atgagcctggacatccagagcctggacatccagtgtgaggagctgagtgatgcccgctgggccgagctgctgcccctgctgcagcagtgccaggtggtgcggctggatgactgtggcctgacagaggcccgctgcaaggacatcagcagcgccctgcgggtgaacccagccctggccgagctgaacctgcggagcaatgagctgggagatgtgggcgtgcactgtgtgctgcagggcctgcagacccccagctgcaagatccagaagctgagcctgcagaactgctgcctgaccggggccggctgcggcgtgctgagcagcaccctgcggaccctgcccaccctgcaggagctgcacctgagtgacaacctgctgggagatgctggcctgcagctgctgtgtgagggcctgctggacccccagtgccgcctggagaagctgcagctggagtactgcagcctgtctgctgccagctgtgagcccctggcctctgtgctgcgggccaagccagacttcaaggagctgactgtgagcaacaatgacatcaatgaagctggggtgcgggtgctgtgccagggcctgtag

SEQ ID NO: 312704 - DNA, 123 bp, Artificial Sequence
  derived and/or modified sequence
atgagcctggacatccagagcctggacatccagtgtgaggagctgagtgatgcccgctgggccgagctgctgcccctgctgcagcagtgccaggtggtgcggctggatgactgtggcctgtag

SEQ ID NO: 312705 - DNA, 1386 bp, Artificial Sequence
  derived and/or modified sequence
atgagcctggacatccagagcctggacatccagtgcgaggagctgagtgatgcacgctgggcagaactcttgcctttgctacagcagtgtcaggtggtgagattggacgattgcgggctgaccgaggctcggtgcaaagatattagctcggccctcagagtgaatcctgcactggctgagttgaatttgcgatctaacgaactgggggacgtaggcgtacactgtgtgttgcagggtttgcagaccccttcttgcaagatccagaaactgtccctgcagaactgctgcctgaccggcgctggctgtggcgtgctgtcttccacgcttaggaccttgcctactctgcaggaacttcacctcagcgataacttactgggggatgcggggctgcagctgttatgcgaggggctcttggatccacagtgccgcctggaaaagctgcaactcgaatattgttcgctgagcgcagcatcttgcgaacccctggcgagtgtgctccgagcgaaaccagactttaaggagcttaccgtgtcaaataacgatattaatgaggccggggtacgcgtcttgtgtcagggcctcaaggacagcccttgtcagctcgaggcattgaaactggagtcttgcggagttacaagcgataattgtcgagatctttgcgggattgtagcctcgaaggcttccttgcgagaactggctttgggtagcaacaagcttggggacgtcggcatggctgaactgtgcccaggcctcttacacccttcaagccgcctccgaaccctgtggatctgggagtgcggcatcacggctaaaggctgcggggatctttgcagagtgctgcgtgctaaggaatccctcaaagagttgagcctggctggaaacgaactgggagacgagggggctcgcttgctgtgcgaaacattgctggagcccggatgccagctggaaagtctatgggtcaaatcttgtagtttcactgctgcttgttgcagtcattttagcagcgtgttagcccagaatagattccttctcgagctacagatatcaaataacagacttgaggacgctggagtgagagaattgtgccaggggctgggacagccaggaagcgtgttaagggtgctgtggctggccgattgtgatgtgagtgacagttcttgttcaagcttggcagccactctcctggctaaccactcccttcgtgaactggacctttcaaacaattgtctgggcgacgctggcattctgcagctagtcgaatccgtgagacagcccggatgccttctggagcagcttgtcctctacgatatatactggtccgaagagatggaagatcggttacaggccctggagaaagataaaccttccctgcgggtaatcagctag

SEQ ID NO: 312706 - DNA, 1386 bp, Artificial Sequence
  derived and/or modified sequence
atgagcctggacatccagagcctggacatccagtgcgaggagctgtcagacgctcgctgggctgagctccttccactgctccagcagtgtcaggtcgtgcggttagatgactgcgggctgaccgaggctagatgcaaggacatttcctctgccctgcgtgttaacccagctttggccgaactaaatctgagaagtaatgagctaggggatgtgggcgtgcactgtgtgctgcagggcctgcaaacaccgagttgtaagatccaaaaattgtccctccagaactgctgcttgaccggggccggctgcggcgtcttatcctctactctgcgaactctgccaaccctgcaagaactgcatctcagcgacaatctcctgggggacgccggactgcagctgctgtgtgaagggctgctggaccctcaatgtaggttagaaaaactccaactcgaatattgttccttgagtgccgcgagctgtgaacccctggcatccgtacttagagcaaagccggactttaaagagttgaccgtaagcaacaacgatataaacgaggctggcgtgagagttctttgtcaaggattgaaagattcaccgtgccagctggaagcattgaagcttgaatcctgtggggtaacctcggacaattgtagggacctatgtgggatagtggcctctaaagcgagtttacgtgaattggctctgggttccaataaattaggagatgtgggaatggcagagctgtgccctggcctactgcacccctcctctagacttaggaccctttggatctgggagtgcggaattacagctaaagggtgtggcgacttatgtcgcgttctgagggccaaggagtcgctgaaagaattgagcttagctggtaatgagctgggggacgaaggggcccggttactgtgtgagaccctacttgagcccggatgtcagctggagtcactttgggtgaagtcttgcagtttcacagcggcctgctgctcccatttttcctcagtgctggcccagaacagatttctgctcgagctgcagatcagcaacaaccggcttgaggatgccggggtacgggaactgtgccaaggcctcggtcaaccaggctccgttttgagggtcctttggctggcagactgcgacgttagtgactcatcctgttccagcctcgccgcgaccctactagccaaccacagcctgagagagctggatctctccaataactgccttggtgatgccggaatactgcagctcgttgaatccgttcgccagcccggctgtctgctggaacagctggttctctacgacatttattggtcagaggagatggaggatcgcctgcaggccctggagaaggataaacccagcctacgcgttatcagctag

SEQ ID NO: 312707 - DNA, 1386 bp, Artificial Sequence
  derived and/or modified sequence
atgagcctggacatccagagcctggacatccagtgcgaggagctgagcgacgcccggtgggccgaacttttgcctttgcttcagcaatgccaggtagtcagactcgacgactgcggtttgacggaggcaagatgtaaggacatctcgtctgcattgagagtgaacccggcattggcagagttgaatcttagatcgaatgagttgggagatgttggcgtccactgcgtgctgcagggactacagactccatcctgtaagattcaaaaattatcattacaaaattgctgcctgaccggggccgggtgtggagtcctgtccagtaccctgcggacactgccaaccctccaggagcttcatctttctgataatcttttgggcgacgccggtctgcagctgctgtgcgaagggctcctcgacccacagtgccgcttggaaaagctccagctggaatactgttctttgtccgctgcaagttgtgagccactggcttctgttcttagagctaaaccagacttcaaggaactgactgtttctaataatgacattaacgaggccggagtccgcgtgctttgccagggcctgaaggatagtccttgccaattggaggcgctgaagctggagtcctgtggggtcaccagtgataactgcagggatctttgtggaatagtggcatcgaaggcttctctgcgggagcttgccctggggtcaaataagctcggtgatgtgggtatggcagaactttgccctggacttctgcacccatcttccagactgagaactctgtggatctgggaatgtggtattacggctaaaggttgtggcgacctttgccgcgtccttagggccaaagagtcgctgaaggagcttagtttggccggcaatgaactgggagatgaaggcgctagactgctttgcgaaacgctactggaacctggctgtcagctggagtcattgtgggtcaagtcatgttcctttacagccgcatgctgtagtcatttctcctcagtgttggcacagaatcgttttctgctggaactgcagatctccaacaaccggctcgaagacgcgggagtccgggagttgtgtcagggcctggggcagcccggcagtgttctgcgcgttttgtggctagctgactgtgacgtatcagatagctcatgctcctcactagccgcaacgcttctcgccaatcacagcctcagggaactggatctcagtaataactgtttgggggacgctggtattcttcagcttgtcgagagcgtaagacagccagggtgtctgttagaacaactcgtgttatatgatatctactggagtgaggagatggaggatcgactacaggccctggaaaaagacaaaccctccttgagagttatttcctag

SEQ ID NO: 312708 - DNA, 1386 bp, Artificial Sequence
  derived and/or modified sequence
atgagcctggacatccagagcctggacatccagtgcgaggagctgagcgacgccagatgggccgagctgttgcccttgctgcagcaatgccaggtcgtccgactggacgattgcggcttaaccgaagcacggtgtaaggatataagttccgccctacgggtgaaccccgccctcgctgagctgaatctgcgttctaacgagctcggggacgtgggagtgcattgcgttcttcagggccttcagacaccaagctgcaaaatccagaagctttccttacaaaactgctgcttaactggtgcaggctgtggagtgctgagtagtacattacgtactcttcccacactccaggaactgcacctgagcgataatttgctgggagacgccggcctgcagttgctgtgtgagggcctgctcgatccacagtgccgcttagagaagttgcagttagaatattgctctttgtctgctgcatcatgcgagcctctcgctagtgtcctgagggctaagccagacttcaaggaactgaccgttagcaataacgatatcaatgaggcaggagtgagggtcctttgtcagggacttaaggactctccttgccagctagaagcccttaagctggaatcatgcggcgtgacaagtgacaactgtcgcgatctatgcgggattgtggcctccaaagcctcactaagggagctggccctgggctctaataagttgggagacgttggcatggcggagctttgtcctgggctgctgcaccctagttcccggcttcgaacactctggatctgggaatgcggcattactgccaaaggatgcggagatttgtgtcgagttctgcgtgcaaaagagagcctgaaggagctgtcattagccgggaacgaactgggcgatgagggagcaagattgctctgtgagacccttctggaacccggttgccagttagaaagcctctgggttaaaagctgctcttttactgcagcatgctgctctcactttagcagtgtgctagcccagaaccgctttctcctggagctgcagatctcgaataacaggctcgaggacgccggcgtccgcgaattgtgtcaaggtcttggacagcctggctctgtgttgcgggtactgtggcttgctgactgcgatgtgtccgactcatcgtgttcctctctggccgccaccctcttggcgaaccactcactgagagaactcgatctgtctaacaattgtctgggtgatgcaggaattctgcagctggtcgaatctgtaagacagcccggctgtctcctggaacagctggtactgtacgatatctactggtctgaggaaatggaggaccgtctgcaggccttggaaaaggataaaccctccctgcgtgtgatctcgtag

SEQ ID NO: 312709 - DNA, 1386 bp, Artificial Sequence
  derived and/or modified sequence
atgagcctggacatccagagcctggacatccagtgcgaggagctgagcgatgctaggtgggcggagctgttgcccttactgcaacagtgccaggtggtgaggctggatgattgtggcttaacagaagcacggtgcaaggacatctcatcagcactacgagtcaatccagctttggcagaactcaatctgcggagcaatgagttgggggacgtgggggttcactgtgtgctgcaagggctccagacacctagttgtaagatccagaagctgagtctgcagaactgctgcctgaccggggccggttgcggcgtgctgagctccaccctgcggactctgcctactcttcaggagctccatctgagtgacaatctgctaggggatgctgggttgcaactgctgtgcgaaggccttctcgatcctcagtgccgcctggaaaagctacagctggagtactgtagcctgagtgctgcgtcttgcgagcctctggcctctgtgctccgcgccaaaccagactttaaggaactgacagtgtccaataatgacatcaacgaggccggagtaagagtgttgtgtcagggtcttaaggactctccatgccagttggaggcgttgaaactggagtcctgcggcgtcacgagcgataactgccgggacttgtgcggtatagtcgccagcaaggcgtccctgcgggagttggcattaggctcgaataaattgggtgatgttgggatggccgagctgtgtccaggtctgcttcacccctcatcaagattaaggaccctttggatttgggaatgtggcatcacggcgaaaggatgcggcgacctctgtagagtcctacgggcaaaggagagcctcaaggaattgtccctggctgggaacgagctgggggacgagggcgctaggctgctctgtgagactctcttggagccgggctgccagctggagagtttatgggtgaagagttgctcctttactgccgcctgctgtagccatttctcttctgttttagcccagaacaggtttctgttggaattacaaatttctaataatcgattggaggacgcaggagtccgagagttatgccaaggcctgggtcagcctgggtctgtgctcagggtattgtggttagcggattgtgacgtgtcggattcatcttgttcctctctggcagccaccctgctcgctaaccactcactgagagagttagacttaagtaacaactgcttgggtgatgccggcatcctgcagctcgttgaaagcgtgaggcaaccggggtgcctcctggagcagctggtcctatatgatatctactggtccgaagaaatggaagacagactacaggcacttgaaaaggataagccgtcactgagggtgatttcatag

SEQ ID NO: 312710 - DNA, 1386 bp, Artificial Sequence
  derived and/or modified sequence
atgagcctggacatccagagcctggacatccagtgcgaggagctgagtgacgcgagatgggccgagctgctgcccctgctgcagcaatgccaggtcgtacgtctcgatgactgtggcctgactgaagctcggtgtaaggatatatcatccgcccttcgggtgaacccagctcttgccgagcttaacctgaggagcaatgagttgggcgacgtgggggtccactgcgtcttgcaggggctgcaaactccctcctgcaaaattcagaaactgagcctgcagaattgctgtctaacaggtgcgggctgtggggtgttatcctctactctgcgtacattacccaccctacaagagctgcacttatcagacaacctattgggtgacgctgggcttcagctgctatgtgaaggcctgctggacccccaatgtcggctcgaaaagttgcagctggagtactgcagcctgagcgcagccagctgcgaaccccttgcctctgtgctgagggcaaagccggattttaaggagctgacggtgagcaacaacgacatcaatgaagccggcgtaagagtgctgtgccaagggctcaaagattcaccatgccagctcgaagctctgaagctggaaagctgcggcgtgaccagtgataattgccgggacctgtgcggaattgttgctagcaaggcctctttacgagagctggcccttggatctaacaaactcggcgatgtgggtatggcggagctatgcccgggtctgttacacccctcttcaaggctgcgtaccctgtggatctgggaatgtggcatcactgctaagggctgtggcgacctgtgtagagtgctgcgagctaaggagtccctaaaggagctctctcttgctggcaacgaacttggggacgagggggctcgattgctctgcgagacactgctagaacccggttgtcagctcgagtcactttgggtgaagtcttgttccttcacagctgcatgttgttcacatttcagctccgtcctcgcccagaaccgcttcctgctggagctgcagattagcaataaccgccttgaagacgccggagtccgagaactatgccagggccttggacagccaggctcagtgctgcgagtgctatggctggctgactgcgacgtaagcgactcatcctgctcaagtctcgcagcgacgctgttggctaaccacagcttgcgcgaactcgatctatcaaataattgcctcggggacgccggcattttgcagctcgttgaaagtgtgagacagcctggatgtttgctggaacagctggtgctgtatgacatatactggagcgaagaaatggaagacagattgcaggcactggagaaagacaagccctctcttagagttatttcctag

SEQ ID NO: 312711 - DNA, 600 bp, Artificial Sequence
  derived and/or modified sequence
atgagcctggacatccagagcctggacatccagtgcgaggagctgtcagacgcaagatgggccgagctgcttccactgctgcaacagtgccaagtggtgagattagacgattgtggcctgacagaggcccgctgcaaagacatctcttccgccctacgcgtcaacccggcgctagccgaattgaatcttcgaagcaacgagctgggagatgtcggggtgcattgcgttctgcaggggctccaaactccttcatgtaaaattcagaaactgagtctgcagaactgttgcttgactggggccggctgcggagtcctatcctctaccctcagaacgctgccaacgctacaagagctgcacttgagcgacaacctgctcggagacgccggcctccagttgctgtgcgaaggccttttggatcctcagtgcaggctggagaagttgcagctggaatactgctccctgtccgcagcttcttgtgaacctctggcctctgtactccgggccaaaccggacttcaaagaattaacagtttcgaataatgatatcaatgaggcaggtgttagagtcttgtgccagggcttaaaggactcaccatgttag

SEQ ID NO: 312712 - DNA, 570 bp, Artificial Sequence
  derived and/or modified sequence
atgagcctggacatccagagcctggacatccagtgcgaggagctgtccgacgcaaggtgggccgagcttttaccattgttgcagcagtgccaggtcgtgcgtctcgacgactgcgggctaacagaagcccgctgcaaggatatctccagcgccttgcgagtgaacccggctctggcggaacttaacctgcgctccaatgaacttggcgatgtcggggtgcattgcgtcttgcagggattacaaaccccctcgtgtaagatacagaagttaagcctgcagaactgctgcctgacaggtgccgggtgcggagtgctgtcctccaccctgaggacgcttcccacactccaggaactccatctctcagacaacctgctcggggatgcgggactgcaactactgtgcgagggcctgttagatccacagtgccgtctagagaagctgcagttagaatattgttccctgtctgctgctagttgtgagccccttgcttctgtgctgcgggcaaagcctgacttcaaggagctgactgttagcaataatgatatcaacgaggccggggtcagggtttag

SEQ ID NO: 312713 - DNA, 585 bp, Artificial Sequence
  derived and/or modified sequence
atgagcctggacatccagagcctggacatccagtgcgaggagctgagtgatgcgcggtgggctgagcttctccccctcctgcaacagtgccaggtggtcagacttgacgactgtggtctgaccgaagcccgctgtaaagatattagttccgcactgagggtgaatcctgctctggcagaacttaatctacggtcaaacgaactgggcgacgtgggggtccattgcgtgttgcaagggctccagacccctagctgcaagatccagaagctttcattgcagaattgctgcctaacaggagcgggctgtggggtacttagttccaccctgagaaccctgcccaccttacaggaattacacttatccgacaacctgctgggcgacgctgggttgcagcttctgtgcgagggcctccttgacccccagtgccgactcgaaaagctccagttggaatactgttccctgtcagcagcaagctgcgaacccctggcctcagtgctccgcgcaaagcccgattttaaagaactgacagtcagtaataatgatataaatgaggccggagtccgcgtcctctgtcagggcttgtag

SEQ ID NO: 312714 - DNA, 123 bp, Artificial Sequence
  derived and/or modified sequence
atgagcctggacatccagagcctggacatccagtgcgaggagctgtccgacgcacgatgggcagaactcctgcccctacttcagcagtgtcaggtggtgagactagatgactgcggactgtag

SEQ ID NO: 312715 - DNA, 1386 bp, Artificial Sequence
  derived and/or modified sequence
atgagcctggacatccagagcctggacatccagtgcgaggagctgagtgatgcacgctgggccgagctgctgccactgttacagcagtgtcaggtcgtgcggctggacgattgcggcctaaccgaggctcggtgcaaggacatcagcagcgcactccgcgtaaaccctgccttagcagagttaaacctccgtagcaacgagctgggtgatgtgggtgtgcattgtgtgctccagggcctccaaactccctcatgtaagatccaaaagctttcgttacagaattgctgcctgacaggcgcaggatgtggggtgttaagttccaccctgcgtaccctgcccaccctgcaagagctacacttatctgataatcttctgggcgacgctgggctccagctgctgtgcgaaggtctcctggacccccagtgcaggctggagaagctgcagttagaatattgtagcctctccgccgcgtcctgtgaaccactcgcctccgtgcttagagctaaacctgactttaaggaattgacggttagtaacaatgacattaacgaggctggggttagagttctttgtcagggcttgaaggacagtccttgtcagctggaagctctgaagctggagtcctgcggggtcacttctgacaactgtagagacctgtgcggcatcgttgcttctaaagcctcactcagagaactggcattggggtccaacaagctcggtgatgttggcatggccgagctgtgtcctggcttattacacccctccagcagacttcgcacactctggatatgggaatgcggtatcaccgccaaagggtgtggggacctatgcagagtcctgcgtgctaaggaatccctgaaagaactgagccttgccggaaacgagctcggtgatgagggggccagattgttatgtgagacactgctcgagcccgggtgccagctggagagtctgtgggtgaaaagctgttccttcaccgccgcctgttgtagtcacttcagcagcgttctcgcgcagaatagattcctcctggagctgcaaatctctaataaccgtcttgaagacgcaggagtgagagagctgtgtcagggactggggcagccgggcagcgttcttcgggttttgtggctcgccgattgtgacgtgtctgattcatcatgcagtagtttggctgctacattgctcgcgaaccactcccttcgcgaactggaccttagcaataactgcctcggggatgccgggatacttcaactggtagaatctgtaagacagcccggctgtctgttggagcagctcgtgctgtacgacatttactggtccgaggaaatggaagacaggttacaggccctggaaaaggataaaccctctctgcgcgtcatctcttag

SEQ ID NO: 312716 - DNA, 1386 bp, Artificial Sequence
  derived and/or modified sequence
atgagcctggacatccagagcctggacatccagtgcgaggagctgtccgacgcaaggtgggccgagctgctgccactgctccaacaatgccaagtagtaaggcttgatgactgtggactgacagaggcacgatgcaaagatatatcctcggcactgcgggtgaaccctgctctcgccgaactgaatctgcggagtaatgagttgggagatgtaggcgtccattgtgttttacagggcctgcagactccaagctgcaaaatacagaaactaagtctccaaaattgttgcctcactggcgcaggatgcggtgtgttgagttcgacactaaggacactcccaaccctccaggagctgcacttatccgacaatctgctgggggacgccgggctccagctactgtgcgagggcctgctggaccctcaatgccgcctggagaagctgcagctggaatactgctctctctctgccgcaagctgcgaaccgctggccagtgtgctgagggccaaaccggactttaaggagctgactgtttcaaacaacgatatcaacgaggccggcgtacgcgtgctgtgtcagggtctgaaggattcaccttgccagcttgaagccctgaagctggaaagctgtggcgtgacctcagataactgcagggatctatgtggaattgtggcatccaaagccagcttgcgcgaactggcactgggcagtaacaagttaggtgatgtcggcatggctgagttgtgtccaggactcctgcatccctcatcgcgcctccggacgttgtggatttgggagtgtggaatcaccgccaaaggatgcggcgacttatgcagggtcttgagggcaaaggagagcttgaaagaactgagcctggccggcaacgaactgggggacgagggcgctaggctgctatgcgagacactcttggagccgggttgtcaactggaaagtttatgggtcaaatcatgctccttcaccgctgcttgctgctcccacttttctagcgtgttggcccagaatagatttttgttggaactgcagatcagcaacaatcgcctagaggatgctggcgtcagagagctttgccagggattggggcaaccgggatctgtcttgcgcgtcctgtggctggccgactgtgacgtctcagactcatcctgttcatcactcgctgctacattgctcgcaaatcattccttacgagaactggaccttagtaacaattgcctgggcgacgcgggaatcttgcagctggtggaaagcgtccgccaacccggctgtttgctcgagcagctggtcctttatgatatttattggtccgaggagatggaggacaggctgcaagccctcgaaaaggataagccatctcttcgcgttatcagttag

SEQ ID NO: 312717 - RNA, 1386 nt, Artificial Sequence
  derived and/or modified sequence
auguccuuggacauucagagucuugacauccagugcgaagaguuauccgaugccagaugggcagaguuacuuccacuucugcagcaaugucaggugguuaggcuggacgauuguggguugacugaggcucgaugcaaagacaucucuagcgcucugcgaguuaaucccgcgcuagccgaacugaauuuaaggucaaaugaacugggcgaugugggugugcacugugugcuucaagggcugcagacucccagcugcaaaauucagaaguuaucccugcagaauuguugucucacaggggcuggcuguggcguuuugagcuccacucugagaacucuuccgacucugcaggaacuccaccugucugacaaucugcucggcgacgccggccuacagcuccugugcgaaggccuguuagacccccagugcagacuggaaaaauugcagcucgaauacugcuccuuaagugcugcuucuugugagccacucgcuucugugcugcgugccaaaccggacuucaaggaguugaccgugucaaacaacgauauuaacgaagccggagugagggugcucugucagggccucaaagacucuccuugucagcuagaagccuuaaagcuggagucaugcggcgucaccagcgauaauugucgugaccuaugcggaaucguggcauccaaagcaagucuacgcgagcuggcucugggcucgaauaaacucggcgauguuggaauggcugagcucugcccuggacuacuucauccaagcucucggcugcggacccuguggaucugggagugcgguauaaccgcgaaagggugcggugacuuaugccggguuuuaagagcuaaggagucccuaaaggaguuaagucucgcuggcaacgagcugggugaugaaggugcccgucuuuugugcgaaacguugcucgagccugggugucaacuugagagccugugggucaagucuugcucauucacagccgccugcuguucucacuuuagcagcguucucgcacagaaccgguuucugcuagaacugcaaaucagcaauaacaggcuggaggacgccggggugcgggaacuuugucaagggcuggggcagccugguuccguacucagaguucuuugguuggcggauugugacgugucugauucaagcugcucuuccuuggcagcaacucugcuggcaaaccacucccugcgugaacucgauuuauccaacaauugcuugggcgaugcuggcauucuucaguuggucgagucagugcgccaacccggauguuuacuggagcaacuuguucuuuaugacauuuauuggucagaagaaauggaggaucggcuucaggcccuggaaaaagacaaaccaucacugcgaguuaucagcuag

SEQ ID NO: 312718 - RNA, 1386 nt, Artificial Sequence
  derived and/or modified sequence
augagucuggauauacagucacuggacauucaaugugaagaacucuccgaugcacggugggccgagcuucugccuuuacuccaacagugucaagugguuagauuggacgacuguggucugacugaggccagaugcaaggacauaaguucugcccugagagugaaucccgcccuagccgaacugaaccuccggucuaacgaauugggagaugugggcguccauugcgugcugcaggguuugcaaacaccaagcuguaagauucagaagcugucacugcaaaacuguugcuugacaggggccggcugcggcgugcucagcucuacccuacguacccugccaacccuucaggaauugcaccuauccgauaacuuacucggagaugcaggauugcaacugcugugcgagggucuccucgacccccaauguagauuggagaaacuacaguuggaauauuguagccuguccgcggcaucaugugagccucucgcuucuguucugagggcaaagccagauuuuaaggagcugacuguguccaacaacgacaucaacgaagccgggguccgcguccugugccagggacugaaggacucucccugccagcuggaggcccuuaaacucgaaucaugcggcguaacaucagacaacugucgggaccugugcggcauugucgcuucuaaggcgucucucagagaguuggcacuggguagcaauaagcugggcgaugugggaauggcugagcuuuguccgggacuucugcaucccuccagccgacuacguacccuguggauuugggagugcgguaucacugcuaagggcuguggcgacuuaugccggguacuucgcgcuaaagagucccuaaaagagcugucucuggcuggcaacgagcuaggggaugaaggcgcccgccuacugugugaaacccugcuggagccaggcugccagcucgaaucccuaugggugaagucguguucuuucaccgccgcaugcuguucacacuucucaucugugcuugcucaaaaucgauuucugcuggagcuacagauuuccaauaauagacuugaggaugccggagucagagagcucugccagggacucgggcaaccuggcagcgugcuacgggugcuguggcuggcagacugugaugucuccgacucgagcugcucuagucucgcugccacccuccuugcgaaccacuccuuacgugaguuggaccucagcaauaacugccucggggaugccggcauacugcagcugguugagagcguccgacagccgggaugccuccuggaacagcuugugcuguaugauaucuacuggagcgaagaaauggaagauagacugcaggcucucgagaaggauaaaccaucccuccgagugauaaguuag

SEQ ID NO: 312719 - RNA, 1386 nt, Artificial Sequence
  derived and/or modified sequence
augucccucgauauucaaagcuuagauauccaaugugaggaguuauccgaugcuagaugggccgagcuccugccccuucuucagcagugccagguggugagacucgacgauugcggguugacagaagcuagaugcaaagauauuuccuccgcccugcgugugaauccagcgcuggcagaacuaaaucugcggagcaaugagcuuggugaugugggcgugcacugcguccuccaggguuugcagacacccucuugcaagauucagaagcugagccuacagaauugcugccugaccggugcugggugcggugugcucucaaguacucucagaacacugccaacucugcaggagcugcacuugucagauaaccugcugggagaugcuggucugcaacuguugugugagggauugcucgacccccagugccgccuggaaaaacugcagcuggaguauuguucacugucugccgccuccugcgaacccuuggcuuccguacuccgugcuaaacccgauuuuaaggaacucacugugucgaauaacgauaucaacgaggccggcgugagaguguugugccagggacugaaagacucccccugccaguuggaggcucugaaauuggagucaugcggggugacauccgacaacugccgggaccugugcggcauuguggccagcaaggcuucccuccgagaacuagcacucgguucgaacaaacucggugauguggggauggccgagcugugccccggauuguugcauccuucaucucggcugcguacccuguggauaugggaauguggaaucaccgcuaagggaugcggggauuuaugucgcgugcuacgggcaaaggaaagcuugaaggagcugucccuggcugguaaugagcugggcgaugagggagcuaggcucuugugcgaaacccuucuggagccaggaugucagcuggaaucccuguggguaaaguccugcuccuucaccgcugccugcugcucacacuucucuucaguauuggcacagaacagguucuuacuggagcuccaaaucagcaauaacagacuugaagaugcuggugugcgugaauuaugccaagggcuggggcagccuggcuccgugcugcggguguuguggcuugcagacugugaugucagcgacagcuccuguuccagccuggcugccacucuucuggcuaaucacucucuccgcgaauuagaucuuuccaauaacugccugggagaugcggguauccugcaacuaguggaauccgugcgccagccugguugccugcucgaacaacuuguguuauacgacaucuauuggucggaagaaauggaggaucgguuacaggccuuagaaaaagacaaaccgagucugagagugauuucuuag

SEQ ID NO: 312720 - RNA, 1386 nt, Artificial Sequence
  derived and/or modified sequence
augucucuugauauucaaagucucgacauucagugcgaggaguuaucugaugcccggugggcugaacugcuaccgcugcugcagcagugucagguggugagauuagacgauuguggguugaccgaggcacguugcaaggacaucucauccgcauuacgugugaaccccgcccucgccgaacugaaucugcguuccaacgagcugggugacgugggagugcacugugugcuccagggacugcagacucccucauguaaaauacaaaaauugagccuccagaauuguugucuuacaggcgccggaugugggguucugagcuccaccuuaagaacacuccccacgcuacaggagcugcaccucuccgauaaccuccucggcgacgcugggcugcaacuacugugugaggggcugcuugauccucagugccggcuagagaaauugcagcuggaguauuguucccuguccgcugcuuccugcgaaccccuugccaguguguugagagcgaagccggacuuuaaggagcugacugucuccaacaacgauaucaaugaagccgguguucggguacucugucaagggcugaaggacagcccaugccaacuggaggccuugaaacucgaguccuguggagugacaagugauaacuguagagacuuauguggaauaguugcuagcaaggcuagucuccgagaguuagcgcucggcagcaacaaacuaggggaugugggcauggccgaacucugccccgggcuuuugcaucccucgagcagauugcgcacacuguggauuugggaaugcggcauuaccgcgaaaggguguggagaccucugucgcgugcugcgggccaaagaaagccucaaggagcucucgcucgcuggcaaugagcucggcgacgagggagcaagacuccucugcgaaacccuccuggagccaggaugccagcucgagucccucugggugaaaaguugcuccuuuacggcugccugcugcucgcacuucucuucaguacucgcacaaaaucgcuuucuucuugaguuacaaauuucgaacaaucgucuggaagacgcaggcguccgagaauuaugccaaggccuuggccagcccgggaguguguuacggguucugugguuggcagacugcgacguuucagacucuucuuguucuagccucgccgccacccuccuggcgaaucauucccuucgagaguuggaucugaguaauaauugucugggcgacgccgggauccugcagcucguggagaguguuaggcagccagggugccugcuagagcagcugguucucuaugacaucuauuggucagaagaaauggaagaccgccuccaggcucuggagaaggacaaaccaaguuuaaggguuaucuccuag

SEQ ID NO: 312721 - RNA, 1386 nt, Artificial Sequence
  derived and/or modified sequence
augucucucgacauucagucccuggauauacagugugaagaguuguccgacgcgaggugggcggaguugcuacccuugcugcaacaaugucaaguggugcgguuggacgacugcggccugacugaagcucgguguaaggacaucagcuccgcgcugagagugaaccccgcccuggccgaauugaacuugcguagcaacgaguugggugauguuggaguucacugcguacuucagggccuucagaccccaucuuguaaaauccagaaacucucucuccaaaauuguugucuuacuggagccggaugcggugucuuguccucuacccuucgcacguugcccacacugcaggagcuccauuugucagacaaccucuuaggcgaugcagggcuccaacuacugugcgagggacuucuggauccccaguguagacucgagaaauuacagcuugaauacuguucucuuagugcugcaucaugugaaccacuggcuagcguuuuacgagccaaacccgacuuuaaagaacugaccguaucaaauaaugauaucaacgaagcaggcgugaggguacugugucagggccugaaggauuccccgugccaacuugaggcucugaagcuugaaucuugugguguaacuagugacaauuguagggaccugugcggaauagucgccuccaaggcaucuuuacgagagcuggcauuggggaguaacaaacuuggcgauguggguauggccgagcucugucccgggcuacuccaccccucuucacgucuucggacccuguggaucugggagugcggaauuaccgcaaaagguugcggcgaccugugccgggugcuaagagcuaaagagucacuaaaggagcugagccuugccggaaacgaauugggcgaugagggugccagacugcuuugugagacccuuuuggaaccggggugccaguuggagaguuuaugggugaaaucguguuccuuuacggcggcgugcugcucacauuucaguaguguucuugcccagaauagguuucuucuugagcuucaaaucucaaacaauaggcucgaagaugcaggggugcgcgaguugugccaaggacugggacagccugggagcguacucagagugcucuggcuugcagauugcgacgugagcgauucaucaugcuccucccucgccgccacucuccuggcaaaccacagccugcgggagcuggaucuuuccaauaacugccugggcgaugcuggcauccuucaacugguagaaucaguucgccagccagggugccuccuggaacagcuuguucucuacgacauuuacuggucagaggagauggaggacagacugcaagcccucgagaaagacaaacccagccuccgugucauuagcuag

SEQ ID NO: 312722 - RNA, 1386 nt, Artificial Sequence
  derived and/or modified sequence
augucacuggacauccagucacuugacauccagugcgaggaacugucagacgcacguugggccgaguuacugccgcuccuucagcagugccaggucguacggcucgaugacugugggcugaccgaggcaagaugcaaagauauauccagcgcccugagggugaauccugcccuggccgaacuuaaccugcggucgaacgaguugggagaugugggcguucacugugugcugcaaggccugcagaccccuagcugcaagauacagaagcuuuccuugcagaauuguugucuuacaggagcaggcugcggaguucucucuuccacauugcggacacuuccaacucugcaggagcuucaccugagugacaaucugcucggcgaugcaggcuuacagcuucugugcgagggccuguuggauccucagugccgcuuggagaagcuucaacuugaguacuguucccucucggcagcaucgugugagccuuuagcuuccgugcugcgcgccaagccggauuucaaggagcugaccguuagcaauaacgauauuaaugaagcagguguaaggguucuaugucaaggccuuaaggauucuccaugccagcuggaagcccugaagcucgaaucuuguggcgugacaucugacaacugcagagaucugugcggcaucguggccucaaaggccucacugcgagaauuagcccugggcuccaacaaacuuggggacgugggaauggccgagcugugccccggccuccuccaucccagcucaagauugcgcacccuguggauuugggaaugcggaaucaccgcaaaggguuguggagacuuauguaggguccucagagcuaaggaauccuugaaggaguugucacuggccggcaaugaguuaggcgacgaaggugcccggcugcucugugagaccuugcucgaacccggcugucagcuggagucacugugggucaaguccugcagcuuuaccgccgcuuguugcucucauuuuagcucaguccucgcucaaaaccguuuucugcucgaacuccagauaagcaauaauagacucgaggaugccgguguuagggaacugugucagggacugggccagcccggauccguguugagagugcuguggcuggccgauugugacguaucugacucaucaugcucgucccuggcugcaacccugcuggccaaucauucguugagagaacuggacuuaaguaacaacugccucggcgaugcuggcauccugcagcucguggaauccgucaggcaacccgggugucugcucgaacaacuggucuuauacgauauuuacuggucugaagagauggaagauaggcugcaggcgcuagaaaaagauaagccaucuuuacgcgugaucaguuag

SEQ ID NO: 312723 - RNA, 600 nt, Artificial Sequence
  derived and/or modified sequence
augucacucgacauccagagucucgauauucagugcgaagagcucucugaugcaagaugggccgagcucuuaccucuccuccagcagugccagguagugcgacuggacgacuguggacuuaccgaggcaagguguaaagauaucucuagcgcucugcguguuaauccagcuuuagcugaacucaaccuaagaucgaacgaacucggggauguaggcguucacugcgugcuacagggucuucaaaccccuuccugcaaaauucagaaacugagccuccagaacuguugucugacaggcgccggcugcgggguccugucuucaacacugagaacacugccgacacuccaggaauugcaucugucugauaaucugcuuggcgaugccggucugcagcugcugugcgaaggcuuacucgauccccagugcagguuagaaaaacugcaguuagaguauuguucacucuccgccgccucaugugagccucucgccuccguccugcgggccaaacccgauuucaaagaauuaacagugaguaauaacgauauaaacgaggccggcguucggguauuaugccaggguuuaaaagauaguccuuguuag

SEQ ID NO: 312724 - RNA, 570 nt, Artificial Sequence
  derived and/or modified sequence
augucacuagauauccagucauuagacauccagugugaggaguugucggaugcucggugggcagagcucuugccguugcuucaacagugccaggugguaagacuggaugacugcggguugacagaagcccguuguaaagauauuaguagugcacuuagagugaacccagcucuggccgagcucaaucucaggaguaacgaacugggcgaugucggcguccauuguguguuacaaggucuccaaacuccuuccuguaagauucagaaacugucccuccagaauugcugucucaccggagcaggaugcggggucuuaagcucuacgcuucgcacauugcccacucugcaggagcuccaccugucugacaaccugcugggcgacgcaggccuucagcucuugugugagggacugcucgacccgcaauguagacuugagaaguuacagcucgaguauuguucucucucagcggccucaugcgagccacuggcaucugucuuaagggccaaacccgauuucaaagaacucaccguuucuaauaaugauauaaaugaagcuggaguacggguguag

SEQ ID NO: 312725 - RNA, 585 nt, Artificial Sequence
  derived and/or modified sequence
augucucuggacauucagucucuggacauucaaugcgaggaacuuagugacgcgaggugggccgaguuacuuccccugcugcaacagugccagguagugcgacucgacgacuguggacugacggaggcaagauguaaagacaucucaucugcccuacgagugaaucccgcccuugcugaauugaaucugcggaguaaugaacucggcgaugucggcgugcacugcguguugcaggggcuucagaccccuucuuguaaaauucagaaguugucccuacaaaauuguugccugacaggcgcagguuguggagugcuuuccucaacucuucgaaccuuacccacccuccaagagcugcaccugucugauaacuuacugggcgaugccggucugcaguugcugugcgagggcuuguuggacccacaguguagacuagaaaagcuccaacuggaguauuguucucugagugcugccucaugcgaaccccuggccagcguccugcgugccaagcccgauuucaaagagcugacagucuccaauaacgauaucaacgaagcaggcgugcgcguauuaugccagggccuguag

SEQ ID NO: 312726 - RNA, 123 nt, Artificial Sequence
  derived and/or modified sequence
augucccuagauauccaaucgcuugauauccaaugcgaagaacuauccgacgccagaugggcagaguuauugccacuguuacagcaaugucagguaguaagauuagaugacugcggccuguag

SEQ ID NO: 312727 - RNA, 1386 nt, Artificial Sequence
  derived and/or modified sequence
augucccuggauauucagucucuggacauucaaugcgaagagcuuagugaugcucgcugggcagagcuguugccacugcugcagcaaugucagguggugagauuggacgauuguggucuuacagaagcaagaugcaaagauaucucaucugcccugcgugucaacccugcuuuggcugaacugaauuugcggagcaaugaacugggggauguggggguacauugugugcugcagggucugcagacacccucauguaaaauucagaaacugucccugcaaaauugcugucucaccggugcuggcugcgguguucugucuuccacacugaggacgcucccuacccuccaagaauugcaucugucugauaaucugcuuggcgacgcaggcuuacagcuccuaugcgaaggacuccuggacccucagugucgauuagagaaacuucaguuggaauacugcucauuguccgcggcuagcugugaaccuuuggccagcgugcugcgugcaaaaccugacuuuaaggagcucacugucagcaacaacgauauaaacgaagcaggcgucagggugcuuugucagggccugaaagauucacccugucaacuugaagcacugaaacuugagaguugcggggugacuucagauaauugccgcgaccucugugggauuguugcaucgaaagccucgcugcgcgaacucgcucucggcucgaacaagcucggcgacgugggcauggcugaacugugcccgggguugcuacauccaucaucuaggcugagaacauuauggauuugggaaugcgggauaaccgcuaaggggugcggcgaucuuugccguguguuacgugcgaaagaaucacugaaagagcucucccucgccggcaaugagcugggggaugaaggcgcaagacuacugugcgagaccuuguuagaaccaggaugccaacuggagucucuguggguuaaaucgugcucuuucacagccgcaugcuguucucauuuuucuucaguccuagcccaaaauagguuuuuauuggagcuccagauuagcaacaaccgccucgaggaugcuggcgucagggaacugugucaggguuugggccaacccggaagcgugcuacgggugcucuggcuugcagacugugacguuagugauucuaguugcucuagccuugcugcaacacugcucgcaaaccacucacugcgcgaacuggaucuguccaauaacugccugggagaugcggggauucuucagcucgucgaaucuguucgccagcccgguugccugcuugagcaguuggugcucuacgauaucuacuggagugaagagauggaggacaggcugcaagcccuggagaaggauaaaccaucacucagaguaauaucuuag

SEQ ID NO: 312728 - RNA, 1386 nt, Artificial Sequence
  derived and/or modified sequence
augagcuuagacauucaaagucucgacauccagugugaggaguuguccgacgcaaggugggccgaacuccuaccccugcugcaacaaugccagguggugcggcuggacgauuguggccugacugaggcuagaugcaaggauaucucuucagcccuaagaguaaaucccgcacuggcagaauuaaacuugaggucaaacgaacugggugauguggggguacauugcguccugcaggggcugcagacgccaaguugcaagauucagaaacucagccugcagaauuguugucuuacuggagcaggguguggcguacuuuccuccacccucaggacucuccccacucuacaggagcugcaccugucugacaaucugcuuggagacgcuggauugcaacugcugugugagggccugcuagacccgcagugcagacuugaaaaauugcaguuagaauacuguagccucucugccgccucgugcgaacccuuagcuucugugcugcgcgccaaacccgauuucaaggagcugacgguaucuaauaaugauauuaaugaggccggcgugaggguacuuugccagggacuuaaggauucaccgugucaguuggaggcucugaagcuggaauccuguggcgugaccagugacaauuguagagacuuguguggcaucguggcuaguaaagcuucccuuagagagcuggcucugggaucaaauaagcucggagacgugggaauggcugaauuguguccgggacuccuccauccaucuucgcgacucaggacccuguggauuugggaaugugguaucaccgcaaagggguguggggaucucugccgagugcugcgagccaaggagagccucaaagaacugagccucgccggaaaugagcugggcgaugagggagcuagauuacucugugagacacugcuggagccagggugccaguuagaauccuuauggguuaagagcugcaguuuuaccgcagcuuguuguagccacuuuucuagcgugcuugcccagaaccgcuuccuccuggaacugcagauauccaacaauagguuggaagaugcaggcguucgugaacugugucaaggucucgggcaaccuggcuccguccugcgcguucucuggcuggccgauugugaugucuccgacucaaguugcucaucacuggccgccacccuucuagcuaaccauucccuucgugagcucgacuugagcaauaacugucugggcgaugccggaauucuccaacuaguugagagcgugaggcagcccggaugucuccuggaacagcuaguccuguaugacaucuauuggagugaggagauggaggauagacuccaggcccuugagaaagacaaaccuucucuucgcgugauuaguuag

SEQ ID NO: 312729 - RNA, 1386 nt, Artificial Sequence
  derived and/or modified sequence
augucuuuagauauucagagccuugacauccagugugaagagcuaagcgaugcucggugggcugagcugcucccccugcugcaacagugucaggucguuagacucgacgauuguggccuuaccgaggcacgaugcaaggacauauccuccgcccucagggugaauccugcuuuggcagaacugaauuuaagaucuaaugaacugggcgaugucggcguucauugcgugcugcaaggguuacagacuccauccugcaagauucaaaaguuaucccuucagaacuguugucugaccggcgccggauguggugucuuauccuccaccuugcgaacccugccaaccuugcaagagcuacaccucucagacaacuuacucggggacgccgggcugcagcuccugugcgaaggguugcuggacccccaaugucgcuuagaaaagcugcaacuugaauacuguucauugagugcugccucuugcgagccacuggccagugugcugagagcaaaaccugacuucaaagaacugaccguaucuaauaacgacaucaacgaagccggugugcguguccugugucagggccugaaagauucgcccugccaguuagaggcucugaaguuggagaguugcggcgugacgagcgacaauugccgagaucugugugguauaguggcuucuaaggcuucucugagggagcuggcccugggcucuaauaagcugggagacgugggaauggcugaacuuugcccuggccugcugcacccaucuagcagacuucgaacccuguggaucugggaauguggaaucaccgccaaggguuguggcgaucugugccgcguccugagagcaaaagagaguuuaaaggaauuaagccuggcuggcaacgagcuuggugaugaaggagcccgucugcucugcgagacccuuuuagaaccugguugucaauuagaaucccugugggugaaauccuguagcuucacugcugcauguugcucccacuuuuccucugugcuugcccagaaucgcuuccugcuugagcuucagauaagcaauaauaggcuggaggacgccggagugagagagcuaugucagggccugggccagcccgguuccguucugcgcguguuauggcucgccgauugugaugucucagauucgucguguucaaguuuggcugcuacgcuacuugcaaaucacucacuucgggagcuugaucuuaguaauaauugucuuggcgaugccggcauucuccaacucguugaguccgugagacaaccugggugucuguuggagcaacucguacucuacgauauuuauuggucugaggagauggaagacagacugcaggccuuagagaaggauaaaccaucucugcgcguaauaucauag

SEQ ID NO: 312730 - RNA, 1386 nt, Artificial Sequence
  derived and/or modified sequence
augucacuugauauacaaaguuuagauauucagugugaagagcuuuccgaugcccgaugggccgaacuucuuccucuacuucagcagugccagguugugcgguuggacgacuguggacugacugaggcucgcuguaaagacauaucuuccgcccucagggugaacccggcccuggccgaacugaaucucagaucgaaugagcuuggcgacguggggguccacuguguccuucagggccugcagacgccaucuugcaaaauccagaaacucuccuugcagaauugcugccuaacaggagcuggaugcggaguucuuucuucuacccuccgaacacugccaacgcugcaggagcugcaucugucugacaauuugcuaggggacgccggacuccagcugcuuugcgaaggccugcuugauccucagugcagacuggaaaaauugcaauuagaguacugcucauuaucugccgccagcugcgaaccacuugccucagugcuuagagccaagccagauuuuaaagagcucacagucuccaacaacgauaucaacgaggcaggggugcgaguucucugucagggauugaaagacucuccaugccagcuggaggcucuuaaauuagagagcuguggugucaccuccgauaauuguagggaccuguguggcauuguggcaaguaaagccucucugcgagaauuggcgcucgguucaaacaagcugggggacguuggaauggccgaacucuguccaggacuucugcauccuuccagcaggcugagaacccucuggauuugggaguguggcaucacugcuaaaggguguggcgacuuauguaggguccugagagcuaaagaaagucuuaaagaacucucacucgcuggaaaugaacugggagacgaaggugcacgacuguuaugcgagacgcuuuuggaacccgggugccagcuugagucacuuuggguuaaaucaugcucauucacugccgcuugcuguucucauuuuagcuccguccuggcacagaaccgauucuuacucgaacuacagauuucuaacaaccggcuggaggacgccggugugcgcgaacucugccaagggcuuggucagccagggaguguacugagagugcuuuggcuugcugacugcgacgugucugacuccucauguagcagccucgcagcuacucuccuggcuaaucauucucucagagaacuggaccugucgaauaacugucuuggagacgcaggcauauugcagcucguggaaucugugcgacaaccuggcugccuucuugaacaguuaguccucuacgauaucuacuggagcgaagagauggaggaccgacugcaggcauuggagaaagacaaaccuucuuuacgcguaauaucauag

SEQ ID NO: 312731 - RNA, 1386 nt, Artificial Sequence
  derived and/or modified sequence
augucccucgauauucaaagcuuagauauccaaugugaggaguuauccgaugcuagaugggccgagcuccugccccuucuucagcagugccagguggugagacucgacgauugcggguugacagaagcuagaugcaaagauauuuccuccgcccugcgugugaauccagcgcuggcagaacuaaaucugcggagcaaugagcuuggugaugugggcgugcacugcguccuccaggguuugcagacacccucuugcaagauucagaagcugagccuacagaauugcugccugaccggugcuggcuguggcguucuguccucuacgcuacggacacuaccuacccuccaggagcugcaucuaagugauaaucuuuugggagaugcgggccuucaacugcugugcgaagggcuucuagauccccaguguaggcuggagaaauugcaauuggaguauuguucucugucagcagcgaguugugaaccccuggccuccgugcuccgugcaaagcccgacuuuaaggaacugaccgugagcaauaaugacauaaaugaagcaggagugagaguccucugccagggcuuaaaggauuccccaugucagcuggaggcccucaagcuggagucauguggaguuaccucagacaacugcagagaucuguguggaaucguugcaucgaaagcgucccugcgcgaacuugcucuugguaguaacaaacugggcgauguagggauggccgaacucugcccuggauuauugcacccuaguagucgguugaggacccuguggauuugggagugcggaauaacagcaaaggguuguggugacuuaugccggguacugcgugcgaaagaaucuuugaaagaacugagccuagcugguaacgagcuuggagacgagggugcucgacugcugugcgagacuuugcuggagcccgggugucaauuagaaucuuugugggucaagagcuguucuuuuacugcugcaugcugcagucauuuuucaucuguguuagcucagaaucgauuucugcucgaacugcagaucuccaauaaccgccuugaggaugcuggggucagggaacugugucaagggcuaggccaaccgggcaguguacucagagugcuuugguuagcugacugcgacguuuccgauucuucaugcuccucucuggcugccacucuauuggcuaaccacagccugcgcgaauuagaucuuuccaauaacugccugggagaugcggguauccugcaacuaguggaauccgugcgccagccugguugccugcucgaacaacuuguguuauacgacaucuauuggucggaagaaauggaggaucgguuacaggccuuagaaaaagacaaaccgagucugagagugauuucuuag

SEQ ID NO: 312732 - RNA, 1386 nt, Artificial Sequence
  derived and/or modified sequence
auguccuuagauauucaaucacuggacauccaaugugaagaacucuccgacgcgagaugggccgaacuacuaccccuccuccagcaaugccagguggugcgucuggacgacuguggccuaacagaggcgagauguaaggauauaucaagugcuuugcgagucaacccugcucuggccgaacugaauuuacgguccaaugaacugggugauguaggagugcacugcguacugcaaggucuccagacaccgaguugcaaaauucagaagcugucccugcagaauuguugccuaaccggcgccgggugcggagugcugagcucuacacuuaggacccucccgacucuccaggaacugcaccugucagacaaccuacugggcgacgcaggauuacaauuacugugugaaggccuccuugauccgcagugccgccuagagaagcuacaacuagaguacuguucacucagcgccgccuccugcgaaccccuugccucuguccuacgagcuaagccagauuuuaaagaacuuaccguaucuaacaacgacaucaaugaagcaggcgugcgcguccucugccagggccuuaaagacucaccaugucagcuggaagcacuaaaacuggaguccugcgggguuacuucagauaacuguagagaccuguguggcauuguggcaagcaaggccucccuuagagaauuagcccucggaaguaacaaacucggggacgugggaauggcggagcucuguccgggccuguuacaccccucuagucgcuuacgcacccuguggaucugggaauguggaauuacugcaaaaggauguggcgaucuguguagagugcugcgcgccaaggagucguugaaagaacugagucuggccgggaaugaacuuggagaugagggcgcaagacuccucugcgaaacccuccuggagccaggaugccagcucgagucccucugggugaaaaguugcuccuuuacggcugccugcugcucgcacuucucuucaguacucgcacaaaaucgcuuucuucuugaguuacaaauuucgaacaaucgucuggaagacgcaggcguccgagaauuaugccaaggccuuggccagcccgggaguguguuacggguucugugguuggcagacugcgacguuucagacucuucuuguucuagccucgccgccacccuccuggcgaaucauucccuuagggaacucgaccugagcaacaauugccucggagaugccggaauccuacagcucgucgagucaguucgacaaccaggaugccucuuggaacaacugguucucuacgauaucuacuggucagaagagauggaagauagauuacaggcuuuggagaaggacaaaccaucccugaggguaauuucauag

SEQ ID NO: 312733 - RNA, 1386 nt, Artificial Sequence
  derived and/or modified sequence
augagccucgauauccaaaguuuagacauccaaugcgaagaacugagcgacgcucggugggccgagcugcucccccugcuacaacagugccagguggugcgucuugaugauugcggucucacagaagcacgauguaaggauauaaguuccgcccugagggugaaucccgcucuugccgagcugaaucuacggucuaaugaguuaggggaugugggcgugcauugcgugcuccaggguuuacagaccccuucuuguaaaauccaaaagcugagccuccagaauuguugccuuacuggcgccgggugcggcguucucagcuccacacuacgaacccugcccacuuuacaggagcuccaccuguccgauaauuugcuuggagacgcuggguugcaacugcugugugaagggcuucuggauccucagugcagacuugagaaguugcagcuggaauacuguucucucuccgcagcuuccugugaaccucucgcuaguguguuacgugccaaaccagauuucaaggagcuuacaguaaguaauaaugacauuaacgaagccggcgugcggguacugugucagggccugaaggauucgccgugucaacucgaggcacugaaacucgagagcuguggcgucacgagugauaacugcagggaccugugugggaucguugcuagcaaagcuucacugcgcgaguuggcacuggguucuaauaaacugggggacguggguauggcggagcuguguccaggccuuuuacacccaagcagccgguuaaggacucuguggaucugggagugcgguaucacggcuaagggcugcggggaucugugucgcguguugcgggcaaaagaaucuuuaaaagagcucucacuggcuggaaaugagcucggcgacgaaggagcgagacuacuaugugaaaccuugcuggaaccagggugucagcuugaaagucugugggugaaaucgugcaguuuuaccgcggccuguugcagccauuuuucaucuguucuugcccaaaaccgcuuccugcuugaacugcagaucucaaauaacagguuggaagacgcuggaguccgcgaguugugucaaggccugggccaacccgguuccguguuacgaguguuauggcuagccgauugugacguguccgacuccucaugcucuucucucgcagcgacucuacuugcuaaccacagccucagagaacuugaucugaguaauaacugccugggcgaugccggcauucugcagcucguggagucagugcgccagccuggaugccuguuggagcagcuugugcucuaugauauuuacuggucugaggaaauggaagaucgucuucaagcacuagaaaaagacaagccaucauuacgcgugauuucuuag

SEQ ID NO: 312734 - RNA, 1386 nt, Artificial Sequence
  derived and/or modified sequence
augucacuggacauucaaucauuagauauacaaugcgaagagcuuucugacgcuagaugggcugaacugcucccauuauugcagcaaugccagguggugaggcucgacgacuguggcuuaacggaggcucguuguaaggacaucucauccgcuuugagagugaauccugcgcuggcagagcugaaccugcgaucuaaugaacucggggaugucgguguacauuguguguuacaagggcuucagaccccauccugcaaaauucaaaagcugucucugcaaaacuguugcuugacuggugccggaugcggcguccugucaagcacccuccgcacgcugccuacucugcaggaauugcacuuaucugacaaucugcugggugaugccgggcugcaacugcuaugugaaggacugcuagauccacaaugcaggcucgagaagcuccaguuagaguacuguucccucucagccgcuucuugugagccgcucgccagcguccuccgcgcaaaacccgauuucaaagagcugaccguuuccaauaaugacauuaacgaggccgggguaagaguccucugucagggccugaaagacucucccugucagcuggaggcccucaagcuggaaucuuguggggugacaucagacaauuguagggauuugugcggaaucguggccagcaaggcaagccuccgagaacuggcccugggauccaauaagcugggagacguagguauggccgaguuaugcccuggacuguugcacccaagcucuagauugagaaccuuguggauaugggaauguggaauuacagcuaaagguuguggagaucugugcagaguacuucgcgcuaaggagucucucaaagagcugucacuggccgguaacgaguugggggacgaaggggcccgguuacucugugaaacacuccucgaaccaggaugucaauuagagaguuugugggugaaguccugcuccuuuaccgcagcuuguuguucucacuuuucuagugugcuugcgcaaaaccguuuccuauuagagcuccagaucucaaacaacagguuagaagacgccgggguccgggagcugugucaagguuuggggcagcccgggaguguacugcgagugcucuggcuugccgacugugacgugucugacucuagcuguucuucccuagcugcaacucugcuugcaaaccauucccuuagagaauuggaucugaguaauaauugucuaggagaugcggggauucugcaacugguggagucaguacgucagccugggugcuuauuggaacagcucgugcucuaugauauauacuggagcgaagaaauggaagaucgucuacaagcacuggagaaggauaagcccagccugcguguaauuucauag

SEQ ID NO: 312735 - RNA, 600 nt, Artificial Sequence
  derived and/or modified sequence
augucacucgacauccagagucucgauauucagugcgaagagcucucugaugcaagaugggccgagcucuuaccucuccuccagcagugccagguagugcgacuggacgacuguggacuuaccgaggcaagguguaaagauaucucuagcgcucugcguguuaauccagcuuuagcugaacucaaccuaagaucgaacgaacucggggauguaggcguucacugcgugcuacagggucuucaaaccccuuccugcaaaauucagaaacugagccuccagaacuguugucugacaggcgccgggugcggcgugcuguccucgacgcugagaacacugccuacacugcaagagcuucaucucucugauaaucugcugggcgacgcaggccugcaguugcuuugcgagggacuacuugacccccagugccgauuggaaaaauuacagcucgaguauugcagucuuucugccgcaucaugugaacccuuggccuccguccugagggcaaaacccgauuuuaaagaacucacuguaagcaauaaugauauuaacgaagcuggagugcguguccugugucagggacuuaaggauagccccuguuag

SEQ ID NO: 312736 - RNA, 570 nt, Artificial Sequence
  derived and/or modified sequence
augagccuggauauucaaucgcuggauauucaaugugaggaauuaagugacgcaagaugggccgaguuacuaccauuacuucagcaaugucagguuguccgucuggacgauuguggccugaccgaagcucgaugcaaggacauuuccucggcacuucgcgugaacccugcccuagccgagcugaaccugagaucaaaugagcugggggaugugggugugcacugugugcuccagggcuuacagaccccuuccugcaagauucaaaaacugucucugcagaauuguugccugaccggcgcaggaugcgggguauuguccaguacucucagaacacuaccgacacuacaggagcugcacuuaucagacaaccuuuugggugacgcgggccuacaguugcuaugcgaggggcuacuugauccacaaugucgauuagagaaacugcagcuggaauacugcucccugagugcugccucuugcgagccacuagccucaguuuugagggcuaagcccgauuucaaagaacuaaccgugucaaacaaugacaucaacgaagcagggguuaggguuuag

SEQ ID NO: 312737 - RNA, 585 nt, Artificial Sequence
  derived and/or modified sequence
auguccuuagacauccagucccuagacauccagugcgaagaacugagugaugccaggugggcugaauuguuaccucugcugcagcagugucagguuguacgauuagacgacugcggcuugaccgaagcccgauguaaggacauuuccucugcacuuagggucaaccccgccuuagcugaguugaaccuccggagcaacgaacugggugacguuggugugcauugcguucugcagggccuucagacaccauccugcaagauccagaagcuuucucugcaaaauugcugccugacgggagccggauguggcguguugucaaguacacuacgcacccugccaacacuccaggaacugcaccugucugauaaccugcucggagaugcugggcuucaauuauugugugagggccuguuagacccccagugucggcuggagaaacuucaauuggaguauuguucauugagugccgccucuugcgaaccccuggccuccgugcuucgagccaaaccggauuucaaggaacugaccguuucaaauaaugacauaaacgaagccggcguaagggugcucugucaaggguuguag

SEQ ID NO: 312738 - RNA, 1386 nt, Artificial Sequence
  derived and/or modified sequence
augagccucgacauucagagccucgacauucagugcgaagagcucuccgacgcccgaugggcugagcuucuuccccuccugcagcagugucaaguggucagauuagaugacuguggacuuacagaggccagaugcaaagauaucaguuccgcuuugcgcgucaacccugcccuggccgaacuaaaucugagaucaaacgaacuuggagacgugggcgugcauugcguucuucaaggauugcagacaccgucaugcaagauucagaagcucucccugcagaauugcugucuuacuggagccgguugcgguguucugucuucuacacuucgaacauuaccaacauugcaagagcugcaccugagcgacaacuuauuaggcgaugcaggacugcagcugcuuugugagggccuccuggauccccagugcagacuagaaaaacuucaguuggaauacuguucuuuaagcgcugccucaugugaaccccuggcaucugucuugcgggccaagccugacuucaaggaacugaccgugagcaacaaugauauuaacgaggcaggggugagaguguuaugccagggccuuaaagauagcccuugucaguuagaggcucugaaacuugaaucuugugggguuaccagcgauaacugcagggaucuguguggaaucguagccagcaaagcuucuuugcgcgagcuugcuuugggauccaauaagcucggagauguggguauggcugaguugugcccugggcuacugcaccccuccaguagacugcgcacacuguggaucugggagugcggcauuaccgcaaaaggcuguggcgauuugugucgaguacugagagcuaaagaguccuugaaggaacugagccuagccggaaaugagcugggugaugaaggcgcaagacuacugugcgagaccuuguuagaaccaggaugccaacuggagucucuguggguuaaaucgugcucuuucacagccgcaugcuguucucauuuuucuucaguccuagcccaaaauagguuuuuauuggagcuccagauuagcaacaaccgccucgaggaugcuggcgucagggaacugugucaggguuugggccaacccggaagcgugcuacgggugcucuggcuugcagacugugacguuagugauucuaguugcucuagccuugcugcaacacugcucgcaaaccacucacugagagagcucgacuugaguaauaauugucugggcgaugcaggaauccugcagcucguggaaucuguuagacagccugguugcuuguuggaacagcucguccuguacgacaucuauuggucagaagaaauggaagacagguuacaagcgcuggagaaagacaagccgucauuaaggguuauuucauag

SEQ ID NO: 312739 - RNA, 1386 nt, Artificial Sequence
  derived and/or modified sequence
augucacuggauauccagucccucgacauucagugugaggagcugucagaugcacguugggccgaacugcucccucucuugcaacaaugccagguaguccggcuggaugauugcggacuaacugaagcucgauguaaagacauaucuagugcucuccggguaaaccccgccuuggccgaacuuaaccugaggucaaacgaacugggagauguggguguucauugcguucuucaaggacuccagaccccuucauguaaaauccagaaauuaucacugcaaaacuguugccugaccggagcaggaugcgggguccugucuucuacucuuagaaccuuacccacacuacaggaauuacacuuaucugacaaucuguuaggagaugccggccuccaacuccuuugcgagggccugcucgacccccagugucggcuugaaaaacuccagcucgaauacugcaguuuguccgcagcaucuugugagccucuugcaagcguauugcgcgcuaaacccgacuuuaaagaacugacgguaucuaauaaugauaucaaugaggcaggcgugagagugcuuugccagggacuaaaggacucacccugccaguuggaggcucugaagcuggaauccuguggcgugaccagugacaauuguagagacuuguguggcaucguggcuaguaaagcuucccuuagagagcuggcucugggaucaaauaagcucggagacgugggaauggcugaauuguguccgggacuccuccauccaucuucgcgacucaggacccuguggauuugggaaugugguaucaccgcaaagggguguggggaucucugccgagugcugcgagccaaggagagccucaaagaacugagccucgccggaaaugagcugggcgaugagggagccagacuuuugugcgagacucuccuugaaccuggaugccaacuggaaagucuuuggguuaaaucgugcuccuuuaccgccgcuuguuguucucacuucucauccguucuagcccagaacagauucuugcuggaacuucaaaucucaaauaaccgcuuagaagacgccggcgugcgggagcuaugccagggccugggccaaccggggucggugcucagaguucuguggcuggccgauugugacgucucggacucuucauguucaagccuggcugcuacccuacuggccaaccauucccucagagaacuugaccugucaaauaacugucugggcgacgcuggaauacugcagcuuguggaguccguccggcaacccgggugccugcuggaacaauuagucuuauaugauauauauuggagugaagagauggaggaucgacuccaggcucuggagaaagauaaaccuucccuacgcgugauaucuuag

SEQ ID NO: 312740 - protein, 121 aa, Artificial Sequence
  derived and/or modified sequence
MAPRPLLLLLLLLGGSAARPAPPRARRHSDGTFTSELSRLREGARLQRLLQGLVGKRSEQDAENSMAWTRLSAGLLCPSGSNMPILQAWMPLDGTWSPWLPPGPMVSEPAGAAAEGTLRPR

SEQ ID NO: 312741 - DNA, 366 bp, Artificial Sequence
  derived and/or modified sequence
atggctccccgccctctgctgttgctcttgcttctcctgggggggtccgcagcaagaccagcccctccaagggcccggagacattctgatggcacatttacctccgaactgagccgcctgcgcgaaggtgctcggctgcagcgactcctgcagggccttgttggtaaacgatccgagcaggatgctgaaaattctatggcttggacacgcttgagtgcagggctcctgtgtccctccggctctaatatgccaatcctgcaagcttggatgcctctggatggaacatggagtccatggttacctcctggccccatggtcagtgagcctgccggggccgccgcggagggaacgcttcgccctaggtag

SEQ ID NO: 312742 - DNA, 366 bp, Artificial Sequence
  derived and/or modified sequence
atggccccccggcccctgctgctgctgctgctgctgctgggcggcagcgctgcccggcctgccccaccccgggcccggcggcacagtgatggcaccttcaccagcgagctgagccggctgcgggagggcgcccggctgcagaggctgctgcagggcctggtgggcaagaggtctgagcaggatgctgaaaattccatggcctggacccggctgtctgctggcctgctgtgccccagcggcagcaacatgcccatcctgcaggcctggatgcccctggatggcacctggagcccctggctgcccccaggccccatggtgtctgagcctgctggagctgctgctgagggcaccctgcggcccaggtag

SEQ ID NO: 312743 - DNA, 366 bp, Artificial Sequence
  derived and/or modified sequence
atggccccccggcccctgctgctgctgctgctgctgctgggcggctccgcagctcgtcccgcgccccctcgagcccggcgccacagtgacggtacatttacctctgaattgagcagattgcgcgagggagcccgtctgcaaaggttactgcagggactggtggggaagcgctctgaacaggacgctgagaattccatggcctggactaggttgtcggccgggctcctctgtccaagtgggtccaacatgcccatcctgcaggcctggatgccactggacggaacctggtccccttggctgccaccgggccctatggtgtccgagcctgccggggccgctgccgagggcaccctgcgtccccgctag

SEQ ID NO: 312744 - DNA, 366 bp, Artificial Sequence
  derived and/or modified sequence
atggccccacgaccactactgttactgctgttgctgctgggaggatcagccgcaaggcctgctccacctcgagccaggaggcattctgatgggacttttactagcgagctttctcgactcagagagggcgcaaggctccagaggctgctgcagggtttggttgggaagcgaagcgagcaagacgcagaaaattccatggcttggacccggctgtccgctgggcttctctgcccaagtgggtcaaacatgcccattctgcaagcatggatgccccttgacggcacttggtcgccatggctgcctcctgggccaatggtctcagaacctgcgggtgccgcagccgagggaaccctgaggcccagatag

SEQ ID NO: 312745 - DNA, 366 bp, Artificial Sequence
  derived and/or modified sequence
atggccccccggcccctcctgctgctgctgctgctcctcgggggctccgccgcgcgccccgcgccccccagggcccggcgacactcagacgggacgttcaccagcgagctcagccgcctgcgggagggcgcgcggctccagcggctgctacagggcctggtggggaagcgcagcgagcaggacgcagagaacagcatggcctggaccaggctcagcgcgggtctgctctgcccgtcagggtccaacatgcccatcctgcaggcctggatgcccctggacgggacctggtctccctggctgccccctgggcctatggtttcagaaccagctggcgctgctgcagaaggaaccttgcggcccagatga

SEQ ID NO: 312746 - DNA, 366 bp, Artificial Sequence
  derived and/or modified sequence
atggcccccagacccctgctgctgctgctgctgctgctgggcggcagcgccgccagacccgccccccccagagccagaagacacagcgacggcaccttcaccagcgagctgagcagactgagagagggcgccagactgcagagactgctgcagggcctggtgggcaagagaagcgagcaggacgccgagaacagcatggcctggaccagactgagcgccggcctgctgtgccccagcggcagcaacatgcccatcctgcaggcctggatgcccctggacggcacctggagcccctggctgccccccggccccatggtgagcgagcccgccggcgccgccgccgagggcaccctgagacccagatag

SEQ ID NO: 312747 - protein, 448 aa, Artificial Sequence
  derived and/or modified sequence
MADSGLDKKSTKCPDCSSASQKDVLCVCSSKTRVPPVLVVEMSQTSSIGSAESLISLERKKEKNINRDITSRKDLPSRTSNVERKASQQQWGRGNFTEGKVPHIRIENGAAIEEIYTFGRILGKGSFGIVIEATDKETETKWAIKKVNKEKAGSSAVKLLEREVNILKSVKHEHIIHLEQVFETPKKMYLVMELCEDGELKEILDRKGHFSENETRWIIQSLASAIAYLHNNDIVHRDLKLENIMVKSSLIDDNNEINLNIKVTDFGLAVKKQSRSEAMLQATCGTPIYMAPEVISAHDYSQQCDIWSIGVVMYMLLRGEPPFLASSEEKLFELIRKGELHFENAVWNSISDCAKSVLKQLMKVDPAHRITAKELLDNQWLTSTAYEKQFPATSKDNFDMCSSSFTSSKLLPAEIKGEMEKTPVTPSQGTATKYPAKSGALSRTKKKL

SEQ ID NO: 312748 - protein, 37 aa, Artificial Sequence
  derived and/or modified sequence
MADSGLDKKSTKCPDCSSASQKDVLCVCSSKTRVPPV

SEQ ID NO: 312749 - DNA, 1347 bp, Artificial Sequence
  derived and/or modified sequence
atggcagacagtggattggacaaaaagtccactaagtgccccgactgttcgagcgccagtcaaaaagatgttctgtgtgtatgtagcagcaagacacgcgtgcctcccgtgctcgtggtcgaaatgagccagacctccagcatcggttcagccgagtccctcataagtctggagcgcaaaaaagaaaagaatattaatcgtgatatcacatctcggaaggatctgcccagcagaaccagtaacgtggagcgcaaagccagccagcagcaatggggcaggggcaatttcactgaggggaaagttccccatatcaggattgagaacggagctgcaattgaagagatttataccttcggccggatccttggcaagggctcgtttggcattgtaattgaggccaccgataaggaaactgaaacgaagtgggctattaagaaggtgaataaggagaaggccggatcctccgcagtaaagctgttagaaagagaagtgaatattttgaagtcagtcaagcatgagcacattattcaccttgagcaagtgttcgaaacgcctaagaaaatgtatctcgttatggagctgtgtgaggatggagaactgaaggagatccttgacaggaaaggacatttttcagaaaacgagactcgatggatcattcaatcccttgcctccgctatagcctacctccataataatgatattgttcacagagatctgaaattagagaatattatggtaaaatctagcctgatcgatgataacaacgaaattaacctcaatattaaggtgacagattttggattagccgtgaaaaagcagtcccggagcgaagctatgcttcaagctacctgtgggacaccaatctacatggcccctgaagttatctctgcccatgattactcccagcaatgcgacatttggagcatcggggtcgtaatgtacatgcttctgagaggggagcctccctttttagcatcgtctgaggaaaagctgtttgagttgattagaaagggtgaactgcacttcgaaaacgctgtttggaatagtatcagcgactgcgccaaatccgtgctgaagcaactgatgaaggtagatccagctcatcgcatcaccgctaaagaactccttgataatcagtggttgacaagcaccgcttatgaaaaacagtttcctgctacctccaaggataacttcgacatgtgctcaagtagtttcacctcgtcaaagctgctgcctgccgaaatcaagggcgaaatggagaagacacccgtcacaccttctcaagggacggccacaaaatacccagctaagagtggggccctgagcaggacaaaaaaaaagttgtag

SEQ ID NO: 312750 - DNA, 192 bp, Artificial Sequence
  derived and/or modified sequence
atggccgacagcggtttggataaaaagagtacaaagtgccccgattgttcgagtgctagccagaaagacgtgttgtgcgtgtgctcttctaagacacgggttccccctgtgctggtcgttgaaatgtctcagacgtcgtccataggatctgcagagtccctgatatccttagagcggaaaaaagaaaaatag

SEQ ID NO: 312751 - DNA, 114 bp, Artificial Sequence
  derived and/or modified sequence
atggccgactccggactcgataaaaaatctactaagtgtcctgactgctcttccgcctctcagaaagatgtgttgtgtgtctgctcatccaaaacccgagtgccccctgtgtag

SEQ ID NO: 312752 - DNA, 516 bp, Artificial Sequence
  derived and/or modified sequence
atggctgactccgggctagacaagaagtctaccaagtgtcccgactgcagctccgcctcccagaaagacgtgttgtgcgtgtgctccagcaaaactcgagttccccccgtgctggtggtggagatgtcgcagacttccagtataggttcagctgagtctctgatttctctcgaaaggaaaaaggaaaagaacattaatagggacatcacatcaagaaaggacctgccttcacgaacttcaaacgttgagcgaaaagccagccagcagcagtggggccgaggcaacttcactgagggcaaagttccccacatccggatagagaacggcgctgctattgaggagatctacactttcgggcggatcttggggaaagggtctttcggtatcgtgatcgaagccactgataaggaaacagaaactaagtgggcaattaagaaggtgaataaggaaaaggctggttcttccgcagttaaactgcttgagagggaggtgaacatactgaaaagtgtgaagtag

SEQ ID NO: 312753 - DNA, 90 bp, Artificial Sequence
  derived and/or modified sequence
atggcagacagcggtctcgacaaaaagtcaactaagtgccccgattgttcatccgcctctcagaaggacgttctgtgtgtgtgttcctag

SEQ ID NO: 312754 - DNA, 1347 bp, Artificial Sequence
  derived and/or modified sequence
atggctgacagcggcctggacaagaagagcaccaagtgcccagactgcagcagcgccagccagaaggatgtgctgtgtgtgtgcagcagcaagaccagggtgccccctgtgctggtggtggagatgagccagaccagcagcatcggcagcgctgagagcctcatcagcctggagaggaagaaggagaagaacatcaacagagacatcaccagcaggaaggacctgcccagcaggaccagcaatgtggagaggaaggccagccagcagcagtggggccggggcaacttcacagagggcaaggtgccccacatcagaattgaaaatggagctgccatcgaggagatctacaccttcggccgcatcctgggcaagggcagctttggaattgtgattgaggccacagacaaggagacagagaccaagtgggccatcaagaaggtgaacaaggagaaggccggcagcagcgctgtgaagctgctggagcgggaggtgaacatcctgaagtctgtgaagcatgagcacatcatccacctggagcaggtgtttgagacccccaagaagatgtacctggtgatggagctgtgtgaagatggagagctgaaggagatcctggacaggaagggccacttctctgaaaatgagacccgctggatcatccagagcctggccagcgccatcgcctacctgcacaacaatgacatcgtgcaccgggacctgaagctggagaacatcatggtgaagagcagcctgattgatgacaacaatgagatcaacctgaacatcaaggtgacagactttggcctggccgtgaagaagcagagccgctctgaggccatgctgcaggccacctgtggcacccccatctacatggcccctgaggtgatcagcgcccatgactacagccagcagtgtgacatctggagcattggagtggtgatgtacatgctgctgcggggggagccccccttcctggccagcagcgaggagaagctgtttgagctgatcagaaaaggagagctgcactttgaaaatgctgtgtggaacagcatcagtgactgtgccaagtctgtgctgaagcagctgatgaaggtggaccctgcccaccgcatcacagccaaggagctgctggacaaccagtggctgaccagcacagcctatgagaagcagtttcctgccaccagcaaggacaactttgacatgtgcagcagcagcttcaccagcagcaagctgctgcctgctgagatcaagggggagatggagaagacccctgtgacccccagccagggcacagccaccaagtacccagccaagagcggggccctgagcaggaccaagaagaagctgtag

SEQ ID NO: 312755 - DNA, 192 bp, Artificial Sequence
  derived and/or modified sequence
atggctgacagcggcctggacaagaagagcaccaagtgcccagactgcagcagcgccagccagaaggatgtgctgtgtgtgtgcagcagcaagaccagggtgccccctgtgctggtggtggagatgagccagaccagcagcatcggcagcgctgagagcctcatcagcctggagaggaagaaggagaagtag

SEQ ID NO: 312756 - DNA, 114 bp, Artificial Sequence
  derived and/or modified sequence
atggctgacagcggcctggacaagaagagcaccaagtgcccagactgcagcagcgccagccagaaggatgtgctgtgtgtgtgcagcagcaagaccagggtgccccctgtgtag

SEQ ID NO: 312757 - DNA, 516 bp, Artificial Sequence
  derived and/or modified sequence
atggctgacagcggcctggacaagaagagcaccaagtgcccagactgcagcagcgccagccagaaggatgtgctgtgtgtgtgcagcagcaagaccagggtgccccctgtgctggtggtggagatgagccagaccagcagcatcggcagcgctgagagcctcatcagcctggagaggaagaaggagaagaacatcaacagagacatcaccagcaggaaggacctgcccagcaggaccagcaatgtggagaggaaggccagccagcagcagtggggccggggcaacttcacagagggcaaggtgccccacatcagaattgaaaatggagctgccatcgaggagatctacaccttcggccgcatcctgggcaagggcagctttggaattgtgattgaggccacagacaaggagacagagaccaagtgggccatcaagaaggtgaacaaggagaaggccggcagcagcgctgtgaagctgctggagcgggaggtgaacatcctgaagtctgtgaagtag

SEQ ID NO: 312758 - DNA, 90 bp, Artificial Sequence
  derived and/or modified sequence
atggctgacagcggcctggacaagaagagcaccaagtgcccagactgcagcagcgccagccagaaggatgtgctgtgtgtgtgcagctag

SEQ ID NO: 312759 - DNA, 1347 bp, Artificial Sequence
  derived and/or modified sequence
atggccgacagcggcctggacaagaagagcaccaagtgccccgactgttctagcgctagtcagaaggacgtgttgtgcgtttgcagctcaaaaacccgagtgcctcctgttctcgtggtcgagatgtctcaaaccagctccatcggcagtgctgagtcgctgatcagtctggagagaaagaaagaaaaaaacattaacagggacataacaagccgaaaggaccttccaagcaggactagcaacgtggagcgcaaggctagtcaacagcagtggggacgtggcaacttcaccgaggggaaggtcccccacatcaggattgagaacggcgccgcaatagaagagatttatacattcgggcgaattctaggtaagggaagcttcggcatcgtgattgaggccaccgataaggagacggagaccaagtgggccataaaaaaagttaacaaagaaaaggctggatcatctgcagtaaagctgctcgagcgcgaggtaaatattctcaagtctgtcaagcatgagcacatcatccatctggagcaggtcttcgagaccccaaagaaaatgtatttggtgatggagttatgcgaagatggggagctgaaggagatcctcgacagaaagggtcatttcagcgagaacgagactagatggatcatccagtcactggcttcggcgatcgcctacttgcataacaacgacatcgtgcaccgcgatctcaaactggaaaatattatggttaaaagctcgctgatcgacgataacaatgagataaacctcaacattaaggtgaccgactttggtcttgctgtcaagaaacagagcagaagtgaagctatgttgcaagcaacttgtggaacaccgatctacatggcacccgaggtcatctctgcacacgattactcacaacagtgtgacatctggagtatcggagtggtaatgtatatgcttttgaggggagagcctccttttctggcttcctccgaggaaaagctatttgagctgattagaaaaggagagctccacttcgaaaatgccgtctggaatagcatcagcgactgtgcaaaatccgtgctcaagcaactcatgaaagtcgatccagcacatcggattacagcaaaggagctactcgataaccaatggctcacaagcacagcctacgaaaagcagttccccgcaacctcaaaggataatttcgatatgtgttcatcatcgttcacctcttctaagctgctgccggccgaaatcaagggggaaatggagaagacccctgtgacacccagtcaggggaccgccacaaagtacccggctaagagcggggccctgtcacgtacaaagaagaaactttag

SEQ ID NO: 312760 - DNA, 192 bp, Artificial Sequence
  derived and/or modified sequence
atggccgacagcggcctggacaagaagagcaccaagtgccccgactgctcctccgcttcccaaaaggatgtgctgtgcgtgtgttcatcaaagactcgcgtgcctccagttctcgtggtggagatgtcacaaacttcctccattggatcggcagaatcccttatctctttggaacgcaagaaggaaaagtag

SEQ ID NO: 312761 - DNA, 114 bp, Artificial Sequence
  derived and/or modified sequence
atggccgacagcggcctggacaagaagagcaccaagtgccccgactgctctagcgctagccaaaaggatgtgctgtgtgtttgtagtagcaagacaagagtgccccctgtgtag

SEQ ID NO: 312762 - DNA, 516 bp, Artificial Sequence
  derived and/or modified sequence
atggccgacagcggcctggacaagaagagcaccaagtgccccgactgctcctctgcctcccagaaggacgttctatgtgtgtgcagctctaagacccgcgttcccccggtgctggtggtcgagatgtcccagacctcctcaattggcagtgcggagtcgcttatttctctggaaagaaaaaaggagaagaatattaaccgagacatcaccagcagaaaggatctcccaagtaggacgtccaacgttgagcgaaaggcaagccaacagcagtggggccgtggcaattttactgaaggaaaggtgcctcacattcggattgagaatggggccgcaatcgaggagatatatactttcggccggatattgggcaaaggctcttttggcatcgtcattgaggccaccgataaggaaaccgagaccaaatgggcaataaagaaggtcaataaggaaaaggctgggagtagcgccgttaagctgctagagagagaggtgaatatcctaaagtccgtgaagtag

SEQ ID NO: 312763 - DNA, 90 bp, Artificial Sequence
  derived and/or modified sequence
atggccgacagcggcctggacaagaagagcaccaagtgccccgactgtagcagcgcatcccaaaaagatgtgctgtgtgtgtgcagctag

SEQ ID NO: 312764 - DNA, 1347 bp, Artificial Sequence
  derived and/or modified sequence
atggctgatagtggtctagataagaaatccactaaatgccccgattgctccagtgcttcccaaaaggacgtgttgtgtgtctgttccagtaaaacaagagtgcccccagtactcgtggtagaaatgagccaaacctcctctattggtagtgccgagagtcttatatccttggaaaggaagaaagagaagaatatcaatagagatataacttctcgtaaggacctcccatctcgcacctcgaatgtcgagagaaaagcaagccagcaacagtggggtagaggtaatttcactgagggaaaggtcccacatattcggatagagaatggggcagccattgaggagatctacacatttggtaggatactcgggaaaggctctttcgggatcgttattgaggcaaccgacaaagagacggagactaagtgggctatcaaaaaggtgaataaggagaaggctggctcgagcgcagttaagttgctcgaaagagaggtcaatatcctcaagtctgtaaaacacgagcacattatacatctcgaacaggtttttgagactcctaaaaagatgtacctggtgatggaactgtgtgaggatggagagctgaaggaaattttagacagaaagggacactttagcgagaatgagactcgatggatcatccaatcccttgcctctgccatagcataccttcacaacaatgacatcgtacaccgagaccttaaactggagaatatcatggttaagagttcccttatcgatgataataacgaaatcaacttgaatattaaggtgacagattttgggctggccgtcaagaaacagtcccgctctgaagcaatgctccaggcgacatgcggcactcccatttacatggcacctgaggtcatctccgcacatgactactcacagcaatgtgacatctggtccattggggttgtcatgtacatgctgctcaggggcgaacctcccttcctcgcctcctctgaggaaaaactcttcgagcttataagaaagggtgagctccacttcgagaacgctgtttggaactctatctccgactgtgctaagagcgtgttgaagcagctgatgaaggttgacccggctcataggataactgcgaaggaacttttagataaccagtggcttacaagtacggcctacgagaaacagtttccagccactagtaaggataacttcgatatgtgttcttctagttttacctcaagtaagctgctgccggcagaaattaaaggagaaatggagaagacaccggtcaccccaagccaaggcacagctactaaataccccgcaaagtcgggagcactgagtcggaccaagaagaaattgtag

SEQ ID NO: 312765 - DNA, 192 bp, Artificial Sequence
  derived and/or modified sequence
atggccgactctggactggataagaagtcaaccaagtgtcccgattgcagttcagcttctcagaaggacgtactctgtgtatgctctagtaagactcgtgtccctcccgttctggtagtggaaatgtcacagacatcctcgataggttccgccgagagcctcatctctctagagagaaagaaagagaagtag

SEQ ID NO: 312766 - DNA, 114 bp, Artificial Sequence
  derived and/or modified sequence
atggccgattccggcttagataagaagtcaactaagtgcccagactgtagcagcgcttctcagaaggacgtgttgtgtgtctgctctagcaaaacaagggttccaccagtgtag

SEQ ID NO: 312767 - DNA, 516 bp, Artificial Sequence
  derived and/or modified sequence
atggcagatagcggcttggataagaagtctaccaagtgtcctgattgtagttctgcatcacagaaggacgtcctgtgcgtttgcagcagcaagaccagggtccccccagtacttgtcgttgaaatgtcacagacatcttcaataggatccgctgagagcctcatctcactggagcgcaaaaaagagaagaacatcaacagagacatcaccagcagaaaagacctgcctagtcgaaccagcaatgttgagcgtaaggcctcacaacagcagtggggtcgtggcaattttactgaaggaaaagtgccccacatacggatagagaacggcgcagccatagaggaaatttatacattcggtcgcatactggggaagggttcgttcggaatagtaatagaggctacagacaaggagacagaaactaagtgggccatcaaaaaagtaaataaagagaaagccggttcgtccgctgttaaactgctggaacgggaagttaacatcctgaaaagtgtaaagtag

SEQ ID NO: 312768 - DNA, 90 bp, Artificial Sequence
  derived and/or modified sequence
atggccgattcaggattggataagaaaagcactaagtgtccagactgctcgagtgctagtcagaaagatgtgttatgtgtttgcagctag

SEQ ID NO: 312769 - DNA, 2509 bp, Artificial Sequence
  derived and/or modified sequence
gccggccggctggtaaccccccagcggagggaccgggccgagcccgcggacccctccgagtgtctcctggggcccagccgttggtaccccatttcccccgggtccggtatttggggtggtctctgtctgccccggttcatctccaccgtctcaccttcaccccatcttgggacgtgaaactttttgaaagtttagaagcgaacttactgtggggaccttcctctggggttagttctctggtgccaccttcagtgatctgtgtggcagctctgctgctcacttctggctttactgggttttggtatttaactgttgcttacgcacactggaaattttcacctgcagtttttcttctgcctaagctctcacgtgtgaatatgtgtctagtgcatccttaacctgaggacttcaccagttcgaaattacagttttcaccatcaactaccttatcctttttggcctggttttcttcctcaaacagtggaaacatttttaaagttgcttttgttgcagagttaaacaaatggctgatagtggcttagataaaaaatccacaaaatgccccgactgttcatctgcttctcagaaagatgtactttgtgtatgttccagcaaaacaagggttcctccagttttggtggtggaaatgtcacagacatcaagcattggtagtgcagaatctttaatttcactggagagaaaaaaagaaaaaaatatcaacagagatataacctccaggaaagatttgccctcaagaacctcaaatgtagagagaaaagcatctcagcaacaatggggtcggggcaactttacagaaggaaaagttcctcacataaggattgagaatggagctgctattgaggaaatctatacctttggaagaatattgggaaaagggagctttggaatagtcattgaagcgacagacaaggaaacagaaacgaagtgggcaattaaaaaagtgaacaaagaaaaggctggaagctctgctgtgaagttacttgaacgagaggtgaacattctgaaaagtgtaaaacatgaacacatcatacatctggaacaagtatttgaaacgccaaagaaaatgtaccttgtgatggagctttgtgaggatggagaactcaaagaaattctggataggaaagggcatttctcagagaatgagacaaggtggatcattcaaagtctcgcatcagctatagcatatcttcacaataatgatattgtacatagagatctgaaactggaaaatataatggttaaaagcagtcttattgatgataacaatgaaataaacttaaacataaaggtgactgattttggcttagcggtgaagaagcaaagtaggagtgaagccatgctgcaggccacatgtgggactcctatctatatggcccctgaagttatcagtgcccacgactatagccagcagtgtgacatttggagcataggcgtcgtaatgtacatgttattacgtggagaaccaccctttttggcaagctcagaagagaagctttttgagttaataagaaaaggagaactacattttgaaaatgcagtctggaattccataagtgactgtgctaaaagtgttttgaaacaacttatgaaagtagatcctgctcacagaatcacagctaaggaactactagataaccagtggttaacatctactgcttatgaaaagcaatttcctgcaaccagtaaggacaactttgatatgtgcagttcaagtttcacatctagcaaactccttccagctgaaatcaagggagaaatggagaaaacccctgtgactccaagccaaggaacagcaaccaagtaccctgctaaatccggcgccctgtccagaaccaaaaagaaactctaaggttccctccagtgttggacagtacaaaaacaaagctgctcttgttagcactttgatgagggggtaggaggggaagaagacagccctatgctgagcttgtagccttttagctccacagagccccgccatgtgtttgcaccagcttaaaattgaagctgcttatctccaaagcagcataagctgcacatggcattaaaggacagccaccagtaggcttggcagtgggctgcagtggaaatcaactcaagatgtacacgaaggttttttaggggggcagataccttcaatttaaggctgtgggcacacttgctcatttttacttcaaattcttatgtttaggcacagctatttataggggaaaacaagaggccaaatatagtaatggaggtgccaaataattatgtgcactttgcactagaagactttgttagaaaattactaataaacttgccatacgtattacagcagaagtgcttcagtcattcacatgtgttcgtgagattttaggttgctatagattgtttaagacagcttattttaaatgtagaaaaataggagattttgtaactgcttgccattaacttgctgctaaattcccaatgtattgattaaatcaataaaaaacagatgttactcagc

SEQ ID NO: 312770 - DNA, 758 bp, Artificial Sequence
  derived and/or modified sequence
tgggtatctcgctgccggccggctggtaaccccccagcggagggaccgggccgagcccgcggacccctccgagtgtctcctggggcccagccgttggtaccccatttcccccgggtccggtatttggggtggtctctgtctgccccggttcatctccaccgtctcaccttcaccccatcttgggacgtgaaactttttgaaagtttagaagcgaacttactgtggggcagggccactacttctcagcacatccggccttctggctcatctcctccctgcatctcactacgcccctccccactccagggcctgaagttaaatcattttggaaagtgatacaggagaggactctgctatgaaacttcctgagtgaaatgataagtggcatgaagaaaaacaaagcaagctctcacgtgtgaatatgtgtctagtgcatccttaacctgaggacttcaccagttcgaaattacagttttcaccatcaactaccttatcctttttggcctggttttcttcctcaaacagtggaaacatttttaaagttgcttttgttgcagagttaaacaaatggctgatagtggcttagataaaaaatccacaaaatgccccgactgttcatctgcttctcagaaagatgtactttgtgtatgttccagcaaaacaagggttcctccagttttggtggtggaaatgtcacagacatcaagcattggtagtgcagaatctttaatttcactggagagaaaaaaagaaaaaaa

SEQ ID NO: 312771 - DNA, 562 bp, Artificial Sequence
  derived and/or modified sequence
gtgcagccggcacctcccggccaaccccgcggcttggagaaggggctttgcacccgccgccgctgtttgtcctcgcgcggcccccgtccactgccctgcggttgctctgcgggctgaaaagtttctcccggtgcagaattccgggctcagcgacagcctgcgccgagtgtgcgcacctgtcggagacccgccagtccgccggccgcggcagggccactacttctcagcacatccggccttctggctcatctcctccctgcatctcactacgcccctccccactccaggctctcacgtgtgaatatgtgtctagtgcatccttaacctgaggacttcaccagttcgaaattacagttttcaccatcaactaccttatcctttttggcctggttttcttcctcaaacagtggaaacatttttaaagttgcttttgttgcagagttaaacaaatggctgatagtggcttagataaaaaatccacaaaatgccccgactgttcatctgcttctcagaaagatgtactttgtgtatgttccagcaaaacaagggttcctccagtttt

SEQ ID NO: 312772 - DNA, 709 bp, Artificial Sequence
  derived and/or modified sequence
gcctgaagttaaatcattttggaaagtgatacagctctcacgtgtgaatatgtgtctagtgcatccttaacctgaggacttcaccagttcgaaattacagttttcaccatcaactaccttatcctttttggcctggttttcttcctcaaacagtggaaacatttttaaagttgcttttgttgcagagttaaacaaatggctgatagtggcttagataaaaaatccacaaaatgccccgactgttcatctgcttctcagaaagatgtactttgtgtatgttccagcaaaacaagggttcctccagttttggtggtggaaatgtcacagacatcaagcattggtagtgcagaatctttaatttcactggagagaaaaaaagaaaaaaatatcaacagagatataacctccaggaaagatttgccctcaagaacctcaaatgtagagagaaaagcatctcagcaacaatggggtcggggcaactttacagaaggaaaagttcctcacataaggattgagaatggagctgctattgaggaaatctatacctttggaagaatattgggaaaagggagctttggaatagtcattgaagcgacagacaaggaaacagaaacgaagtgggcaattaaaaaagtgaacaaagaaaaggctggaagctctgctgtgaagttacttgaacgagaggtgaacattctgaaaagtgtaaaac

SEQ ID NO: 312773 - DNA, 582 bp, Artificial Sequence
  derived and/or modified sequence
acacaggagggatgggtcggcagagtttgtaagtttggatgggtaataacttaacccaggggattgttggtggaggaacgagggagtcctgtagctagagataggcagaagcagacaggatatttgggttctaggtaagcaaggtgcatctaagacctaagaagtcttcagaggcagcagagacgaacaaatgaacgtgaaggcagggccactacttctcagcacatccggccttctggctcatctcctccctgcatctcactacgcccctccccactccagggtaaattccaataatgctgctctgttccagatggagttcatgttgactgagctctcacgtgtgaatatgtgtctagtgcatccttaacctgaggacttcaccagttcgaaattacagttttcaccatcaactaccttatcctttttggcctggttttcttcctcaaacagtggaaacatttttaaagttgcttttgttgcagagttaaacaaatggctgatagtggcttagataaaaaatccacaaaatgccccgactgttcatctgcttctcagaaagatgtactttgtgtatgttcc

SEQ ID NO: 312774 - DNA, 1347 bp, Artificial Sequence
  derived and/or modified sequence
atggccgacagcggcctggacaagaagagcaccaagtgccccgactgcagcagcgccagccagaaggacgtgctgtgcgtgtgcagcagcaagaccagagtgccccccgtgctggtggtggagatgagccagaccagcagcatcggcagcgccgagagcctgatcagcctggagagaaagaaggagaagaacatcaacagagacatcaccagcagaaaggacctgcccagcagaaccagcaacgtggagagaaaggccagccagcagcagtggggcagaggcaacttcaccgagggcaaggtgccccacatcagaatcgagaacggcgccgccatcgaggagatctacaccttcggcagaatcctgggcaagggcagcttcggcatcgtgatcgaggccaccgacaaggagaccgagaccaagtgggccatcaagaaggtgaacaaggagaaggccggcagcagcgccgtgaagctgctggagagagaggtgaacatcctgaagagcgtgaagcacgagcacatcatccacctggagcaggtgttcgagacccccaagaagatgtacctggtgatggagctgtgcgaggacggcgagctgaaggagatcctggacagaaagggccacttcagcgagaacgagaccagatggatcatccagagcctggccagcgccatcgcctacctgcacaacaacgacatcgtgcacagagacctgaagctggagaacatcatggtgaagagcagcctgatcgacgacaacaacgagatcaacctgaacatcaaggtgaccgacttcggcctggccgtgaagaagcagagcagaagcgaggccatgctgcaggccacctgcggcacccccatctacatggcccccgaggtgatcagcgcccacgactacagccagcagtgcgacatctggagcatcggcgtggtgatgtacatgctgctgagaggcgagccccccttcctggccagcagcgaggagaagctgttcgagctgatcagaaagggcgagctgcacttcgagaacgccgtgtggaacagcatcagcgactgcgccaagagcgtgctgaagcagctgatgaaggtggaccccgcccacagaatcaccgccaaggagctgctggacaaccagtggctgaccagcaccgcctacgagaagcagttccccgccaccagcaaggacaacttcgacatgtgcagcagcagcttcaccagcagcaagctgctgcccgccgagatcaagggcgagatggagaagacccccgtgacccccagccagggcaccgccaccaagtaccccgccaagagcggcgccctgagcagaaccaagaagaagctgtag

SEQ ID NO: 312775 - DNA, 192 bp, Artificial Sequence
  derived and/or modified sequence
atggccgacagcggcctggacaagaagagcaccaagtgccccgactgcagcagcgccagccagaaggacgtgctgtgcgtgtgcagcagcaagaccagagtgccccccgtgctggtggtggagatgagccagaccagcagcatcggcagcgccgagagcctgatcagcctggagagaaagaaggagaagtag

SEQ ID NO: 312776 - DNA, 114 bp, Artificial Sequence
  derived and/or modified sequence
atggccgacagcggcctggacaagaagagcaccaagtgccccgactgcagcagcgccagccagaaggacgtgctgtgcgtgtgcagcagcaagaccagagtgccccccgtgtag

SEQ ID NO: 312777 - DNA, 516 bp, Artificial Sequence
  derived and/or modified sequence
atggccgacagcggcctggacaagaagagcaccaagtgccccgactgcagcagcgccagccagaaggacgtgctgtgcgtgtgcagcagcaagaccagagtgccccccgtgctggtggtggagatgagccagaccagcagcatcggcagcgccgagagcctgatcagcctggagagaaagaaggagaagaacatcaacagagacatcaccagcagaaaggacctgcccagcagaaccagcaacgtggagagaaaggccagccagcagcagtggggcagaggcaacttcaccgagggcaaggtgccccacatcagaatcgagaacggcgccgccatcgaggagatctacaccttcggcagaatcctgggcaagggcagcttcggcatcgtgatcgaggccaccgacaaggagaccgagaccaagtgggccatcaagaaggtgaacaaggagaaggccggcagcagcgccgtgaagctgctggagagagaggtgaacatcctgaagagcgtgaagtag

SEQ ID NO: 312778 - DNA, 90 bp, Artificial Sequence
  derived and/or modified sequence
atggccgacagcggcctggacaagaagagcaccaagtgccccgactgcagcagcgccagccagaaggacgtgctgtgcgtgtgcagctag

SEQ ID NO: 312779 - protein, 587 aa, Artificial Sequence
  derived and/or modified sequence
MPRYGASLRQSCPRSGREQGQDGTAGAPGLLWMGLVLALALALALALALSDSRVLWAPAEAHPLSPQGHPARLHRIVPRLRDVFGWGNLTCPICKGLFTAINLGLKKEPNVARVGSVAIKLCNLLKIAPPAVCQSIVHLFEDDMVEVWRRSVLSPSEACGLLLGSTCGHWDIFSSWNISLPTVPKPPPKPPSPPAPGAPVSRILFLTDLHWDHDYLEGTDPDCADPLCCRRGSGLPPASRPGAGYWGEYSKCDLPLRTLESLLSGLGPAGPFDMVYWTGDIPAHDVWHQTRQDQLRALTTVTALVRKFLGPVPVYPAVGNHESTPVNSFPPPFIEGNHSSRWLYEAMAKAWEPWLPAEALRTLRYLSSVETQEGKRKVHIIGHIPPGHCLKSWSWNYYRIVARYENTLAAQFFGHTHVDEFEVFYDEETLSRPLAVAFLAPSATTYIGLNPGYRVYQIDGNYSGSSHVVLDHETYILNLTQANIPGAIPHWQLLYRARETYGLPNTLPTAWHNLVYRMRGDMQLFQTFWFLYHKGHPPSEPCGTPCRLATLCAQLSARADSPALCRHLMPDGSLPEAQSLWPRPLFC

SEQ ID NO: 312780 - protein, 575 aa, Artificial Sequence
  derived and/or modified sequence
MPRYGASLRQSCPRSGREQGQDGTAGAPGLLWMGLVLALALALALALALSDSRVLWAPAEAHPLSPQGHPARLHRIVPRLRDVFGWGNLTCPICKGLFTAINLGLKKEPNVARVGSVAIKLCNLLKIAPPAVCQSIVHLFEDDMVEVWRRSVLSPSEACGLLLGSTCGHWDIFSSWNISLPTVPKPPPKPPSPPAPGAPVSRILFLTDLHWDHDYLEGTDPDCADPLCCRRGSGLPPASRPGAGYWGEYSKCDLPLRTLESLLSGLGPAGPFDMVYWTGDIPAHDVWHQTRQDQLRALTTVTALVRKFLGPVPVYPAVGNHESTPVNSFPPPFIEGNHSSRWLYEAMAKAWEPWLPAEALRTLRKVHIIGHIPPGHCLKSWSWNYYRIVARYENTLAAQFFGHTHVDEFEVFYDEETLSRPLAVAFLAPSATTYIGLNPGYRVYQIDGNYSGSSHVVLDHETYILNLTQANIPGAIPHWQLLYRARETYGLPNTLPTAWHNLVYRMRGDMQLFQTFWFLYHKGHPPSEPCGTPCRLATLCAQLSARADSPALCRHLMPDGSLPEAQSLWPRPLFC

SEQ ID NO: 312781 - DNA, 1761 bp, Artificial Sequence
  derived and/or modified sequence
atgccccgctacggcgccagcctgcgccagagctgcccccgcagcggccgcgagcagggccaggacggcaccgccggcgcccccggcctgctgtggatgggcctggtgctggccctggccctggccctggccctggccctggccctgagcgacagccgcgtgctgtgggcccccgccgaggcccaccccctgagcccccagggccaccccgcccgcctgcaccgcatcgtgccccgcctgcgcgacgtgttcggctggggcaacctgacctgccccatctgcaagggcctgttcaccgccatcaacctgggcctgaagaaggagcccaacgtggcccgcgtgggcagcgtggccatcaagctgtgcaacctgctgaagatcgccccccccgccgtgtgccagagcatcgtgcacctgttcgaggacgacatggtggaggtgtggcgccgcagcgtgctgagccccagcgaggcctgcggcctgctgctgggcagcacctgcggccactgggacatcttcagcagctggaacatcagcctgcccaccgtgcccaagcccccccccaagccccccagcccccccgcccccggcgcccccgtgagccgcatcctgttcctgaccgacctgcactgggaccacgactacctggagggcaccgaccccgactgcgccgaccccctgtgctgccgccgcggcagcggcctgccccccgccagccgccccggcgccggctactggggcgagtacagcaagtgcgacctgcccctgcgcaccctggagagcctgctgagcggcctgggccccgccggccccttcgacatggtgtactggaccggcgacatccccgcccacgacgtgtggcaccagacccgccaggaccagctgcgcgccctgaccaccgtgaccgccctggtgcgcaagttcctgggccccgtgcccgtgtaccccgccgtgggcaaccacgagagcacccccgtgaacagcttccccccccccttcatcgagggcaaccacagcagccgctggctgtacgaggccatggccaaggcctgggagccctggctgcccgccgaggccctgcgcaccctgcgctacctgagcagcgtggagacccaggagggcaagcgcaaggtgcacatcatcggccacatcccccccggccactgcctgaagagctggagctggaactactaccgcatcgtggcccgctacgagaacaccctggccgcccagttcttcggccacacccacgtggacgagttcgaggtgttctacgacgaggagaccctgagccgccccctggccgtggccttcctggcccccagcgccaccacctacatcggcctgaaccccggctaccgcgtgtaccagatcgacggcaactacagcggcagcagccacgtggtgctggaccacgagacctacatcctgaacctgacccaggccaacatccccggcgccatcccccactggcagctgctgtaccgcgcccgcgagacctacggcctgcccaacaccctgcccaccgcctggcacaacctggtgtaccgcatgcgcggcgacatgcagctgttccagaccttctggttcctgtaccacaagggccacccccccagcgagccctgcggcaccccctgccgcctggccaccctgtgcgcccagctgagcgcccgcgccgacagccccgccctgtgccgccacctgatgcccgacggcagcctgcccgaggcccagagcctgtggccccgccccctgttctgc

SEQ ID NO: 312782 - DNA, 1725 bp, Artificial Sequence
  derived and/or modified sequence
atgccccgctacggcgccagcctgcgccagagctgcccccgcagcggccgcgagcagggccaggacggcaccgccggcgcccccggcctgctgtggatgggcctggtgctggccctggccctggccctggccctggccctggccctgagcgacagccgcgtgctgtgggcccccgccgaggcccaccccctgagcccccagggccaccccgcccgcctgcaccgcatcgtgccccgcctgcgcgacgtgttcggctggggcaacctgacctgccccatctgcaagggcctgttcaccgccatcaacctgggcctgaagaaggagcccaacgtggcccgcgtgggcagcgtggccatcaagctgtgcaacctgctgaagatcgccccccccgccgtgtgccagagcatcgtgcacctgttcgaggacgacatggtggaggtgtggcgccgcagcgtgctgagccccagcgaggcctgcggcctgctgctgggcagcacctgcggccactgggacatcttcagcagctggaacatcagcctgcccaccgtgcccaagcccccccccaagccccccagcccccccgcccccggcgcccccgtgagccgcatcctgttcctgaccgacctgcactgggaccacgactacctggagggcaccgaccccgactgcgccgaccccctgtgctgccgccgcggcagcggcctgccccccgccagccgccccggcgccggctactggggcgagtacagcaagtgcgacctgcccctgcgcaccctggagagcctgctgagcggcctgggccccgccggccccttcgacatggtgtactggaccggcgacatccccgcccacgacgtgtggcaccagacccgccaggaccagctgcgcgccctgaccaccgtgaccgccctggtgcgcaagttcctgggccccgtgcccgtgtaccccgccgtgggcaaccacgagagcacccccgtgaacagcttccccccccccttcatcgagggcaaccacagcagccgctggctgtacgaggccatggccaaggcctgggagccctggctgcccgccgaggccctgcgcaccctgcgcaaggtgcacatcatcggccacatcccccccggccactgcctgaagagctggagctggaactactaccgcatcgtggcccgctacgagaacaccctggccgcccagttcttcggccacacccacgtggacgagttcgaggtgttctacgacgaggagaccctgagccgccccctggccgtggccttcctggcccccagcgccaccacctacatcggcctgaaccccggctaccgcgtgtaccagatcgacggcaactacagcggcagcagccacgtggtgctggaccacgagacctacatcctgaacctgacccaggccaacatccccggcgccatcccccactggcagctgctgtaccgcgcccgcgagacctacggcctgcccaacaccctgcccaccgcctggcacaacctggtgtaccgcatgcgcggcgacatgcagctgttccagaccttctggttcctgtaccacaagggccacccccccagcgagccctgcggcaccccctgccgcctggccaccctgtgcgcccagctgagcgcccgcgccgacagccccgccctgtgccgccacctgatgcccgacggcagcctgcccgaggcccagagcctgtggccccgccccctgttctgc

SEQ ID NO: 312783 - DNA, 1764 bp, Artificial Sequence
  derived and/or modified sequence
atgcccagatacggcgccagcctgagacagagctgccccagaagcggcagagagcagggccaggacggcaccgccggcgcccccggcctgctgtggatgggcctggtgctggccctggccctggccctggccctggccctggccctgagcgacagcagagtgctgtgggcccccgccgaggcccaccccctgagcccccagggccaccccgccagactgcacagaatcgtgcccagactgagagacgtgttcggctggggcaacctgacctgccccatctgcaagggcctgttcaccgccatcaacctgggcctgaagaaggagcccaacgtggccagagtgggcagcgtggccatcaagctgtgcaacctgctgaagatcgccccccccgccgtgtgccagagcatcgtgcacctgttcgaggacgacatggtggaggtgtggagaagaagcgtgctgagccccagcgaggcctgcggcctgctgctgggcagcacctgcggccactgggacatcttcagcagctggaacatcagcctgcccaccgtgcccaagcccccccccaagccccccagcccccccgcccccggcgcccccgtgagcagaatcctgttcctgaccgacctgcactgggaccacgactacctggagggcaccgaccccgactgcgccgaccccctgtgctgcagaagaggcagcggcctgccccccgccagcagacccggcgccggctactggggcgagtacagcaagtgcgacctgcccctgagaaccctggagagcctgctgagcggcctgggccccgccggccccttcgacatggtgtactggaccggcgacatccccgcccacgacgtgtggcaccagaccagacaggaccagctgagagccctgaccaccgtgaccgccctggtgagaaagttcctgggccccgtgcccgtgtaccccgccgtgggcaaccacgagagcacccccgtgaacagcttccccccccccttcatcgagggcaaccacagcagcagatggctgtacgaggccatggccaaggcctgggagccctggctgcccgccgaggccctgagaaccctgagatacctgagcagcgtggagacccaggagggcaagagaaaggtgcacatcatcggccacatcccccccggccactgcctgaagagctggagctggaactactacagaatcgtggccagatacgagaacaccctggccgcccagttcttcggccacacccacgtggacgagttcgaggtgttctacgacgaggagaccctgagcagacccctggccgtggccttcctggcccccagcgccaccacctacatcggcctgaaccccggctacagagtgtaccagatcgacggcaactacagcggcagcagccacgtggtgctggaccacgagacctacatcctgaacctgacccaggccaacatccccggcgccatcccccactggcagctgctgtacagagccagagagacctacggcctgcccaacaccctgcccaccgcctggcacaacctggtgtacagaatgagaggcgacatgcagctgttccagaccttctggttcctgtaccacaagggccacccccccagcgagccctgcggcaccccctgcagactggccaccctgtgcgcccagctgagcgccagagccgacagccccgccctgtgcagacacctgatgcccgacggcagcctgcccgaggcccagagcctgtggcccagacccctgttctgctag

SEQ ID NO: 312784 - DNA, 1728 bp, Artificial Sequence
  derived and/or modified sequence
atgcccagatacggcgccagcctgagacagagctgccccagaagcggcagagagcagggccaggacggcaccgccggcgcccccggcctgctgtggatgggcctggtgctggccctggccctggccctggccctggccctggccctgagcgacagcagagtgctgtgggcccccgccgaggcccaccccctgagcccccagggccaccccgccagactgcacagaatcgtgcccagactgagagacgtgttcggctggggcaacctgacctgccccatctgcaagggcctgttcaccgccatcaacctgggcctgaagaaggagcccaacgtggccagagtgggcagcgtggccatcaagctgtgcaacctgctgaagatcgccccccccgccgtgtgccagagcatcgtgcacctgttcgaggacgacatggtggaggtgtggagaagaagcgtgctgagccccagcgaggcctgcggcctgctgctgggcagcacctgcggccactgggacatcttcagcagctggaacatcagcctgcccaccgtgcccaagcccccccccaagccccccagcccccccgcccccggcgcccccgtgagcagaatcctgttcctgaccgacctgcactgggaccacgactacctggagggcaccgaccccgactgcgccgaccccctgtgctgcagaagaggcagcggcctgccccccgccagcagacccggcgccggctactggggcgagtacagcaagtgcgacctgcccctgagaaccctggagagcctgctgagcggcctgggccccgccggccccttcgacatggtgtactggaccggcgacatccccgcccacgacgtgtggcaccagaccagacaggaccagctgagagccctgaccaccgtgaccgccctggtgagaaagttcctgggccccgtgcccgtgtaccccgccgtgggcaaccacgagagcacccccgtgaacagcttccccccccccttcatcgagggcaaccacagcagcagatggctgtacgaggccatggccaaggcctgggagccctggctgcccgccgaggccctgagaaccctgagaaaggtgcacatcatcggccacatcccccccggccactgcctgaagagctggagctggaactactacagaatcgtggccagatacgagaacaccctggccgcccagttcttcggccacacccacgtggacgagttcgaggtgttctacgacgaggagaccctgagcagacccctggccgtggccttcctggcccccagcgccaccacctacatcggcctgaaccccggctacagagtgtaccagatcgacggcaactacagcggcagcagccacgtggtgctggaccacgagacctacatcctgaacctgacccaggccaacatccccggcgccatcccccactggcagctgctgtacagagccagagagacctacggcctgcccaacaccctgcccaccgcctggcacaacctggtgtacagaatgagaggcgacatgcagctgttccagaccttctggttcctgtaccacaagggccacccccccagcgagccctgcggcaccccctgcagactggccaccctgtgcgcccagctgagcgccagagccgacagccccgccctgtgcagacacctgatgcccgacggcagcctgcccgaggcccagagcctgtggcccagacccctgttctgctag

SEQ ID NO: 312785 - DNA, 1764 bp, Artificial Sequence
  derived and/or modified sequence
atgcctagatatggtgcaagtttgaggcaaagctgtcccaggtcaggcagggagcaaggccaggatggcacagcaggcgccccaggtctcctatggatgggcctggtgctggcgctggccctggcactggcgctagccctggcactatccgactcgcgagtgttgtgggccccagccgaagcccaccctttaagtccacagggacaccccgcacgtctgcatcggatagtccctcgcctgcgcgatgtgttcggttgggggaacctcacctgcccaatttgcaagggcctgtttaccgcaatcaaccttggtctcaaaaaagagcctaacgtggccagggtaggctcggttgccatcaaactgtgcaaccttctgaagatagctcccccagcagtgtgccagtccatcgtccatttgttcgaggacgacatggtggaggtgtggcgtagatccgtgctctctcccagcgaggcttgcgggctgcttctcggcagtacttgcggccactgggatatattctcgtcgtggaacatctctctccccaccgtgcccaagcctccgccaaagcccccaagcccacctgcgcctggagcccccgtgagtagaattttattcctgactgatctgcattgggatcacgattacctcgaggggaccgaccccgactgtgctgaccccctgtgttgtaggcggggatccggactgccccccgcatctaggccaggcgctggctactggggagaatacagtaagtgcgacttgccacttcgcaccttggaatcactgctctctggacttggccccgccggaccgttcgatatggtttactggactggagatatcccggctcatgacgtctggcatcagactaggcaggatcagctgcgtgccctgaccaccgtgactgctctggttaggaaattccttggacccgtgcccgtgtaccctgccgtcgggaatcacgagtcaactcccgtcaattccttcccgccgcccttcatagaggggaaccatagcagtcgctggctctacgaggcaatggcaaaagcttgggagccttggctcccagctgaagcactcaggacacttcgatatctttccagtgtggagacacaggaggggaaaaggaaggtccacattatcggtcacatcccaccgggccactgcctcaagtcctggtcctggaactactataggatcgtggcgaggtatgaaaataccctcgcagcccagttcttcggacacacacacgtggatgagtttgaggtgttttatgacgaagagacattgagccgcccactcgcggtggctttccttgccccatcagccacgacgtacatcgggctaaatcctggctaccgtgtttatcaaatcgatggcaactactccggatcttcacatgtggtgcttgatcacgagacttatattttgaacttgacccaggcaaatatcccaggcgcaattccgcattggcagttactgtatcgggctcgggagacgtacggacttccaaatacgctgcctaccgcttggcataacctcgtgtataggatgcgtggcgatatgcagctgttccagacattttggtttctgtatcacaaaggtcatcccccgagtgagccctgcggcaccccttgtcgccttgcgacactgtgcgcccaattgagcgcacgagcagattctccagctctgtgtcgccatttgatgccggatggatccctcccggaggcacagtctctgtggcctcgccccctgttctgctag

SEQ ID NO: 312786 - DNA, 1728 bp, Artificial Sequence
  derived and/or modified sequence
atgccaagatacggcgcatccttgcgccagtcctgtcctcgttcgggcagagaacagggccaggacggaacagccggggcgcctggcttattatggatgggccttgtgttagcactagctttggctctcgcgctcgcccttgcactttctgacagtcgcgtcctgtgggcacccgctgaggcacaccccctctctccacagggacaccctgcacgcctgcatcggattgtgccaaggctgcgggatgtcttcggctgggggaacttaacgtgcccgatctgtaaaggcctgttcaccgccattaatcttggcctgaaaaaggaacctaatgtggcacgtgtgggcagcgtagccattaagctttgtaatctactcaaaatcgctccgcctgccgtttgccagagcatcgttcatttatttgaggatgacatggtcgaagtctggcgaagaagcgtgctgtctccgagtgaggcttgtgggctgctcctggggagtacatgcggtcattgggacatcttttccagctggaatatctccctgccgacggttccgaagcctccgcccaagcccccgtccccaccggcccccggggcgcctgtctcacgcatcttatttctgacagacctccactgggatcatgattacctcgaagggaccgacccagattgcgcggacccactgtgttgtcggcgaggctcaggtttacctcctgcatctcgtcccggtgcaggttactggggtgagtacagtaaatgtgacctgcctttgcgcacgctggagtccctcttgagtggcctgggcccagccggcccttttgatatggtgtattggactggggacattcccgctcacgacgtgtggcaccagacgcggcaggatcaactcagagctcttactactgtcacagcgctagttcgtaaattcctgggacccgtcccagtctaccccgcggtgggtaatcatgaatcaaccccggtgaattcattcccccctcctttcatcgaaggcaatcattcgagtcgctggctgtatgaagcaatggccaaggcatgggagccctggcttcccgcagaagcactgcgcacactgagaaaggtgcatatcatcggccatatccctccgggacattgtctgaagtcatggagttggaattactatagaatcgtggctagatacgaaaacacactggccgcccagtttttcggtcacacacatgttgatgagtttgaagtcttttacgatgaagagaccctgagccggcccctggccgtggccttccttgctccttctgccacgacctatatcggcttgaatcctggatacagagtttaccagatcgatggtaactactctggctcctcccacgtggtactcgaccacgagacatacatcctcaacttaacacaggccaacattcccggagccattccacactggcaattactctaccgagcacgggaaacttacgggctccctaataccctcccaaccgcctggcacaacctcgtctatagaatgagaggcgatatgcagttatttcagacgttttggtttctgtaccacaaaggtcatcctcctagtgagccctgtgggacaccatgcagactcgcaaccttatgcgcacagcttagcgcccgcgcagactcgccggccctgtgccgacacctcatgccagacgggtccctgcctgaagcacagagtctttggccccgtcccctgttttgttag

SEQ ID NO: 312787 - DNA, 1764 bp, Artificial Sequence
  derived and/or modified sequence
atgccccgctacggggccagcctgcggcagagctgccccaggagcggccgggagcagggccaggacggcacagctggggcccctggcctgctgtggatgggcctggtgctggccctggccctggccctggccctggccctggccctgagtgacagccgggtgctgtgggccccagctgaggcccaccccctgagcccccagggccacccagcccggctgcaccgcatcgtgccccggctgagagatgtgtttggctggggcaacctgacctgccccatctgcaagggcctcttcaccgccatcaacctgggcctgaagaaggagcccaacgtggcccgggtgggctctgtggccatcaagctgtgcaacctgctgaagatcgcccctcctgctgtgtgccagagcatcgtgcacctgtttgaagatgacatggtggaggtgtggaggagatctgtgctgagccccagcgaggcctgtggcctgctgctgggcagcacctgtggccactgggacatcttcagctcctggaacatcagcctgcccaccgtgcccaagcccccacccaagccacccagccccccagcccctggggcccctgtgagccgcatcctcttcctgacagacctgcactgggaccatgactacctggagggcacagatcctgactgtgccgaccccctgtgctgccggcggggcagcggcctgcccccagccagcaggcctggagctggctactggggcgagtacagcaaatgtgacctgcccctgcggaccctggagagcctgctgagcggcctgggccctgctggcccctttgacatggtgtactggacaggagacatcccagcccatgatgtgtggcaccagacccggcaggaccagctgcgggccctgaccaccgtgacagccctggtgaggaagttcctgggccctgtgcctgtgtacccagctgtgggcaaccacgagagcacccctgtgaacagcttccccccacccttcatcgagggcaaccacagcagccgctggctgtatgaggccatggccaaggcctgggagccctggctgcctgctgaggccctgcggaccctgcgctacctgagctctgtggagacccaggagggcaagaggaaggtgcacatcatcggccacatccccccaggccactgcctgaagtcctggagctggaactactaccgcatcgtggcccgctatgagaacaccctggccgcccagttcttcggccacacccacgtggatgaatttgaggtgttctatgatgaggagaccctgagccggcccctggccgtggccttcctggcccccagcgccaccacctacatcggcctgaaccctggctacagagtgtaccagattgatggcaactacagcggcagcagccacgtggtgctggaccacgagacctacatcctgaacctgacccaggccaacatccctggggccatcccccactggcagctgctgtaccgggcccgggagacctacggcctgcccaacaccctgcccacagcctggcacaacctggtgtacaggatgagaggagacatgcagctgttccagaccttctggttcctgtaccacaagggccaccccccatctgagccctgtggcaccccctgccgcctggccaccctgtgtgcccagctgagcgcccgggctgacagccctgccctgtgccgccacctgatgccagatggcagcctgcctgaggcccagagcctgtggccccggcccctcttctgctag

SEQ ID NO: 312788 - DNA, 1728 bp, Artificial Sequence
  derived and/or modified sequence
atgccccgctacggggccagcctgcggcagagctgccccaggagcggccgggagcagggccaggacggcacagctggggcccctggcctgctgtggatgggcctggtgctggccctggccctggccctggccctggccctggccctgagtgacagccgggtgctgtgggccccagctgaggcccaccccctgagcccccagggccacccagcccggctgcaccgcatcgtgccccggctgagagatgtgtttggctggggcaacctgacctgccccatctgcaagggcctcttcaccgccatcaacctgggcctgaagaaggagcccaacgtggcccgggtgggctctgtggccatcaagctgtgcaacctgctgaagatcgcccctcctgctgtgtgccagagcatcgtgcacctgtttgaagatgacatggtggaggtgtggaggagatctgtgctgagccccagcgaggcctgtggcctgctgctgggcagcacctgtggccactgggacatcttcagctcctggaacatcagcctgcccaccgtgcccaagcccccacccaagccacccagccccccagcccctggggcccctgtgagccgcatcctcttcctgacagacctgcactgggaccatgactacctggagggcacagatcctgactgtgccgaccccctgtgctgccggcggggcagcggcctgcccccagccagcaggcctggagctggctactggggcgagtacagcaaatgtgacctgcccctgcggaccctggagagcctgctgagcggcctgggccctgctggcccctttgacatggtgtactggacaggagacatcccagcccatgatgtgtggcaccagacccggcaggaccagctgcgggccctgaccaccgtgacagccctggtgaggaagttcctgggccctgtgcctgtgtacccagctgtgggcaaccacgagagcacccctgtgaacagcttccccccacccttcatcgagggcaaccacagcagccgctggctgtatgaggccatggccaaggcctgggagccctggctgcctgctgaggccctgcggaccctgaggaaggtgcacatcatcggccacatccccccaggccactgcctgaagtcctggagctggaactactaccgcatcgtggcccgctatgagaacaccctggccgcccagttcttcggccacacccacgtggatgaatttgaggtgttctatgatgaggagaccctgagccggcccctggccgtggccttcctggcccccagcgccaccacctacatcggcctgaaccctggctacagagtgtaccagattgatggcaactacagcggcagcagccacgtggtgctggaccacgagacctacatcctgaacctgacccaggccaacatccctggggccatcccccactggcagctgctgtaccgggcccgggagacctacggcctgcccaacaccctgcccacagcctggcacaacctggtgtacaggatgagaggagacatgcagctgttccagaccttctggttcctgtaccacaagggccaccccccatctgagccctgtggcaccccctgccgcctggccaccctgtgtgcccagctgagcgcccgggctgacagccctgccctgtgccgccacctgatgccagatggcagcctgcctgaggcccagagcctgtggccccggcccctcttctgctag

SEQ ID NO: 312789 - DNA, 1764 bp, Artificial Sequence
  derived and/or modified sequence
atgccccggtacggcgccagcctgcggcagagctgcccccggagcggacgcgagcagggacaagatggcactgctggtgcccccggactattgtggatgggcctcgttttggcccttgcacttgccctggcattagctctggccctgtccgattctcgggtactttgggctccagctgaggcgcatcctctgagtccccaaggccaccccgcacggctgcacaggattgtacctaggctgcgggacgtgtttggctgggggaacctaacttgtccaatctgtaaaggacttttcacagcaatcaatcttggccttaagaaagagcccaacgtggccagagtcggttcagtggctataaaactgtgcaacctgctgaaaatcgctccgccagccgtgtgtcagagcatcgtccacttgtttgaggacgacatggtcgaggtgtggcggcgctctgtgctgtccccaagtgaggcgtgcggactcttgctggggtccacttgtggtcactgggacatcttttcttcatggaacattagtttgccgactgtgcctaagccaccacccaaacctcctagcccgcccgcacccggagcacctgtcagcagaatcctgttcctaactgacctccattgggaccatgactacctggaagggaccgatcccgattgtgctgatccactctgttgtaggagggggtccggacttccccctgcgtccaggcctggagctggctactggggcgagtatagcaagtgtgatctaccactcagaactctagagagccttttaagtgggttaggccctgccggcccatttgatatggtgtactggactggcgacattcctgctcatgacgtctggcaccagacacgccaggatcagctgagggctctaactactgttacggcccttgtgcggaagtttctgggccctgtccctgtgtatccggccgtcggtaatcatgaatccacgccagtcaatagttttccacccccctttattgagggcaatcattcgtcaagatggttgtatgaagcgatggctaaggcctgggaaccttggctaccggccgaggccctgaggactctgcgctacctcagctctgtggagacacaggaagggaaacgaaaggtccacattatcgggcacatcccccctggacattgtctaaagagctggagctggaattactatcgtattgtggcccggtatgagaatactctggctgcccaatttttcggccacacacacgtggatgagtttgaggtcttctacgacgaagagactctctcgagacccttggcggttgccttcctggctcccagcgctacaacatacattggtctgaaccccggctatagagtctatcaaatagacggaaattactctggctcctcccacgtggtgctggaccacgaaacatatattctgaacctcacccaggctaacattcccggcgcaatcccccattggcagctgctgtatagggcccgggaaacttacggtctccctaacaccctgccaaccgcatggcataatctggtctatagaatgcgcggggatatgcaattgtttcagacattctggtttctataccataagggccatccaccatcagaaccctgcgggactccctgcagattggctactctgtgcgcgcagctctcggcgcgcgccgattcaccggccctttgcagacatttgatgccagacggatccctgccagaggcccaaagcctgtggccgcggccactcttttgctag

SEQ ID NO: 312790 - DNA, 1728 bp, Artificial Sequence
  derived and/or modified sequence
atgccccggtacggcgccagcctgcggcagagctgcccccggagcggaagagaacaggggcaggatggcaccgcaggggcccccggactgttgtggatgggactggttctggcattagccctcgcactagctctggccttggcgctttctgatagtagagtgctctgggcgcccgccgaagcccacccactgtccccccagggtcatcccgctaggttgcataggatcgtgccacggctgcgcgacgtatttggatggggcaacctgacatgtccgatctgtaagggcctgtttaccgccattaacttgggtttgaagaaagagcccaacgtggctcgcgttgggagtgtggcaattaagctgtgtaacctccttaagatcgcccctcctgccgtgtgtcagagtatagtccacctgtttgaggatgacatggtggaagtgtggagaaggtccgttctgtccccctcagaagcttgtgggctgctcctggggagtacatgcggccactgggatatcttctcgtcttggaacatcagtctgcctacagtacccaaaccaccccccaagccaccctctccacccgcacccggagcccccgtttctagaattttgttcttgactgaccttcattgggaccacgactaccttgaggggactgacccggactgtgccgaccctctgtgctgcagacgcggctcgggccttccgccggcctcacggccaggagccgggtactggggagaatactctaaatgcgacttgccattgcgcactctggaaagcctactgtctgggctgggaccagcaggcccattcgatatggtttactggactggcgacattcccgcccacgacgtgtggcatcagactagacaggaccagcttcgcgccttaacgactgtcacagctctagttagaaaattcctcgggcctgtgccagtttaccccgctgtcgggaatcatgagagtactccggtcaattccttcccccctccctttatagaagggaatcactcttcaagatggttatatgaagccatggctaaagcctgggaaccctggttgccggcagaggccctgcgtaccttgcggaaggtgcatatcattggccacattccccccggacattgcctgaagtcctggtcgtggaattactatcgcatcgtggctcgatacgaaaacacattggcagcccagttctttggccacactcacgtggatgagttcgaagtgttttatgatgaagaaactctgagcagaccgcttgcggttgcatttctggctcctagcgcaaccacatatatcggactgaacccaggctatagagtgtatcagatcgatggcaactattccggaagcagccacgtagtgctcgaccatgagacctacattctgaatcttacacaggccaatataccaggtgctattccacactggcagctcttgtaccgcgctcgcgaaacctatggcctgcccaacactctgccgactgcttggcacaatctggtttataggatgcgcggcgatatgcagttgttccagacattttggtttctataccataagggccacccaccttctgagccctgcggcaccccctgtcggctggccacactatgtgcacagttatctgccagagcggacagcccagcgctttgcaggcacttgatgcctgacggctccctgcctgaagcacagtcgctgtggcccagaccattgttttgctag

SEQ ID NO: 312791 - DNA, 1764 bp, Artificial Sequence
  derived and/or modified sequence
atgccaagatacggcgcaagcctgcgccaatcctgtcccagaagtggacgcgagcaaggtcaggatggcaccgcgggtgcacctggattgctgtggatggggctcgtgctggctctcgctctcgccctagcacttgctttggctttgtcagattccagagtgttatgggccccagctgaagcccaccccttatcccctcaagggcatccagccaggcttcatcgcatagttccacgcctgagggatgtgttcggttggggaaatctgacatgtcccatttgcaaaggacttttcaccgccatcaacttgggactgaagaaagagcctaatgtggccagggtaggttctgtcgccataaaactgtgtaatctgctaaagattgctccacctgctgtatgccagtcaattgtgcacctgttcgaagacgacatggtggaagtttggcgccgatccgtcctatcaccctctgaggcatgcggcctgctgctggggagtacttgtggacactgggacatcttttccagctggaatatcagtctgcctacagtaccaaaacctccacccaagcccccaagtcccccagccccaggcgcacccgtttcacgcatcctgttcctcaccgatctgcactgggaccacgactatctggagggtacagaccctgactgcgccgaccctctgtgctgcagaagaggaagcgggctgcctcccgcaagccgcccaggggctgggtattggggtgaatatagcaagtgcgatctccccctgcgcactctcgaatcacttctgagcgggcttggtcctgccggaccattcgatatggtgtactggacgggcgacatcccagcccacgatgtgtggcaccagacgcggcaggaccagctgagagcactgaccactgtcactgccctagtcagaaagtttttggggccagtgccagtttaccctgccgtggggaatcacgaatctacaccagtcaattccttcccccctccatttattgagggtaaccactcaagcagatggctctacgaggcaatggctaaagcctgggaaccctggctgcccgcagaagctttgagaaccctccggtatctgagttctgtcgagacacaggagggcaaaagaaaggtgcacataattggccacattccccctgggcactgcctcaagtcttggagttggaactattatcgcatcgtagctcggtatgaaaatacactggccgcacaattcttcggacatactcacgtggacgagtttgaggtgttttacgacgaagagactctctcaagacccctcgcagtggccttcctggcacccagcgccacaacatacatcggcctcaacccgggatatagggtgtatcagattgacggaaattactcgggatcttcacatgtggtgctcgatcacgagacttacatcctgaacctaactcaagccaacatccccggtgctattccccattggcagctgctttatagagcaagggagacctatggtctgccgaacacattgcccactgcctggcataatctggtctatcggatgagaggtgacatgcagctatttcagacattttggttcctatatcacaaaggccacccgccttcagaaccctgcgggacaccatgcaggctggctacattatgcgcacagctgtccgcacgagcggattcccctgccctgtgcaggcatctgatgcccgacgggagccttcccgaagcacaatccttgtggccaaggcccctcttctgttag

SEQ ID NO: 312792 - DNA, 1728 bp, Artificial Sequence
  derived and/or modified sequence
atgccgcgttatggggcttctctgaggcagagctgtccccgaagcggcagagaacaggggcaggatggcacagcaggagctccaggacttctctggatgggactcgtgctcgcattagcacttgcactcgccttggcactggccttgtccgattccagagttctgtgggcgccagccgaggcacacccactctcccctcaggggcatccagctcggctgcacaggatcgtgcctagactccgggacgtgttcggttgggggaatctgacctgccctatatgcaaaggcctgttcacggccatcaacctgggtctaaagaaagagcccaatgtggctagggtaggctctgtcgcaataaagttatgtaatctgttgaagattgctccaccagccgtgtgtcagtctatagttcacctgtttgaggacgatatggtagaggtgtggaggcgatctgtcttgtccccgtctgaggcttgcgggttgctcctcggcagcacctgcggccattgggacatattctcttcctggaacatcagtcttcctacagtgccaaaaccaccacccaaacccccttcacctcccgcaccgggagctcccgtctcccgtatccttttcctgacagacctgcattgggaccatgactacctcgaggggacagacccggactgcgccgaccccctgtgctgtcgacgcggttcaggactcccacctgcgtcaagacccggagcaggttattggggtgaatactcaaaatgcgacctgcctctgagaactcttgagtcgctgctcagcggcctggggccagctgggcctttcgatatggtgtactggacaggagacattcccgcacatgatgtctggcatcagaccagacaggaccagctgcgcgcactcaccacagtaactgccctagtgcgcaagtttctggggcctgtgcctgtatatcctgccgtgggaaatcacgagtcaaccccagtcaactccttcccccctcctttcatcgagggtaatcacagtagccgctggctctatgaggctatggcaaaagcctgggagccgtggctgcctgccgaggcgcttcgaacactcagaaaggtgcacatcatcgggcacataccacccggacactgcctcaaaagttggtcctggaactactatagaatcgtggctagatatgaaaatacattggcggctcagtttttcggccatacccacgtggatgagttcgaggtgttctacgatgaggagacactctcaagaccattggctgtggcttttctcgcaccctcagccacgacttacatcggtctaaatccagggtaccgcgtctatcagattgatggtaattactcaggctccagccacgtagttctggaccacgaaacctatattttgaatcttacacaggccaatatccccggagcaattcctcactggcagctgctgtatcgggcacgggagacatatggactgcccaataccctgcccactgcttggcataatcttgtgtaccgtatgcgaggtgacatgcaactgttccagaccttctggtttctctaccataagggccaccctccaagcgagccctgtgggacgccctgcaggctggccacgctgtgcgcccagctatcagcccgagcagattcccctgccctctgtaggcacctgatgcctgatggctcactgcctgaggctcagtcattgtggccgagacctcttttctgttag

SEQ ID NO: 312793 - DNA, 1764 bp, Artificial Sequence
  derived and/or modified sequence
atgcccagatacggagcatcccttcgccagtcatgccccagatccggacgagagcaggggcaagatggaaccgccggggctcctggcttgctctggatgggacttgtgttagcactcgctttggccctcgctctggctctggctctgtcagactccagagtgttatgggctccagctgaggcacaccccctgtctccccagggacaccccgcccgacttcatcggatcgtccctcgattacgggatgtgtttggatggggcaatttaacttgtccaatatgtaaaggtctgttcacagccatcaacttgggactcaagaaggaaccaaatgtcgcaagggttggctcagtcgcgattaaactatgcaatctgctcaagatcgccccccctgccgtgtgccagagcattgtacacctgtttgaggacgacatggtggaggtatggagacgcagcgtactgtctccatccgaagcttgcggcctgctcttgggtagtacatgcggtcattgggatatcttctcatcatggaacatttccctcccaactgtcccgaagccacctcccaaacccccatctccccccgcacctggcgcaccagtgagccgaattctcttcttaaccgaccttcattgggatcacgactaccttgaaggaacagaccccgactgcgcggaccctctctgctgccgccggggctccggactgccgcctgcgtcacgtccaggtgctggatactggggagaatatagtaagtgtgatctccccctaagaaccctagaaagtctgctctccggcctgggacctgccggaccctttgacatggtgtattggacaggagacattcccgctcacgacgtctggcatcagacacggcaggatcagctacgcgcgctgactactgtcactgctctggtgagaaaatttctgggaccggtcccagtgtaccccgccgtcggcaaccatgagagtacgcctgttaacagcttcccaccacctttcatcgaaggcaatcattctagccggtggttatacgaggctatggcgaaagcttgggagccatggctcccggccgaagctctacgcacactaaggtatctgtcgtcggtggaaacacaggagggtaaacgtaaagtacacataatcggtcacataccacccggtcactgcctcaaaagctggtcctggaactattatcggattgtggccaggtatgagaacaccctagccgctcagtttttcggccatacccatgtggatgaatttgaggtattctatgacgaggaaacactatctcgtcctctagctgtggcattcctcgctccttctgctaccacatatattgggttaaacccaggctaccgcgtataccagatagatggcaattactctgggtcatctcacgtagtccttgatcacgagacctatatcctgaatctgacacaggccaacatcccgggtgccatcccccactggcagttactctaccgagctagagaaacctacgggctcccgaatacactgccaaccgcatggcacaacctagtgtatcgcatgagaggcgacatgcagctcttccaaacattctggttcttatatcataaaggtcatccaccatccgaaccatgcggaaccccatgcagactcgccactctatgcgcccaactctccgctcgtgcagattccccagcactgtgcaggcatttgatgccagacggttccctgcccgaggctcagagcttgtggccaagacccttgttctgctag

SEQ ID NO: 312794 - DNA, 1728 bp, Artificial Sequence
  derived and/or modified sequence
atgcccaggtacggagctagcctgcggcagtcatgtccaaggagtggccgagagcagggtcaggacggaacagccggagctccaggtttattatggatggggctggtgctcgccctggctttggcccttgcgctagctctggctttgagtgatagccgggttctctgggccccagcggaggcacacccactgtcacctcagggccatcctgctagattgcatcggatcgtaccgaggctgcgggatgtgtttggatgggggaatctaacctgtccgatctgcaagggtctgtttaccgccatcaacctcggtcttaagaaggagcccaacgttgctagggtggggagcgtggccattaaactgtgcaatttacttaagatagcccctcccgccgtgtgccagtccatcgtgcatctgtttgaggacgacatggtagaggtgtggcgaagatcggttcttagtccgtctgaagcctgcgggctcttactcggtagcacctgtggtcattgggacatttttagcagttggaatatcagccttcccacggtgcccaaaccaccccccaaacctccaagtcccccagctcctggagcccctgtatcccgaattctgttcttgaccgatctgcattgggaccacgactacctggaaggtaccgatccagactgcgcagaccccttatgctgccgacgcggttcaggactgccacccgcatctcggccaggagcaggatattggggcgaatattccaagtgtgacctacccctgcgtacactcgagtctttactgtccggactaggtcccgcaggcccatttgatatggtttattggaccggcgacatccctgcccatgacgtgtggcatcagacccgccaggaccagttgcgtgccttgacaacagtcactgcattggtgagaaagtttctcgggcctgtcccagtctatcccgccgtggggaaccatgagtcaacacccgtcaatagtttcccccctccttttatcgagggcaatcatagcagtcggtggctgtatgaagcgatggccaaggcatgggaaccgtggcttcctgccgaggccttacgtactctgcgcaaggtgcatataataggccatatcccccccgggcattgtctcaagtcatggagctggaattattaccgaatagtcgctcgctacgaaaatacacttgctgctcagttcttcggtcatacccacgtcgatgagtttgaagttttctatgacgaggaaaccctgtccaggcctctagccgtggcctttctggcaccctctgcaacgacctatatcggcctgaatccagggtacagggtgtatcagatagatggcaactattccgggagcagtcacgtggtgcttgatcatgaaacatatattctgaatttgacgcaggccaatatcccaggcgccataccccactggcaattactgtaccgagcgcgcgaaacctatgggctccccaatactctgccaaccgcctggcacaacctggtgtaccgtatgcgcggcgacatgcaactctttcaaacattctggttcctttaccataagggccacccgcctagtgagccatgtgggacaccttgccgtcttgccacactctgtgcccaattgagcgcccgcgccgattcacccgccctgtgccgccatttaatgcccgatggatccctccccgaagctcagagcctgtggcctagacctttgttttgctag

SEQ ID NO: 312795 - DNA, 1764 bp, Artificial Sequence
  derived and/or modified sequence
atgcccagatatggcgcttcattacgccaaagctgccctcgatcaggcagggaacaaggtcaggacgggacagctggggctcccgggcttttgtggatgggacttgtactggcccttgcgctcgcccttgcgctggccctggcactgagcgactcccgtgttctttgggctcctgcagaagcacatcctctttcacctcaaggacaccctgctaggttacatcgaatcgtgccccgattaagagatgtcttcggatgggggaatctgacatgcccaatttgtaagggactgtttaccgccatcaatcttggccttaaaaaagaacccaatgtggctcgcgtgggcagcgtcgctatcaaactctgtaacctcctcaaaattgcccctcccgcagtctgtcagtcaattgttcacctttttgaagacgatatggtcgaggtctggaggcgctctgtgctgtctccaagtgaagcctgtggcttactcctaggtagtacatgcggtcactgggacatcttctccagttggaatatctccctgcccactgtacctaagcctcccccgaaaccacctagcccaccagctcctggagcgccggtgagtcgtatcttgtttttaaccgacctccattgggaccacgactatttggaaggtaccgatccagattgcgccgatcctctatgctgcagacggggctcaggcttgccacccgcatcgaggccaggagcgggatactggggagaatactcaaagtgtgacctgcctcttaggacattggaatctctgttgtctggactgggcccagctggcccttttgatatggtctattggactggcgacatacctgcccacgacgtgtggcaccagactcgacaagaccaactccgggctctgactactgtgacggcgctggtcagaaaattcttaggcccagtgccagtctacccagccgtaggcaatcacgaatcaacaccagtcaacagttttcctcccccttttattgagggtaaccactcatcacgctggctgtacgaggcgatggctaaggcttgggaaccttggctgcccgcagaggcactgcgcacattacgctatctgtctagcgtcgaaactcaagagggcaagagaaaagtgcacatcatcggtcatattccacccgggcattgtcttaaatcgtggtcttggaattattatagaatcgtagcacgctatgaaaatacccttgcagctcagttctttggacatacacacgtggatgaattcgaggtattttacgacgaagagacactaagccgtcccctggccgtagccttcctggccccatcagctaccacatacatcggactgaatcctgggtaccgggtttatcagatcgatggtaattatagtgggtcctctcatgtcgtgctggatcacgaaacttatatccttaatctcacccaggccaacatcccaggagcaatccctcactggcagctgctttatcgcgcccgagaaacctatgggctgccaaacacccttcctacagcctggcacaaccttgtttatcgcatgcgaggtgacatgcaattattccagacattctggtttctgtaccacaagggtcacccccccagcgaaccgtgcggaaccccatgcaggttagctaccttatgcgctcaactaagtgcgagagcagactccccggcgctatgccgccacctgatgccagatggaagccttccggaagcccagtctttgtggccacgtcctttgttttgttag

SEQ ID NO: 312796 - DNA, 1728 bp, Artificial Sequence
  derived and/or modified sequence
atgccccggtatggagcaagtttaaggcagtcctgtccccggtcaggtcgcgagcaaggacaggatggaactgcaggtgcgcccggcctcttgtggatgggactggtactcgccctggctctggccctggccttagctcttgcactgtccgattcaagagttctttgggctcctgcagaagcccacccattatcccctcagggtcacccagccagactgcacaggattgtgcctaggttaagagatgtgttcggatgggggaaccttacctgtcctatttgtaagggattatttaccgctataaacctgggtttgaagaaggaaccaaacgtagcaagagttggttcggtggccattaaattatgcaatctcctcaaaatcgccccaccagcagtctgtcagagtatcgtccatctgttcgaagatgacatggttgaagtctggcgcagatccgtgttaagcccctccgaagcttgcggcttgcttcttggatccacctgtggtcactgggatatattctcgtcctggaatatttcgttgcccacagtccctaaacccccaccaaaacccccgagccccccagcaccaggcgccccagtttcccggatactttttctgaccgatcttcactgggatcacgattatctcgaaggcaccgacccagattgtgctgaccctctgtgctgtagacgggggagcggacttcccccggcaagtagacctggcgctggctactggggggagtacagtaagtgtgatcttcctctaaggacactggaaagtctgctgagtggcctgggacctgccgggccctttgatatggtatattggactggagatatccccgcacatgatgtatggcatcagacccgccaggaccaactgagagccctcaccaccgtgacagcccttgtcagaaaattccttggccctgtaccagtgtatccagccgtcggaaatcatgaaagcactccagtcaactcatttcctccacctttcatagaagggaaccacagttctagatggctctacgaagccatggctaaagcttgggaaccctggcttcccgcggaagctctgcgaacgctccggaaggttcatataatcggccacattcctccagggcactgcctcaaatcttggtcatggaactactaccgcattgtggccaggtatgaaaacacgctggcagcccagttcttcggccacacccacgttgatgagtttgaagtgttttatgacgaagaaaccctaagccgaccccttgccgtagcctttttagctccctccgccacaacttatatagggctgaatcccggttaccgggtatatcaaattgacggaaattattctgggagctctcacgtagtgcttgatcacgaaacctacatcctgaacttgacccaggctaacatcccaggagccataccacactggcaactcttgtaccgagctagggagacttacggactgccgaataccttaccaacggcctggcataacctggtgtaccgtatgcgcggcgacatgcaactctttcaaacattctggttcctttaccataagggccacccgcctagtgagccatgtgggacaccttgccgtcttgccacactctgtgcccaattgagcgcccgcgccgattcacccgccctgtgccgccatttaatgcccgatggatccctccccgaagctcagagcctgtggcctagacctttgttttgctag

SEQ ID NO: 312797 - DNA, 2326 bp, Artificial Sequence
  derived and/or modified sequence
atcagaggaagaggaaggggcggagctgctttgcggccggccgcggagcagtcagccgactacagagaagggtaatcgggtgtccccggcgccgcccggggccctgagggctggctagggtccaggccgggggggacgggacagacgaaccagccccgtgtaggaagcgcgacaatgccccgctacggagcgtcactccgccagagctgccccaggtccggccgggagcagggacaagacgggaccgccggagcccccggactcctttggatgggcctggtgctggcgctggcgctggcgctggcgctggcgctggctctgtctgactctcgggttctctgggctccggcagaggctcaccctctttctccccaaggccatcctgccaggttacatcgcatagtgccccggctccgagatgtctttgggtgggggaacctcacctgcccaatctgcaaaggtctattcaccgccatcaacctcgggctgaagaaggaacccaatgtggctcgcgtgggctccgtggccatcaagctgtgcaatctgctgaagatagcaccacctgccgtgtgccaatccattgtccacctctttgaggatgacatggtggaggtgtggagacgctcagtgctgagcccatctgaggcctgtggcctgctcctgggctccacctgtgggcactgggacattttctcatcttggaacatctctttgcctactgtgccgaagccgccccccaaaccccctagccccccagccccaggtgcccctgtcagccgcatcctcttcctcactgacctgcactgggatcatgactacctggagggcacggaccctgactgtgcagacccactgtgctgccgccggggttctggcctgccgcccgcatcccggccaggtgccggatactggggcgaatacagcaagtgtgacctgcccctgaggaccctggagagcctgttgagtgggctgggcccagccggcccttttgatatggtgtactggacaggagacatccccgcacatgatgtctggcaccagactcgtcaggaccaactgcgggccctgaccaccgtcacagcacttgtgaggaagttcctggggccagtgccagtgtaccctgctgtgggtaaccatgaaagcacacctgtcaatagcttccctccccccttcattgagggcaaccactcctcccgctggctctatgaagcgatggccaaggcttgggagccctggctgcctgccgaagccctgcgcaccctcaggtacttatcgtccgtggaaacccaggaagggaaaagaaaggtgcatataattggccacattcccccagggcactgtctgaagagctggagctggaattattaccgaattgtagccaggtatgagaacaccctggctgctcagttctttggccacactcatgtggatgaatttgaggtcttctatgatgaagagactctgagccggccgctggctgtagccttcctggcacccagtgcaactacctacatcggccttaatcctggttaccgtgtgtaccaaatagatggaaactactccgggagctctcacgtggtcctggaccatgagacctacatcctgaatctgacccaggcaaacataccgggagccataccgcactggcagcttctctacagggctcgagaaacctatgggctgcccaacacactgcctaccgcctggcacaacctggtatatcgcatgcggggcgacatgcaacttttccagaccttctggtttctctaccataagggccacccaccctcggagccctgtggcacgccctgccgtctggctactctttgtgcccagctctctgcccgtgctgacagccctgctctgtgccgccacctgatgccagatgggagcctcccagaggcccagagcctgtggccaaggccactgttttgctagggccccagggcccacatttgggaaagttcttgatgtaggaaagggtgaaaaagcccaaatgctgctgtggttcaaccaggcaagatcatccggtgaaagaaccagtccctgggccccaaggatgccggggaaacaggaccttctcctttcctggagctggtttagctggatatgggagggggtttggctgcctgtgcccaggagctagactgccttgaggctgctgtcctttcacagccatggagtagaggcctaagttgacactgccctgggcagacaagacaggagctgtcgccccaggcctgtgctgcccagccaggaaccctgtactgctgctgcgacctgatgctgccagtctgttaaaataaagataagagacttggactcc

SEQ ID NO: 312798 - DNA, 2290 bp, Artificial Sequence
  derived and/or modified sequence
atcagaggaagaggaaggggcggagctgctttgcggccggccgcggagcagtcagccgactacagagaagggtaatcgggtgtccccggcgccgcccggggccctgagggctggctagggtccaggccgggggggacgggacagacgaaccagccccgtgtaggaagcgcgacaatgccccgctacggagcgtcactccgccagagctgccccaggtccggccgggagcagggacaagacgggaccgccggagcccccggactcctttggatgggcctggtgctggcgctggcgctggcgctggcgctggcgctggctctgtctgactctcgggttctctgggctccggcagaggctcaccctctttctccccaaggccatcctgccaggttacatcgcatagtgccccggctccgagatgtctttgggtgggggaacctcacctgcccaatctgcaaaggtctattcaccgccatcaacctcgggctgaagaaggaacccaatgtggctcgcgtgggctccgtggccatcaagctgtgcaatctgctgaagatagcaccacctgccgtgtgccaatccattgtccacctctttgaggatgacatggtggaggtgtggagacgctcagtgctgagcccatctgaggcctgtggcctgctcctgggctccacctgtgggcactgggacattttctcatcttggaacatctctttgcctactgtgccgaagccgccccccaaaccccctagccccccagccccaggtgcccctgtcagccgcatcctcttcctcactgacctgcactgggatcatgactacctggagggcacggaccctgactgtgcagacccactgtgctgccgccggggttctggcctgccgcccgcatcccggccaggtgccggatactggggcgaatacagcaagtgtgacctgcccctgaggaccctggagagcctgttgagtgggctgggcccagccggcccttttgatatggtgtactggacaggagacatccccgcacatgatgtctggcaccagactcgtcaggaccaactgcgggccctgaccaccgtcacagcacttgtgaggaagttcctggggccagtgccagtgtaccctgctgtgggtaaccatgaaagcacacctgtcaatagcttccctccccccttcattgagggcaaccactcctcccgctggctctatgaagcgatggccaaggcttgggagccctggctgcctgccgaagccctgcgcaccctcagaaaggtgcatataattggccacattcccccagggcactgtctgaagagctggagctggaattattaccgaattgtagccaggtatgagaacaccctggctgctcagttctttggccacactcatgtggatgaatttgaggtcttctatgatgaagagactctgagccggccgctggctgtagccttcctggcacccagtgcaactacctacatcggccttaatcctggttaccgtgtgtaccaaatagatggaaactactccgggagctctcacgtggtcctggaccatgagacctacatcctgaatctgacccaggcaaacataccgggagccataccgcactggcagcttctctacagggctcgagaaacctatgggctgcccaacacactgcctaccgcctggcacaacctggtatatcgcatgcggggcgacatgcaacttttccagaccttctggtttctctaccataagggccacccaccctcggagccctgtggcacgccctgccgtctggctactctttgtgcccagctctctgcccgtgctgacagccctgctctgtgccgccacctgatgccagatgggagcctcccagaggcccagagcctgtggccaaggccactgttttgctagggccccagggcccacatttgggaaagttcttgatgtaggaaagggtgaaaaagcccaaatgctgctgtggttcaaccaggcaagatcatccggtgaaagaaccagtccctgggccccaaggatgccggggaaacaggaccttctcctttcctggagctggtttagctggatatgggagggggtttggctgcctgtgcccaggagctagactgccttgaggctgctgtcctttcacagccatggagtagaggcctaagttgacactgccctgggcagacaagacaggagctgtcgccccaggcctgtgctgcccagccaggaaccctgtactgctgctgcgacctgatgctgccagtctgttaaaataaagataagagacttggactcc

SEQ ID NO: 312799 - DNA, 2211 bp, Artificial Sequence
  derived and/or modified sequence
ggtgtccccggcgccgcccggggccctgagggctggctagggtccaggccgggggggacgggacagacgaaccagccccgtgtaggaagcgcgacaatgccccgctacggagcgtcactccgccagagctgccccaggtccggccgggagcagggacaagacgggaccgccggagcccccggactcctttggatgggcctggtgctggcgctggcgctggcgctggcgctggcgctggctctgtctgactctcgggttctctgggctccggcagaggctcaccctctttctccccaaggccatcctgccaggttacatcgcatagtgccccggctccgagatgtctttgggtgggggaacctcacctgcccaatctgcaaaggtctattcaccgccatcaacctcgggctgaagaaggaacccaatgtggctcgcgtgggctccgtggccatcaagctgtgcaatctgctgaagatagcaccacctgccgtgtgccaatccattgtccacctctttgaggatgacatggtggaggtgtggagacgctcagtgctgagcccatctgaggcctgtggcctgctcctgggctccacctgtgggcactgggacattttctcatcttggaacatctctttgcctactgtgccgaagccgccccccaaaccccctagccccccagccccaggtgcccctgtcagccgcatcctcttcctcactgacctgcactgggatcatgactacctggagggcacggaccctgactgtgcagacccactgtgctgccgccggggttctggcctgccgcccgcatcccggccaggtgccggatactggggcgaatacagcaagtgtgacctgcccctgaggaccctggagagcctgttgagtgggctgggcccagccggcccttttgatatggtgtactggacaggagacatccccgcacatgatgtctggcaccagactcgtcaggaccaactgcgggccctgaccaccgtcacagcacttgtgaggaagttcctggggccagtgccagtgtaccctgctgtgggtaaccatgaaagcacacctgtcaatagcttccctccccccttcattgagggcaaccactcctcccgctggctctatgaagcgatggccaaggcttgggagccctggctgcctgccgaagccctgcgcaccctcaggtgcatataattggccacattcccccagggcactgtctgaagagctggagctggaattattaccgaattgtagccaggtatgagaacaccctggctgctcagttctttggccacactcatgtggatgaatttgaggtcttctatgatgaagagactctgagccggccgctggctgtagccttcctggcacccagtgcaactacctacatcggccttaatcctggttaccgtgtgtaccaaatagatggaaactactccgggagctctcacgtggtcctggaccatgagacctacatcctgaatctgacccaggcaaacataccgggagccataccgcactggcagcttctctacagggctcgagaaacctatgggctgcccaacacactgcctaccgcctggcacaacctggtatatcgcatgcggggcgacatgcaacttttccagaccttctggtttctctaccataagggccacccaccctcggagccctgtggcacgccctgccgtctggctactctttgtgcccagctctctgcccgtgctgacagccctgctctgtgccgccacctgatgccagatgggagcctcccagaggcccagagcctgtggccaaggccactgttttgctagggccccagggcccacatttgggaaagttcttgatgtaggaaagggtgaaaaagcccaaatgctgctgtggttcaaccaggcaagatcatccggtgaaagaaccagtccctgggccccaaggatgccggggaaacaggaccttctcctttcctggagctggtttagctggatatgggagggggtttggctgcctgtgcccaggagctagactgccttgaggctgctgtcctttcacagccatggagtagaggcctaagttgacactgccctgggcagacaagacaggagctgtcgccccaggcctgtgctgcccagccaggaaccctgtactgctgctgcgacctgatgctgccagtctgttaaaataaagataagagacttggactccaga

SEQ ID NO: 312800 - RNA, 1764 nt, Artificial Sequence
  derived and/or modified sequence
augcccagauacggagcaucccuucgccagucaugccccagauccggacgagagcaggggcaagauggaaccgccggggcuccuggcuugcucuggaugggacuuguguuagcacucgcuuuggcccucgcucuggcucuggcucugucagacuccagaguguuaugggcuccagcugaggcacacccccugucuccccagggacaccccgcccgacuucaucggaucgucccucgauuacgggauguguuuggauggggcaauuuaacuuguccaauauguaaaggucuguucacagccaucaacuugggacucaagaaggaaccaaaugucgcaaggguuggcucagucgcgauuaaacuaugcaaucugcucaagaucgcccccccugccgugugccagagcauuguacaccuguuugaggacgacaugguggagguauggagacgcagcguacugucuccauccgaagcuugcggccugcucuuggguaguacaugcggucauugggauaucuucucaucauggaacauuucccucccaacugucccgaagccaccucccaaacccccaucuccccccgcaccuggcgcaccagugagccgaauucucuucuuaaccgaccuucauugggaucacgacuaccuugaaggaacagaccccgacugcgcggacccucucugcugccgccggggcuccggacugccgccugcgucacguccaggugcuggauacuggggagaauauaguaagugugaucucccccuaagaacccuagaaagucugcucuccggccugggaccugccggacccuuugacaugguguauuggacaggagacauucccgcucacgacgucuggcaucagacacggcaggaucagcuacgcgcgcugacuacugucacugcucuggugagaaaauuucugggaccggucccaguguaccccgccgucggcaaccaugagaguacgccuguuaacagcuucccaccaccuuucaucgaaggcaaucauucuagccggugguuauacgaggcuauggcgaaagcuugggagccauggcucccggccgaagcucuacgcacacuaagguaucugucgucgguggaaacacaggaggguaaacguaaaguacacauaaucggucacauaccacccggucacugccucaaaagcugguccuggaacuauuaucggauuguggccagguaugagaacacccuagccgcucaguuuuucggccauacccauguggaugaauuugagguauucuaugacgaggaaacacuaucucguccucuagcuguggcauuccucgcuccuucugcuaccacauauauuggguuaaacccaggcuaccgcguauaccagauagauggcaauuacucugggucaucucacguaguccuugaucacgagaccuauauccugaaucugacacaggccaacaucccgggugccaucccccacuggcaguuacucuaccgagcuagagaaaccuacgggcucccgaauacacugccaaccgcauggcacaaccuaguguaucgcaugagaggcgacaugcagcucuuccaaacauucugguucuuauaucauaaaggucauccaccauccgaaccaugcggaaccccaugcagacucgccacucuaugcgcccaacucuccgcucgugcagauuccccagcacugugcaggcauuugaugccagacgguucccugcccgaggcucagagcuuguggccaagacccuuguucugcuag

SEQ ID NO: 312801 - RNA, 1728 nt, Artificial Sequence
  derived and/or modified sequence
augcccagguacggagcuagccugcggcagucauguccaaggaguggccgagagcagggucaggacggaacagccggagcuccagguuuauuauggauggggcuggugcucgcccuggcuuuggcccuugcgcuagcucuggcuuugagugauagccggguucucugggccccagcggaggcacacccacugucaccucagggccauccugcuagauugcaucggaucguaccgaggcugcgggauguguuuggaugggggaaucuaaccuguccgaucugcaagggucuguuuaccgccaucaaccucggucuuaagaaggagcccaacguugcuaggguggggagcguggccauuaaacugugcaauuuacuuaagauagccccucccgccgugugccaguccaucgugcaucuguuugaggacgacaugguagagguguggcgaagaucgguucuuaguccgucugaagccugcgggcucuuacucgguagcaccuguggucauugggacauuuuuagcaguuggaauaucagccuucccacggugcccaaaccaccccccaaaccuccaagucccccagcuccuggagccccuguaucccgaauucuguucuugaccgaucugcauugggaccacgacuaccuggaagguaccgauccagacugcgcagaccccuuaugcugccgacgcgguucaggacugccacccgcaucucggccaggagcaggauauuggggcgaauauuccaagugugaccuaccccugcguacacucgagucuuuacuguccggacuaggucccgcaggcccauuugauaugguuuauuggaccggcgacaucccugcccaugacguguggcaucagacccgccaggaccaguugcgugccuugacaacagucacugcauuggugagaaaguuucucgggccugucccagucuaucccgccguggggaaccaugagucaacacccgucaauaguuuccccccuccuuuuaucgagggcaaucauagcagucgguggcuguaugaagcgauggccaaggcaugggaaccguggcuuccugccgaggccuuacguacucugcgcaaggugcauauaauaggccauaucccccccgggcauugucucaagucauggagcuggaauuauuaccgaauagucgcucgcuacgaaaauacacuugcugcucaguucuucggucauacccacgucgaugaguuugaaguuuucuaugacgaggaaacccuguccaggccucuagccguggccuuucuggcacccucugcaacgaccuauaucggccugaauccaggguacaggguguaucagauagauggcaacuauuccgggagcagucacguggugcuugaucaugaaacauauauucugaauuugacgcaggccaauaucccaggcgccauaccccacuggcaauuacuguaccgagcgcgcgaaaccuaugggcuccccaauacucugccaaccgccuggcacaaccugguguaccguaugcgcggcgacaugcaacucuuucaaacauucugguuccuuuaccauaagggccacccgccuagugagccaugugggacaccuugccgucuugccacacucugugcccaauugagcgcccgcgccgauucacccgcccugugccgccauuuaaugcccgauggaucccuccccgaagcucagagccuguggccuagaccuuuguuuugcuag

SEQ ID NO: 312802 - RNA, 1764 nt, Artificial Sequence
  derived and/or modified sequence
augcccagauauggcgcuucauuacgccaaagcugcccucgaucaggcagggaacaaggucaggacgggacagcuggggcucccgggcuuuuguggaugggacuuguacuggcccuugcgcucgcccuugcgcuggcccuggcacugagcgacucccguguucuuugggcuccugcagaagcacauccucuuucaccucaaggacacccugcuagguuacaucgaaucgugccccgauuaagagaugucuucggaugggggaaucugacaugcccaauuuguaagggacuguuuaccgccaucaaucuuggccuuaaaaaagaacccaauguggcucgcgugggcagcgucgcuaucaaacucuguaaccuccucaaaauugccccucccgcagucugucagucaauuguucaccuuuuugaagacgauauggucgaggucuggaggcgcucugugcugucuccaagugaagccuguggcuuacuccuagguaguacaugcggucacugggacaucuucuccaguuggaauaucucccugcccacuguaccuaagccucccccgaaaccaccuagcccaccagcuccuggagcgccggugagucguaucuuguuuuuaaccgaccuccauugggaccacgacuauuuggaagguaccgauccagauugcgccgauccucuaugcugcagacggggcucaggcuugccacccgcaucgaggccaggagcgggauacuggggagaauacucaaagugugaccugccucuuaggacauuggaaucucuguugucuggacugggcccagcuggcccuuuugauauggucuauuggacuggcgacauaccugcccacgacguguggcaccagacucgacaagaccaacuccgggcucugacuacugugacggcgcuggucagaaaauucuuaggcccagugccagucuacccagccguaggcaaucacgaaucaacaccagucaacaguuuuccucccccuuuuauugaggguaaccacucaucacgcuggcuguacgaggcgauggcuaaggcuugggaaccuuggcugcccgcagaggcacugcgcacauuacgcuaucugucuagcgucgaaacucaagagggcaagagaaaagugcacaucaucggucauauuccacccgggcauugucuuaaaucguggucuuggaauuauuauagaaucguagcacgcuaugaaaauacccuugcagcucaguucuuuggacauacacacguggaugaauucgagguauuuuacgacgaagagacacuaagccguccccuggccguagccuuccuggccccaucagcuaccacauacaucggacugaauccuggguaccggguuuaucagaucgaugguaauuauaguggguccucucaugucgugcuggaucacgaaacuuauauccuuaaucucacccaggccaacaucccaggagcaaucccucacuggcagcugcuuuaucgcgcccgagaaaccuaugggcugccaaacacccuuccuacagccuggcacaaccuuguuuaucgcaugcgaggugacaugcaauuauuccagacauucugguuucuguaccacaagggucacccccccagcgaaccgugcggaaccccaugcagguuagcuaccuuaugcgcucaacuaagugcgagagcagacuccccggcgcuaugccgccaccugaugccagauggaagccuuccggaagcccagucuuuguggccacguccuuuguuuuguuag

SEQ ID NO: 312803 - RNA, 1728 nt, Artificial Sequence
  derived and/or modified sequence
augccccgguauggagcaaguuuaaggcaguccuguccccggucaggucgcgagcaaggacaggauggaacugcaggugcgcccggccucuuguggaugggacugguacucgcccuggcucuggcccuggccuuagcucuugcacuguccgauucaagaguucuuugggcuccugcagaagcccacccauuauccccucagggucacccagccagacugcacaggauugugccuagguuaagagauguguucggaugggggaaccuuaccuguccuauuuguaagggauuauuuaccgcuauaaaccuggguuugaagaaggaaccaaacguagcaagaguugguucgguggccauuaaauuaugcaaucuccucaaaaucgccccaccagcagucugucagaguaucguccaucuguucgaagaugacaugguugaagucuggcgcagauccguguuaagccccuccgaagcuugcggcuugcuucuuggauccaccuguggucacugggauauauucucguccuggaauauuucguugcccacagucccuaaacccccaccaaaacccccgagccccccagcaccaggcgccccaguuucccggauacuuuuucugaccgaucuucacugggaucacgauuaucucgaaggcaccgacccagauugugcugacccucugugcuguagacgggggagcggacuucccccggcaaguagaccuggcgcuggcuacuggggggaguacaguaagugugaucuuccucuaaggacacuggaaagucugcugaguggccugggaccugccgggcccuuugauaugguauauuggacuggagauauccccgcacaugauguauggcaucagacccgccaggaccaacugagagcccucaccaccgugacagcccuugucagaaaauuccuuggcccuguaccaguguauccagccgucggaaaucaugaaagcacuccagucaacucauuuccuccaccuuucauagaagggaaccacaguucuagauggcucuacgaagccauggcuaaagcuugggaacccuggcuucccgcggaagcucugcgaacgcuccggaagguucauauaaucggccacauuccuccagggcacugccucaaaucuuggucauggaacuacuaccgcauuguggccagguaugaaaacacgcuggcagcccaguucuucggccacacccacguugaugaguuugaaguguuuuaugacgaagaaacccuaagccgaccccuugccguagccuuuuuagcucccuccgccacaacuuauauagggcugaaucccgguuaccggguauaucaaauugacggaaauuauucugggagcucucacguagugcuugaucacgaaaccuacauccugaacuugacccaggcuaacaucccaggagccauaccacacuggcaacucuuguaccgagcuagggagacuuacggacugccgaauaccuuaccaacggccuggcauaaccugguguaccguaugcgcggcgacaugcaacucuuucaaacauucugguuccuuuaccauaagggccacccgccuagugagccaugugggacaccuugccgucuugccacacucugugcccaauugagcgcccgcgccgauucacccgcccugugccgccauuuaaugcccgauggaucccuccccgaagcucagagccuguggccuagaccuuuguuuugcuag

SEQ ID NO: 312804 - protein, 366 aa, Artificial Sequence
  derived and/or modified sequence
MPRYGASLRQSCPRSGREQGQDGTAGAPGLLWMGLVLALALALALALALSDSRVLWAPAEAHPLSPQGHPARLHRIVPRLRDVFGWGNLTCPICKGLFTAINLGLKKEPNVARVGSVAIKLCNLLKIAPPAVCQSIVHLFEDDMVEVWRRSVLSPSEACGLLLGSTCGHWDIFSSWNISLPTVPKPPPKPPSPPAPGAPVSRILFLTDLHWDHDYLEGTDPDCADPLCCRRGSGLPPASRPGAGYWGEYSKCDLPLRTLESLLSGLGPAGPFDMVYWTGDIPAHDVWHQTRQDQLRALTTVTALVRKFLGPVPVYPAVGNHESTPVNSFPPPFIEGNHSSRWLYEAMAKAWEPWLPAEALRTLRCI

SEQ ID NO: 312805 - protein, 402 aa, Artificial Sequence
  derived and/or modified sequence
MPRYGASLRQSCPRSGREQGQDGTAGAPGLLWMGLVLALALALALALALSDSRVLWAPAEAHPLSPQGHPARLHRIVPRLRDVFGWGNLTCPICKGLFTAINLGLKKEPNVARVGSVAIKLCNLLKIAPPAVCQSIVHLFEDDMVEVWRRSVLSPSEACGLLLGSTCGHWDIFSSWNISLPTVPKPPPKPPSPPAPGAPVSRILFLTDLHWDHDYLEGTDPDCADPLCCRRGSGLPPASRPGAGYWGEYSKCDLPLRTLESLLSGLGPAGPFDMVYWTGDIPAHDVWHQTRQDQLRALTTVTALVRKFLGPVPVYPAVGNHESTPVNSFPPPFIEGNHSSRWLYEAMAKAWEPWLPAEALRTLRYLSSVETQEGKRKNWGVLCSFPIPRSPPHLSQYEFLFP

SEQ ID NO: 312806 - DNA, 1098 bp, Artificial Sequence
  derived and/or modified sequence
atgccccgctacggcgccagcctgcgccagagctgcccccgcagcggccgcgagcagggccaggacggcaccgccggcgcccccggcctgctgtggatgggcctggtgctggccctggccctggccctggccctggccctggccctgagcgacagccgcgtgctgtgggcccccgccgaggcccaccccctgagcccccagggccaccccgcccgcctgcaccgcatcgtgccccgcctgcgcgacgtgttcggctggggcaacctgacctgccccatctgcaagggcctgttcaccgccatcaacctgggcctgaagaaggagcccaacgtggcccgcgtgggcagcgtggccatcaagctgtgcaacctgctgaagatcgccccccccgccgtgtgccagagcatcgtgcacctgttcgaggacgacatggtggaggtgtggcgccgcagcgtgctgagccccagcgaggcctgcggcctgctgctgggcagcacctgcggccactgggacatcttcagcagctggaacatcagcctgcccaccgtgcccaagcccccccccaagccccccagcccccccgcccccggcgcccccgtgagccgcatcctgttcctgaccgacctgcactgggaccacgactacctggagggcaccgaccccgactgcgccgaccccctgtgctgccgccgcggcagcggcctgccccccgccagccgccccggcgccggctactggggcgagtacagcaagtgcgacctgcccctgcgcaccctggagagcctgctgagcggcctgggccccgccggccccttcgacatggtgtactggaccggcgacatccccgcccacgacgtgtggcaccagacccgccaggaccagctgcgcgccctgaccaccgtgaccgccctggtgcgcaagttcctgggccccgtgcccgtgtaccccgccgtgggcaaccacgagagcacccccgtgaacagcttccccccccccttcatcgagggcaaccacagcagccgctggctgtacgaggccatggccaaggcctgggagccctggctgcccgccgaggccctgcgcaccctgcgctgcatc

SEQ ID NO: 312807 - DNA, 1206 bp, Artificial Sequence
  derived and/or modified sequence
atgccccgctacggcgccagcctgcgccagagctgcccccgcagcggccgcgagcagggccaggacggcaccgccggcgcccccggcctgctgtggatgggcctggtgctggccctggccctggccctggccctggccctggccctgagcgacagccgcgtgctgtgggcccccgccgaggcccaccccctgagcccccagggccaccccgcccgcctgcaccgcatcgtgccccgcctgcgcgacgtgttcggctggggcaacctgacctgccccatctgcaagggcctgttcaccgccatcaacctgggcctgaagaaggagcccaacgtggcccgcgtgggcagcgtggccatcaagctgtgcaacctgctgaagatcgccccccccgccgtgtgccagagcatcgtgcacctgttcgaggacgacatggtggaggtgtggcgccgcagcgtgctgagccccagcgaggcctgcggcctgctgctgggcagcacctgcggccactgggacatcttcagcagctggaacatcagcctgcccaccgtgcccaagcccccccccaagccccccagcccccccgcccccggcgcccccgtgagccgcatcctgttcctgaccgacctgcactgggaccacgactacctggagggcaccgaccccgactgcgccgaccccctgtgctgccgccgcggcagcggcctgccccccgccagccgccccggcgccggctactggggcgagtacagcaagtgcgacctgcccctgcgcaccctggagagcctgctgagcggcctgggccccgccggccccttcgacatggtgtactggaccggcgacatccccgcccacgacgtgtggcaccagacccgccaggaccagctgcgcgccctgaccaccgtgaccgccctggtgcgcaagttcctgggccccgtgcccgtgtaccccgccgtgggcaaccacgagagcacccccgtgaacagcttccccccccccttcatcgagggcaaccacagcagccgctggctgtacgaggccatggccaaggcctgggagccctggctgcccgccgaggccctgcgcaccctgcgctacctgagcagcgtggagacccaggagggcaagcgcaagaactggggcgtgctgtgcagcttccccatcccccgcagccccccccacctgagccagtacgagttcctgttcccc

SEQ ID NO: 312808 - DNA, 1101 bp, Artificial Sequence
  derived and/or modified sequence
atgcccagatacggcgccagcctgagacagagctgccccagaagcggcagagagcagggccaggacggcaccgccggcgcccccggcctgctgtggatgggcctggtgctggccctggccctggccctggccctggccctggccctgagcgacagcagagtgctgtgggcccccgccgaggcccaccccctgagcccccagggccaccccgccagactgcacagaatcgtgcccagactgagagacgtgttcggctggggcaacctgacctgccccatctgcaagggcctgttcaccgccatcaacctgggcctgaagaaggagcccaacgtggccagagtgggcagcgtggccatcaagctgtgcaacctgctgaagatcgccccccccgccgtgtgccagagcatcgtgcacctgttcgaggacgacatggtggaggtgtggagaagaagcgtgctgagccccagcgaggcctgcggcctgctgctgggcagcacctgcggccactgggacatcttcagcagctggaacatcagcctgcccaccgtgcccaagcccccccccaagccccccagcccccccgcccccggcgcccccgtgagcagaatcctgttcctgaccgacctgcactgggaccacgactacctggagggcaccgaccccgactgcgccgaccccctgtgctgcagaagaggcagcggcctgccccccgccagcagacccggcgccggctactggggcgagtacagcaagtgcgacctgcccctgagaaccctggagagcctgctgagcggcctgggccccgccggccccttcgacatggtgtactggaccggcgacatccccgcccacgacgtgtggcaccagaccagacaggaccagctgagagccctgaccaccgtgaccgccctggtgagaaagttcctgggccccgtgcccgtgtaccccgccgtgggcaaccacgagagcacccccgtgaacagcttccccccccccttcatcgagggcaaccacagcagcagatggctgtacgaggccatggccaaggcctgggagccctggctgcccgccgaggccctgagaaccctgagatgcatctag

SEQ ID NO: 312809 - DNA, 1209 bp, Artificial Sequence
  derived and/or modified sequence
atgcccagatacggcgccagcctgagacagagctgccccagaagcggcagagagcagggccaggacggcaccgccggcgcccccggcctgctgtggatgggcctggtgctggccctggccctggccctggccctggccctggccctgagcgacagcagagtgctgtgggcccccgccgaggcccaccccctgagcccccagggccaccccgccagactgcacagaatcgtgcccagactgagagacgtgttcggctggggcaacctgacctgccccatctgcaagggcctgttcaccgccatcaacctgggcctgaagaaggagcccaacgtggccagagtgggcagcgtggccatcaagctgtgcaacctgctgaagatcgccccccccgccgtgtgccagagcatcgtgcacctgttcgaggacgacatggtggaggtgtggagaagaagcgtgctgagccccagcgaggcctgcggcctgctgctgggcagcacctgcggccactgggacatcttcagcagctggaacatcagcctgcccaccgtgcccaagcccccccccaagccccccagcccccccgcccccggcgcccccgtgagcagaatcctgttcctgaccgacctgcactgggaccacgactacctggagggcaccgaccccgactgcgccgaccccctgtgctgcagaagaggcagcggcctgccccccgccagcagacccggcgccggctactggggcgagtacagcaagtgcgacctgcccctgagaaccctggagagcctgctgagcggcctgggccccgccggccccttcgacatggtgtactggaccggcgacatccccgcccacgacgtgtggcaccagaccagacaggaccagctgagagccctgaccaccgtgaccgccctggtgagaaagttcctgggccccgtgcccgtgtaccccgccgtgggcaaccacgagagcacccccgtgaacagcttccccccccccttcatcgagggcaaccacagcagcagatggctgtacgaggccatggccaaggcctgggagccctggctgcccgccgaggccctgagaaccctgagatacctgagcagcgtggagacccaggagggcaagagaaagaactggggcgtgctgtgcagcttccccatccccagaagccccccccacctgagccagtacgagttcctgttcccctag

SEQ ID NO: 312810 - DNA, 1101 bp, Artificial Sequence
  derived and/or modified sequence
atgcccaggtacggcgcctctcttaggcagagttgcccacggtcgggccgcgagcaggggcaggacggaactgcaggggcacccggtctcctctggatgggtctggtgctcgccctcgcactagctctggctttagctttagctttgagcgatagccgcgttctgtgggctcccgctgaggcccaccccctgtctccacagggccatcctgctcgactgcacagaattgtccctaggctgagggatgtgttcggttggggcaacctgacatgcccgatctgcaaaggtttatttaccgctatcaatttaggcctgaagaaagagcccaatgttgctagggtgggatccgtagctataaagctctgtaaccttttaaagattgcgccccctgccgtgtgccaaagcatagttcacctgtttgaggacgacatggtggaagtctggcgccgctccgtcctctccccctccgaagcctgtggcctgctccttggctccacttgcgggcattgggacattttctcatcgtggaatatcagtctccccactgtcccaaaaccaccacccaagcctccctcgccacctgcacccggagcccctgtgtcccgcatcctgtttctaacagacctgcattgggaccacgactatctggagggtactgatccagactgtgccgaccctctgtgctgtaggcggggttccggtctgcccccggccagccggcccggtgccggttattggggtgagtactcaaagtgcgatctgccgttgagaacattagaaagtttgttaagcgggctgggtcctgcggggccgttcgatatggtgtattggaccggggacatcccagctcacgacgtgtggcaccagacaaggcaagaccaactgcgcgccctgaccacagtgaccgcattggtccgaaagttcctggggcctgtacccgtttatccagccgtgggtaatcacgaatcaacccctgtcaatagcttcccacccccatttatagagggcaatcatagttccagatggctctatgaggccatggcgaaagcctgggaaccctggctgcccgccgaggctctacggactctgaggtgcatttag

SEQ ID NO: 312811 - DNA, 1209 bp, Artificial Sequence
  derived and/or modified sequence
atgccaagatatggggcttcactgcgacagtcgtgcccccggagtggcagagaacaaggtcaggatggcaccgccggagctccaggacttctttggatgggattggtgctggctctagctctcgctctagcccttgcccttgcactaagcgattctcgtgttttgtgggctcctgctgaggcccatccactctcaccccaggggcacccagcacgtctccatagaatcgtaccccgcctgagggatgtgttcggctggggcaatttgacctgtcctatttgcaagggcctttttaccgccattaacctaggccttaagaaggagccaaatgtcgcgcgcgtcggatccgtcgcaataaagttatgtaaccttttgaagatcgctccaccagccgtctgccagtccatcgttcatctattcgaggacgatatggtagaagtttggaggagatctgtcctgtcacctagcgaagcatgtggcctcctgctgggctcaacatgtggtcattgggatatttttagctcttggaacataagtttgccaacggtccctaaaccccctccgaagccccccagcccccctgcccctggggcacccgtttctcgcatactgtttttgacagacttgcactgggaccacgattacctggaaggcactgaccctgactgcgccgatcccttatgttgccgtagaggctcaggcctgcctcccgctagccgacccggcgctggatattggggcgaatatagcaagtgcgacctgcccctgcgtacgttggaaagcctcctgagcgggctcgggcctgcaggacccttcgacatggtgtattggaccggcgatattccagctcacgatgtttggcaccagacgcggcaggaccagctgagagccttgacaacggttaccgctctggtaaggaaattcttgggccccgtaccagtgtaccccgctgtgggaaaccatgaaagcactcctgtcaattccttccctcccccctttattgagggcaatcactcatcccgatggctctacgaagccatggcgaaggcgtgggagccttggcttcccgcagaggcgctgcgcacattaagatacctgtccagtgtcgagactcaggagggcaagcggaaaaactggggcgtcctgtgttccttccccatcccacgctccccacctcacctgtcccagtatgaattcctcttcccctag

SEQ ID NO: 312812 - DNA, 1101 bp, Artificial Sequence
  derived and/or modified sequence
atgccccgctacggggccagcctgcggcagagctgccccaggagcggccgggagcagggccaggacggcacagctggggcccctggcctgctgtggatgggcctggtgctggccctggccctggccctggccctggccctggccctgagtgacagccgggtgctgtgggccccagctgaggcccaccccctgagcccccagggccacccagcccggctgcaccgcatcgtgccccggctgagagatgtgtttggctggggcaacctgacctgccccatctgcaagggcctcttcaccgccatcaacctgggcctgaagaaggagcccaacgtggcccgggtgggctctgtggccatcaagctgtgcaacctgctgaagatcgcccctcctgctgtgtgccagagcatcgtgcacctgtttgaagatgacatggtggaggtgtggaggagatctgtgctgagccccagcgaggcctgtggcctgctgctgggcagcacctgtggccactgggacatcttcagctcctggaacatcagcctgcccaccgtgcccaagcccccacccaagccacccagccccccagcccctggggcccctgtgagccgcatcctcttcctgacagacctgcactgggaccatgactacctggagggcacagatcctgactgtgccgaccccctgtgctgccggcggggcagcggcctgcccccagccagcaggcctggagctggctactggggcgagtacagcaaatgtgacctgcccctgcggaccctggagagcctgctgagcggcctgggccctgctggcccctttgacatggtgtactggacaggagacatcccagcccatgatgtgtggcaccagacccggcaggaccagctgcgggccctgaccaccgtgacagccctggtgaggaagttcctgggccctgtgcctgtgtacccagctgtgggcaaccacgagagcacccctgtgaacagcttccccccacccttcatcgagggcaaccacagcagccgctggctgtatgaggccatggccaaggcctgggagccctggctgcctgctgaggccctgcggaccctgcgctgcatctag

SEQ ID NO: 312813 - DNA, 1209 bp, Artificial Sequence
  derived and/or modified sequence
atgccccgctacggggccagcctgcggcagagctgccccaggagcggccgggagcagggccaggacggcacagctggggcccctggcctgctgtggatgggcctggtgctggccctggccctggccctggccctggccctggccctgagtgacagccgggtgctgtgggccccagctgaggcccaccccctgagcccccagggccacccagcccggctgcaccgcatcgtgccccggctgagagatgtgtttggctggggcaacctgacctgccccatctgcaagggcctcttcaccgccatcaacctgggcctgaagaaggagcccaacgtggcccgggtgggctctgtggccatcaagctgtgcaacctgctgaagatcgcccctcctgctgtgtgccagagcatcgtgcacctgtttgaagatgacatggtggaggtgtggaggagatctgtgctgagccccagcgaggcctgtggcctgctgctgggcagcacctgtggccactgggacatcttcagctcctggaacatcagcctgcccaccgtgcccaagcccccacccaagccacccagccccccagcccctggggcccctgtgagccgcatcctcttcctgacagacctgcactgggaccatgactacctggagggcacagatcctgactgtgccgaccccctgtgctgccggcggggcagcggcctgcccccagccagcaggcctggagctggctactggggcgagtacagcaaatgtgacctgcccctgcggaccctggagagcctgctgagcggcctgggccctgctggcccctttgacatggtgtactggacaggagacatcccagcccatgatgtgtggcaccagacccggcaggaccagctgcgggccctgaccaccgtgacagccctggtgaggaagttcctgggccctgtgcctgtgtacccagctgtgggcaaccacgagagcacccctgtgaacagcttccccccacccttcatcgagggcaaccacagcagccgctggctgtatgaggccatggccaaggcctgggagccctggctgcctgctgaggccctgcggaccctgcgctacctgagctctgtggagacccaggagggcaagaggaagaactggggcgtgctgtgcagcttccccatccccaggagccccccccacctgagccagtatgagttcctgttcccctag

SEQ ID NO: 312814 - DNA, 1101 bp, Artificial Sequence
  derived and/or modified sequence
atgccccggtacggcgccagcctgcggcagagctgcccccggagcggacgggagcagggccaggatggtaccgccggcgcccctggcttactgtggatgggcctagtcctggcgctagccctggctctggccctagcactcgccctatccgatagcagagtgctgtgggccccggccgaggcccacccgctgtctccacagggccatcccgcacgactccaccgtatcgtgccccggctacgggatgtgttcggctggggaaatctcacttgccctatctgtaaaggtctgttcactgccatcaacctgggcttgaagaaggagccgaatgtggccagagtcggatcagtggctattaaattgtgtaaccttctaaaaatcgccccacctgctgtgtgtcagtcaattgtgcatttgtttgaggacgatatggtagaggtgtggaggaggagcgtgctttccccatctgaggcctgcggtttgctcctgggctccacctgtggacattgggacatttttagctcctggaacataagtctgccaacagtcccaaaaccaccccctaaacccccttccccccctgccccgggagcccccgtctcaagaatcctgtttctgaccgacctccattgggatcatgactatctggaaggtactgaccctgactgtgccgaccccctttgctgcagacgtggaagtggcttgcctcctgcttcccgacctggtgcaggctattggggcgaatacagcaaatgcgatctgccccttaggactttggagagccttctgagcggcctcggcccggctggccccttcgatatggtatattggacaggggacatccccgctcacgatgtttggcaccagacacgacaggatcaactgcgcgctctgaccacagtgaccgcattagtccggaaattcctgggccctgtgccggtgtatcctgccgtcgggaatcatgaatccacccctgtgaacagtttcccccctcccttcattgaaggcaatcacagtagccgctggttgtacgaagccatggccaaagcatgggagccttggttgcccgcggaggcgcttcgaaccttgagatgtatttag

SEQ ID NO: 312815 - DNA, 1209 bp, Artificial Sequence
  derived and/or modified sequence
atgccccggtacggcgccagcctgcggcagagctgcccccggagcgggagggagcagggacaagatggtacagccggtgcccccggtctgctgtggatgggcttggtccttgcgctggcactggccctggcgttggccttggccctgtccgacagtcgagtcctgtgggctccagccgaggcgcacccactatcgccccagggtcatccagctaggctgcacagaattgtcccacggctgcgggacgtgtttggatggggcaacttgacctgtcccatatgtaaagggctgtttaccgcaatcaacctgggcctgaagaaagagcccaacgttgcaagggttggaagcgtggcaataaaattgtgcaacctcctgaaaatcgctcccccagctgtgtgccagtcaatcgtgcatttatttgaggacgacatggtggaagtatggagacgctcagtgttaagcccctctgaagcatgcggactgctacttggaagcacttgcggccattgggacatcttctcttcttggaacatttctctgcccacagtgcccaagcctccaccaaaaccaccctccccccctgcacctggtgcgccagtgtcccggattcttttccttaccgatcttcactgggatcacgattatctggaaggtaccgatcccgattgtgcagatcctctatgttgccggcgcggtagcggattaccaccggcaagtcgaccaggcgccggctactggggtgagtactccaagtgcgacctgcctctcagaacccttgagtccttgctttccgggctcggtcctgctggaccgtttgacatggtctattggaccggcgacattcccgctcacgatgtgtggcaccaaacgaggcaggatcagcttcgtgcacttaccaccgtaacggccctcgtgcgcaagtttctggggcccgtacctgtttacccagccgtagggaatcacgaatccacaccagtgaattcattcccccctccgttcatagaaggcaaccattctagtaggtggctatacgaggctatggcgaaagcctgggaaccatggcttcctgctgaagccctgcgaaccctccggtacctcagttcggtcgagacacaggaaggcaagagaaaaaactggggcgtgctgtgcagctttcccattccccggtctcctcctcacctctcgcagtatgaatttcttttcccatag

SEQ ID NO: 312816 - DNA, 1101 bp, Artificial Sequence
  derived and/or modified sequence
atgcctcggtatggagcatccctcaggcaaagctgcccacggtcggggagagagcagggtcaggacggaactgccggagccccaggactgctgtggatgggactggtactggcccttgcactggcattggcattggccttggctctgtctgacagcagagtgttgtgggctccagctgaggcacacccactaagtccccaaggacacccagcgaggttgcaccgtattgtgccaagactccgtgatgtcttcgggtggggaaacctgacctgcccaatatgtaaagggctttttacggccatcaacctcggtcttaagaaggaaccaaacgtggccagggtcggatctgtggcgataaagctatgtaacctcttaaagatcgcaccccctgccgtctgtcagagtatcgttcatctctttgaagacgatatggttgaggtctggagacgctcagtccttagcccctcagaagcttgtggattgttgctcgggtccacgtgtggacactgggatattttctcaagttggaacattagcttgccgacagttcccaagccaccaccaaagccaccttctcccccagccccaggagcccctgtgtcgcgaatcctcttcctgacagatcttcattgggaccatgattacctggaggggactgatcctgactgcgcagaccccttatgctgccgtagagggagtggcctcccccctgcctccagacctggcgctggttactggggagagtatagcaaatgtgatctacccttgcgcactctggaaagccttctcagcgggcttggacccgctggaccctttgatatggtgtactggactggcgacataccagcccatgatgtctggcaccagacgagacaagaccagcttagggcgttgactacagtgaccgctctagttcggaagttcctgggacccgtccccgtgtaccctgctgtgggaaatcatgagtctacgccagtgaatagttttccaccgccatttatcgaaggaaaccattccagccgctggctctacgaggcaatggctaaggcatgggaaccgtggctgcctgccgaggcactgcggaccctgcgttgcatttag

SEQ ID NO: 312817 - DNA, 1209 bp, Artificial Sequence
  derived and/or modified sequence
atgcctaggtatggggcttctcttcggcagtcatgtccgaggagtggccgagaacaggggcaggatggtactgcaggagcaccgggtctgctctggatggggttggtcttggccctggctctggcgctcgcgctcgccctcgcactgtcagactcccgagttctgtgggcacccgctgaagcccatcccctgagtccacagggacatcctgcaaggcttcacaggatcgtcccccgactgagggatgttttcggatggggtaacttgacctgccccatttgtaaaggccttttcacagctattaacttgggactaaaaaaagaacctaacgtcgccagggtgggaagtgttgccatcaagctgtgcaaccttctgaagatcgctcctccagccgtctgccagagcattgtccatctcttcgaagacgacatggtcgaagtttggcggaggagcgtcttgtctccttctgaggcatgtggcctgctcctgggttctacttgtggacactgggacattttctcttcctggaatatttctcttccgacagtgccaaagccaccacctaaaccaccctcaccaccggcaccaggcgctccagtgtccagaatcctcttcctcacggacctccactgggatcacgattatctggaggggacggaccctgactgtgctgatcccctttgctgtaggcgcggaagcgggctgcctcccgcttcccgcccaggtgcgggatactggggtgaatacagcaagtgtgatctacccttacgcactttggaatccctgctttcaggcttgggaccggctggaccctttgatatggtgtactggaccggcgacattcccgcacatgacgtgtggcaccaaaccaggcaggatcaactgcgtgccctcaccacagtgacagctctcgtgcgcaagtttctgggaccagtccccgtgtaccccgcagtaggcaaccacgaaagcacaccggtgaactcctttccaccaccttttattgaaggtaatcactctagtcggtggttgtacgaggctatggccaaggcgtgggaaccatggctccccgctgaagctttacgaacattacgctatttaagctcggtcgaaacccaggaggggaagcggaagaattggggggtgctctgcagcttcccaatcccacgttctccaccacacctgtcacagtatgaatttctctttccatag

SEQ ID NO: 312818 - DNA, 1101 bp, Artificial Sequence
  derived and/or modified sequence
atgccccgttacggtgcctccctccgccaaagttgccccaggagtggccgagagcagggccaggatggcactgctggtgcgccaggactcctctggatgggactggtactggccctcgccctcgccttggcgttggctctcgccttaagcgatagcagggtgctgtgggccccagctgaagctcacccgcttagtccccaaggccatcctgctaggctgcaccggatagtacctcgccttagagatgtgttcggctggggaaacctcacgtgccctatatgtaagggactctttactgcgatcaatctgggactgaagaaggaaccgaatgtagccagggttggctctgtagcaatcaagttatgcaatctactcaagattgccccccccgctgtgtgtcagtcgatcgtgcatctgtttgaagacgacatggtggaagtgtggcgtcgttcagtgctgtctccctctgaagcctgcggtctgctgctagggtcaacatgtgggcattgggatatcttctcctcctggaacatctctctgcctaccgtgcccaagccgccgcccaagcccccatctccccctgcaccaggagctcctgtaagcagaatcctctttttgacagatcttcattgggatcacgattacctagagggaacagatcctgactgcgcagatcctctctgttgcagacgcggaagtggcttgcctcccgcaagtcgaccaggagccggctattggggcgaatactctaaatgcgacttgcctctcaggaccctcgagtcactgttaagcggtcttggcccagcggggccatttgacatggtgtattggaccggtgatattcccgctcacgacgtttggcatcagactcggcaagaccagctgcgcgcccttactaccgtaaccgctctggttcgcaagtttcttggcccggtgcccgtgtaccccgctgtaggcaatcacgaatccacccccgtgaactcatttccccctccatttatcgaaggcaaccacagtagtagatggctctatgaagcaatggccaaagcctgggagccttggttacccgcagaagctcttcgcaccctgagatgcatttag

SEQ ID NO: 312819 - DNA, 1209 bp, Artificial Sequence
  derived and/or modified sequence
atgccccggtacggtgcttccctccgccagtcatgtccaagaagcggccgcgagcaggggcaggatggaacagcaggcgcacctgggctgctctggatggggctcgttctcgccttagccctggcactggctctagctttagccctgtccgattcacgcgtcctgtgggcgcccgccgaagcacaccctctttcaccacaggggcaccccgcacgactacatcgcatagttccgcgtctacgggacgtcttcggttggggcaatttgacgtgcccaatttgcaagggccttttcacagctatcaaccttggattaaagaaagaacccaatgttgctagagttggctctgtggccattaagttgtgtaacctgttaaaaatcgctcccccagccgtctgtcagtcaatcgtgcatctctttgaggacgacatggtagaagtgtggagaagatctgtactgtccccaagtgaggcctgcggcctccttctcgggagcacttgcggacattgggatatattctcaagctggaatatctctctcccaacagttcccaagcctccccccaaacccccttctcctccagcccccggcgctcccgtgagccgtatcctgttcctgaccgaccttcattgggaccacgactatctggaagggacagaccccgattgtgctgacccgctgtgttgccgcaggggctccgggctcccacctgcaagtcggccaggtgcagggtactggggagagtactctaagtgtgatctgcccctcaggaccctggaatccctgctgtctggcctcggcccagccgggccatttgacatggtgtactggactggcgacattcccgctcacgacgtctggcatcaaacccgacaggaccaactgcgcgccttgactactgtaaccgccctcgtccgtaaattcctgggaccagttcctgtctatcccgccgtcggaaatcatgaaagcactcccgtgaatagttttccccccccctttatcgagggcaaccactcctcacggtggttgtacgaagcgatggccaaggcttgggagccatggcttcctgcagaggctctgagaacccttcggtatctgtcatccgtagagacacaggaagggaaacgcaagaattggggagtactgtgcagctttccgattccccggagcccgccacatttgagccaatacgaatttttgttcccttag

SEQ ID NO: 312820 - DNA, 1101 bp, Artificial Sequence
  derived and/or modified sequence
atgcccagatacggcgcaagcctccgtcaatcatgccctagaagcggcagggaacagggtcaagacggcaccgccggcgctcctggcctgctttggatgggacttgttctcgcattggccctagcccttgcactggctttagccttgagtgattctagagtactttgggcaccagctgaagctcatcccctttcaccccaggggcatcccgctcgactgcacaggatagtgcctcgcctgcgagatgtgttcggctgggggaacttgacttgtcctatttgcaagggtctgttcaccgctattaacctaggactcaaaaaagagcccaacgtagcaagagttggtagcgttgcaattaagctgtgtaatctcctaaaaattgcaccccctgccgtatgccagtcaatagtccacctgtttgaagatgatatggttgaagtgtggcgtcgctccgtactttcgcctagtgaagcctgtggcctcctcttagggagtacttgcggccactgggatatcttctcatcttggaatatcagtctacccacggtccctaagccacccccgaaacctccaagtccgcccgcaccaggagcacccgtgtcaagaattctcttcctaacagaccttcactgggaccacgactacctcgaaggaaccgaccctgattgcgctgaccccctctgttgcaggcgcggctccggactaccccccgccagccgccccggcgccggctactggggcgaatactctaaatgtgacttgcccctgcgcacactggaatccctccttagcggactgggtcctgcgggcccattcgacatggtgtattggacgggcgatattccagcccacgacgtatggcaccagacacgccaggaccagctaagagccctgacgactgttaccgctctcgtaagaaaatttttggggcctgtgcccgtctatcccgctgtgggcaaccatgaatcaacacctgtaaacagttttcctccccctttcatcgaagggaatcattctagtaggtggctttatgaggccatggcaaaagcctgggagccctggttaccagccgaagcattacggacactccgatgtatttag

SEQ ID NO: 312821 - DNA, 1209 bp, Artificial Sequence
  derived and/or modified sequence
atgcccagatacggagccagtctgagacagagttgccctagaagcgggcgtgaacaggggcaagatgggactgccggtgcccccggtctgctgtggatgggattagtccttgcactcgccctcgccctcgccttagccctagccttatcagattctcgggtgttatgggcccctgccgaggcccacccgctcagtccccagggacatccggcaaggctgcatcggatcgtcccaagacttcgagatgtgtttggatggggaaatcttacatgcccaatctgcaagggattattcaccgcaatcaaccttggattaaagaaagaacccaatgttgctagagttggctctgtggccattaagttgtgtaacctgttaaaaatcgctcccccagccgtctgtcagtcaatcgtgcatctctttgaggacgacatggtagaagtgtggagaagatctgtactgtccccaagtgaggcctgcggcctccttctcgggagcacttgcggacattgggatatattctcaagctggaatatctctctcccaacagttcccaagcctccccccaaacccccttctcctccagcccccggcgctcccgtgtcccggattctatttttaactgacctgcactgggatcacgattaccttgaaggcacagaccctgactgcgctgatccattgtgttgtcgtcgaggttcgggactgccacctgctagccgacccggcgccggttactggggcgagtactccaaatgcgatctgccactacgtactctcgagagcttactgtccggtctcgggcctgctggaccatttgacatggtctactggacgggcgatattccggcccatgacgtctggcaccagactcgacaagatcagctccgtgcgctgacaactgttaccgcactcgttaggaaatttttagggccggtacccgtttatccagcggtgggcaaccatgaaagtacacctgttaacagctttccacctccttttatcgaaggcaaccactcatctcggtggctatacgaggcaatggccaaagcttgggaaccctggctccctgccgaagcccttcgcactcttagatatcttagtagcgtagagacacaagaggggaagagaaaaaactggggtgtgctctgtagcttccccattccacgctccccaccccacctgtcccagtacgagttccttttcccatag

SEQ ID NO: 312822 - DNA, 2446 bp, Artificial Sequence
  derived and/or modified sequence
cagtcagccgactacagagaagggtaatcgggtgtccccggcgccgcccggggccctgagggctggctagggtccaggccgggggggacgggacagacgaaccagccccgtgtaggaagcgcgacaatgccccgctacggagcgtcactccgccagagctgccccaggtccggccgggagcagggacaagacgggaccgccggagcccccggactcctttggatgggcctggtgctggcgctggcgctggcgctggcgctggcgctggctctgtctgactctcgggttctctgggctccggcagaggctcaccctctttctccccaaggccatcctgccaggttacatcgcatagtgccccggctccgagatgtctttgggtgggggaacctcacctgcccaatctgcaaaggtctattcaccgccatcaacctcgggctgaagaaggaacccaatgtggctcgcgtgggctccgtggccatcaagctgtgcaatctgctgaagatagcaccacctgccgtgtgccaatccattgtccacctctttgaggatgacatggtggaggtgtggagacgctcagtgctgagcccatctgaggcctgtggcctgctcctgggctccacctgtgggcactgggacattttctcatcttggaacatctctttgcctactgtgccgaagccgccccccaaaccccctagccccccagccccaggtgcccctgtcagccgcatcctcttcctcactgacctgcactgggatcatgactacctggagggcacggaccctgactgtgcagacccactgtgctgccgccggggttctggcctgccgcccgcatcccggccaggtgccggatactggggcgaatacagcaagtgtgacctgcccctgaggaccctggagagcctgttgagtgggctgggcccagccggcccttttgatatggtgtactggacaggagacatccccgcacatgatgtctggcaccagactcgtcaggaccaactgcgggccctgaccaccgtcacagcacttgtgaggaagttcctggggccagtgccagtgtaccctgctgtgggtaaccatgaaagcacacctgtcaatagcttccctccccccttcattgagggcaaccactcctcccgctggctctatgaagcgatggccaaggcttgggagccctggctgcctgccgaagccctgcgcaccctcaggtacttatcgtccgtggaaacccaggaagggaaaagaaagaattggggggttctatgctctttccccataccccggtctccgcctcatctctctcaatatgaatttttgttcccgtgagaacttctggctcttgatcaactccacggatcccgcaggacagctccagtggctggtgggggagcttcaggctgctgaggatcgaggagacaaagtgcatataattggccacattcccccagggcactgtctgaagagctggagctggaattattaccgaattgtagccaggtatgagaacaccctggctgctcagttctttggccacactcatgtggatgaatttgaggtcttctatgatgaagagactctgagccggccgctggctgtagccttcctggcacccagtgcaactacctacatcggccttaatcctggttaccgtgtgtaccaaatagatggaaactactccgggagctctcacgtggtcctggaccatgagacctacatcctgaatctgacccaggcaaacataccgggagccataccgcactggcagcttctctacagggctcgagaaacctatgggctgcccaacacactgcctaccgcctggcacaacctggtatatcgcatgcggggcgacatgcaacttttccagaccttctggtttctctaccataagggccacccaccctcggagccctgtggcacgccctgccgtctggctactctttgtgcccagctctctgcccgtgctgacagccctgctctgtgccgccacctgatgccagatgggagcctcccagaggcccagagcctgtggccaaggccactgttttgctagggccccagggcccacatttgggaaagttcttgatgtaggaaagggtgaaaaagcccaaatgctgctgtggttcaaccaggcaagatcatccggtgaaagaaccagtccctgggccccaaggatgccggggaaacaggaccttctcctttcctggagctggtttagctggatatgggagggggtttggctgcctgtgcccaggagctagactgccttgaggctgctgtcctttcacagccatggagtagaggcctaagttgacactgccctgggcagacaagacaggagctgtcgccccaggcctgtgctgcccagccaggaaccctgtactgctgctgcgacctgatgctgccagtctgttaaaataaagataagagacttgga

SEQ ID NO: 312823 - RNA, 1101 nt, Artificial Sequence
  derived and/or modified sequence
augccccguuacggugccucccuccgccaaaguugccccaggaguggccgagagcagggccaggauggcacugcuggugcgccaggacuccucuggaugggacugguacuggcccucgcccucgccuuggcguuggcucucgccuuaagcgauagcagggugcugugggccccagcugaagcucacccgcuuaguccccaaggccauccugcuaggcugcaccggauaguaccucgccuuagagauguguucggcuggggaaaccucacgugcccuauauguaagggacucuuuacugcgaucaaucugggacugaagaaggaaccgaauguagccaggguuggcucuguagcaaucaaguuaugcaaucuacucaagauugccccccccgcugugugucagucgaucgugcaucuguuugaagacgacaugguggaaguguggcgucguucagugcugucucccucugaagccugcggucugcugcuagggucaacaugugggcauugggauaucuucuccuccuggaacaucucucugccuaccgugcccaagccgccgcccaagcccccaucucccccugcaccaggagcuccuguaagcagaauccucuuuuugacagaucuucauugggaucacgauuaccuagagggaacagauccugacugcgcagauccucucuguugcagacgcggaaguggcuugccucccgcaagucgaccaggagccggcuauuggggcgaauacucuaaaugcgacuugccucucaggacccucgagucacuguuaagcggucuuggcccagcggggccauuugacaugguguauuggaccggugauauucccgcucacgacguuuggcaucagacucggcaagaccagcugcgcgcccuuacuaccguaaccgcucugguucgcaaguuucuuggcccggugcccguguaccccgcuguaggcaaucacgaauccacccccgugaacucauuucccccuccauuuaucgaaggcaaccacaguaguagauggcucuaugaagcaauggccaaagccugggagccuugguuacccgcagaagcucuucgcacccugagaugcauuuag

SEQ ID NO: 312824 - RNA, 1209 nt, Artificial Sequence
  derived and/or modified sequence
augccccgguacggugcuucccuccgccagucauguccaagaagcggccgcgagcaggggcaggauggaacagcaggcgcaccugggcugcucuggauggggcucguucucgccuuagcccuggcacuggcucuagcuuuagcccuguccgauucacgcguccugugggcgcccgccgaagcacacccucuuucaccacaggggcaccccgcacgacuacaucgcauaguuccgcgucuacgggacgucuucgguuggggcaauuugacgugcccaauuugcaagggccuuuucacagcuaucaaccuuggauuaaagaaagaacccaauguugcuagaguuggcucuguggccauuaaguuguguaaccuguuaaaaaucgcucccccagccgucugucagucaaucgugcaucucuuugaggacgacaugguagaaguguggagaagaucuguacuguccccaagugaggccugcggccuccuucucgggagcacuugcggacauugggauauauucucaagcuggaauaucucucucccaacaguucccaagccuccccccaaacccccuucuccuccagcccccggcgcucccgugagccguauccuguuccugaccgaccuucauugggaccacgacuaucuggaagggacagaccccgauugugcugacccgcuguguugccgcaggggcuccgggcucccaccugcaagucggccaggugcaggguacuggggagaguacucuaagugugaucugccccucaggacccuggaaucccugcugucuggccucggcccagccgggccauuugacaugguguacuggacuggcgacauucccgcucacgacgucuggcaucaaacccgacaggaccaacugcgcgccuugacuacuguaaccgcccucguccguaaauuccugggaccaguuccugucuaucccgccgucggaaaucaugaaagcacucccgugaauaguuuucccccccccuuuaucgagggcaaccacuccucacggugguuguacgaagcgauggccaaggcuugggagccauggcuuccugcagaggcucugagaacccuucgguaucugucauccguagagacacaggaagggaaacgcaagaauuggggaguacugugcagcuuuccgauuccccggagcccgccacauuugagccaauacgaauuuuuguucccuuag

SEQ ID NO: 312825 - RNA, 1101 nt, Artificial Sequence
  derived and/or modified sequence
augcccagauacggcgcaagccuccgucaaucaugcccuagaagcggcagggaacagggucaagacggcaccgccggcgcuccuggccugcuuuggaugggacuuguucucgcauuggcccuagcccuugcacuggcuuuagccuugagugauucuagaguacuuugggcaccagcugaagcucauccccuuucaccccaggggcaucccgcucgacugcacaggauagugccucgccugcgagauguguucggcugggggaacuugacuuguccuauuugcaagggucuguucaccgcuauuaaccuaggacucaaaaaagagcccaacguagcaagaguugguagcguugcaauuaagcuguguaaucuccuaaaaauugcacccccugccguaugccagucaauaguccaccuguuugaagaugauaugguugaaguguggcgucgcuccguacuuucgccuagugaagccuguggccuccucuuagggaguacuugcggccacugggauaucuucucaucuuggaauaucagucuacccacggucccuaagccacccccgaaaccuccaaguccgcccgcaccaggagcacccgugucaagaauucucuuccuaacagaccuucacugggaccacgacuaccucgaaggaaccgacccugauugcgcugacccccucuguugcaggcgcggcuccggacuaccccccgccagccgccccggcgccggcuacuggggcgaauacucuaaaugugacuugccccugcgcacacuggaaucccuccuuagcggacuggguccugcgggcccauucgacaugguguauuggacgggcgauauuccagcccacgacguauggcaccagacacgccaggaccagcuaagagcccugacgacuguuaccgcucucguaagaaaauuuuuggggccugugcccgucuaucccgcugugggcaaccaugaaucaacaccuguaaacaguuuuccucccccuuucaucgaagggaaucauucuaguagguggcuuuaugaggccauggcaaaagccugggagcccugguuaccagccgaagcauuacggacacuccgauguauuuag

SEQ ID NO: 312826 - RNA, 1209 nt, Artificial Sequence
  derived and/or modified sequence
augcccagauacggagccagucugagacagaguugcccuagaagcgggcgugaacaggggcaagaugggacugccggugcccccggucugcuguggaugggauuaguccuugcacucgcccucgcccucgccuuagcccuagccuuaucagauucucggguguuaugggccccugccgaggcccacccgcucaguccccagggacauccggcaaggcugcaucggaucgucccaagacuucgagauguguuuggauggggaaaucuuacaugcccaaucugcaagggauuauucaccgcaaucaaccuuggauuaaagaaagaacccaauguugcuagaguuggcucuguggccauuaaguuguguaaccuguuaaaaaucgcucccccagccgucugucagucaaucgugcaucucuuugaggacgacaugguagaaguguggagaagaucuguacuguccccaagugaggccugcggccuccuucucgggagcacuugcggacauugggauauauucucaagcuggaauaucucucucccaacaguucccaagccuccccccaaacccccuucuccuccagcccccggcgcucccgugucccggauucuauuuuuaacugaccugcacugggaucacgauuaccuugaaggcacagacccugacugcgcugauccauuguguugucgucgagguucgggacugccaccugcuagccgacccggcgccgguuacuggggcgaguacuccaaaugcgaucugccacuacguacucucgagagcuuacuguccggucucgggccugcuggaccauuugacauggucuacuggacgggcgauauuccggcccaugacgucuggcaccagacucgacaagaucagcuccgugcgcugacaacuguuaccgcacucguuaggaaauuuuuagggccgguacccguuuauccagcggugggcaaccaugaaaguacaccuguuaacagcuuuccaccuccuuuuaucgaaggcaaccacucaucucgguggcuauacgaggcaauggccaaagcuugggaacccuggcucccugccgaagcccuucgcacucuuagauaucuuaguagcguagagacacaagaggggaagagaaaaaacuggggugugcucuguagcuuccccauuccacgcuccccaccccaccugucccaguacgaguuccuuuucccauag

SEQ ID NO: 312827 - protein, 111 aa, Artificial Sequence
  derived and/or modified sequence
MTMTANKNSSITHGAGGTKAPRGTLSRSQSVSPPPVLSPPRSPIYPLSDSETSACRYPSHSSSRVLLKDRHPPAPSPQNPQDPSPDTSPPTCPFKTASFGYLDRSPSACKR

SEQ ID NO: 312828 - protein, 95 aa, Artificial Sequence
  derived and/or modified sequence
MTMTANKNSSITHGAGGTKAPRGTLSRSQSVSPPPVLSPPRSPIYPLSDSETSACRYPSHSSSRVLLKDRHPPAPSPQNPQDPSPDTSPPTCPFK

SEQ ID NO: 312829 - protein, 154 aa, Artificial Sequence
  derived and/or modified sequence
MTMTANKNSSITHGAGGTKAPRGTLSRSQSVSPPPVLSPPRSPIYPLSDSETSACRYPSHSSSRVLLKDRHPPAPSPQNPQDPSPDTSPPTCPFKTASFGYLDRSPSACKRDAQKESVQGAAQDVAGVAACLPLAQSTPFPGPAAGPRGVLLTR

SEQ ID NO: 312830 - protein, 144 aa, Artificial Sequence
  derived and/or modified sequence
MTMTANKNSSITHGAGGTKAPRGTLSRSQSVSPPPVLSPPRSPIYPLSDSETSACRYPSHSSSRVLLKDRHPPAPSPQNPQDPSPDTSPPTCPFKTASFGYLDRSPSACKRDAQKESVQGAAQDVAGVAACLPLAQSTPFPGPA

SEQ ID NO: 312831 - protein, 122 aa, Artificial Sequence
  derived and/or modified sequence
MTMTANKNSSITHGAGGTKAPRGTLSRSQSVSPPPVLSPPRSPIYPLSDSETSACRYPSHSSSRVLLKDRHPPAPSPQNPQDPSPDTSPPTCPFKTASFGYLDRSPSACKRDAQKESVQGAA

SEQ ID NO: 312832 - DNA, 123 bp, Artificial Sequence
  derived and/or modified sequence
atgaccatgaccgccaacaagaacagcagcatcacccacggcgccggcggcaccaaggcccccagaggcaccctgagcagaagccagagcgtgagccccccccccgtgctgagccccccctag

SEQ ID NO: 312833 - DNA, 81 bp, Artificial Sequence
  derived and/or modified sequence
atgaccatgaccgccaacaagaacagcagcatcacccacggcgccggcggcaccaaggcccccagaggcaccctgagctag

SEQ ID NO: 312834 - DNA, 93 bp, Artificial Sequence
  derived and/or modified sequence
atgaccatgaccgccaacaagaacagcagcatcacccacggcgccggcggcaccaaggcccccagaggcaccctgagcagaagccagagctag

SEQ ID NO: 312835 - DNA, 123 bp, Artificial Sequence
  derived and/or modified sequence
atgacaatgaccgccaataagaattccagcatcactcacggtgctggtgggactaaggcccccagaggtaccctgtcacgcagtcagtccgtgtcaccgccacccgtcttgtcacctccatag

SEQ ID NO: 312836 - DNA, 81 bp, Artificial Sequence
  derived and/or modified sequence
atgacaatgaccgcgaataagaatagttccattacccacggcgccggcggcaccaaggcacctagaggaacccttagttag

SEQ ID NO: 312837 - DNA, 93 bp, Artificial Sequence
  derived and/or modified sequence
atgaccatgacagcaaataaaaattctagcatcacacacggggcaggggggactaaggctccccgtggaaccctgtctaggagccagtcttag

SEQ ID NO: 312838 - DNA, 123 bp, Artificial Sequence
  derived and/or modified sequence
atgaccatgacagccaacaagaacagcagcatcacccatggagctgggggcaccaaggccccccggggcaccctgagccgcagccagagcgtgtccccacctcctgtgctgagccccccatag

SEQ ID NO: 312839 - DNA, 81 bp, Artificial Sequence
  derived and/or modified sequence
atgaccatgacagccaacaagaacagcagcatcacccatggagctgggggcaccaaggccccccggggcaccctgtcctag

SEQ ID NO: 312840 - DNA, 93 bp, Artificial Sequence
  derived and/or modified sequence
atgaccatgacagccaacaagaacagcagcatcacccatggagctgggggcaccaaggccccccggggcaccctgagccgcagccagagctag

SEQ ID NO: 312841 - DNA, 123 bp, Artificial Sequence
  derived and/or modified sequence
atgaccatgaccgccaacaagaacagcagcatcacccacggcgccggaggcacgaaagcgccaaggggaacactcagccggtcccagtccgtgtctcctccacccgttttgtcaccaccttag

SEQ ID NO: 312842 - DNA, 81 bp, Artificial Sequence
  derived and/or modified sequence
atgaccatgaccgccaacaagaacagcagcatcacccacggcgccggtggaacaaaggcccctcgcggaactctgtcttag

SEQ ID NO: 312843 - DNA, 93 bp, Artificial Sequence
  derived and/or modified sequence
atgaccatgaccgccaacaagaacagcagcatcacccacggcgccggcggtactaaagccccccggggcaccttgtcccggagccaaagctag

SEQ ID NO: 312844 - DNA, 123 bp, Artificial Sequence
  derived and/or modified sequence
atgactatgactgccaacaaaaattcatccattactcatggggcagggggaacaaaagcccctagagggactctgtcgagaagtcagagcgtgtctccacccccagtcctttcaccaccgtag

SEQ ID NO: 312845 - DNA, 81 bp, Artificial Sequence
  derived and/or modified sequence
atgactatgactgctaacaagaactctagtattactcatggcgcaggtggaacgaaggcccctcgtggtacactgagttag

SEQ ID NO: 312846 - DNA, 93 bp, Artificial Sequence
  derived and/or modified sequence
atgaccatgaccgcgaacaaaaattccagcatcacacatggggctggaggcaccaaggctccccgtgggaccttgagtcgttcacagagttag

SEQ ID NO: 312847 - protein, 57 aa, Artificial Sequence
  derived and/or modified sequence
MTMTANKNSSITHGAGGTKAPRGTLSRSQSVSPPPVLSPPRSPIYPLSDSETSACRY

SEQ ID NO: 312848 - protein, 124 aa, Artificial Sequence
  derived and/or modified sequence
MTMTANKNSSITHGAGGTKAPRGTLSRSQSVSPPPVLSPPRSPIYPLSDSETSACRYPSHSSSRVLLKDRHPPAPSPQNPQDPSPDTSPPTCPFKTASFGYLDRSPSACKRDAQKESVQGAAQD

SEQ ID NO: 312849 - protein, 142 aa, Artificial Sequence
  derived and/or modified sequence
MTMTANKNSSITHGAGGTKAPRGTLSRSQSVSPPPVLSPPRSPIYPLSDSETSACRYPSHSSSRVLLKDRHPPAPSPQNPQDPSPDTSPPTCPFKTASFGYLDRSPSACKRDAQKESVQGAAQDVAGVAACLPLAQSTPFPG

SEQ ID NO: 312850 - protein, 53 aa, Artificial Sequence
  derived and/or modified sequence
MTMTANKNSSITHGAGGTKAPRGTLSRSQSVSPPPVLSPPRSPIYPLSDSETS

SEQ ID NO: 312851 - protein, 83 aa, Artificial Sequence
  derived and/or modified sequence
MTMTANKNSSITHGAGGTKAPRGTLSRSQSVSPPPVLSPPRSPIYPLSDSETSACRYPSHSSSRVLLKDRHPPAPSPQNPQDP

SEQ ID NO: 312852 - protein, 74 aa, Artificial Sequence
  derived and/or modified sequence
MTMTANKNSSITHGAGGTKAPRGTLSRSQSVSPPPVLSPPRSPIYPLSDSETSACRYPSHSSSRVLLKDRHPPA

SEQ ID NO: 312853 - DNA, 534 bp, Artificial Sequence
  derived and/or modified sequence
gatgcctgcccgccgcccgccctctctgcaggagcggctcctcctccgggccgcgcggctcccggcgagaccccatccaggcgccgcgcccggcccggctggggaacgcagagatttcacaccctttggagagtttctttcttggataattcagggtcttgctgtgttgctcgggctgctcttgaactcctgggctcaaacagtcctcttgcctcagcctcccaacgtgctgggattacgggagcaagccaccccactgtgtgcagcccagaagttgagcctgagagggctctgggtttgcagagagccgaaatgaccatgactgccaacaagaattccagcatcacccacggagctggtggcactaaagcccctcgggggactctgagcaggtctcagtcagtctctccacctccagttctctccccaccaaggagtcccatctacccgctcagtgatagtgaaacctcagcctgcaggtaccccagccactccagctcccgggtgctcctcaaggaccggcaccccccagct

SEQ ID NO: 312854 - protein, 40 aa, Artificial Sequence
  derived and/or modified sequence
MTMTANKNSSITHGAGGTKAPRGTLSRSQSVSPPPVLSPP

SEQ ID NO: 312855 - protein, 52 aa, Artificial Sequence
  derived and/or modified sequence
MTMTANKNSSITHGAGGTKAPRGTLSRSQSVSPPPVLSPPRSPIYPLSDSET

SEQ ID NO: 312856 - protein, 139 aa, Artificial Sequence
  derived and/or modified sequence
MTMTANKNSSITHGAGGTKAPRGTLSRSQSVSPPPVLSPPRSPIYPLSDSETSACRYPSHSSSRVLLKDRHPPAPSPQNPQDPSPDTSPPTCPFKTASFGYLDRSPSACKRDAQKESVQGAAQDVAGVAACLPLAQSTP

SEQ ID NO: 312857 - protein, 179 aa, Artificial Sequence
  derived and/or modified sequence
MWSPQDRKYNSPPTQLSLKPNSQSLRSGNWSERKSHRLPRLPKRHSHDDMLLLAQLSLPSSPSSLNEDSLSTTSELLSSRRARRIPKLVQRINSIYNAKRGKKRLKKLSMSSIETASLRDENSESESDSDDRFKAHTQRLVHIQSMLKRAPSYRTLELELLEWQERELFEYFVVVSLKK

SEQ ID NO: 312858 - protein, 30 aa, Artificial Sequence
  derived and/or modified sequence
MTMTANKNSSITHGAGGTKAPRGTLSRSQS

SEQ ID NO: 312859 - DNA, 336 bp, Artificial Sequence
  derived and/or modified sequence
atggtttcgttgtgggtggaggatactttcctgtcccctggctttgggtttgcccacgtggcttgctctggccttggaatgaagcagaaacgaaaggctgccagttccgagcccacgtctgaagtcgccttaggtggttccgcgggccccgtgcgctcccaccttcacccagagggccttctctggtgcagccgctgcttcttcagcctccgcccaaaaggaacggagccccctggccgatccgcaggcctacagggagccacagagcgcagcggctggaccagcgttcaagcccaagcacaggcctgcgagaaccttgttccagccgccgtttag

SEQ ID NO: 312860 - DNA, 174 bp, Artificial Sequence
  derived and/or modified sequence
atgaccatgaccgccaacaagaacagcagcatcacccacggcgccggcggcaccaaggcccccagaggcaccctgagcagaagccagagcgtgagccccccccccgtgctgagcccccccagaagccccatctaccccctgagcgacagcgagaccagcgcctgcagatactag

SEQ ID NO: 312861 - DNA, 375 bp, Artificial Sequence
  derived and/or modified sequence
atgaccatgaccgccaacaagaacagcagcatcacccacggcgccggcggcaccaaggcccccagaggcaccctgagcagaagccagagcgtgagccccccccccgtgctgagcccccccagaagccccatctaccccctgagcgacagcgagaccagcgcctgcagataccccagccacagcagcagcagagtgctgctgaaggacagacacccccccgcccccagcccccagaacccccaggaccccagccccgacaccagcccccccacctgccccttcaagaccgccagcttcggctacctggacagaagccccagcgcctgcaagagagacgcccagaaggagagcgtgcagggcgccgcccaggactag

SEQ ID NO: 312862 - DNA, 429 bp, Artificial Sequence
  derived and/or modified sequence
atgaccatgaccgccaacaagaacagcagcatcacccacggcgccggcggcaccaaggcccccagaggcaccctgagcagaagccagagcgtgagccccccccccgtgctgagcccccccagaagccccatctaccccctgagcgacagcgagaccagcgcctgcagataccccagccacagcagcagcagagtgctgctgaaggacagacacccccccgcccccagcccccagaacccccaggaccccagccccgacaccagcccccccacctgccccttcaagaccgccagcttcggctacctggacagaagccccagcgcctgcaagagagacgcccagaaggagagcgtgcagggcgccgcccaggacgtggccggcgtggccgcctgcctgcccctggcccagagcacccccttccccggctag

SEQ ID NO: 312863 - DNA, 159 bp, Artificial Sequence
  derived and/or modified sequence
atgaccatgaccgccaacaagaacagcagcatcacccacggcgccggcggcaccaaggcccccagaggcaccctgagcagaagccagagcgtgagccccccccccgtgctgagcccccccagaagccccatctaccccctgagcgacagcgagacctag

SEQ ID NO: 312864 - DNA, 336 bp, Artificial Sequence
  derived and/or modified sequence
atgaccatgaccgccaacaagaacagcagcatcacccacggcgccggcggcaccaaggcccccagaggcaccctgagcagaagccagagcgtgagccccccccccgtgctgagcccccccagaagccccatctaccccctgagcgacagcgagaccagcgcctgcagataccccagccacagcagcagcagagtgctgctgaaggacagacacccccccgcccccagcccccagaacccccaggaccccagccccgacaccagcccccccacctgccccttcaagaccgccagcttcggctacctggacagaagccccagcgcctgcaagagatag

SEQ ID NO: 312865 - DNA, 162 bp, Artificial Sequence
  derived and/or modified sequence
atgaccatgaccgccaacaagaacagcagcatcacccacggcgccggcggcaccaaggcccccagaggcaccctgagcagaagccagagcgtgagccccccccccgtgctgagcccccccagaagccccatctaccccctgagcgacagcgagaccagctag

SEQ ID NO: 312866 - DNA, 252 bp, Artificial Sequence
  derived and/or modified sequence
atgaccatgaccgccaacaagaacagcagcatcacccacggcgccggcggcaccaaggcccccagaggcaccctgagcagaagccagagcgtgagccccccccccgtgctgagcccccccagaagccccatctaccccctgagcgacagcgagaccagcgcctgcagataccccagccacagcagcagcagagtgctgctgaaggacagacacccccccgcccccagcccccagaacccccaggacccctag

SEQ ID NO: 312867 - DNA, 288 bp, Artificial Sequence
  derived and/or modified sequence
atgaccatgaccgccaacaagaacagcagcatcacccacggcgccggcggcaccaaggcccccagaggcaccctgagcagaagccagagcgtgagccccccccccgtgctgagcccccccagaagccccatctaccccctgagcgacagcgagaccagcgcctgcagataccccagccacagcagcagcagagtgctgctgaaggacagacacccccccgcccccagcccccagaacccccaggaccccagccccgacaccagcccccccacctgccccttcaagtag

SEQ ID NO: 312868 - DNA, 465 bp, Artificial Sequence
  derived and/or modified sequence
atgaccatgaccgccaacaagaacagcagcatcacccacggcgccggcggcaccaaggcccccagaggcaccctgagcagaagccagagcgtgagccccccccccgtgctgagcccccccagaagccccatctaccccctgagcgacagcgagaccagcgcctgcagataccccagccacagcagcagcagagtgctgctgaaggacagacacccccccgcccccagcccccagaacccccaggaccccagccccgacaccagcccccccacctgccccttcaagaccgccagcttcggctacctggacagaagccccagcgcctgcaagagagacgcccagaaggagagcgtgcagggcgccgcccaggacgtggccggcgtggccgcctgcctgcccctggcccagagcacccccttccccggccccgccgccggccccagaggcgtgctgctgaccagatag

SEQ ID NO: 312869 - DNA, 225 bp, Artificial Sequence
  derived and/or modified sequence
atgaccatgaccgccaacaagaacagcagcatcacccacggcgccggcggcaccaaggcccccagaggcaccctgagcagaagccagagcgtgagccccccccccgtgctgagcccccccagaagccccatctaccccctgagcgacagcgagaccagcgcctgcagataccccagccacagcagcagcagagtgctgctgaaggacagacacccccccgcctag

SEQ ID NO: 312870 - DNA, 420 bp, Artificial Sequence
  derived and/or modified sequence
atgaccatgaccgccaacaagaacagcagcatcacccacggcgccggcggcaccaaggcccccagaggcaccctgagcagaagccagagcgtgagccccccccccgtgctgagcccccccagaagccccatctaccccctgagcgacagcgagaccagcgcctgcagataccccagccacagcagcagcagagtgctgctgaaggacagacacccccccgcccccagcccccagaacccccaggaccccagccccgacaccagcccccccacctgccccttcaagaccgccagcttcggctacctggacagaagccccagcgcctgcaagagagacgcccagaaggagagcgtgcagggcgccgcccaggacgtggccggcgtggccgcctgcctgcccctggcccagagcaccccctag

SEQ ID NO: 312871 - DNA, 435 bp, Artificial Sequence
  derived and/or modified sequence
atgaccatgaccgccaacaagaacagcagcatcacccacggcgccggcggcaccaaggcccccagaggcaccctgagcagaagccagagcgtgagccccccccccgtgctgagcccccccagaagccccatctaccccctgagcgacagcgagaccagcgcctgcagataccccagccacagcagcagcagagtgctgctgaaggacagacacccccccgcccccagcccccagaacccccaggaccccagccccgacaccagcccccccacctgccccttcaagaccgccagcttcggctacctggacagaagccccagcgcctgcaagagagacgcccagaaggagagcgtgcagggcgccgcccaggacgtggccggcgtggccgcctgcctgcccctggcccagagcacccccttccccggccccgcctag

SEQ ID NO: 312872 - DNA, 369 bp, Artificial Sequence
  derived and/or modified sequence
atgaccatgaccgccaacaagaacagcagcatcacccacggcgccggcggcaccaaggcccccagaggcaccctgagcagaagccagagcgtgagccccccccccgtgctgagcccccccagaagccccatctaccccctgagcgacagcgagaccagcgcctgcagataccccagccacagcagcagcagagtgctgctgaaggacagacacccccccgcccccagcccccagaacccccaggaccccagccccgacaccagcccccccacctgccccttcaagaccgccagcttcggctacctggacagaagccccagcgcctgcaagagagacgcccagaaggagagcgtgcagggcgccgcctag

SEQ ID NO: 312873 - DNA, 174 bp, Artificial Sequence
  derived and/or modified sequence
atgacaatgacggcaaacaagaactcttctattacccacggtgctggcggcacgaaggccccgcgtggcaccctgtcccgctcccagagtgtgagtccccctcccgtgctcagcccaccccgatctccaatttatcccctctcagattccgaaacctcagcctgccggtactag

SEQ ID NO: 312874 - DNA, 375 bp, Artificial Sequence
  derived and/or modified sequence
atgactatgactgctaataaaaattcctcaataactcacggcgccgggggaaccaaggcccccaggggaactctctctcgtagccaaagtgtctcacctccccctgtgctttcacctcctcgctcgcctatctatcctctctctgacagtgagactagtgcgtgccgatatccctcacactcttcaagcagagttctgctgaaggatcggcacccaccagcaccatcccctcagaatccacaggatcctagtccagacacttcaccccctacttgtccatttaagaccgcgagttttgggtatcttgatcggtctccttcagcttgtaaacgggacgctcagaaggaaagcgtgcaaggcgccgcacaggactag

SEQ ID NO: 312875 - DNA, 429 bp, Artificial Sequence
  derived and/or modified sequence
atgaccatgaccgctaataagaactctagcataacccatggtgcaggcggtaccaaggcaccgaggggcacgctctctcgttcgcaatccgtgtctcctccgcccgttttgtctcctcccaggtcacccatctatcccctgagtgattccgaaaccagcgcctgcaggtacccctcacatagctcctccagagtcctgctgaaagataggcatccacccgcgcccagtcctcagaacccccaagatccttctcccgatacatccccaccgacatgtcccttcaaaacggctagtttcggatacctcgacagaagtccaagtgcgtgcaagcgtgatgcacagaaggagtctgtgcagggggccgcccaggacgtggcaggagtggcagcttgcctcccactggctcaaagcacccccttccctggctag

SEQ ID NO: 312876 - DNA, 159 bp, Artificial Sequence
  derived and/or modified sequence
atgacgatgaccgcaaataagaacagcagcattactcatggagctggaggtaccaaggccccacgcgggacactctcacggtctcagtccgtgtcgcctccaccggtcctgagccccccaaggagccccatttatcctttatcggacagcgagacctag

SEQ ID NO: 312877 - DNA, 336 bp, Artificial Sequence
  derived and/or modified sequence
atgaccatgaccgccaacaagaattcctcgataactcatggcgcaggcggtaccaaggcccccaggggaactttatccaggagtcagagtgtttctccaccgcctgtgctgagccctccacgctcgcccatctaccccctctctgatagcgagacaagcgcttgtcgatacccttctcactcgagcagccgggtcttgctcaaggacaggcatccacccgccccaagtccccagaatcctcaggacccttccccagatacttcacccccaacttgccctttcaaaacagccagcttcgggtacctggacaggagcccatctgcctgcaagaggtag

SEQ ID NO: 312878 - DNA, 162 bp, Artificial Sequence
  derived and/or modified sequence
atgaccatgaccgccaataagaattcatctatcactcacggggccggcggaactaaggcacctcgcggaactctttcccgatctcaaagtgtctccccacccccggtgctgagccccccaaggtccccgatctaccctctcagtgattccgagacctcgtag

SEQ ID NO: 312879 - DNA, 252 bp, Artificial Sequence
  derived and/or modified sequence
atgaccatgactgctaacaagaattccagcataactcatggtgccgggggcacaaaggcccctaggggtacattaagtcggtcccagagcgttagtccgcctccggtgttgagtcccccgagatcacctatatatcctctgtccgatagtgagacatccgcctgccggtatcccagtcattcaagctcccgcgtgttacttaaagataggcatcctccagccccttcaccacagaatccacaagacccgtag

SEQ ID NO: 312880 - DNA, 288 bp, Artificial Sequence
  derived and/or modified sequence
atgacaatgaccgccaacaaaaacagttccattacccacggagctggaggtacaaaggcaccgcgggggacgttgagcaggagccagtccgtttcgcctcctcctgtgctctcaccacctagaagccctatataccctctcagtgactctgagaccagtgcctgccgctacccatcacactccagtagtcgagtcctcttaaaagatcgccatccgccagcaccatctccccagaacccacaggaccctagtccagacacctcgccaccgacctgtccctttaagtag

SEQ ID NO: 312881 - DNA, 465 bp, Artificial Sequence
  derived and/or modified sequence
atgactatgaccgcaaataaaaattcatccataacccacggagctggcgggacaaaggctccccgggggaccctgtctaggtcacaatcagtttctcccccgccagtgctgagcccaccaaggtctccgatctatcctctgagtgacagcgagacgagcgcatgccgttatccaagccactctagcagcagagtcctcctcaaggaccgtcatccccccgccccaagcccccaaaatccgcaggaccccagtcctgataccagtccccctacgtgccccttcaaaacggcttcctttggctatttggatcgatcaccttccgcctgcaagcgggatgcccagaaagaatcagtgcaaggcgccgcccaggacgttgcaggcgtggctgcttgtctcccattggcccagtccaccccatttcctggtcctgctgctggtcctagaggagtgttgttgactagatag

SEQ ID NO: 312882 - DNA, 225 bp, Artificial Sequence
  derived and/or modified sequence
atgactatgactgcaaacaaaaatagctccatcacccatggcgctggaggtacaaaggccccgagaggcactctgagtcgcagccagagcgtgtcaccgcctcccgtcttatcacctccaaggtcacccatttaccctttgtctgacagtgagaccagcgcttgccgatacccctctcactcatcctcaagagtgcttctgaaggatcgacatcctcctgcatag

SEQ ID NO: 312883 - DNA, 420 bp, Artificial Sequence
  derived and/or modified sequence
atgacaatgaccgcaaataagaattcctctattacacacggggctggggggacaaaggcccctcgagggaccctttctagaagccagagcgtttccccaccccccgtgctttccccgccacgatctccaatttatccactgtccgactctgaaaccagtgcctgcagatacccgtcacacagctctagccgcgtgctgctgaaagaccgccaccctcctgcaccctccccccaaaatccacaggaccccagtcctgatacatccccgcctacctgcccctttaaaaccgcatcatttggatacctggacagaagcccaagcgcctgcaagcgagatgcgcagaaagaatccgtgcagggcgccgcccaggacgttgcgggggtggccgcctgtttaccacttgctcagagtactccctag

SEQ ID NO: 312884 - DNA, 225 bp, Artificial Sequence
  derived and/or modified sequence
atgacaatgaccgccaacaagaacagtagcattactcatggggccggtggcacgaaggcgccaaggggcaccttatcaagatcacagtccgtctcaccacctccagtcctctcaccgcccaggtcaccaatatatccgttgtccgatagcgagacatctgcttgccgatacccaagccactctagttctagggtgctcctgaaggatcgacatccccccgcctag

SEQ ID NO: 312885 - DNA, 435 bp, Artificial Sequence
  derived and/or modified sequence
atgaccatgacagcaaacaaaaactcctccatcacccatggagccggcggaacaaaagccccaaggggaacactgtcaagaagccagagtgtgtcacccccgccagttttaagcccaccgagaagccctatttatcctctgagtgattctgaaacgtccgcttgtcgttatccatcccactcaagctcccgtgtgctgctcaaggatcgacatccgccggcgcccagcccacagaaccctcaggacccttctcctgataccagcccccccacatgtccattcaagacggcttccttcggctatcttgatagaagtccctctgcttgtaaacgagacgcacagaaagagtcagtccaaggtgccgcccaggacgtggccggcgtggccgcctgtctgcccctggcacagagcactccatttcctggtcccgcgtag

SEQ ID NO: 312886 - DNA, 369 bp, Artificial Sequence
  derived and/or modified sequence
atgacaatgacagccaataagaactcgagcatcacacacggcgccggtggcacaaaggcaccaagaggaacgctctctcgtagtcagtcagtgtccccccctcccgtgctgagcccaccgcgatcacccatatacccactgagtgactccgaaactagcgcctgtcggtatccatcccattcttcctcacgcgttctactcaaagatcgacaccctccagctcctagcccacagaacccccaagaccccagcccggacacatctccccccacttgcccctttaaaacggcatcgtttgggtaccttgaccgctccccaagtgcctgtaagagagacgcacaaaaagaaagcgtccagggggccgcatag

SEQ ID NO: 312887 - DNA, 174 bp, Artificial Sequence
  derived and/or modified sequence
atgaccatgacagccaacaagaacagcagcatcacccatggagctgggggcaccaaggccccccggggcaccctgagccgcagccagagcgtgtccccacctcctgtgctgagccccccaagaagccccatctaccccctgagtgacagcgagaccagcgcctgccgctactag

SEQ ID NO: 312888 - DNA, 375 bp, Artificial Sequence
  derived and/or modified sequence
atgaccatgacagccaacaagaacagcagcatcacccatggagctgggggcaccaaggccccccggggcaccctgagccgcagccagagcgtgtccccacctcctgtgctgagccccccaagaagccccatctaccccctgagtgacagcgagaccagcgcctgccgctaccccagccacagcagcagccgggtgctgctgaaggacagacaccccccagcccccagcccccagaacccccaggaccccagcccagacaccagcccccccacctgccccttcaagacagccagctttggctacctggacaggagccccagcgcctgcaagagagatgcccagaaggagagcgtgcagggcgccgcccaggactag

SEQ ID NO: 312889 - DNA, 429 bp, Artificial Sequence
  derived and/or modified sequence
atgaccatgacagccaacaagaacagcagcatcacccatggagctgggggcaccaaggccccccggggcaccctgagccgcagccagagcgtgtccccacctcctgtgctgagccccccaagaagccccatctaccccctgagtgacagcgagaccagcgcctgccgctaccccagccacagcagcagccgggtgctgctgaaggacagacaccccccagcccccagcccccagaacccccaggaccccagcccagacaccagcccccccacctgccccttcaagacagccagctttggctacctggacaggagccccagcgcctgcaagagagatgcccagaaggagagcgtgcagggcgccgcccaggatgtggccggcgtggccgcctgcctgcccctggcccagagcacccccttccctggatag

SEQ ID NO: 312890 - DNA, 159 bp, Artificial Sequence
  derived and/or modified sequence
atgaccatgacagccaacaagaacagcagcatcacccatggagctgggggcaccaaggccccccggggcaccctgagccgcagccagagcgtgtccccacctcctgtgctgagccccccaagaagccccatctaccccctgagtgacagcgagacctag

SEQ ID NO: 312891 - DNA, 336 bp, Artificial Sequence
  derived and/or modified sequence
atgaccatgacagccaacaagaacagcagcatcacccatggagctgggggcaccaaggccccccggggcaccctgagccgcagccagagcgtgtccccacctcctgtgctgagccccccaagaagccccatctaccccctgagtgacagcgagaccagcgcctgccgctaccccagccacagcagcagccgggtgctgctgaaggacagacaccccccagcccccagcccccagaacccccaggaccccagcccagacaccagcccccccacctgccccttcaagacagccagctttggctacctggacaggagccccagcgcctgcaagaggtag

SEQ ID NO: 312892 - DNA, 162 bp, Artificial Sequence
  derived and/or modified sequence
atgaccatgacagccaacaagaacagcagcatcacccatggagctgggggcaccaaggccccccggggcaccctgagccgcagccagagcgtgtccccacctcctgtgctgagccccccaagaagccccatctaccccctgagtgacagcgagaccagctag

SEQ ID NO: 312893 - DNA, 252 bp, Artificial Sequence
  derived and/or modified sequence
atgaccatgacagccaacaagaacagcagcatcacccatggagctgggggcaccaaggccccccggggcaccctgagccgcagccagagcgtgtccccacctcctgtgctgagccccccaagaagccccatctaccccctgagtgacagcgagaccagcgcctgccgctaccccagccacagcagcagccgggtgctgctgaaggacagacaccccccagcccccagcccccagaacccccaggacccctag

SEQ ID NO: 312894 - DNA, 288 bp, Artificial Sequence
  derived and/or modified sequence
atgaccatgacagccaacaagaacagcagcatcacccatggagctgggggcaccaaggccccccggggcaccctgagccgcagccagagcgtgtccccacctcctgtgctgagccccccaagaagccccatctaccccctgagtgacagcgagaccagcgcctgccgctaccccagccacagcagcagccgggtgctgctgaaggacagacaccccccagcccccagcccccagaacccccaggaccccagcccagacaccagcccccccacctgccccttcaagtag

SEQ ID NO: 312895 - DNA, 465 bp, Artificial Sequence
  derived and/or modified sequence
atgaccatgacagccaacaagaacagcagcatcacccatggagctgggggcaccaaggccccccggggcaccctgagccgcagccagagcgtgtccccacctcctgtgctgagccccccaagaagccccatctaccccctgagtgacagcgagaccagcgcctgccgctaccccagccacagcagcagccgggtgctgctgaaggacagacaccccccagcccccagcccccagaacccccaggaccccagcccagacaccagcccccccacctgccccttcaagacagccagctttggctacctggacaggagccccagcgcctgcaagagagatgcccagaaggagagcgtgcagggcgccgcccaggatgtggccggcgtggccgcctgcctgcccctggcccagagcacccccttccctggccctgctgctggcccccggggcgtgctgctgaccaggtag

SEQ ID NO: 312896 - DNA, 225 bp, Artificial Sequence
  derived and/or modified sequence
atgaccatgacagccaacaagaacagcagcatcacccatggagctgggggcaccaaggccccccggggcaccctgagccgcagccagagcgtgtccccacctcctgtgctgagccccccaagaagccccatctaccccctgagtgacagcgagaccagcgcctgccgctaccccagccacagcagcagccgggtgctgctgaaggacagacaccccccagcctag

SEQ ID NO: 312897 - DNA, 420 bp, Artificial Sequence
  derived and/or modified sequence
atgaccatgacagccaacaagaacagcagcatcacccatggagctgggggcaccaaggccccccggggcaccctgagccgcagccagagcgtgtccccacctcctgtgctgagccccccaagaagccccatctaccccctgagtgacagcgagaccagcgcctgccgctaccccagccacagcagcagccgggtgctgctgaaggacagacaccccccagcccccagcccccagaacccccaggaccccagcccagacaccagcccccccacctgccccttcaagacagccagctttggctacctggacaggagccccagcgcctgcaagagagatgcccagaaggagagcgtgcagggcgccgcccaggatgtggccggcgtggccgcctgcctgcccctggcccagagcaccccctag

SEQ ID NO: 312898 - DNA, 435 bp, Artificial Sequence
  derived and/or modified sequence
atgaccatgacagccaacaagaacagcagcatcacccatggagctgggggcaccaaggccccccggggcaccctgagccgcagccagagcgtgtccccacctcctgtgctgagccccccaagaagccccatctaccccctgagtgacagcgagaccagcgcctgccgctaccccagccacagcagcagccgggtgctgctgaaggacagacaccccccagcccccagcccccagaacccccaggaccccagcccagacaccagcccccccacctgccccttcaagacagccagctttggctacctggacaggagccccagcgcctgcaagagagatgcccagaaggagagcgtgcagggcgccgcccaggatgtggccggcgtggccgcctgcctgcccctggcccagagcacccccttccctggccctgcctag

SEQ ID NO: 312899 - DNA, 369 bp, Artificial Sequence
  derived and/or modified sequence
atgaccatgacagccaacaagaacagcagcatcacccatggagctgggggcaccaaggccccccggggcaccctgagccgcagccagagcgtgtccccacctcctgtgctgagccccccaagaagccccatctaccccctgagtgacagcgagaccagcgcctgccgctaccccagccacagcagcagccgggtgctgctgaaggacagacaccccccagcccccagcccccagaacccccaggaccccagcccagacaccagcccccccacctgccccttcaagacagccagctttggctacctggacaggagccccagcgcctgcaagagagatgcccagaaggagagcgtgcagggcgccgcctag

SEQ ID NO: 312900 - DNA, 174 bp, Artificial Sequence
  derived and/or modified sequence
atgaccatgaccgccaacaagaacagcagcatcacccacggcgccggtggcaccaaagcacctaggggcactctgtcgaggagccagagcgtgtccccacccccagtgcttagcccccctagatcgccgatttatccgcttagtgatagcgagaccagtgcctgtcgttactag

SEQ ID NO: 312901 - DNA, 375 bp, Artificial Sequence
  derived and/or modified sequence
atgaccatgaccgccaacaagaacagcagcatcacccacggcgccgggggcaccaaggccccgaggggtacccttagcaggtcccagtctgtcagccctccacccgtgcttagccctcctcgctcaccaatttacccgttgtctgatagcgagacatccgcttgccggtatccttctcacagttcctctagggtgcttctcaaggacaggcatccacctgctccaagtccacaaaatccacaagacccttctccagataccagtccccccacatgcccgtttaaaacagcctcattcggctatcttgatagaagtccctctgcctgcaaacgggacgcccagaaagaatctgtgcagggagccgcccaagattag

SEQ ID NO: 312902 - DNA, 429 bp, Artificial Sequence
  derived and/or modified sequence
atgaccatgaccgccaacaagaacagcagcatcacccacggcgccggcgggacaaaggccccccgggggaccctctcaagatcacagtcagtgtccccgccacctgtattgtcacctccccgttccccaatctaccctctgtctgactccgagactagtgcgtgtagatacccttcacactccagcagccgtgtgctgttgaaggatcggcacccgcctgcaccctcgccccagaatccacaggatccttcgccggacactagccctccaacatgtccatttaagaccgcctcattcggttacctcgataggtctccctcagcgtgcaaacgcgatgctcagaaagagagtgtgcagggggctgcacaggacgttgccggagttgccgcctgtctgccactggctcagtcaaccccattcccaggctag

SEQ ID NO: 312903 - DNA, 159 bp, Artificial Sequence
  derived and/or modified sequence
atgaccatgaccgccaacaagaacagcagcatcacccacggcgccggcgggaccaaggcaccacgagggacacttagccggagccagagtgtatctccaccccctgtgctttcgccaccacgctctcctatataccccctgagtgacagcgagacttag

SEQ ID NO: 312904 - DNA, 336 bp, Artificial Sequence
  derived and/or modified sequence
atgaccatgaccgccaacaagaacagcagcatcacccacggcgccggtgggacaaaagcaccacgggggacattgtcccgaagccagtctgtgagtcctccaccagtcctgtcccctccgcgaagccctatctatcctctgagtgactcagagacctcagcttgccgatacccctcgcactcctcttcgagagtactcctgaaggatagacatcccccagctccatcacctcagaacccacaggacccttctcctgacacatccccaccgacttgcccctttaagaccgctagtttcggatacttggacagatccccatccgcctgtaaacgctag

SEQ ID NO: 312905 - DNA, 162 bp, Artificial Sequence
  derived and/or modified sequence
atgaccatgaccgccaacaagaacagcagcatcacccacggcgccggcggaactaaggcccccagaggcacactgtcgcgttcacaaagtgtttcacccccaccagtgctttcccccccaagatccccaatctaccctctgagcgactccgagacttcctag

SEQ ID NO: 312906 - DNA, 252 bp, Artificial Sequence
  derived and/or modified sequence
atgaccatgaccgccaacaagaacagcagcatcacccacggcgccgggggcactaaggccccccgaggcacactcagtaggagtcagagcgtctctccacccccggttttatctccgcctagaagtcctatctacccgctatccgacagcgagacttcagcgtgcagatatccatcacattcatccagtagggtcctcctgaaggacaggcacccccctgcccctagcccccagaatccacaggatccatag

SEQ ID NO: 312907 - DNA, 288 bp, Artificial Sequence
  derived and/or modified sequence
atgaccatgaccgccaacaagaacagcagcatcacccacggcgccgggggcacaaaagcccccaggggtacactctcccggagtcagagcgtttcgccgccccccgttctaagtccccctagaagccccatatatcccctgtcagatagtgagacttccgcgtgccggtacccatcccattcctccagtcgcgtgctgcttaaggaccgacatccgcctgcaccctccccccaaaaccctcaggatccttccccagacacttctcccccaacgtgtccttttaaatag

SEQ ID NO: 312908 - DNA, 465 bp, Artificial Sequence
  derived and/or modified sequence
atgaccatgaccgccaacaagaacagcagcatcacccacggcgccggaggtaccaaagccccacgaggcactctgtcccgatcacagagcgtgtcgccccctccagttctgagtccaccaagatcccccatctatcccctctctgactcggaaactagcgcttgcaggtatcctagccatagcagtagccgcgtgctgctgaaagacaggcatccacctgcccccagcccccaaaatccacaggatccttctccagacacatcaccacccacttgcccctttaaaactgcatccttcggatatctggaccggagtccatcagcatgtaaacgtgatgcacagaaggagagtgtacagggtgccgcccaggatgtggccggagtggctgcctgcttgcctctagcacaatccacaccatttcccggtccagcagcaggacctcgtggtgtcctgctcacaaggtag

SEQ ID NO: 312909 - DNA, 225 bp, Artificial Sequence
  derived and/or modified sequence
atgaccatgaccgccaacaagaacagcagcatcacccacggcgccgggggaacaaaagcccctcggggcacattgtctaggtctcagtcagtctctccgccccccgtactcagtccacccaggtctccaatctatcctctatccgattcggagacttccgcctgtagatatccttctcacagctcttcacgagttctgctgaaagaccgccatccgcccgcctag

SEQ ID NO: 312910 - DNA, 420 bp, Artificial Sequence
  derived and/or modified sequence
atgaccatgaccgccaacaagaacagcagcatcacccacggcgccggtggaacgaaggccccacggggaactctctctcggtcccagtcggtgtccccgcccccagttctaagccctcctagaagcccaatatacccactctccgactctgagacgagcgcttgccggtatccgtctcattcttcctcccgtgttttgctgaaggacaggcaccctcccgctcctagcccacagaatcctcaggatccttcaccagacacctctccacccacatgtccatttaaaaccgcaagctttggttacttagatcggtctccgtcagcatgtaaaagggacgcgcagaaagagtcggtgcagggggccgctcaggacgtcgccggtgttgcagcttgcctgcctttagcccaatccactccatag

SEQ ID NO: 312911 - DNA, 225 bp, Artificial Sequence
  derived and/or modified sequence
atgaccatgaccgccaacaagaacagcagcatcacccacggcgccggcggcacaaaggctcctagaggaaccctgagtcgttcacaatcagtgtctcccccacccgtgctttcaccccctagatcaccgatttaccctctcagcgactcggagacatcggcctgcaggtaccccagccactcctcaagccgtgtattgcttaaagacagacacccacccgcctag

SEQ ID NO: 312912 - DNA, 435 bp, Artificial Sequence
  derived and/or modified sequence
atgaccatgaccgccaacaagaacagcagcatcacccacggcgccggcggcaccaaggcccccagagggacactttcaaggagtcagagtgtaagtccccctcccgttctgtcacccccacgctcacctatttatcctctgagcgactcagaaacttccgcttgcagatatccttcccactcttcctcacgggtactcctgaaagataggcatcctcctgcaccctcacctcagaacccccaggatccgtccccagacactagtccgccaacatgcccatttaaaacagcgtctttcggctacctagaccggagtccatctgcatgcaagcgagatgctcagaaagaatctgtgcagggagccgcgcaggatgtggccggagtcgccgcctgtctgcccttggcccaatccactccttttccaggacctgcatag

SEQ ID NO: 312913 - DNA, 369 bp, Artificial Sequence
  derived and/or modified sequence
atgaccatgaccgccaacaagaacagcagcatcacccacggcgccggcggtacaaaggctccacgggggacactgtcccggtcccagagcgtgagcccgcctccagtgctaagccctccccgctcccctatatatcccctgagcgactccgagacctcagcctgtcgttacccctcccactctagttctcgggtactcttaaaggaccggcatccaccagccccctcacctcagaacccacaagatccgtcaccggatacctcaccccccacttgcccttttaagacggcgtcctttgggtaccttgacagaagcccaagcgcatgtaagagagacgcgcagaaggagtcagtacagggggccgcctag

SEQ ID NO: 312914 - DNA, 174 bp, Artificial Sequence
  derived and/or modified sequence
atgactatgactgctaataagaattccagtatcacccacggagcgggaggtactaaagcacccagagggaccctatcccgcagtcaatccgtatcacctcctcccgttctgtccccacccagatcccctatttatcccctctcagactctgaaactagtgcttgcaggtactag

SEQ ID NO: 312915 - DNA, 375 bp, Artificial Sequence
  derived and/or modified sequence
atgacaatgacggccaacaaaaacagttctattacacacggcgctggcggaacaaaagcacctcgcggaacactgtcgcgatcccagtctgtatctccacccccagtcttatctcctccaaggtccccaatataccccttatccgactcggagacatcagcttgtaggtacccaagccactcgagttcacgggtgctcctgaaggaccgacatccccctgccccatccccccagaaccctcaagatccttcaccggacacttcccccccaacttgtcctttcaagaccgccagcttcggataccttgaccgaagtccatccgcttgtaagagggacgctcagaaggaatcagtgcagggggcagcccaagattag

SEQ ID NO: 312916 - DNA, 429 bp, Artificial Sequence
  derived and/or modified sequence
atgactatgaccgccaacaagaactcgagtatcacccatggcgcaggcggtactaaagctccgaggggcacgctgagccgctcacagtccgtctccccgccacctgtgctgtcccctcccagatcccctatttacccactatcagactctgaaacctcagcgtgtagatacccctctcattctagcagtagagtgttgctaaaggatcgacatcctcccgctccttcaccccaaaacccacaagacccaagccccgatactagccccccaacatgtccgtttaaaacagcctcttttggatacctggatcgaagccctagcgcttgcaagcgcgatgcccagaaggaaagcgtgcagggcgctgcacaggacgtggccggagtggcagcatgccttccgctggctcagtctaccccattcccagggtag

SEQ ID NO: 312917 - DNA, 159 bp, Artificial Sequence
  derived and/or modified sequence
atgacaatgaccgctaataagaattccagcattactcatggagctggcggtacaaaagctcctcgcggaaccctgtctcggagccagagtgtatcacctcctcccgtcttgtcaccccctaggtctcctatttatcccttgtccgactccgaaacctag

SEQ ID NO: 312918 - DNA, 336 bp, Artificial Sequence
  derived and/or modified sequence
atgacaatgacagccaataagaattcttctataacccatggtgccggaggaaccaaggccccacgtgggaccctctcacgatctcaaagcgttagccctcctccagtgttaagtcccccaagaagcccgatctatccactgagtgacagcgagacatccgcttgccgctacccatcccactcttcctcgagggtgttgttaaaagaccggcatcctccagcacccagccctcagaaccctcaggatcctagtcccgacactagcccacccacatgtccttttaagaccgctagttttgggtatctggaccggagccctagtgcctgcaagaggtag

SEQ ID NO: 312919 - DNA, 162 bp, Artificial Sequence
  derived and/or modified sequence
atgacgatgaccgcgaataagaatagctctatcactcacggcgcaggcggaactaaggctccgcgtggcactctttcaagatcacagagtgtcagccctcccccagtgttatcgccaccaaggagcccaatctatcccttatctgattccgagacatcatag

SEQ ID NO: 312920 - DNA, 252 bp, Artificial Sequence
  derived and/or modified sequence
atgactatgaccgcgaacaaaaatagcagtataactcacggggcaggtggtacgaaggctcccagagggactttgtcccgtagtcagtctgtgtctcctccaccagtcctgtccccgcctaggtcacccatatatcccctctccgattccgagacatcagcctgtcgatacccctcgcacagcagctctcgggtgttgttgaaggaccggcaccctccagcacccagccctcaaaaccctcaggatccttag

SEQ ID NO: 312921 - DNA, 288 bp, Artificial Sequence
  derived and/or modified sequence
atgacgatgacagcaaataagaattcatccattactcacggagcaggagggactaaagcacccaggggaacgctgtcccggtcccagagtgtcagtcccccaccggtgttgtcccctcctcgtagtcccatttaccccctctctgactcagagacatccgcatgccgatacccatcacattcttcctcccgcgtcttactgaaagaccgccacccacctgccccaagcccccaaaatcctcaggaccccagccctgatacttctccccctacctgtcccttcaagtag

SEQ ID NO: 312922 - DNA, 465 bp, Artificial Sequence
  derived and/or modified sequence
atgaccatgaccgcaaacaagaatagcagcattacccacggcgcagggggtaccaaggccccaagaggtaccctgtctaggtcccagagtgtgtcaccacctccggttttgagtccgcctaggagtcctatctatcccctgagtgattctgaaacaagcgcttgccgttatccatcacatagctccagcagagtgttactaaaggaccgccatccacccgctccttcaccgcagaacccgcaggaccccagtccagacacttcacctccgacttgtccattcaagacagcatcattcggctatctggaccggagtcccagtgcctgcaagcgagatgcccagaaagaaagtgtacagggggctgcacaggatgtagctggcgtagctgcgtgtctgcctttggctcagtcgacccctttccccggacccgctgccggtcctaggggcgtcttgctaacacggtag

SEQ ID NO: 312923 - DNA, 225 bp, Artificial Sequence
  derived and/or modified sequence
atgactatgacagctaataagaattcctccatcactcatggcgctggcggaacaaaagcacctcgcggaaccttaagtagatcccaaagtgtcagccccccaccagttctcagtcctcccagaagccctatctacccactctccgattcagagacaagtgcatgccgatacccatctcacagctcgtccagagtgctccttaaagatcggcatcctccagcatag

SEQ ID NO: 312924 - DNA, 420 bp, Artificial Sequence
  derived and/or modified sequence
atgactatgacagccaacaaaaattccagtattactcatggagcaggcggtaccaaggcaccacgaggaactctgagccgctcacagtccgtgtcaccacccccagtgctgagccccccacgctcaccaatttacccccttagtgattctgaaacgtcagcctgtagataccccagccatagttcaagccgcgtgctgctgaaagatagacaccctcccgcaccatctccacagaacccccaggatccctcgccagatacttcaccccctacatgtccattcaaaactgcttcctttggatacctggatcggtcaccatctgcctgcaaacgggatgcgcaaaaggagtcagttcagggggcagcacaggacgtagccggagttgccgcatgtctccctctggcccagagcacaccctag

SEQ ID NO: 312925 - DNA, 225 bp, Artificial Sequence
  derived and/or modified sequence
atgacaatgactgctaacaagaactcttctattacacacggggctggaggaaccaaagcccctaggggtactctatctcgcagccagagcgtgagcccaccacccgtactgtcgccccctaggtctccaatctatcctctgagtgattccgagacatcggcatgccggtatccatcccactcctcaagccgggtactgctaaaggatcggcatccacctgcctag

SEQ ID NO: 312926 - DNA, 435 bp, Artificial Sequence
  derived and/or modified sequence
atgaccatgactgccaataagaattcttccatcactcatggcgctgggggaacgaaggctccccgaggaacccttagccggagtcagagcgtgtcaccacccccagttctcagccctcccaggtctcctatctatcctcttagcgattcggaaacctcagcctgtcggtacccctcacattcctcctctcgcgtactgttgaaagacaggcacccgccagcgccttcaccgcaaaaccctcaagaccccagtccagataccagcccaccaacatgtcctttcaaaacagctagtttcggatatctagaccgatctccatctgcttgcaagcgagacgcacagaaggaaagcgtgcagggcgcagcacaggatgtcgcgggagtggcagcatgccttccgctcgcccagagtactccttttcccggtcctgcgtag

SEQ ID NO: 312927 - DNA, 369 bp, Artificial Sequence
  derived and/or modified sequence
atgacaatgaccgctaataagaacagtagtatcactcatggcgctggcggaacaaaggcccctcgtgggactctatcccgttcccagagtgttagccctccacccgttctgtccccgccacgatcccccatctatccactgagcgacagcgagaccagcgcctgccggtatcctagtcactcctcttctcgcgtcctgttgaaggacagacaccctccggctccctctccacagaatccccaggatccctcacccgatacatcacctccaacgtgtccttttaagacagcgtccttcggctacctggatcgctcaccttccgcctgtaagcgcgacgctcagaaagaaagcgtccagggcgcagcctag

SEQ ID NO: 312928 - DNA, 590 bp, Artificial Sequence
  derived and/or modified sequence
agacccagacaactcttggtcggatggtgaggagcccggccgcagcccggggcgcggatgcctgcccgccgcccgccctctctgcaggagcggctcctcctccgggccgcgcggctcccggcgagaccccatccaggcgccgcgcccggcccggctggggaacgcagagggatggtgacagaatggatagtatagaaaatggattggaattgaggaggaaactagaagctaagaggagttaggaggcccttgtaacaatccagatttcacaccctttggagagtttctttcttggataattcaggaagatgagagactgcttaggcgccaccactagtaccatgagtccctgcactggttaaagccatcgccacaacctggacaggcagcaagggctctgggtttgcagagagccgaaatgaccatgactgccaacaagaattccagcatcacccacggagctggtggcactaaagcccctcgggggactctgagcaggtctcagtcagtctctccacctccagttctctccccaccaaggagtcccatctacccgctcagtgatagtgaaacctcagcctgcaggtacc

SEQ ID NO: 312929 - DNA, 580 bp, Artificial Sequence
  derived and/or modified sequence
tccagacccagacaactcttggtcggatggtgaggagcccggccgcagcccggggcgcggatgcctgcccgccgcccgccctctctgcaggagcggctcctcctccgggccgcgcggctcccggcgagaccccatccaggcgccgcgcccggcccggctggggaacgcagagatttcacaccctttggagagtttctttcttggataattcagggtcttgctgtgttgctcgggctgctcttgaactcctgggctcaaacagtcctcttgcctcagcctcccaacgtgctgggattacgggagcaagccaccccactgtgtgcagcccagaagttgagcctgagaggaagatgagagactgcttaggcgccaccactagtaccatgagtccctgcactggttaaagccatcgccacaacctggacaggcagcaagggctctgggtttgcagagagccgaaatgaccatgactgccaacaagaattccagcatcacccacggagctggtggcactaaagcccctcgggggactctgagcaggtctcagtcagtctctccacctccagttctctccccacca

SEQ ID NO: 312930 - DNA, 887 bp, Artificial Sequence
  derived and/or modified sequence
cttggtcggatggtgaggaggtgagggccgtccagtttgggggccaacttctcctccctgctgcccccggcccccgcctccctcacccctgtcccccaccctccctcgcacactctcggcgcggctttctcgctgcctccggcgcctccgagcgctcccctccgccgggctccagcagcccaccctctctgtcttgggtggaggcgcacatcctccacgccccctccactcaaatctgcgctccctcccctctctctccctgcagcccggccgcagcccggggcgcggatgcctgcccgccgcccgccctctctgcaggagcggctcctcctccgggccgcgcggctcccggcgagaccccatccaggcgccgcgcccggcccggctggggaacgcagaggaagatgagagactgcttaggcgccaccactagtaccatgagtccctgcactggttaaagccatcgccacaacctggacaggcagcaagggctctgggtttgcagagagccgaaatgaccatgactgccaacaagaattccagcatcacccacggagctggtggcactaaagcccctcgggggactctgagcaggtctcagtcagtctctccacctccagttctctccccaccaaggagtcccatctacccgctcagtgatagtgaaacctcagcctgcaggtaccccagccactccagctcccgggtgctcctcaaggaccggcaccccccagctccttcaccccagaatcctcaagatccctccccagatacttccccacccacctgtcccttcaagaccgccagcttcggttatttggacagaagcccttcggcgtgcaagagagacgcccaaaaggaaagtgtccaaggcgcagcccaggatg

SEQ ID NO: 312931 - DNA, 523 bp, Artificial Sequence
  derived and/or modified sequence
gccgcgcccggcccggctggggaacgcagagatttcacaccctttggagagtttctttcttggataattcagggctctgggtttgcagagagccgaaatgaccatgactgccaacaagaattccagcatcacccacggagctggtggcactaaagcccctcgggggactctgagcaggtctcagtcagtctctccacctccagttctctccccaccaaggagtcccatctacccgctcagtgatagtgaaacctcagcctgcaggtaccccagccactccagctcccgggtgctcctcaaggaccggcaccccccagctccttcaccccagaatcctcaagatccctccccagatacttccccacccacctgtcccttcaagaccgccagcttcggttatttggacagaagcccttcggcgtgcaagagagacgcccaaaaggaaagtgtccaaggcgcagcccaggatgtagcaggggtcgctgcctgcctcccccttgcccagagcacgccattcccgggg

SEQ ID NO: 312932 - DNA, 550 bp, Artificial Sequence
  derived and/or modified sequence
gttgacactctgaatggtttgtgaaggcatcctctggcccctgaaggcattaccatccttaccaggtttaaaatctttcagagtgcacccagcatcatcagctcctgcaagcagaaagggcccaagggagcatgaacacacactggggtcttgctgtgttgctcgggctgctcttgaactcctgggctcaaacagtcctcttgcctcagcctcccaacgtgctgggattacgggagcaagccaccccactgtgtgcagcccagaagttgagcctgagaggaagatgagagactgcttaggcgccaccactagtaccatgagtccctgcactggttaaagccatcgccacaacctggacaggcagcaagggctctgggtttgcagagagccgaaatgaccatgactgccaacaagaattccagcatcacccacggagctggtggcactaaagcccctcgggggactctgagcaggtctcagtcagtctctccacctccagttctctccccaccaaggagtcccatctacccgctcagtgatagtgaaacct

SEQ ID NO: 312933 - DNA, 573 bp, Artificial Sequence
  derived and/or modified sequence
gtgcgcgcccggtcccgcccctgccctcccagcccttttccctctgctcccgactcccggccccggcagcggtgtccagctccatttcacaccctttggagagtttctttcttggataattcaggaagatgagagactgcttaggcgccaccactagtaccatgagtccctgcactggttaaagccatcgccacaacctggacaggcagcaagggctctgggtttgcagagagccgaaatgaccatgactgccaacaagaattccagcatcacccacggagctggtggcactaaagcccctcgggggactctgagcaggtctcagtcagtctctccacctccagttctctccccaccaaggagtcccatctacccgctcagtgatagtgaaacctcagcctgcaggtaccccagccactccagctcccgggtgctcctcaaggaccggcaccccccagctccttcaccccagaatcctcaagatccctccccagatacttccccacccacctgtcccttcaagaccgccagcttcggttatttggacagaagcccttcggcgtgcaagagaga

SEQ ID NO: 312934 - DNA, 576 bp, Artificial Sequence
  derived and/or modified sequence
agacccagacaactcttggtcggatggtgaggagcccggccgcagcccggggcgcggatgcctgcccgccgcccgccctctctgcaggagcggctcctcctccgggccgcgcggctcccggcgagaccccatccaggcgccgcgcccggcccggctggggaacgcagagggtcttgctgtgttgctcgggctgctcttgaactcctgggctcaaacagtcctcttgcctcagcctcccaacgtgctgggattacgggagcaagccaccccactgtgtgcagcccagaagttgagcctgagaggaagatgagagactgcttaggcgccaccactagtaccatgagtccctgcactggttaaagccatcgccacaacctggacaggcagcaagggctctgggtttgcagagagccgaaatgaccatgactgccaacaagaattccagcatcacccacggagctggtggcactaaagcccctcgggggactctgagcaggtctcagtcagtctctccacctccagttctctccccaccaaggagtcccatctacccgctcagtgatagtgaaacctcag

SEQ ID NO: 312935 - DNA, 514 bp, Artificial Sequence
  derived and/or modified sequence
aaacttagggggtctgccgtgtcccagggactgtgctcattttctgacaggagcaatattattaccgactgtgacagcagctcccactaagcctgcaccttagctgcagatccttagcagggcagagagacaaggctgtatttgtatcaggaagatgagagactgcttaggcgccaccactagtaccatgagtccctgcactggttaaagccatcgccacaacctggacaggcagcaagggctctgggtttgcagagagccgaaatgaccatgactgccaacaagaattccagcatcacccacggagctggtggcactaaagcccctcgggggactctgagcaggtctcagtcagtctctccacctccagttctctccccaccaaggagtcccatctacccgctcagtgatagtgaaacctcagcctgcaggtaccccagccactccagctcccgggtgctcctcaaggaccggcaccccccagctccttcaccccagaatcctcaagatccct

SEQ ID NO: 312936 - DNA, 631 bp, Artificial Sequence
  derived and/or modified sequence
agaccccgttgtgctttgctccagacccagacaactcttggtcggatggtgaggagcccggccgcagcccggggcgcggatgcctgcccgccgcccgccctctctgcaggagcggctcctcctccgggccgcgcggctcccggcgagaccccatccaggcgccgcgcccggcccggctggggaacgcagagatttcacaccctttggagagtttctttcttggataattcaggaagatgagagactgcttaggcgccaccactagtaccatgagtccctgcactggttaaagccatcgccacaacctggacaggcagcaagggctctgggtttgcagagagccgaaatgaccatgactgccaacaagaattccagcatcacccacggagctggtggcactaaagcccctcgggggactctgagcaggtctcagtcagtctctccacctccagttctctccccaccaaggagtcccatctacccgctcagtgatagtgaaacctcagcctgcaggtaccccagccactccagctcccgggtgctcctcaaggaccggcaccccccagctccttcaccccagaatcctcaagatccctccccagatacttccccacccacctgtcccttcaag

SEQ ID NO: 312937 - DNA, 560 bp, Artificial Sequence
  derived and/or modified sequence
agtgctctgctcacttggctgcgaggagcgccacgaaaggtcagaggaaggagctgtgggaagctcgcagcagggctctgggtttgcagagagccgaaatgaccatgactgccaacaagaattccagcatcacccacggagctggtggcactaaagcccctcgggggactctgagcaggtctcagtcagtctctccacctccagttctctccccaccaaggagtcccatctacccgctcagtgatagtgaaacctcagcctgcaggtaccccagccactccagctcccgggtgctcctcaaggaccggcaccccccagctccttcaccccagaatcctcaagatccctccccagatacttccccacccacctgtcccttcaagaccgccagcttcggttatttggacagaagcccttcggcgtgcaagagagacgcccaaaaggaaagtgtccaaggcgcagcccaggatgtagcaggggtcgctgcctgcctcccccttgcccagagcacgccattcccggggccagcagctggcccccggggcgtcttgctgacccgt

SEQ ID NO: 312938 - DNA, 751 bp, Artificial Sequence
  derived and/or modified sequence
acataatatccagtgcgtcctccctggcactccgattctcagtagtcatgaaccagctggcttctatatctctcaccaatcacagggtcttgctgtgttgctcgggctgctcttgaactcctgggctcaaacagtcctcttgcctcagcctcccaacgtgctgggattacgggagcaagccaccccactgtgtgcagcccagaagttgagcctgagaggaagatgagagactgcttaggcgccaccactagtaccatgagtccctgcactggttaaagccatcgccacaacctggacaggcagcaagggctctgggtttgcagagagccgaaatgaccatgactgccaacaagaattccagcatcacccacggagctggtggcactaaagcccctcgggggactctgagcaggtctcagtcagtctctccacctccagttctctccccaccaaggagtcccatctacccgctcagtgatagtgaaacctcagcctgcaggtaccccagccactccagctcccgggtgctcctcaaggaccggcaccccccagctccttcaccccagaatcctcaagatccctccccagatacttccccacccacctgtcccttcaagaccgccagcttcggttatttggacagaagcccttcggcgtgcaagagagacgcccaaaaggaaagtgtccaaggcgcagcccaggatgtagcaggggtcgctgcctgcctcccccttgcccagagcacgccatt

SEQ ID NO: 312939 - DNA, 299 bp, Artificial Sequence
  derived and/or modified sequence
acataatatccagtgcgtcctccctggcactccgattctcagtagtcatgaaccagctggcttctatatctctcaccaatcacaggtaatttaggtctccctcaggaagatgagagactgcttaggcgccaccactagtaccatgagtccctgcactggttaaagccatcgccacaacctggacaggcagcaagggctctgggtttgcagagagccgaaatgaccatgactgccaacaagaattccagcatcacccacggagctggtggcactaaagcccctcgggggactctgagcag

SEQ ID NO: 312940 - DNA, 556 bp, Artificial Sequence
  derived and/or modified sequence
gtgtgtatgagaaaatgacataaagtttcagaccccgttgtgctttgctccagacccagacaactcttggtcggatggtgaggagcccggccgcagcccggggcgcggatgcctgcccgccgcccgccctctctgcaggagcggctcctcctccgggccgcgcggctcccggcgagaccccatccaggcgccgcgcccggcccggctggggaacgcagaggaagatgagagactgcttaggcgccaccactagtaccatgagtccctgcactggttaaagccatcgccacaacctggacaggcagcaagggctctgggtttgcagagagccgaaatgaccatgactgccaacaagaattccagcatcacccacggagctggtggcactaaagcccctcgggggactctgagcaggtctcagtcagtctctccacctccagttctctccccaccaaggagtcccatctacccgctcagtgatagtgaaacctcagcctgcaggtaccccagccactccagctcccgggtgctcctcaaggaccggcaccccccagct

SEQ ID NO: 312941 - DNA, 638 bp, Artificial Sequence
  derived and/or modified sequence
gattactgtgctttgggattaaagtgtcctgccgtttctggaagagactgctagtcataaagacaggtagggctgaagggtggaggtagggtctccagctgcagttgtcaagaacccaacgtgaaggctgactgagcagagaaactgctgctgcccagaaagaaagcacttttagcagtgggctctgggtttgcagagagccgaaatgaccatgactgccaacaagaattccagcatcacccacggagctggtggcactaaagcccctcgggggactctgagcaggtctcagtcagtctctccacctccagttctctccccaccaaggagtcccatctacccgctcagtgatagtgaaacctcagcctgcaggtaccccagccactccagctcccgggtgctcctcaaggaccggcaccccccagctccttcaccccagaatcctcaagatccctccccagatacttccccacccacctgtcccttcaagaccgccagcttcggttatttggacagaagcccttcggcgtgcaagagagacgcccaaaaggaaagtgtccaaggcgcagcccaggatgtagcaggggtcgctgcctgcctcccccttgcccagagcacgccattcccggggccagcag

SEQ ID NO: 312942 - DNA, 564 bp, Artificial Sequence
  derived and/or modified sequence
taatatccagtgcgtcctccctggcactccgattctcagtagtcatgaaccagctggcttctatatctctcaccaatcacaggaagatgagagactgcttaggcgccaccactagtaccatgagtccctgcactggttaaagccatcgccacaacctggacaggcagcaagggctctgggtttgcagagagccgaaatgaccatgactgccaacaagaattccagcatcacccacggagctggtggcactaaagcccctcgggggactctgagcaggtctcagtcagtctctccacctccagttctctccccaccaaggagtcccatctacccgctcagtgatagtgaaacctcagcctgcaggtaccccagccactccagctcccgggtgctcctcaaggaccggcaccccccagctccttcaccccagaatcctcaagatccctccccagatacttccccacccacctgtcccttcaagaccgccagcttcggttatttggacagaagcccttcggcgtgcaagagagacgcccaaaaggaaagtgtccaaggcgcagccca

SEQ ID NO: 312943 - DNA, 659 bp, Artificial Sequence
  derived and/or modified sequence
agacccagacaactcttggtcggatggtgaggaggtgagggccgtccagtttgggggccaacttctcctccctgctgcccccggcccccgcctccctcacccctgtcccccaccctccctcgcacactctcggcgcggctttctcgctgcctccggcgcctccgagcgctcccctccgccgggctccagcagcccaccctctctgtcttgggtggaggcgcacatcctccacgccccctccactcaaatctgcgctccctcccctctctctccctgcagcccggccgcagcccggggcgcggatgcctgcccgccgcccgccctctctgcaggagcggctcctcctccgggccgcgcggctcccggcgagaccccatccaggcgccgcgcccggcccggctggggaacgcagagatttcacaccctttggagagtttctttcttggataattcaggaagatgagagactgcttaggcgccaccactagtaccatgagtccctgcactggttaaagccatcgccacaacctggacaggcagcaagggctctgggtttgcagagagccgaaatgaccatgactgccaacaagaattccagcatcacccacggagctggtggcactaaagcccctcgggggactctgagcaggtctcagtca

SEQ ID NO: 312944 - protein, 72 aa, Artificial Sequence
  derived and/or modified sequence
MTMTANKNSSITHGAGGTKAPRGTLSRKSFEFEDASSLQSLYPSSPTENGTENQPKFGSKSTLEENAYEDIV

SEQ ID NO: 312945 - protein, 77 aa, Artificial Sequence
  derived and/or modified sequence
MTMTANKNSSITHGAGGTKAPRGTLSRKSFEFEDASSLQSLYPSSPTENGTENQPKFGSKSTLEENAYEDIVGDLPK

SEQ ID NO: 312946 - protein, 76 aa, Artificial Sequence
  derived and/or modified sequence
MTMTANKNSSITHGAGGTKAPRGTLSRKSFEFEDASSLQSLYPSSPTENGTENQPKFGSKSTLEENAYEDIVGDLP

SEQ ID NO: 312947 - DNA, 144 bp, Artificial Sequence
  derived and/or modified sequence
atgtggagcccccaggacagaaagtacaacagcccccccacccagctgagcctgaagcccaacagccagagcctgagaagcggcaactggagcgagagaaagagccacagactgcccagactgcccaagagacacagccactag

SEQ ID NO: 312948 - DNA, 540 bp, Artificial Sequence
  derived and/or modified sequence
atgtggagcccccaggacagaaagtacaacagcccccccacccagctgagcctgaagcccaacagccagagcctgagaagcggcaactggagcgagagaaagagccacagactgcccagactgcccaagagacacagccacgacgacatgctgctgctggcccagctgagcctgcccagcagccccagcagcctgaacgaggacagcctgagcaccaccagcgagctgctgagcagcagaagagccagaagaatccccaagctggtgcagagaatcaacagcatctacaacgccaagagaggcaagaagagactgaagaagctgagcatgagcagcatcgagaccgccagcctgagagacgagaacagcgagagcgagagcgacagcgacgacagattcaaggcccacacccagagactggtgcacatccagagcatgctgaagagagcccccagctacagaaccctggagctggagctgctggagtggcaggagagagagctgttcgagtacttcgtggtggtgagcctgaagaagtag

SEQ ID NO: 312949 - DNA, 144 bp, Artificial Sequence
  derived and/or modified sequence
atgtggagcccacaggacagaaagtacaactcccctcccactcagctgtcactaaagcccaattcccagagcctccgctccggcaactggagtgagcgcaagtcccaccggttacctcgactgcccaaaaggcatagccattag

SEQ ID NO: 312950 - DNA, 540 bp, Artificial Sequence
  derived and/or modified sequence
atgtggtccccccaagataggaagtataattcgccgccaacgcagttgtctcttaagcccaattctcagtctctgagatccggaaattggtccgagcgtaagtctcaccggctgccccgactgccaaaacgacactcccatgatgacatgctcctgctggcacagcttagcctaccgtcaagccccagttccctcaacgaggactctctatcaactacctctgagctactgtccagtagaagggctcggcggatcccaaagctcgtacagaggattaattcgatatacaatgcaaagcgtggtaaaaaacgcctaaagaagctgagtatgtcctcaatcgagacagcgtctctacgcgacgaaaactccgagagcgaaagtgactctgacgacagattcaaagcccacacccagaggctggtgcatattcagtcaatgctgaagcgggccccttcgtaccgcactctggaactcgagttgttagaatggcaggaaagggagctgtttgaatattttgttgtcgtgtcactcaagaagtag

SEQ ID NO: 312951 - DNA, 144 bp, Artificial Sequence
  derived and/or modified sequence
atgtggagcccccaggacaggaagtacaacagcccccccacccagctgagcctgaagcccaacagccagagcctgcggagcggcaactggagcgagaggaagagccaccggctgccccggctgcccaagaggcacagccactag

SEQ ID NO: 312952 - DNA, 540 bp, Artificial Sequence
  derived and/or modified sequence
atgtggagcccccaggacaggaagtacaacagcccccccacccagctgagcctgaagcccaacagccagagcctgcggagcggcaactggagcgagaggaagagccaccggctgccccggctgcccaagaggcacagccatgatgacatgctgctgctggcccagctgagcctgcccagcagccccagcagcctgaatgaagacagcctgagcaccaccagcgagctgctgagcagccggcgggcccggcgcatccccaagctggtgcagaggatcaacagcatctacaatgccaagaggggcaagaagaggctgaagaagctgtccatgagcagcattgaaacagccagcctgagagatgaaaattctgagagcgagagtgacagtgatgaccgcttcaaggcccacacccagaggctggtgcacatccagagcatgctgaagagggcccccagctaccgcaccctggagctggagctgctggagtggcaggagcgggagctgtttgagtactttgtggtggtgtccctgaagaagtag

SEQ ID NO: 312953 - DNA, 144 bp, Artificial Sequence
  derived and/or modified sequence
atgtggagcccccaggaccggaagtacaacagcccccccacccagttgtcactgaagccaaactcacaatcactcaggagtggcaactggagcgagagaaaatcacaccgactgccacgcctgcccaagagacattcccattag

SEQ ID NO: 312954 - DNA, 540 bp, Artificial Sequence
  derived and/or modified sequence
atgtggagcccccaggaccggaagtacaacagcccccccacccagctgtctctaaaaccaaatagccagtccctacgctctgggaactggagtgagagaaaatctcacagactgcccaggctccccaagagacacagtcacgatgacatgttgcttcttgcccagttgtccctaccctctagcccttcctccctgaacgaggattcgttgagtacaacctctgagcttctgagttcaaggagagcccgaagaattcccaagcttgtgcaacgcatcaactccatctataatgcaaaacgcggtaagaagcgactgaaaaaactctccatgtcttccatcgagactgcaagtctgcgagacgagaatagcgagtctgagagcgactctgacgaccgtttcaaggcccacacacaacgtctggtacatatccaatcaatgctcaaacgcgcccccagttatcgcactctggaactcgagctactggaatggcaggagagggagctgtttgagtacttcgttgtggtgagtctgaagaagtag

SEQ ID NO: 312955 - DNA, 144 bp, Artificial Sequence
  derived and/or modified sequence
atgtggtctcctcaagacaggaaatacaattcccctcctacccaactatccttaaaaccaaattcacagtcacttaggagcgggaattggtctgagcggaaatcccaccgcctccccagactgccaaagagacactcgcattag

SEQ ID NO: 312956 - DNA, 540 bp, Artificial Sequence
  derived and/or modified sequence
atgtggagtcctcaggacaggaagtataactccccgcctacccaactgagcctcaagccgaattcacaaagtctgcgcagcggcaattggtcggaacgcaagtcacacagactgcctcggctgcccaagaggcattcccatgacgacatgcttctcctggcacaattgtctcttccttcatccccatcttcactcaacgaggactcattgtctacaacttctgaactcctgagctctcgtcgtgctcgccgtatcccaaagctggtgcagagaatcaactccatttataacgcaaaacggggaaaaaagcgactgaagaaactctcgatgtcatccatcgaaactgcttcccttcgtgatgaaaattctgagtccgaatcggactccgatgaccggttcaaagcccacacacaaaggttggttcatatccagtccatgctcaaaagagcacctagctacagaacccttgaactggaactgcttgagtggcaggagagagagctgttcgagtattttgtggtggtatccttgaaaaagtag

SEQ ID NO: 312957 - protein, 407 aa, Artificial Sequence
  derived and/or modified sequence
MPTPDATTPQAKGFRRAVSELDAKQAEAIMVRGQSPRFIGRRQSLIEDARKEREAAVAAAAAAVPSEPGDPLEAVAFEEKEGKAVLNLLFSPRATKPSALSRAVKVFETFEAKIHHLETRPAQRPRAGGPHLEYFVRLEVRRGDLAALLSGVRQVSEDVRSPAGPKVPWFPRKVSELDKCHHLVTKFDPDLDLDHPGFSDQVYRQRRKLIAEIAFQYRHGDPIPRVEYTAEEIATWDCCHELLGHVPMLADRTFAQFSQDIGLASLGASDEEIEKLSTLYWFTVEFGLCKQNGEVKAYGAGLLSSYGELLHCLSEEPEIRAFDPEAAAVQPYQDQTYQSVYFVSESFSDAKDKLRSYASRIQRPFSVKFDPYTLAIDVLDSPQAVRRSLEGVQDELDTLAHALSAIG

SEQ ID NO: 312958 - DNA, 1224 bp, Artificial Sequence
  derived and/or modified sequence
atgcccacccccgacgccaccaccccccaggccaagggcttcagaagagccgtgagcgagctggacgccaagcaggccgaggccatcatggtgagaggccagagccccagattcatcggcagaagacagagcctgatcgaggacgccagaaaggagagagaggccgccgtggccgccgccgccgccgccgtgcccagcgagcccggcgaccccctggaggccgtggccttcgaggagaaggagggcaaggccgtgctgaacctgctgttcagccccagagccaccaagcccagcgccctgagcagagccgtgaaggtgttcgagaccttcgaggccaagatccaccacctggagaccagacccgcccagagacccagagccggcggcccccacctggagtacttcgtgagactggaggtgagaagaggcgacctggccgccctgctgagcggcgtgagacaggtgagcgaggacgtgagaagccccgccggccccaaggtgccctggttccccagaaaggtgagcgagctggacaagtgccaccacctggtgaccaagttcgaccccgacctggacctggaccaccccggcttcagcgaccaggtgtacagacagagaagaaagctgatcgccgagatcgccttccagtacagacacggcgaccccatccccagagtggagtacaccgccgaggagatcgccacctgggactgctgccacgagctgctgggccacgtgcccatgctggccgacagaaccttcgcccagttcagccaggacatcggcctggccagcctgggcgccagcgacgaggagatcgagaagctgagcaccctgtactggttcaccgtggagttcggcctgtgcaagcagaacggcgaggtgaaggcctacggcgccggcctgctgagcagctacggcgagctgctgcactgcctgagcgaggagcccgagatcagagccttcgaccccgaggccgccgccgtgcagccctaccaggaccagacctaccagagcgtgtacttcgtgagcgagagcttcagcgacgccaaggacaagctgagaagctacgccagcagaatccagagacccttcagcgtgaagttcgacccctacaccctggccatcgacgtgctggacagcccccaggccgtgagaagaagcctggagggcgtgcaggacgagctggacaccctggcccacgccctgagcgccatcggctag

SEQ ID NO: 312959 - DNA, 1224 bp, Artificial Sequence
  derived and/or modified sequence
atgccaacgcccgacgccactacccctcaagccaaaggatttagacgcgcggtgagcgagctggacgctaaacaggcagaagccatcatggttcggggccagagcccgagattcattgggcgaaggcagtcgctgatcgaagatgcccgcaaagagagggaggccgccgtggccgccgctgccgccgccgtgccctctgagcccggcgacccgttggaagccgttgcctttgaggagaaagaagggaaggccgttctgaatcttctctttagccctcgcgccaccaagcccagtgccctctcacgagctgtcaaggtgtttgagacatttgaggccaagatccatcacctggagacacgccctgcccagcggccgagagctggtggtccacacctcgaatactttgtgcgcctggaagtgcggcggggcgatctggccgccctcctcagtggcgtccgccaggtgtcagaggacgtgaggagcccagcggggcctaaagtgccatggttccctcgtaaggtatcagaactcgacaagtgccaccatctcgtgactaaatttgatcccgacctcgatctcgaccatcctggatttagtgatcaggtctacaggcaacggaggaagctcatcgctgagattgcgttccagtataggcacggtgatcccattcctagggtcgaatacacggcagaagaaatagctacgtgggattgctgccacgagctcctgggccatgtgcctatgttagctgaccgcacctttgcccagttctcacaagatattggacttgcatccttaggggcttcagacgaagaaatagagaaactcagcaccctgtactggttcacagttgagttcgggctatgcaagcagaacggtgaggtaaaagcatacggggcaggactgctcagtagctacggcgaacttcttcattgcctgtcagaggagcccgagatccgtgcttttgaccccgaagctgccgccgtgcagccataccaggaccagacctaccagtccgtctacttcgttagtgagagtttctccgatgccaaagacaaactgcggagttatgctagtcgtatccagaggccattctcagtgaaattcgatccctatactctggctatcgatgtcctggatagccctcaggcagtgaggagaagtctggagggagtgcaagacgagctcgatacactggctcatgccctcagtgcaatcggctag

SEQ ID NO: 312960 - DNA, 1224 bp, Artificial Sequence
  derived and/or modified sequence
atgcccaccccagatgccaccaccccccaggccaagggcttcagaagagctgtgtctgagctggatgccaagcaggccgaggccatcatggtgcggggccagagcccccgcttcatcggccggcggcagagcctgattgaagatgccaggaaggagcgggaggccgctgtggccgctgctgctgctgctgtgcccagcgagcccggggaccccctggaggccgtggcctttgaggagaaggagggcaaggctgtgctgaacctgctcttcagcccccgggccaccaagcccagcgccctgagcagagctgtgaaggtgtttgagacctttgaggccaagatccaccacctggagaccaggcctgcccagaggcccagggctgggggcccccacctggagtactttgtgcggctggaggtgagaagaggagacctggccgccctgctgagcggcgtgcggcaggtgtctgaagatgtgcgcagccctgctggccccaaggtgccctggttccccaggaaggtgtctgagctggacaagtgccaccacctggtgaccaagtttgatcctgacctggacctggaccaccctggcttcagtgaccaggtgtaccggcagaggaggaagctgattgctgagatcgccttccagtacagacatggagaccccatcccccgggtggagtacacagctgaggagatcgccacctgggactgctgccacgagctgctgggccacgtgcccatgctggccgacaggacctttgcccagttcagccaggacatcggcctggccagcctgggcgccagtgatgaggagattgagaagctgagcaccctgtactggttcaccgtggagtttggcctgtgcaagcagaatggagaggtgaaggcctacggggccggcctgctgagcagctatggagagctgctgcactgcctgtctgaggagcctgagatccgggcctttgatcctgaggccgctgctgtgcagccctaccaggaccagacctaccagagcgtgtactttgtgtctgagagcttcagtgatgccaaggacaagctgcggagctatgccagccgcatccagaggcccttctctgtgaagtttgacccctacaccctggccattgatgtgctggacagcccccaggccgtgcggcgcagcctggagggcgtgcaggatgagctggacaccctggcccacgccctgagcgccatcggctag

SEQ ID NO: 312961 - DNA, 1224 bp, Artificial Sequence
  derived and/or modified sequence
atgcccacccccgacgccaccaccccccaggccaagggcttccggcgggcagtgagcgagcttgatgccaagcaagccgaagctattatggtgcgcggccaatctccgcgctttattgggagaagacagagcctaatagaagacgctcgcaaggaaagggaagctgcggtggccgcagcagccgctgccgtgccttccgaaccaggcgatcccctagaggctgtggcattcgaggagaaggaaggcaaggccgtacttaacttactgttcagcccccgcgcgacgaagccatcagccctgtcacgtgctgtaaaagttttcgaaactttcgaagctaagatccaccatctagagactcggcccgcccaaaggcccagagccggtggaccacacctggaatactttgtgagactggaagtgagacgaggggatctcgctgctctgctctccggcgtgagacaggtgagcgaggatgtccgcagcccagccggtccaaaggtcccgtggtttccccggaaggttagtgaattggacaagtgccaccatctagtgacgaagttcgacccagatctcgacctcgaccatcccgggttcagcgaccaggtgtatagacagaggcgcaagctcatcgccgagattgcattccagtaccgccatggggatcctataccccgggtcgagtataccgcagaggaaatcgcaacatgggactgttgccacgagctgctggggcacgtgcctatgcttgctgatcggactttcgcacagtttagtcaggacattggactggctagcctgggtgcgtctgatgaagagatcgaaaaactctccaccctgtactggtttactgttgaatttggtttatgcaagcagaacggcgaggttaaagcttatggtgccggattattaagctcctacggcgaattactgcactgcctgtcggaagaaccggagatcagggccttcgacccagaagctgccgcggtgcagccctaccaggatcagacatatcagagtgtttacttcgtaagtgaatccttctctgatgccaaggacaagctgcgatcgtacgctagtaggatccaacgtcctttctctgttaagtttgatccttacacactggctattgatgtgctcgactcaccccaggctgtcagacgaagcctcgagggcgtgcaagacgagctggacaccctggcccacgccctctccgctatcggatag

SEQ ID NO: 312962 - DNA, 1224 bp, Artificial Sequence
  derived and/or modified sequence
atgccaacacccgatgccactactccacaagcgaaaggcttcagaagagccgtctccgagctagacgcaaaacaggccgaagctatcatggtgagaggtcagtcgccaaggttcattggacgacggcagagccttatcgaggacgctcgcaaggaaagagaggctgccgtggcggctgcagccgctgccgtcccttccgagccgggtgaccctcttgaggccgtcgcatttgaagagaaggagggcaaggctgtgctcaatctcctgttctcacccagagcgacaaaaccttccgccttgtcacgcgcagtcaaagtttttgaaacatttgaggccaagatccatcatcttgaaactcggccagcccagcgacccagagctggtgggccacacttagagtacttcgtacgcctcgaagtgcgcagaggagatttggccgcattgctttctggagtccgtcaggtgagtgaggatgttcgctctccagcaggtccaaaggtaccctggtttcctcggaaagtctccgaacttgataagtgtcatcatttggtcacgaaatttgaccccgatctggatctggaccaccctggattctccgatcaagtgtaccgccagagacggaagctgattgcagagattgcgttccagtacaggcacggggatcccatcccgagagtcgagtacacggcggaggagatcgccacatgggactgctgtcacgagctgttgggacacgtacctatgctcgcagatcggacatttgcacagttttcccaggacatcggccttgcctctctcggggcatctgatgaggagatagagaaattgtccacattatattggttcaccgtagagtttggactttgcaagcagaacggagaggtcaaggcctacggggcaggcttgcttagcagttatggcgaattgctgcactgcttatctgaggaaccagagatccgtgcgttcgacccggaggcggcagccgtgcaaccttaccaggatcaaacataccaatccgtgtacttcgtgtccgagtcttttagcgacgcaaaggataaactgcggtcatacgccagccgtatacaaaggcccttcagtgtgaagtttgatccatatacgctggccattgatgtgttggattcacctcaggccgtaaggcgttctcttgagggagtgcaagacgagctggacacccttgcccacgcgctgtcggcgattggatag

SEQ ID NO: 312963 - DNA, 1536 bp, Artificial Sequence
  derived and/or modified sequence
cactgagccatgcccacccccgacgccaccacgccacaggccaagggcttccgcagggccgtgtctgagctggacgccaagcaggcagaggccatcatggtaagagggcagtccccgcggttcattgggcgcaggcagagcctcatcgaggacgcccgcaaggagcgggaggcggcggtggcagcagcggccgctgcagtcccctcggagcccggggaccccctggaggctgtggcctttgaggagaaggaggggaaggccgtgctaaacctgctcttctccccgagggccaccaagccctcggcgctgtcccgagctgtgaaggtgtttgagacgtttgaagccaaaatccaccatctagagacccggcccgcccagaggccgcgagctgggggcccccacctggagtacttcgtgcgcctcgaggtgcgccgaggggacctggccgccctgctcagtggtgtgcgccaggtgtcagaggacgtgcgcagccccgcggggcccaaggtcccctggttcccaagaaaagtgtcagagctggacaagtgtcatcacctggtcaccaagttcgaccctgacctggacttggaccacccgggcttctcggaccaggtgtaccgccagcgcaggaagctgattgctgagatcgccttccagtacaggcacggcgacccgattccccgtgtggagtacaccgccgaggagattgccacctgggactgctgccacgagctgctggggcacgtgcccatgctggccgaccgcaccttcgcgcagttctcgcaggacattggcctggcgtccctgggggcctcggatgaggaaattgagaagctgtccacgctgtactggttcacggtggagttcgggctgtgtaagcagaacggggaggtgaaggcctatggtgccgggctgctgtcctcctacggggagctcctgcactgcctgtctgaggagcctgagattcgggccttcgaccctgaggctgcggccgtgcagccctaccaagaccagacgtaccagtcagtctacttcgtgtctgagagcttcagtgacgccaaggacaagctcaggagctatgcctcacgcatccagcgccccttctccgtgaagttcgacccgtacacgctggccatcgacgtgctggacagcccccaggccgtgcggcgctccctggagggtgtccaggatgagctggacacccttgcccatgcgctgagtgccattggctaggtgcacggcgtccctgagggcccttcccaacctcccctggtcctgcactgtcccggagctcaggccctggtgaggggctgggtcccgggtgccccccatgccctccctgctgccaggctcccactgcccctgcacctgcttctcagcgcaacagctgtgtgtgcccgtggtgaggttgtgctgcctgtggtgaggtcctgtcctggctcccagggtcctgggggctgctgcactgccctccgcccttccctgacactgtctgctgccccaatcaccgtcacaataaaagaaactgtggtctct

SEQ ID NO: 312964 - protein, 100 aa, Artificial Sequence
  derived and/or modified sequence
MAIGFVGCLGAIKENKCLLLTFFLLLLLVFLLEATIAILFFAYTDKIDRYAQQDLKKGLHLYGTQGNVGLTNAWSIIQTDFRCCGVSNYTDWFEVYNATR

SEQ ID NO: 312965 - DNA, 1332 bp, Artificial Sequence
  derived and/or modified sequence
aaagctgcggcggcggttcgcgtttctcgtgtccgcttgactgacagctgcgcggcgggagcgggcggcgcgagcgggaggcggcggcgcagagcttggggcttccttggtcgcacccaccacctgcctgcccactggtcagccttcagggaccctgagcaccgcctggtctctttcctgtggccagcccagctgggaggctgtggcgtgctgggtgtcggcatctggctggccgccacacaggggagcttcgccacgctgtcctcttccttcccgtccctgtcggctgccaacttgctcatcatcaccggcgcctttgtcatggccatcggcttcgtgggctgcctgggtgccatcaaggagaacaagtgcctcctgctcactttcttcctgctgctgctgctggtgttcctgctggaggccaccatcgccatcctcttcttcgcctacacggacaagattgacaggtatgcccagcaagacctgaagaaaggcttgcacctgtacggcacgcagggcaacgtgggcctcaccaacgcctggagcatcatccagaccgacttccgctgctgtggcgtctccaactacactgactggttcgaggtgtacaacgccacgcgggtacctgactcctgctgcttggagttcagtgagagctgtgggctgcacgcccccggcacctggtggaaggcgccgtgctacgagacggtgaaggtgtggcttcaggagaacctgctggctgtgggcatctttgggctgtgcacggcgctggtgcagatcctgggcctgaccttcgccatgaccatgtactgccaagtggtcaaggcagacacctactgcgcgtaggccgcccaccgcccgcttctctgccaaaaggacgcccacggggagatggccgcacccacagctgcctttcccaccaccagcctcggtgctctgccccatgctgggaggagggagggagggacaggtgcctggagcccccggaaccctgtttctggaaggccctagctcaggtggcttcagggcctccggaccccccctgggaggggtggccacgtgctggctgcggaacccagggcaggggtgggaggggcctccagcactttttatatttacgtattctccaaagcagtgttcacacgggagccagcctgtggcccccagcctcctggaaaacaggttggcgctggaggagccgggtcttggcatcctggaggtggccccactggtcctggtgctccaggcggggccgtggacccctcacctacattccatagtgggcccgtggggctcctggtgcatcttaataaagtgtgagcagcaaccttg

SEQ ID NO: 312966 - DNA, 834 bp, Artificial Sequence
  derived and/or modified sequence
aggttcagctgcgaggctgctggtggctgtggagagcttggggcttccttggtcgcacccaccacctgcctgcccactggtcagccttcagggaccctgagcaccgcctggtctctttcctgtggccagcccagctgggaggctgtggcgtgctgggtgtcggcatctggctggccgccacacaggggagcttcgccacgctgtcctcttccttcccgtccctgtcggctgccaacttgctcatcatcaccggcgcctttgtcatggccatcggcttcgtgggctgcctgggtgccatcaaggagaacaagtgcctcctgctcactttcttcctgctgctgctgctggtgttcctgctggaggccaccatcgccatcctcttcttcgcctacacggacaagattgacaggtatgcccagcaagacctgaagaaaggcttgcacctgtacggcacgcagggcaacgtgggcctcaccaacgcctggagcatcatccagaccgacttccgctgctgtggcgtctccaactacactgactggttcgaggtgtacaacgccacgcgggtacctgactcctgctgcttggagttcagtgagagctgtgggctgcacgcccccggcacctggtggaaggcgccgtgctacgagacggtgaaggtgtggcttcaggagaacctgctggctgtgggcatctttgggctgtgcacggcgctggtgcagatcctgggcctgaccttcgccatgaccatgtactgccaagtggtcaaggcagacacctactgcgcgtaggccgcccaccgcccgcttctctgccaaaaggacgcccacggggaga

SEQ ID NO: 312967 - DNA, 860 bp, Artificial Sequence
  derived and/or modified sequence
tcccgggtcccggctctgctggctgctcgccgtcccgagctcccgacgctcagacgcgcctctgagcacggggagaggggacccgggagggaggtcggggagggagtcgtggaagaggtgctttttgagctgaacctggaagaccccggcacaggggatccctgggcagactcccggaggctgcactggcaggaccccctgaaggcctcagctctggcttgccctggagctcagggcctacggacgacgagggacgaggagcccgtgtctctcggatggagtgcgggggggctggcaccagcacccttcttgctgtgcccctggggtggggagcttggggcttccttggtcgcacccaccacctgcctgcccactggtcagccttcagggaccctgagcaccgcctggtctctttcctgtggccagcccagctgggaggctgtggcgtgctgggtgtcggcatctggctggccgccacacaggggagcttcgccacgctgtcctcttccttcccgtccctgtcggctgccaacttgctcatcatcaccggcgcctttgtcatggccatcggcttcgtgggctgcctgggtgccatcaaggagaacaagtgcctcctgctcactttcttcctgctgctgctgctggtgttcctgctggaggccaccatcgccatcctcttcttcgcctacacggacaagattgacaggtatgcccagcaagacctgaagaaaggcttgcacctgtacggcacgcagggcaacgtgggcctcaccaacgcctggagcatcatccagaccgacttccgctgctgtggcgtctccaactacactgactggttcgaggtgtacaacgccacgcgg

SEQ ID NO: 312968 - DNA, 525 bp, Artificial Sequence
  derived and/or modified sequence
atggccatcggcttcgtgggctgcctgggcgccatcaaggagaacaagtgcctgctgctgaccttcttcctgctgctgctgctggtgttcctgctggaggccaccatcgccatcctgttcttcgcctacaccgacaagatcgacagatacgcccagcaggacctgaagaagggcctgcacctgtacggcacccagggcaacgtgggcctgaccaacgcctggagcatcatccagaccgacttcagatgctgcggcgtgagcaactacaccgactggttcgaggtgtacaacgccaccagagtgcccgacagctgctgcctggagttcagcgagagctgcggcctgcacgcccccggcacctggtggaaggccccctgctacgagaccgtgaaggtgtggctgcaggagaacctgctggccgtgggcatcttcggcctgtgcaccgccctggtgcagatcctgggcctgaccttcgccatgaccatgtactgccaggtggtgaaggccgacacctactgcgcctag

SEQ ID NO: 312969 - DNA, 303 bp, Artificial Sequence
  derived and/or modified sequence
atggccatcggcttcgtgggctgcctgggcgccatcaaggagaacaagtgcctgctgctgaccttcttcctgctgctgctgctggtgttcctgctggaggccaccatcgccatcctgttcttcgcctacaccgacaagatcgacagatacgcccagcaggacctgaagaagggcctgcacctgtacggcacccagggcaacgtgggcctgaccaacgcctggagcatcatccagaccgacttcagatgctgcggcgtgagcaactacaccgactggttcgaggtgtacaacgccaccagatag

SEQ ID NO: 312970 - DNA, 525 bp, Artificial Sequence
  derived and/or modified sequence
atggcaataggcttcgtgggctgtcttggggcaatcaaggagaataaatgtctgctgctcacctttttccttctgctgctgctggtttttctgctcgaagctactattgctattctcttcttcgcgtacacagacaaaatcgaccgctatgcccaacaggacctgaaaaaagggttacacctctatggtacacagggtaatgtcgggctgacaaatgcttggtctattatccagactgacttccggtgttgcggggtctcaaactacacagactggtttgaggtgtacaatgccacccgggtccccgatagctgttgccttgaatttagcgagagttgtgggttacacgcgccaggtacatggtggaaagcaccatgctacgagaccgtaaaagtgtggctgcaggaaaatcttctggctgtagggatctttgggttatgtaccgcgctcgttcagatattgggactcacgtttgcgatgacaatgtactgtcaggtcgtcaaggcagacacctactgtgcctag

SEQ ID NO: 312971 - DNA, 525 bp, Artificial Sequence
  derived and/or modified sequence
atggcaattggctttgtggggtgtctgggagccatcaaagaaaataaatgcttattgctgaccttcttcttgcttctgctactggtgtttctcttggaggcaaccatcgccatcctgttttttgcctacacggataaaattgatcgatatgcacagcaggacctgaaaaaggggttgcatctatatgggacacaggggaacgtcggattgaccaacgcctggtccatcattcagacagattttagatgctgtggcgtgagtaattacacagactggtttgaggtctacaacgcaacaagagtgcccgactcttgctgccttgaattctcggagtcctgcggactgcacgccccaggtacttggtggaaggctccttgttatgagacagtcaaagtttggttgcaggagaacttgctcgctgtagggattttcggactgtgcactgcactggttcagatcctgggtcttacatttgctatgactatgtactgccaagtcgtcaaggctgacacttattgtgcttag

SEQ ID NO: 312972 - DNA, 303 bp, Artificial Sequence
  derived and/or modified sequence
atggctatcggtttcgtcgggtgcctgggagccattaaggagaacaaatgtctgctgctgacctttttcctcctcctgctgttggtctttctgctggaagccacaatcgccattttgttcttcgcctacaccgataaaattgacagatatgctcaacaggacctgaaaaaggggttgcacctgtatggcacccagggcaatgtcggactaacaaatgcttggagtatcattcagaccgattttagatgctgcggtgtctctaactacacagattggttcgaagtgtacaatgccaccagatag

SEQ ID NO: 312973 - DNA, 525 bp, Artificial Sequence
  derived and/or modified sequence
atggccatcggctttgtgggctgcctgggcgccatcaaggagaacaagtgcctgctgctgaccttcttcctgctgctgctgctggtgttcctgctggaggccaccatcgccatcctcttctttgcctacacagacaagattgacagatatgcccagcaggacctgaagaagggcctgcacctgtatggcacccagggcaatgtgggcctgaccaatgcctggagcatcatccagacagacttccgctgctgcggcgtgagcaactacacagactggtttgaggtgtacaatgccaccagggtgcctgacagctgctgcctggagttcagcgagagctgtggcctgcacgcccctggcacctggtggaaggccccctgctatgaaacagtgaaggtgtggctgcaggagaacctgctggccgtgggcatcttcggcctgtgcacagccctggtgcagatcctgggcctgacctttgccatgaccatgtactgccaggtggtgaaggctgacacctactgtgcctag

SEQ ID NO: 312974 - DNA, 303 bp, Artificial Sequence
  derived and/or modified sequence
atggccatcggctttgtgggctgcctgggcgccatcaaggagaacaagtgcctgctgctgaccttcttcctgctgctgctgctggtgttcctgctggaggccaccatcgccatcctcttctttgcctacacagacaagattgacagatatgcccagcaggacctgaagaagggcctgcacctgtatggcacccagggcaatgtgggcctgaccaatgcctggagcatcatccagacagacttccgctgctgcggcgtgagcaactacacagactggtttgaggtgtacaatgccaccaggtag

SEQ ID NO: 312975 - DNA, 525 bp, Artificial Sequence
  derived and/or modified sequence
atggccatcggcttcgtgggctgcctgggcgccatcaaggagaacaaatgcttgctgctaaccttttttcttctgcttctcctggtgtttttgctagaagcaactatcgccatcctgttcttcgcttacacagataagatcgacaggtacgcccagcaggatcttaagaaaggtctgcacctgtacggaacacagggcaacgtcggcctcacaaatgcttggtccattattcagacggactttcgctgctgtggagtgtccaattataccgactggttcgaggtctataacgctacacgggtgcctgatagctgttgcctcgagttttctgaaagctgcggactccacgctcctgggacctggtggaaagcaccttgctacgaaacagtgaaagtttggctccaggaaaaccttctggccgtgggcatctttggactgtgtacagctcttgtccaaatccttggactgaccttcgcgatgacaatgtactgtcaggtcgtcaaggctgacacctactgcgcatag

SEQ ID NO: 312976 - DNA, 525 bp, Artificial Sequence
  derived and/or modified sequence
atggccatcggcttcgtgggctgcctgggcgccatcaaggagaacaaatgtctgctgctgacgttcttcctactgctactgctggtgtttctcctcgaggccaccattgcgattctctttttcgcctacacagataaaatcgaccggtacgcacagcaggatttgaagaaaggattgcacctgtatggaacccaagggaacgtgggcttgacaaacgcgtggtccatcatccagaccgacttcaggtgttgtggtgtgtccaactatacggattggtttgaggtatataacgccacaagagtcccggattcttgctgcttggaattcagtgagagctgcggtctgcatgcccctgggacctggtggaaagctccttgctatgagactgtcaaggtctggttgcaggagaaccttttggcagtgggaattttcgggttgtgtacagctctggtccagatactgggactcacctttgccatgactatgtactgccaggtggttaaggcggatacctactgtgcatag

SEQ ID NO: 312977 - DNA, 303 bp, Artificial Sequence
  derived and/or modified sequence
atggccatcggcttcgtgggctgcctgggcgccatcaaggagaacaagtgcctcttactcaccttttttctgctgctgttgctggtgttcttgctcgaagccaccatcgcaatccttttttttgcttatacagacaagatcgatcgctatgcccaacaggatctcaaaaaggggctgcatctttatggaacccagggaaacgtcggtctcacaaatgcctggagtataatccagacggattttaggtgttgcggggtgagcaactatactgattggttcgaggtgtataatgctacccgctag

SEQ ID NO: 312978 - DNA, 525 bp, Artificial Sequence
  derived and/or modified sequence
atggcaatcggatttgttggctgcctcggcgcaattaaggaaaataagtgcttgctcctgacttttttcctgcttctgctgttagtgttcctcctggaggccacaattgcaatcttgtttttcgcctatactgacaaaattgaccgctacgcccagcaagatttgaaaaagggtcttcatctgtacggcacccagggaaacgtgggattgaccaacgcctggtccatcatccagacagactttcgttgttgcggggtgagcaactatactgattggttcgaggtgtacaatgctacacgagtccccgacagctgctgcctggagttcagcgagtcttgcggcctgcatgccccaggtacctggtggaaagcaccgtgttatgagacggtgaaggtgtggctgcaggaaaacttactggctgttggcatatttggcttgtgcaccgctctcgtccaaatcttgggattgacattcgctatgacaatgtactgccaggtcgtaaaagccgatacatactgcgcgtag

SEQ ID NO: 312979 - DNA, 525 bp, Artificial Sequence
  derived and/or modified sequence
atggccattggctttgtagggtgcctgggggcaattaaagagaataaatgcctactgttgacatttttccttttattattgctggtgttcctgttggaagccacaatagccattcttttttttgcctataccgataagatcgatcgctatgctcaacaagatctgaaaaagggcctccacttatacggaacccaaggcaatgtgggcctcaccaatgcatggtctataattcaaaccgattttagatgttgcggcgtgagcaattatactgactggttcgaagtgtataatgccacgagggtccccgactcctgttgcttagaattcagcgagtcttgtggcctgcatgcacccggaacatggtggaaagccccttgctatgagaccgtaaaggtgtggctgcaggagaatttacttgcagtgggcatctttggcctgtgcaccgctttagtgcaaatccttggtcttacattcgccatgaccatgtattgccaagtggtgaaagcagatacctattgcgcctag

SEQ ID NO: 312980 - DNA, 303 bp, Artificial Sequence
  derived and/or modified sequence
atggccattggtttcgtgggctgcttaggggcaatcaaggaaaataagtgcctgctgctcactttctttttgctgttgctgctggtttttctgctggaagcaaccatcgcaatcttgttcttcgcctatacagacaagatcgaccgttatgctcagcaggacctgaaaaagggattacacctgtatggtacccaaggaaacgtcgggctaacaaatgcctggagtatcatacagacggatttccgctgttgtggtgtctcgaactataccgactggtttgaagtatataacgccacccgttag

SEQ ID NO: 312981 - protein, 269 aa, Artificial Sequence
  derived and/or modified sequence
MSDEEVEQVEEQYEEEEEAQEEAAEVHEEVHEPEEVQEDTAEEDAEEEKPRPKLTAPKIPEGEKVDFDDIQKKRQNKDLMELQALIDSHFEARKKEEEELVALKERIEKRRAERAEQQRIRAEKERERQNRLAEEKARREEEDAKRRAEDDLKKKKALSSMGANYSSYLAKADQKRGKKQTAREMKKKILAERRKPLNIDHLGEDKLRDKAKELWETLHQLEIDKFEFGEKLKRQKYDITTLRSRIDQAQKHSKKAGTPAKGKVGGRWK

SEQ ID NO: 312982 - DNA, 2668 bp, Artificial Sequence
  derived and/or modified sequence
aagacctgggacttccgtttcggtccagccgggctgcggccattgtttgtgtggactgagtgttttggccatcccggtccactctcacaggctccgttaagtgacatgaactctcaggaggactgagccagaagcggacagggcaagacgagctgtgcttgaaggaagaggggcagaaaatcgagggtcagggactgagaagctactccggtttagaaaccccagagacacccgtgtagatgggtacatcacggcttctctcccacgttaagacttaataaagaaagcctgatctttgaccagatggcagtaacatttgaagatgtgactattatttttacatgggaggagtggaaattcctggattcttctcaaaaaagactctacagggaggtcatgtgggagaactacacaaatgtcatgtcagtagaaaactggaatgagagctacaaatcccaagaagaaaaattcagatacttagaatatgaaaatttttcctactggcaaggctggtggaatgctggcgcccagatgtatgagaatcagaactatggggaaactgttcaagggacagattccaaagacctcacacagcaagatcgttcccagtgtcaggaatggttaatactctccacacaagtaccagggtatgggaactatgaactgacttttgaaagcaaaagtctcaggaacttaaaatataaaaattttatgccttggcagtccttagaaacaaaaaccactcaagactatggtagagaaatctacatgagtggttcacatggttttcaagggggcagataccgtcttggcatatccaggaaaaacctctccatggaaaaagaacagaagctcatagttcagcattcttatatcccagtggaggaagcccttccacagtatgttggggtgatatgtcaagaagacctactgagagattcaatggaagaaaagtactgtggatgtaataaatgtaaaggaatttattattggaactcacggtgtgttttccacaagagaaatcaacctggagaaaacctctgtcaatgctccatctgtaaagcatgcttctctcagagatcagacttgtatagacatccaagaaaccacataggtaagaagctgtacggatgtgatgaagttgacggtaactttcatcagagctccggagttcactttcatcagagagttcacataggggaggtaccttatagctgtaatgcatgtggtaagagcttcagccagatctctagtcttcacaatcatcaaagagtccacacagaagagaaattctataaaattgagtgtgataaagacctcagtagaaattcattacttcacattcaccagagacttcacataggagagaagccttttaaatgtaatcagtgtggtaagagttttaatcggagttcagtacttcatgttcatcagagagtccacacaggagaaaaaccatataagtgtgatgagtgtggtaagggtttcagccagagctcaaatcttcgaattcatcagttagtacacacaggagagaagtcttataaatgtgaagactgtggtaaaggctttacccagcgctcaaatcttcaaattcatcagagagtgcatacaggagagaaaccttataaatgtgatgactgtggaaaggactttagtcacagctcagatcttcgcattcatcagagagtccatacaggggagaaaccctatacttgtcctgaatgtgggaagggcttcagtaagagttcaaagcttcacactcatcaaagagtacatactggagagaaaccctacaaatgtgaagagtgtggcaagggattcagtcagcgttcacatcttctcattcatcagagagtccatacaggagaaaagccctataaatgtcatgattgtggaaagggttttagtcacagttctaatcttcacattcatcagagggtccatacaggagagaagccttatcaatgtgctaagtgtggtaaaggtttcagtcatagctcagctcttcgaattcatcaaagagtccatgcaggagagaaaccttacaaatgccgtgaatattataagggatttgatcataattcacatcttcacaataatcatagaagaggaaacttataaatattgttcatttagttaacagctttaatcaaagtttacctaacctttaaaccctataaatcctgctgttaaggaaatcttataaataacacaagtaatcccaagcaacatttatagtttcccctatctcccactaagaattatttgcttcaaaaggagatctttagaaaaaaccctatatatttaaaattatagtgtatttttctttacctactataaatataatacagtcataaatatattaaacatttaaggagaaaactcttcattctatttcattctagtctttttttctgtgcattttaatgtgcatgaaattgtgtgttcaattttgtattttcactgtcttcaaaatatttacttaaattttggtttgaattgaaactggttggccaactgttaaacgacatctcttaactcccctaaaaactccctaggaagtaacagaaaagatggaaacacatagaacttaaaactcagttttggccggtagaattcaattgtttatggacaaaagccacctaataaaagataggaaagcatt

SEQ ID NO: 312983 - DNA, 2681 bp, Artificial Sequence
  derived and/or modified sequence
gagtgtctactccaagacctgggacttccgtttcggtccagccgggctgcggccattgtttgtgtggactgagtgttttggccatcccggtccactctcacaggctccgttaagtgacatgaactctcaggaggactgagccagaagcggacagggcaagacgagctgtgcttgaaggaagaggggcagaaaatcgagggtcagggactgagaagctactccggtttagaaaccccagagacacccgtgtagatgggtacatcacggcttctctcccacgttaagacttaataaagaaagcctgatctttgaccagatggcagtaacatttgaagatgtgactattatttttacatgggaggagtggaaattcctggattcttctcaaaaaagactctacagggaggtcatgtgggagaactacacaaatgtcatgtcagtagaaaactggaatgagagctacaaatcccaagaagaaaaattcagatacttagaatatgaaaatttttcctactggcaaggctggtggaatgctggcgcccagatgtatgagaatcagaactatggggaaactgttcaagggacagattccaaagacctcacacagcaagatcgttcccagtgtcaggaatggttaatactctccacacaagtaccagggtatgggaactatgaactgacttttgaaagcaaaagtctcaggaacttaaaatataaaaattttatgccttggcagtccttagaaacaaaaaccactcaagactatggtagagaaatctacatgagtggttcacatggttttcaagggggcagataccgtcttggcatatccaggaaaaacctctccatggaaaaagaacagaagctcatagttcagcattcttatatcccagtggaggaagcccttccacagtatgttggggtgatatgtcaagaagacctactgagagattcaatggaagaaaagtactgtggatgtaataaatgtaaaggaatttattattggaactcacggtgtgttttccacaagagaaatcaacctggagaaaacctctgtcaatgctccatctgtaaagcatgcttctctcagagatcagacttgtatagacatccaagaaaccacataggtaagaagctgtacggatgtgatgaagttgacggtaactttcatcagagctccggagttcactttcatcagagagttcacataggggaggtaccttatagctgtaatgcatgtggtaagagcttcagccagatctctagtcttcacaatcatcaaagagtccacacagaagagaaattctataaaattgagtgtgataaagacctcagtagaaattcattacttcacattcaccagagacttcacataggagagaagccttttaaatgtaatcagtgtggtaagagttttaatcggagttcagtacttcatgttcatcagagagtccacacaggagaaaaaccatataagtgtgatgagtgtggtaagggtttcagccagagctcaaatcttcgaattcatcagttagtacacacaggagagaagtcttataaatgtgaagactgtggtaaaggctttacccagcgctcaaatcttcaaattcatcagagagtgcatacaggagagaaaccttataaatgtgatgactgtggaaaggactttagtcacagctcagatcttcgcattcatcagagagtccatacaggggagaaaccctatacttgtcctgaatgtgggaagggcttcagtaagagttcaaagcttcacactcatcaaagagtacatactggagagaaaccctacaaatgtgaagagtgtggcaagggattcagtcagcgttcacatcttctcattcatcagagagtccatacaggagaaaagccctataaatgtcatgattgtggaaagggttttagtcacagttctaatcttcacattcatcagagggtccatacaggagagaagccttatcaatgtgctaagtgtggtaaaggtttcagtcatagctcagctcttcgaattcatcaaagagtccatgcaggagagaaaccttacaaatgccgtgaatattataagggatttgatcataattcacatcttcacaataatcatagaagaggaaacttataaatattgttcatttagttaacagctttaatcaaagtttacctaacctttaaaccctataaatcctgctgttaaggaaatcttataaataacacaagtaatcccaagcaacatttatagtttcccctatctcccactaagaattatttgcttcaaaaggagatctttagaaaaaaccctatatatttaaaattatagtgtatttttctttacctactataaatataatacagtcataaatatattaaacatttaaggagaaaactcttcattctatttcattctagtctttttttctgtgcattttaatgtgcatgaaattgtgtgttcaattttgtattttcactgtcttcaaaatatttacttaaattttggtttgaattgaaactggttggccaactgttaaacgacatctcttaactcccctaaaaactccctaggaagtaacagaaaagatggaaacacatagaacttaaaactcagttttggccggtagaattcaattgtttatggacaaaagccacctaataaaagataggaaagcatt

SEQ ID NO: 312984 - DNA, 2562 bp, Artificial Sequence
  derived and/or modified sequence
gactgagccagaagcggacagggcaagacgagctgtgcttgaaggaagaggggcagaaaatcgagggtcagggactgagaagctactccggtttagaaaccccagagacacccgtgtagatgggtacatcacggcttctctcccacgttaagacttaataaaggaacctacctttgatcagcaaggaaggactggggtggcaaaggctcatgcccccattttacagcctgatctttgaccagatggcagtaacatttgaagatgtgactattatttttacatgggaggagtggaaattcctggattcttctcaaaaaagactctacagggaggtcatgtgggagaactacacaaatgtcatgtcagtagaaaactggaatgagagctacaaatcccaagaagaaaaattcagatacttagaatatgaaaatttttcctactggcaaggctggtggaatgctggcgcccagatgtatgagaatcagaactatggggaaactgttcaagggacagattccaaagacctcacacagcaagatcgttcccagtgtcaggaatggttaatactctccacacaagtaccagggtatgggaactatgaactgacttttgaaagcaaaagtctcaggaacttaaaatataaaaattttatgccttggcagtccttagaaacaaaaaccactcaagactatggtagagaaatctacatgagtggttcacatggttttcaagggggcagataccgtcttggcatatccaggaaaaacctctccatggaaaaagaacagaagctcatagttcagcattcttatatcccagtggaggaagcccttccacagtatgttggggtgatatgtcaagaagacctactgagagattcaatggaagaaaagtactgtggatgtaataaatgtaaaggaatttattattggaactcacggtgtgttttccacaagagaaatcaacctggagaaaacctctgtcaatgctccatctgtaaagcatgcttctctcagagatcagacttgtatagacatccaagaaaccacataggtaagaagctgtacggatgtgatgaagttgacggtaactttcatcagagctccggagttcactttcatcagagagttcacataggggaggtaccttatagctgtaatgcatgtggtaagagcttcagccagatctctagtcttcacaatcatcaaagagtccacacagaagagaaattctataaaattgagtgtgataaagacctcagtagaaattcattacttcacattcaccagagacttcacataggagagaagccttttaaatgtaatcagtgtggtaagagttttaatcggagttcagtacttcatgttcatcagagagtccacacaggagaaaaaccatataagtgtgatgagtgtggtaagggtttcagccagagctcaaatcttcgaattcatcagttagtacacacaggagagaagtcttataaatgtgaagactgtggtaaaggctttacccagcgctcaaatcttcaaattcatcagagagtgcatacaggagagaaaccttataaatgtgatgactgtggaaaggactttagtcacagctcagatcttcgcattcatcagagagtccatacaggggagaaaccctatacttgtcctgaatgtgggaagggcttcagtaagagttcaaagcttcacactcatcaaagagtacatactggagagaaaccctacaaatgtgaagagtgtggcaagggattcagtcagcgttcacatcttctcattcatcagagagtccatacaggagaaaagccctataaatgtcatgattgtggaaagggttttagtcacagttctaatcttcacattcatcagagggtccatacaggagagaagccttatcaatgtgctaagtgtggtaaaggtttcagtcatagctcagctcttcgaattcatcaaagagtccatgcaggagagaaaccttacaaatgccgtgaatattataagggatttgatcataattcacatcttcacaataatcatagaagaggaaacttataaatattgttcatttagttaacagctttaatcaaagtttacctaacctttaaaccctataaatcctgctgttaaggaaatcttataaataacacaagtaatcccaagcaacatttatagtttcccctatctcccactaagaattatttgcttcaaaaggagatctttagaaaaaaccctatatatttaaaattatagtgtatttttctttacctactataaatataatacagtcataaatatattaaacatttaaggagaaaactcttcattctatttcattctagtctttttttctgtgcattttaatgtgcatgaaattgtgtgttcaattttgtattttcactgtcttcaaaatatttacttaaattttggtttgaattgaaactggttggccaactgttaaacgacatctcttaactcccctaaaaactccctaggaagtaacagaaaagatggaaacacatagaacttaaaactcagttttggccggtagaattca

SEQ ID NO: 312985 - protein, 304 aa, Artificial Sequence
  derived and/or modified sequence
MQPLSKLMAISKPRNLSLREQREVLRADMSWQQETNPVVETHDSEASRQKFRHFQYLKVSGPHEALSQLWELCLQWLRPEIHTKKQIIELLVLEQFLAILPEEVRTWVNLQHPNNSKDMVTLIEDVIEMLEDEDMPCKDSALQMGSIKEKMKAGSRTGKPQEPVTFKDVVVEFSKEEWGQLDSAVKNLYRNVMLENFRNLNSLRKAHLLSKPFESLKLESKKKRWIMEKEIPRKTIFDMKSISGEESSHGVIMTRLTESGHPSSDAWKDGVSLLLPRLEYNDAVSAHCNLHLWVQVILLPQPPE

SEQ ID NO: 312986 - DNA, 915 bp, Artificial Sequence
  derived and/or modified sequence
atgcagcccctgagcaagctgatggccatcagcaagcccagaaacctgagcctgagagagcagagagaggtgctgagagccgacatgagctggcagcaggagaccaaccccgtggtggagacccacgacagcgaggccagcagacagaagttcagacacttccagtacctgaaggtgagcggcccccacgaggccctgagccagctgtgggagctgtgcctgcagtggctgagacccgagatccacaccaagaagcagatcatcgagctgctggtgctggagcagttcctggccatcctgcccgaggaggtgagaacctgggtgaacctgcagcaccccaacaacagcaaggacatggtgaccctgatcgaggacgtgatcgagatgctggaggacgaggacatgccctgcaaggacagcgccctgcagatgggcagcatcaaggagaagatgaaggccggcagcagaaccggcaagccccaggagcccgtgaccttcaaggacgtggtggtggagttcagcaaggaggagtggggccagctggacagcgccgtgaagaacctgtacagaaacgtgatgctggagaacttcagaaacctgaacagcctgagaaaggcccacctgctgagcaagcccttcgagagcctgaagctggagagcaagaagaagagatggatcatggagaaggagatccccagaaagaccatcttcgacatgaagagcatcagcggcgaggagagcagccacggcgtgatcatgaccagactgaccgagagcggccaccccagcagcgacgcctggaaggacggcgtgagcctgctgctgcccagactggagtacaacgacgccgtgagcgcccactgcaacctgcacctgtgggtgcaggtgatcctgctgccccagccccccgagtag

SEQ ID NO: 312987 - DNA, 915 bp, Artificial Sequence
  derived and/or modified sequence
atgcagccactctcgaaactcatggccatttctaaacccaggaatctcagtctccgggagcagcgagaggtgctgcgggccgatatgtcatggcagcaggaaactaatccagtggtggaaacacatgactccgaggcctcccggcagaaatttcgccacttccagtacctcaaggtctctggtcctcatgaggccctctctcagctctgggagttatgtttgcagtggctacgtcctgaaattcataccaaaaaacaaattatagaactgctggtgctcgagcagtttctggcaattcttcctgaagaagtacggacctgggtcaatcttcaacatcctaacaattctaaagatatggtgacgctcatagaagatgtcattgagatgctggaggatgaggacatgccttgtaaggactcagcgctgcaaatggggtcaatcaaggagaagatgaaggctggcagtcggaccggtaaacctcaagagcccgtgacctttaaggacgtcgtagtcgagttcagcaaagaagaatgggggcaactggactcagcagttaaaaacctgtatcgaaatgttatgttagaaaatttccggaatcttaacagcctgaggaaagcccacttattaagcaagcccttcgagagcctcaaactggaaagcaaaaaaaaacgctggatcatggagaaggagattccaaggaagacaattttcgacatgaagtccatctccggggaggaaagtagccacggggtgattatgaccagactcactgaatctgggcatccaagttccgacgcctggaaagacggggtttctctcctgctgcctcgcctggagtataacgatgctgtctccgcacattgcaatctgcatctgtgggtgcaggtcattctactgccgcaaccaccggaatag

SEQ ID NO: 312988 - DNA, 915 bp, Artificial Sequence
  derived and/or modified sequence
atgcagcccctgagcaagctgatggccatcagcaagcccaggaacctgagcctgcgggagcagcgggaggtgctgcgggctgacatgtcctggcagcaggagaccaaccctgtggtggagacccatgacagcgaggccagccggcagaagttccgccacttccagtacctgaaggtgtctggcccccatgaggccctgagccagctgtgggagctgtgcctgcagtggctgcggcctgagatccacaccaagaagcagatcatcgagctgctggtgctggagcagttcctggccatcctgcctgaggaggtgaggacctgggtgaacctgcagcaccccaacaacagcaaggacatggtgaccctgattgaagatgtgattgagatgctggaggatgaggacatgccctgcaaggacagcgccctgcagatgggcagcatcaaggagaagatgaaggccggcagcaggacaggcaagccccaggagcctgtgaccttcaaggatgtggtggtggagttcagcaaggaggagtggggccagctggacagcgctgtgaagaacctgtacagaaatgtgatgctggagaacttcaggaacctgaacagcctgaggaaggcccacctgctgagcaagccctttgagagcctgaagctggagagcaagaagaagcgctggatcatggagaaggagatccccaggaagaccatctttgacatgaagagcatctctggagaggagagcagccatggagtcatcatgacccggctgacagaaagtggccaccccagcagtgatgcctggaaggatggagtgtccctgctgctgccccggctggagtacaatgatgctgtgtctgcccactgcaacctgcacctgtgggtgcaggtgatcctgctgccccagcccccagagtag

SEQ ID NO: 312989 - DNA, 915 bp, Artificial Sequence
  derived and/or modified sequence
atgcagcccctgagcaagctgatggccatcagcaagccccggaacctgtctctgcgggagcagcgggaagtgcttagggccgacatgagctggcagcaggagacgaaccctgtggtggaaacacatgattctgaggccagtcgccagaaatttaggcattttcaatatttaaaggtcagtggtcctcacgaagctctgtcccagctgtgggagctgtgcttgcagtggctaagaccagagatacataccaagaagcaaatcatagaactgctggtactggagcaattcctagctatcctgcccgaagaagtgaggacctgggtcaatctccagcatcctaacaattccaaagacatggtaacgctgatagaggatgtaattgaaatgctggaggacgaggacatgccatgcaaagactcggcactccagatgggctctatcaaagaaaagatgaaagctggctcgcggacaggaaaaccacaagagcccgtaacttttaaggacgtggtcgtggagttctcaaaagaagagtggggccagctagattctgcagtgaaaaacctgtacaggaatgtgatgctagaaaatttccggaacctcaattctttacgcaaggctcacctattgagcaagccattcgagtccctgaagttggagagcaaaaagaaacggtggatcatggagaaggagatacctcgtaaaacaatcttcgatatgaagtccatctccggcgaggagtcatcacacggagtcatcatgaccaggctgactgaatctgggcatccgagctccgacgcctggaaagacggggtgagtctgctgttacctagactggaatataatgatgctgtgagtgcccattgcaacctccatctatgggtccaagtgatcttactgccccaacctcccgaatag

SEQ ID NO: 312990 - DNA, 915 bp, Artificial Sequence
  derived and/or modified sequence
atgcagcctctttccaagcttatggcaattagtaagccgcgaaatctctcacttcgagaacagagagaagtgttacgagccgacatgagctggcagcaggagaccaatcccgtcgtcgagacacacgatagcgaggcatccagacagaaattccgccattttcagtacttaaaggtgagcggtccccacgaggcactttcgcaactgtgggagctatgcctgcagtggctgcgaccagaaatacacacgaagaaacagattattgagctgttagtcctagagcagttcctcgctatcttgccggaagaggttaggacttgggtcaacttacagcatcctaataatagtaaggatatggtcaccctcatcgaagacgtaatagaaatgctggaggatgaagatatgccatgcaaagactccgcgttacagatgggaagtattaaagaaaagatgaaggccggttctagaacggggaagccacaggagcccgtaacattcaaagacgtggttgtggaattctccaaggaagagtggggtcagctggattctgccgttaagaatctataccgaaatgtcatgcttgagaatttcaggaaccttaattcattacgtaaggcacacctgctgagcaaaccttttgaatccctgaaactcgagtcaaaaaaaaaaaggtggatcatggagaaggagatcccacgcaagactatatttgacatgaaatctatcagcggtgaggaatcttcacacggagtcatcatgacaagattaacagagtctggacacccgagttccgacgcatggaaagacggagtttcacttctccttccaaggcttgagtacaatgatgccgtgtctgcccattgcaacctgcatttgtgggtacaggtcattctgttgccacagccaccagaatag

SEQ ID NO: 312991 - DNA, 1396 bp, Artificial Sequence
  derived and/or modified sequence
tagtacacaggtgcttagctcaagcctgagaattactgcaatctagtaaggcggatttgaactactgtgggagttctatttaggaagatgcagcctctgagcaagttgatggctatctcaaaacctcgaaacctgtctctacgtgaacaaagagaggttctgagagcagatatgtcttggcagcaggaaaccaaccccgtcgtggagacacatgactctgaggcatctcgtcaaaagttcagacatttccagtatttgaaagtgtctgggccccatgaagccctgagccaactctgggagctctgtcttcaatggctgagaccagagattcatacaaagaagcagattatagaactgttggtgctggaacaattcctggcaatcctgcctgaagaagtcaggacttgggtgaatttacaacatccaaacaacagtaaagatatggtgaccctcatagaagatgtgattgaaatgcttgaagatgaagatatgccctgcaaggactctgccctgcagatggggagcatcaaggagaaaatgaaagctggctcacgaacaggcaaaccacaggaaccagtgacattcaaagatgtggttgtggaattcagcaaggaagagtgggggcaactggactctgctgtaaagaacctgtacaggaatgtgatgctggaaaactttaggaacctgaattcattgcgtaaagcacatctactttccaaaccatttgagagccttaagttggagagtaagaaaaaaagatggataatggagaaagaaataccaaggaagactatttttgacatgaagagtatttctggagaagaatcatcccatggagtgattatgacaaggcttaccgaaagtggacacccttcttcagatgcctggaaagatggagtttccctcttgttgcccaggctggagtataatgatgcagtctcggctcactgcaacctccacctctgggttcaagtgattctcctgcctcagcctcctgagtagctgggattagaggcacccaccaccatgcctagctaattttttgtgtttctagtagaaatggggtttcaccatgttggccaggctggtcttgaactcctgacctcaagtgatccgcccacctcagcctcctaaagtgctgggatgacaggcgtgagccaccacgcccagctgtcccttaacatttgaaatgtgtatatcacctcatttagctattctgtttctagaaacttatttttacaaagaaaattcacaaatgcacacgaaaatgtatgcatgaagatacttgtcacagcgttggttgtaataatatggaattaggtcaaatatttatcagtaaaagactaagtcatattgtgcatatactgaaatatgtgataaacctaaatttactgac

SEQ ID NO: 312992 - protein, 323 aa, Artificial Sequence
  derived and/or modified sequence
MADKQISLPAKLINGGIAGLIGVTCVFPIDLAKTRLQNQQNGQRVYTSMSDCLIKTVRSEGYFGMYRGAAVNLTLVTPEKAIKLAANDFFRHQLSKDGQKLTLLKEMLAGCGAGTCQVIVTTPMEMLKIQLQDAGRIAAQRKILAAQGQLSAQGGAQPSVEAPAAPRPTATQLTRDLLRSRGIAGLYKGLGATLLRDVPFSVVYFPLFANLNQLGRPASEEKSPFYVSFLAGCVAGSAAAVAVNPCDVVKTRLQSLQRGVNEDTYSGILDCARKILRHEGPSAFLKGAYCRALVIAPLFGIAQVVYFLGIAESLLGLLQDPQA

SEQ ID NO: 312993 - protein, 110 aa, Artificial Sequence
  derived and/or modified sequence
MADKQISLPAKLINGGIAGLIGVTCVFPIDLAKTRLQNQQNGQRVYTSMSDCLIKTVRSEGYFGMYRGAAVNLTLVTPEKAIKLAANDFFRHQLSKDGQKLTLLKEMLAG

SEQ ID NO: 312994 - protein, 127 aa, Artificial Sequence
  derived and/or modified sequence
MADKQISLPAKLINGGIAGLIGVTCVFPIDLAKTRLQNQQNGQRVYTSMSDCLIKTVRSEGYFGMYRGAAVNLTLVTPEKAIKLAANDFFRHQLSKDGQKLTLLKEMLAGCGAGTCQVIVTTPMEML

SEQ ID NO: 312995 - protein, 119 aa, Artificial Sequence
  derived and/or modified sequence
MADKQISLPAKLINGGIAGLIGVTCVFPIDLAKTRLQNQQNGQRVYTSMSDCLIKTVRSEGYFGMYRGAAVNLTLVTPEKAIKLAANDFFRHQLSKDGQKLTLLKEMLAGCGAGTCQVI

SEQ ID NO: 312996 - protein, 123 aa, Artificial Sequence
  derived and/or modified sequence
MADKQISLPAKLINGGIAGLIGVTCVFPIDLAKTRLQNQQNGQRVYTSMSDCLIKTVRSEGYFGMYRGAAVNLTLVTPEKAIKLAANDFFRHQLSKDGQKLTLLKEMLAGCGAGTCQVIVTTP

SEQ ID NO: 312997 - protein, 113 aa, Artificial Sequence
  derived and/or modified sequence
MADKQISLPAKLINGGIAGLIGVTCVFPIDLAKTRLQNQQNGQRVYTSMSDCLIKTVRSEGYFGMYRGAAVNLTLVTPEKAIKLAANDFFRHQLSKDGQKLTLLKEMLAGCGA

SEQ ID NO: 312998 - protein, 78 aa, Artificial Sequence
  derived and/or modified sequence
MADKQISLPAKLINGGIAGLIGVTCVFPIDLAKTRLQNQQNGQRVYTSMSDCLIKTVRSEGYFGMYRGAAVNLTLVTP

SEQ ID NO: 312999 - protein, 59 aa, Artificial Sequence
  derived and/or modified sequence
MADKQISLPAKLINGGIAGLIGVTCVFPIDLAKTRLQNQQNGQRVYTSMSDCLIKTVRS

SEQ ID NO: 313000 - protein, 114 aa, Artificial Sequence
  derived and/or modified sequence
MADKQISLPAKLINGGIAGLIGVTCVFPIDLAKTRLQNQQNGQRVYTSMSDCLIKTVRSEGYFGMYRGAAVNLTLVTPEKAIKLAANDFFRHQLSKDGQKLTLLKEMLAGCGAG

SEQ ID NO: 313001 - protein, 106 aa, Artificial Sequence
  derived and/or modified sequence
MADKQISLPAKLINGGIAGLIGVTCVFPIDLAKTRLQNQQNGQRVYTSMSDCLIKTVRSEGYFGMYRGAAVNLTLVTPEKAIKLAANDFFRHQLSKDGQKLTLLKE

SEQ ID NO: 313002 - protein, 135 aa, Artificial Sequence
  derived and/or modified sequence
MADKQISLPAKLINGGIAGLIGVTCVFPIDLAKTRLQNQQNGQRVYTSMSDCLIKTVRSEGYFGMYRGAAVNLTLVTPEKAIKLAANDFFRHQLSKDGQKLTLLKEMLAGCGAGTCQVIVTTPMEMLKIQLQDAG

SEQ ID NO: 313003 - DNA, 972 bp, Artificial Sequence
  derived and/or modified sequence
atggctgataaacaaatttccctgcctgcaaagctcataaatgggggtatcgctgggctcataggcgttacttgtgtcttcccaatcgacctcgccaaaacacgtctacagaaccaacagaatggccagagggtttacacttccatgagcgattgcctcataaaaacggtgcggagcgagggttactttggcatgtatagaggtgccgctgttaaccttacactggtcactcccgaaaaagccatcaaactggcggcgaatgacttcttccgtcatcaactgagcaaggacggccagaaacttaccctgttaaaggagatgctggcaggttgcggtgcaggaacatgtcaggtgatcgtcactaccccgatggagatgttaaagattcagctccaggatgcggggagaatcgctgctcagagaaagattctggcagctcaggggcagctgtcggcccagggcggcgctcagcctagtgtggaggctccagcagctcctagacccaccgcaacccagttaacgagggacttgctcagatccagggggattgcaggcttgtacaaagggttgggcgccacgctgctaagggacgtgccatttagtgtcgtgtacttccctctttttgctaatctcaaccagctagggaggcctgcgagcgaagagaaaagccctttttacgtgtctttcctcgccgggtgcgttgctggcagcgccgctgccgtggcagtgaacccctgtgatgttgttaagacccgcctgcagagcctgcagagaggcgttaacgaggatacatactccggcatcttggactgtgcacgcaagattctcaggcacgagggaccatcagctttcttgaagggtgcttattgtcgagcccttgtaatcgcccctctttttggcattgcccaagtcgtgtattttctgggaatagcagagtcactgctaggtttgcttcaagatcctcaggcatag

SEQ ID NO: 313004 - DNA, 333 bp, Artificial Sequence
  derived and/or modified sequence
atggccgacaagcagatatccctgcctgccaagctgattaatggcgggatcgcaggcctcataggagtgacatgcgtgttccccattgacctcgcgaaaacccgattacagaaccaacagaatggtcagcgcgtgtatacttcgatgagtgactgtttgattaaaacagtgaggtccgaggggtactttggaatgtaccgcggggctgccgtgaacttgactctcgttactcctgaaaaagcaatcaagctcgccgccaatgacttcttccgacatcagctgtctaaggatggacagaagctgacattgctgaaagaaatgctggccggctag

SEQ ID NO: 313005 - DNA, 384 bp, Artificial Sequence
  derived and/or modified sequence
atggcagataaacaaatctctctcccagctaaactcataaacgggggtatcgcaggccttataggcgtgacatgtgtgttccccatagacctggcaaagacacgcttacagaaccagcagaatggccaacgggtgtatacgagcatgtccgactgtcttataaagacggtcagatccgaagggtacttcggcatgtaccggggtgcagccgtgaacctcaccttagtcacacccgagaaagcgatcaagttggctgctaacgatttcttcaggcaccaactgtcgaaggatggacaaaagttaaccctactcaaggagatgctggccggctgcggagctggtacctgtcaggtaatcgtgacgactccaatggaaatgctctag

SEQ ID NO: 313006 - DNA, 360 bp, Artificial Sequence
  derived and/or modified sequence
atggctgataaacagatttctctgcccgctaagctgattaatggaggcatcgcaggcttaattggggtgacttgcgtgttccccatcgatttagcaaaaacccggctacagaaccaacagaatggtcagagggtctatactagtatgagcgattgcttaattaaaacagtacggagcgaaggatacttcgggatgtacagaggggccgccgtgaatctcaccctggtgacaccagaaaaggctatcaaactggccgccaacgacttctttcgccatcagctgagtaaggatgggcagaaacttacccttttaaaggagatgctcgcaggatgtggcgccgggacttgtcaggtgatatag

SEQ ID NO: 313007 - DNA, 372 bp, Artificial Sequence
  derived and/or modified sequence
atggccgacaaacagataagcctgccggccaaattgattaatggcggcattgctggcctgatcggtgtgacttgcgtgttcccaattgatctcgcaaagacacgcctacaaaatcagcagaatggacagcgagtttacaccagtatgtccgattgtctcatcaaaacggtgcgctccgagggatacttcggcatgtatagaggtgccgccgtgaacctcactctcgtgacaccagagaaggctattaaacttgcagccaacgatttctttaggcatcagctgtcgaaggacggccagaaactcaccctgttgaaggagatgcttgcaggttgtggggcaggcacatgccaggttattgtcaccaccccttag

SEQ ID NO: 313008 - DNA, 342 bp, Artificial Sequence
  derived and/or modified sequence
atggccgacaagcagatatcactgccagcaaagctgatcaatggcggaatcgcagggctgatcggagtaacttgcgtttttcctatcgacctggcaaagacacgtctgcagaatcagcagaatggccagagagtctatacgtcaatgtccgactgtctcatcaagacagtaagatcggagggctacttcgggatgtataggggtgcagcagtgaatctgactctcgtaacaccagagaaagccatcaagcttgccgccaacgacttttttagacatcagctgagtaaggacggacagaagctcaccctgctgaaggaaatgcttgcaggttgtggggcctag

SEQ ID NO: 313009 - DNA, 237 bp, Artificial Sequence
  derived and/or modified sequence
atggccgacaaacagattagcctccccgccaaactaattaacggcggtatcgctgggctaataggcgtcacctgtgttttccctatagatctggccaagaccagacttcagaatcagcaaaacggtcaacgtgtgtatacgtcgatgagcgactgtctaataaagacagtaagaagcgaggggtacttcggcatgtatcggggcgcagcagtgaatctgaccctggtcactccatag

SEQ ID NO: 313010 - DNA, 180 bp, Artificial Sequence
  derived and/or modified sequence
atggccgataaacagatctccctgccagcaaaattgattaacggcggcatcgccggcttaattggggtgacgtgtgttttcccaattgacctggcaaaaactcgattgcagaatcagcagaacggacagcgggtgtatacttctatgtccgattgcttgattaaaaccgtgagaagctag

SEQ ID NO: 313011 - DNA, 972 bp, Artificial Sequence
  derived and/or modified sequence
atggccgataaacaaatctcactaccagcgaaactgataaacggagggattgctgggctaatcggtgtcacgtgtgttttccctatcgacttggcgaagaccaggcttcagaaccagcagaatggtcagcgagtttacacctctatgtcagattgcctgataaaaaccgtccgctccgaggggtattttggtatgtatcggggagctgccgtcaacctgacgctcgtgactccggagaaggcgattaagctcgctgcaaatgattttttcagacaccagctcagtaaggatgggcagaaactgactctactaaaggagatgcttgctgggtgtggggctggcacctgccaggtcatcgtgaccactccaatggagatgctgaagatccagctgcaggacgcaggtagaattgccgctcagcgaaagatactcgcagctcagggtcaactgtcggcccagggtggagctcagccgagcgtggaggcacctgcagcaccgcgcccaacggctacacaactgacccgagacctgcttaggtcccggggaattgcgggcctctataagggtctgggcgcaaccctgctgcgggacgtcccattcagcgtggtatactttcctctctttgccaacctgaatcaacttggcagacccgcgagcgaagagaaatctcccttttacgtaagttttcttgcaggctgcgtcgcaggaagtgcagccgccgtggccgtgaatccatgcgatgtggtcaagactagacttcagtcgttacagcggggcgtgaacgaggatacttactccggcattctggactgtgcccggaaaattctgagacacgagggccccagcgctttcctgaaaggcgcatactgccgagctctggtaattgcacccctctttggaatcgcgcaggtggtgtactttctcggaatcgccgaatctctcttaggcctgttgcaagatccacaagcgtag

SEQ ID NO: 313012 - DNA, 345 bp, Artificial Sequence
  derived and/or modified sequence
atggccgataaacaaattagtcttcctgccaagctgataaacggggggatcgcaggcctgattggggtcacgtgcgttttccctattgacttagcaaaaactcgactgcagaatcaacagaacggacagcgtgtctatacgtctatgtcagattgtctaatcaagacagtgaggagcgaaggatacttcggcatgtacaggggggcagctgtgaacttgactctggtgacacctgaaaaggctatcaagctggccgccaatgacttttttaggcatcaactgtcgaaggacggccaaaaattaacgctgctaaaggagatgctcgcgggctgcggggctggatag

SEQ ID NO: 313013 - DNA, 237 bp, Artificial Sequence
  derived and/or modified sequence
atggccgataagcagatttcattgcctgccaaactgattaacggggggattgctggactgataggagtcacatgtgtgtttcctattgatctcgccaaaacacgcctccagaaccagcagaacggacagcgggtgtacactagcatgtcggactgtttgataaaaacggtcaggagcgaaggatactttggtatgtataggggggccgctgtgaatctgaccctcgtgacaccttag

SEQ ID NO: 313014 - DNA, 321 bp, Artificial Sequence
  derived and/or modified sequence
atggccgacaaacagatttccttaccagctaaactgattaacggtgggatcgccggactgatcggcgtgacttgtgtgtttccgattgacctcgcgaagacgagattacagaatcagcagaatgggcaacgcgtctacacctcaatgagcgactgcctcattaagaccgtcagaagtgaggggtacttcggaatgtatcgaggagccgctgtcaacctgaccctcgtcacccctgaaaaggccatcaaattggcggctaacgactttttccgacaccagctatctaaggatggccagaaactcactctgcttaaggaatag

SEQ ID NO: 313015 - DNA, 408 bp, Artificial Sequence
  derived and/or modified sequence
atggcagataaacagatctcccttcctgccaagctgataaacggaggcattgcagggctgatcggggtcacatgcgtattccccatcgacctggcaaaaacaaggctgcaaaaccagcagaacgggcagcgggtatacacctctatgtcagattgcctgattaagacagtgcgcagtgagggctacttcgggatgtatagaggtgcggctgtgaatttgactcttgtcacccccgaaaaagctatcaagttagccgccaacgactttttcagacatcagctgagcaaagatggtcagaaacttacgttactcaaagagatgctggctggatgcggggccggaacatgccaagtcattgtgacgactccaatggagatgctgaaaattcagttgcaggacgcggggtag

SEQ ID NO: 313016 - DNA, 972 bp, Artificial Sequence
  derived and/or modified sequence
atggctgacaagcagatcagcctgcctgccaagctgatcaatggaggcattgctggcctgattggagtgacctgtgtgttccccatcgacctggccaagacccggctgcagaaccagcagaatggccagagggtgtacacctccatgtctgactgcctgatcaagacagtgcgctctgagggctacttcggcatgtacagaggagctgctgtgaacctgaccctggtgaccccagagaaggccatcaagctggccgccaatgacttcttccgccaccagctgagcaaggatggccagaagctgaccctgctgaaggagatgctggccggctgtggggccggcacctgccaggtgattgtgaccacccccatggagatgctgaagatccagctgcaggatgctggaagaattgctgcccagaggaagatcctggccgcccagggccagctgagcgcccagggcggggcccagcccagcgtggaggccccagctgccccccggcccacagccacccagctgacccgggacctgctgcggagccggggcattgctggcctgtacaagggcctgggcgccaccctgctgagagatgtgcccttctctgtggtgtacttccccctgtttgccaacctgaaccagctgggccgcccagccagcgaggagaagagccccttctacgtgtccttcctggccggctgtgtggccggcagcgctgctgctgtggccgtgaacccctgtgatgtggtgaagacccggctgcagagcctgcagaggggcgtgaatgaagacacctacagcggcatcctggactgtgccaggaagatcctgcggcatgagggccccagcgccttcctgaagggggcctactgccgggccctggtgattgcccccctgtttggaattgcccaggtggtgtacttcctgggcattgctgagagcctgctgggcctgctgcaggacccccaggcctag

SEQ ID NO: 313017 - DNA, 333 bp, Artificial Sequence
  derived and/or modified sequence
atggctgacaagcagatcagcctgcctgccaagctgatcaatggaggcattgctggcctgattggagtgacctgtgtgttccccatcgacctggccaagacccggctgcagaaccagcagaatggccagagggtgtacacctccatgtctgactgcctgatcaagacagtgcgctctgagggctacttcggcatgtacagaggagctgctgtgaacctgaccctggtgaccccagagaaggccatcaagctggccgccaatgacttcttccgccaccagctgagcaaggatggccagaagctgaccctgctgaaggagatgctggccggctag

SEQ ID NO: 313018 - DNA, 384 bp, Artificial Sequence
  derived and/or modified sequence
atggctgacaagcagatcagcctgcctgccaagctgatcaatggaggcattgctggcctgattggagtgacctgtgtgttccccatcgacctggccaagacccggctgcagaaccagcagaatggccagagggtgtacacctccatgtctgactgcctgatcaagacagtgcgctctgagggctacttcggcatgtacagaggagctgctgtgaacctgaccctggtgaccccagagaaggccatcaagctggccgccaatgacttcttccgccaccagctgagcaaggatggccagaagctgaccctgctgaaggagatgctggccggctgtggggccggcacctgccaggtgattgtgaccacccccatggagatgctgtag

SEQ ID NO: 313019 - DNA, 360 bp, Artificial Sequence
  derived and/or modified sequence
atggctgacaagcagatcagcctgcctgccaagctgatcaatggaggcattgctggcctgattggagtgacctgtgtgttccccatcgacctggccaagacccggctgcagaaccagcagaatggccagagggtgtacacctccatgtctgactgcctgatcaagacagtgcgctctgagggctacttcggcatgtacagaggagctgctgtgaacctgaccctggtgaccccagagaaggccatcaagctggccgccaatgacttcttccgccaccagctgagcaaggatggccagaagctgaccctgctgaaggagatgctggccggctgtggggccggcacctgccaggtgatctag

SEQ ID NO: 313020 - DNA, 372 bp, Artificial Sequence
  derived and/or modified sequence
atggctgacaagcagatcagcctgcctgccaagctgatcaatggaggcattgctggcctgattggagtgacctgtgtgttccccatcgacctggccaagacccggctgcagaaccagcagaatggccagagggtgtacacctccatgtctgactgcctgatcaagacagtgcgctctgagggctacttcggcatgtacagaggagctgctgtgaacctgaccctggtgaccccagagaaggccatcaagctggccgccaatgacttcttccgccaccagctgagcaaggatggccagaagctgaccctgctgaaggagatgctggccggctgtggggccggcacctgccaggtgattgtgaccaccccctag

SEQ ID NO: 313021 - DNA, 342 bp, Artificial Sequence
  derived and/or modified sequence
atggctgacaagcagatcagcctgcctgccaagctgatcaatggaggcattgctggcctgattggagtgacctgtgtgttccccatcgacctggccaagacccggctgcagaaccagcagaatggccagagggtgtacacctccatgtctgactgcctgatcaagacagtgcgctctgagggctacttcggcatgtacagaggagctgctgtgaacctgaccctggtgaccccagagaaggccatcaagctggccgccaatgacttcttccgccaccagctgagcaaggatggccagaagctgaccctgctgaaggagatgctggccggctgtggggcctag

SEQ ID NO: 313022 - DNA, 237 bp, Artificial Sequence
  derived and/or modified sequence
atggctgacaagcagatcagcctgcctgccaagctgatcaatggaggcattgctggcctgattggagtgacctgtgtgttccccatcgacctggccaagacccggctgcagaaccagcagaatggccagagggtgtacacctccatgtctgactgcctgatcaagacagtgcgctctgagggctacttcggcatgtacagaggagctgctgtgaacctgaccctggtgaccccctag

SEQ ID NO: 313023 - DNA, 180 bp, Artificial Sequence
  derived and/or modified sequence
atggctgacaagcagatcagcctgcctgccaagctgatcaatggaggcattgctggcctgattggagtgacctgtgtgttccccatcgacctggccaagacccggctgcagaaccagcagaatggccagagggtgtacacctccatgtctgactgcctgatcaagacagtgcgctcctag

SEQ ID NO: 313024 - DNA, 345 bp, Artificial Sequence
  derived and/or modified sequence
atggctgacaagcagatcagcctgcctgccaagctgatcaatggaggcattgctggcctgattggagtgacctgtgtgttccccatcgacctggccaagacccggctgcagaaccagcagaatggccagagggtgtacacctccatgtctgactgcctgatcaagacagtgcgctctgagggctacttcggcatgtacagaggagctgctgtgaacctgaccctggtgaccccagagaaggccatcaagctggccgccaatgacttcttccgccaccagctgagcaaggatggccagaagctgaccctgctgaaggagatgctggccggctgtggggccggctag

SEQ ID NO: 313025 - DNA, 321 bp, Artificial Sequence
  derived and/or modified sequence
atggctgacaagcagatcagcctgcctgccaagctgatcaatggaggcattgctggcctgattggagtgacctgtgtgttccccatcgacctggccaagacccggctgcagaaccagcagaatggccagagggtgtacacctccatgtctgactgcctgatcaagacagtgcgctctgagggctacttcggcatgtacagaggagctgctgtgaacctgaccctggtgaccccagagaaggccatcaagctggccgccaatgacttcttccgccaccagctgagcaaggatggccagaagctgaccctgctgaaggagtag

SEQ ID NO: 313026 - DNA, 408 bp, Artificial Sequence
  derived and/or modified sequence
atggctgacaagcagatcagcctgcctgccaagctgatcaatggaggcattgctggcctgattggagtgacctgtgtgttccccatcgacctggccaagacccggctgcagaaccagcagaatggccagagggtgtacacctccatgtctgactgcctgatcaagacagtgcgctctgagggctacttcggcatgtacagaggagctgctgtgaacctgaccctggtgaccccagagaaggccatcaagctggccgccaatgacttcttccgccaccagctgagcaaggatggccagaagctgaccctgctgaaggagatgctggccggctgtggggccggcacctgccaggtgattgtgaccacccccatggagatgctgaagatccagctgcaggatgctggatag

SEQ ID NO: 313027 - DNA, 972 bp, Artificial Sequence
  derived and/or modified sequence
atggccgacaagcagatcagcctgcccgccaagctgatcaacggcggcatcgccggactgataggtgtgacttgcgtttttcctattgatctggccaagacccgcctgcagaatcaacaaaatggtcaacgcgtctatacatcaatgagtgactgtctaatcaagaccgttcggagtgaaggctacttcggtatgtatcgtggagcagctgtgaacctaacccttgtaacccctgaaaaagccataaaactggctgctaacgacttcttccgacatcagttatctaaagatggccagaaacttacactcctgaaggaaatgctggctggctgcggggccggaacatgtcaggtaatcgtcactacacctatggagatgctgaagatacagcttcaggacgcgggcaggattgcagctcagcgaaagattttggcagcacaaggacagctctcagcgcagggcggcgcacagccaagcgttgaggctcccgcagctccacgcccaactgcaacacagctcacacgtgacttgctacgctcccgaggaatcgccggattgtacaaaggcctgggcgccacgcttctgagagatgtgcccttttctgtggtatactttccattgttcgcaaaccttaatcagcttgggaggcctgctagcgaggagaagagccctttctacgtctcattcttggcagggtgcgtcgcggggtccgctgccgccgtggccgttaacccatgcgacgtggtcaagacacgacttcagagcctgcaacggggcgtgaacgaggacacatacagcgggattctcgactgtgcccggaagattctgaggcacgagggaccatcagccttcctcaagggagcctattgcagagccctcgtgatagcacccctgtttggaatcgctcaggtggtctatttcctcggaattgctgagtctctgctggggctgctccaggacccacaggcatag

SEQ ID NO: 313028 - DNA, 333 bp, Artificial Sequence
  derived and/or modified sequence
atggccgacaagcagatcagcctgcccgccaagctgatcaacggcggtatcgctgggttgataggcgttacctgcgtattcccaattgacctggccaagacccgtctgcagaatcagcagaatggtcagagggtgtatacctccatgagcgactgtctcattaagactgtgcgctcagaggggtatttcggaatgtaccgaggagcagccgtgaatctgacacttgtgacccccgagaaggccattaagctggcagccaatgatttcttcagacaccagctgagtaaagacgggcaaaaactcactctgctcaaggagatgctcgctggctag

SEQ ID NO: 313029 - DNA, 384 bp, Artificial Sequence
  derived and/or modified sequence
atggccgacaagcagatcagcctgcccgccaagctgatcaacggcggcatcgccggcctgatcggcgtcacatgtgtcttcccaatcgacctagccaaaactcggctccagaaccagcagaacggacagcgcgtgtatacgtctatgtcagactgtttaatcaagacagttagatctgaaggctacttcggaatgtacaggggagccgctgtgaatctgactctggtcacgcccgaaaaggctatcaaattagctgcaaacgacttcttcagacatcagctatccaaggacggacagaaactcaccctcttaaaagagatgctggctggatgtggtgccggcacctgccaggtgattgtaaccactcctatggaaatgctatag

SEQ ID NO: 313030 - DNA, 360 bp, Artificial Sequence
  derived and/or modified sequence
atggccgacaagcagatcagcctgcccgccaagctgatcaacggcggaattgctggcttgataggtgtcacatgcgtatttccaattgacctggctaaaacccggctccagaaccagcagaacggacagcgtgtgtacacttccatgagtgactgcctgattaagacagtccgatcggaaggctatttcgggatgtaccggggtgccgccgttaacctgactctggtcacccctgagaaagctatcaaactagcagcgaatgattttttccgtcatcaattgtcaaaagacggacaaaaattaactctgcttaaggaaatgcttgctggatgtggcgctggaacctgtcaggtcatttag

SEQ ID NO: 313031 - DNA, 372 bp, Artificial Sequence
  derived and/or modified sequence
atggccgacaagcagatcagcctgcccgccaagctgatcaacggcgggattgccggcctgatcggagtgacatgcgtgttcccaattgacctggcaaagacacggttgcagaatcaacagaatggccagcgggtctacactagcatgagcgactgcctgatcaagaccgtgaggtctgagggctactttggaatgtaccgaggcgccgccgtaaatcttacactggtaacccctgagaaggccatcaaacttgctgcgaatgattttttccgccaccagttgtctaaagacggtcaaaagctgacactccttaaggaaatgttggccgggtgcggggccggaacctgtcaagtgattgttacaacaccctag

SEQ ID NO: 313032 - DNA, 342 bp, Artificial Sequence
  derived and/or modified sequence
atggccgacaagcagatcagcctgcccgccaagctgatcaacggcggaattgcgggcctgataggtgttacatgtgttttcccgatagacctggcaaaaactcgtttgcagaatcagcaaaacgggcagcgtgtgtatacttccatgtcagattgtctgatcaaaacagtgcggtccgaagggtattttgggatgtatcgaggtgcagcagtaaacttgaccttggtcactcctgagaaggccattaaactagcagcaaatgattttttcagacatcagttgagtaaggacggccaaaagctgacacttctgaaggagatgctcgcaggatgtggtgcttag

SEQ ID NO: 313033 - DNA, 237 bp, Artificial Sequence
  derived and/or modified sequence
atggccgacaagcagatcagcctgcccgccaagctgatcaacggcggcatcgctggcctgattggcgtaacctgtgtgtttccaatagaccttgccaaaacccggctccaaaaccagcagaatggccaaagagtgtatacctccatgagcgattgtctcattaagactgtgcgatcggaggggtattttggcatgtatagaggggccgcggtgaacttaacccttgtaactccttag

SEQ ID NO: 313034 - DNA, 180 bp, Artificial Sequence
  derived and/or modified sequence
atggccgacaagcagatcagcctgcccgccaagctgatcaacggcgggatcgccggactgattggtgtaacttgcgtgttcccaatcgatctcgcgaaaacaagactacagaatcagcagaacggtcagcgggtctatacctctatgagcgactgcttgatcaagaccgtcaggtcttag

SEQ ID NO: 313035 - DNA, 972 bp, Artificial Sequence
  derived and/or modified sequence
atggccgacaagcagatcagcctgcccgccaagctgatcaacggcggtatagcagggctcatcggtgtcacatgcgtgttcccgattgatctcgcaaaaactcggctccaaaatcagcaaaatggccagcgtgtttatacaagcatgtccgactgcctgattaagactgttaggagtgagggctacttcggtatgtataggggggccgccgtgaatctcaccctcgttacccccgagaaggccatcaagcttgcagcaaatgatttctttaggcaccagcttagcaaggacgggcagaaactcactctgctgaaagagatgctagccgggtgtggggcaggcacctgccaggtgatcgttacaacgccaatggagatgttgaagattcagctgcaggacgcgggccgcatagctgcccagcggaaaatacttgccgctcaaggccagctgtccgcgcaggggggagcacagccatcggtggaggccccagccgcacctaggccgacagctactcagctcacccgcgaccttttgcgcagccgcggtatcgccgggctgtataagggcttaggagcaaccctcctgagagacgtcccattctcggttgtgtacttcccattgtttgctaatcttaatcaactgggacgcccagcaagcgaggagaagagccccttttacgtgagttttttggccggatgtgttgccgggagtgcagctgctgttgcagtgaatccatgcgatgtagttaagacacgacttcagtcactccagaggggagttaatgaagacacctatagcggtatccttgactgcgctagaaaaattctcaggcatgagggcccatctgcctttttgaaaggcgcttattgtcgtgccctcgtaatagcgcctcttttcgggattgctcaggtggtgtacttcctagggatcgccgaatctctgctgggccttctgcaggacccccaagcctag

SEQ ID NO: 313036 - DNA, 345 bp, Artificial Sequence
  derived and/or modified sequence
atggccgacaagcagatcagcctgcccgccaagctgatcaacggcggcattgcaggtttgatcggagtgacctgtgtatttcctattgatctggctaagactagactgcaaaatcaacaaaacggtcagcgggtgtacacgtccatgtccgactgtctcatcaagaccgtacggagtgaagggtacttcggcatgtatcggggcgctgcagtcaatctaactctagtgacacctgaaaaggccattaaactagctgcgaatgatttcttccggcatcagctttccaaagacggacagaagctcaccttactcaaagaaatgttggccggatgcggagccggctag

SEQ ID NO: 313037 - DNA, 237 bp, Artificial Sequence
  derived and/or modified sequence
atggccgacaagcagatcagcctgcccgccaagctgatcaacggcggcatagctgggctcataggggtgacgtgtgtgtttcccatcgacctggccaaaacacgactgcagaaccagcagaatggacagagggtctacacctcaatgtctgattgccttattaaaacagtccgctcagaaggatactttggcatgtatcgaggcgccgctgttaatctgactttagtcaccccctag

SEQ ID NO: 313038 - DNA, 321 bp, Artificial Sequence
  derived and/or modified sequence
atggccgacaagcagatcagcctgcccgccaagctgatcaacggcgggatcgctggcctaataggtgtgacctgtgtgttccccatcgatctggccaaaactcgcctgcaaaaccaacagaacggccagagggtgtacaccagcatgagcgactgcttgattaaaacagtgaggtctgaggggtactttgggatgtacaggggggccgccgttaatctgacgctggttacaccggagaaagccattaagttggcggcgaacgatttctttaggcatcagctgtcaaaagatggacagaaactgaccttgcttaaggagtag

SEQ ID NO: 313039 - DNA, 408 bp, Artificial Sequence
  derived and/or modified sequence
atggccgacaagcagatcagcctgcccgccaagctgatcaacggcgggatagcggggctaataggcgttacttgtgtttttcccattgatctcgccaagacacggctccagaaccagcagaatgggcagcgcgtatacacatcaatgagcgactgccttataaagacggtgagatctgaaggatacttcgggatgtaccgcggcgcggctgtgaacctcaccctggtgaccccagaaaaggctattaaactggcagcaaatgactttttcagacaccaactaagtaaggatggccagaaactgaccttgctaaaggagatgttggctggctgcggggcaggcacatgtcaggtcatcgttactaccccaatggaaatgttgaagatacaactgcaggatgccggttag

SEQ ID NO: 313040 - DNA, 972 bp, Artificial Sequence
  derived and/or modified sequence
atggcggacaaacaaatttcactgcccgcaaagctcatcaacgggggaatcgccggacttatcggagttacctgtgtctttccgatagacctggccaagactcgtctgcagaaccaacaaaacggtcaacgagtgtatacgagtatgtctgattgtctgatcaagaccgtccgctctgagggctactttggaatgtatcgcggagcagctgtgaacctgaccctggtgacgcctgagaaggctatcaagctcgccgcaaacgacttcttccgacaccagctttccaaagatgggcaaaagctgaccttgcttaaagaaatgctagccggatgtggagcgggaacctgccaggttatcgtgactactccgatggagatgctgaagatccaactgcaggacgcaggaaggatcgccgctcaaagaaagatcctggcagcccagggccagcttagcgcccagggaggagctcagcccagtgtggaggcacctgcagctccaaggccaacggctactcagttgacccgggatcttctgcggtcacggggtattgccggtttgtacaaggggcttggtgccaccctcctcagagatgtgccattttcagtagtgtacttccccctgttcgccaatctaaaccagctcggaagacccgctagcgaggaaaagagtcctttctatgtgtcttttctagctggctgtgttgcaggaagcgctgcagctgtggcagtgaacccctgtgacgttgtgaaaaccaggctgcaaagcctgcagagaggcgtcaacgaggacacctatagcggaatactggactgtgctcgaaaaatcttgcgacatgaaggtcccagtgcattcttgaagggagcatattgtagggccttagtcatcgcaccgctgtttggaatcgcacaggtcgtctatttcctcgggatagccgagagcctgctcggacttcttcaggacccccaggcttag

SEQ ID NO: 313041 - DNA, 333 bp, Artificial Sequence
  derived and/or modified sequence
atggccgacaagcagatctcccttcctgctaagctgatcaacggagggattgccggattgataggtgtcacttgtgtttttccaatcgatctcgccaaaactaggctccagaatcagcagaacggccaaagagtgtacacaagtatgtcagattgcctgattaaaactgtccgatcagaggggtactttggtatgtatcgtggcgcagccgtgaacctgacactagttacccctgagaaggccattaaactagccgcaaatgattttttcagacaccagctgtcaaaggatgggcagaagcttactttgctgaaagagatgttggctggatag

SEQ ID NO: 313042 - DNA, 384 bp, Artificial Sequence
  derived and/or modified sequence
atggccgataaacagatctcccttcccgcaaaacttatcaatggtggaattgccggactgatcggcgtgacatgcgtttttcccattgatctggctaagaccagactgcaaaaccagcagaacggtcaaagagtgtacacaagcatgagcgactgcttgatcaagaccgtcagaagtgaagggtattttgggatgtataggggcgcagcagtcaaccttaccctggtgactccggaaaaggccatcaagctggccgctaacgattttttcaggcaccagttgagtaaggacggtcagaaattgactctgcttaaggagatgttggcgggatgtggagccggtacctgtcaggttatcgtgactacccctatggaaatgctgtag

SEQ ID NO: 313043 - DNA, 360 bp, Artificial Sequence
  derived and/or modified sequence
atggcagacaaacagatcagcctgcctgcaaagttgataaacggtggcattgcaggcctgataggggtgacttgtgtctttccaatcgacttggccaaaacaagattacagaatcagcaaaacggacaaagggtatatacaagcatgtcagattgtctaataaagacagtgcgctccgagggatactttggcatgtatcgcggagccgcagttaacctgacactcgttacaccagaaaaagccattaagctggcagccaatgattttttcaggcaccagctgtctaaggatggccagaagctaacgctgcttaaagagatgctcgctggctgcggagcagggacttgccaggtgatctag

SEQ ID NO: 313044 - DNA, 372 bp, Artificial Sequence
  derived and/or modified sequence
atggccgacaagcagatttctttgccagcgaaattgattaatggcggtatcgcaggtttgataggagtcacctgcgtgttcccaatagaccttgcaaagaccaggctgcagaaccagcagaacggacagcgtgtttatacttctatgtccgactgtttgatcaaaactgtgcggagcgagggatatttcggcatgtataggggggcagccgtaaatcttactttggtcactcctgagaaggcaatcaaactggctgctaacgacttctttaggcaccaactgagcaaggacggccaaaaacttaccttactgaaggaaatgctcgctggctgcggagccggaacctgtcaggtgattgtcaccactccctag

SEQ ID NO: 313045 - DNA, 342 bp, Artificial Sequence
  derived and/or modified sequence
atggcggacaagcaaatatccctgcctgctaagctgattaatgggggtatcgcgggtctgattggagtcacctgcgtgtttccaatagaccttgcaaagacacgcctacagaaccagcagaatggacagcgggtgtacaccagcatgtctgactgtttaattaaaaccgtgcgctccgaaggatactttgggatgtataggggagctgcagtgaatctaacgcttgtgacgccagagaaagcaataaagcttgcggctaatgatttcttccggcatcagttatctaaggacggacagaaactgaccctgctgaaggaaatgttggcagggtgcggcgcttag

SEQ ID NO: 313046 - DNA, 237 bp, Artificial Sequence
  derived and/or modified sequence
atggctgataagcagatcagcctgccagctaaactcatcaatgggggaatcgcagggctgatcggagtgacatgtgttttcccaatcgatctcgcaaaaaccaggcttcagaaccagcagaatggacaaagagtatacacgagtatgagtgattgtctgattaaaactgtgcgatccgaaggatattttgggatgtacaggggcgcagccgtaaatcttacccttgtgacaccttag

SEQ ID NO: 313047 - DNA, 180 bp, Artificial Sequence
  derived and/or modified sequence
atggccgacaagcagatttctctcccagcaaaactgattaacggaggcattgcaggcctgatcggggtgacctgcgtctttcccatcgatctggccaaaacacggctgcagaatcagcagaatggtcagcgcgtctataccagcatgagcgattgtctcattaaaacagtgcggagctag

SEQ ID NO: 313048 - DNA, 972 bp, Artificial Sequence
  derived and/or modified sequence
atggccgataaacagatcagcttaccggcaaagctgatcaatggaggcatagccggtctgatcggcgtgacctgtgtatttccaatagacctcgcgaagactcggctgcagaaccagcagaacggtcagagggtgtatacgtctatgtcagattgcttgatcaaaactgtcaggtccgaggggtacttcggcatgtaccgcggtgcagctgtgaacctgaccctagtgacacctgagaaggcaatcaaactcgccgcaaacgatttctttcgtcaccagttgagcaaggatggccaaaagctgacattactgaaagagatgctggcgggttgcggagccggaacttgccaggtgattgttacgacacctatggagatgcttaaaatccagcttcaggatgccggaaggatcgcagcacaacgaaaaatcctcgccgcacaaggccagctgagcgcccagggtggcgctcagccatccgtggaagctcccgcagctcctcgtcccacagccactcagttgacacgcgatctgctgaggagcagaggaatcgctggactgtataagggtctaggcgcaacgctcctgcgggacgtgcccttctcggtggtatactttcccctgttcgctaatctgaatcagctcggcagaccagcatccgaggagaaaagcccattttatgtgtccttcttagcaggatgtgtcgcagggtccgccgctgcagtggcggtcaacccgtgtgacgtggttaagacgcggctgcaaagcctccagcgcggagtgaatgaggacacttactctgggatcctagactgtgctcgtaaaatcttgcgtcatgaaggacccagcgcctttttgaaaggtgcttattgccgggctctcgtgatcgcacccttatttgggattgcccaggttgtgtacttcctgggcatcgcagagtcgcttctcggcctcctccaggatccacaggcatag

SEQ ID NO: 313049 - DNA, 345 bp, Artificial Sequence
  derived and/or modified sequence
atggccgacaagcagattagtctacctgcaaagctgattaacggtggcattgcaggcctcatcggcgtcacttgtgtctttcccattgacctggccaaaactaggctgcagaaccagcaaaatggtcaaagggtgtacacttccatgtccgattgtctcattaagacagtccggagtgaagggtacttcgggatgtatcgcggagccgctgtcaacctcaccctcgtgaccccagagaaggctattaagcttgctgccaacgatttctttagacatcagctgtccaaggacggacaaaagctgacactgttgaaagagatgctggctggttgcggagctgggtag

SEQ ID NO: 313050 - DNA, 237 bp, Artificial Sequence
  derived and/or modified sequence
atggctgacaaacagatcagcctgcccgcaaagctgataaatggcggtatcgccggtctaattggcgttacctgtgtattcccaatcgatctcgccaaaacccgtctgcagaatcaacagaacggacagcgggtttacacatcaatgtcggactgtctcatcaagaccgtgaggtctgagggatatttcggaatgtaccgcggagcagccgtcaacctcactctagtcactccttag

SEQ ID NO: 313051 - DNA, 321 bp, Artificial Sequence
  derived and/or modified sequence
atggctgacaaacaaatctctctccctgcaaagctgattaatggcggaatagctggcttaatcggcgtgacttgcgtctttcccatcgacttagcaaagacaaggcttcagaaccagcagaacggccagcgagtatatacctctatgagcgactgcctgatcaaaaccgtcaggagtgaaggatattttggcatgtatcgcggagctgccgttaatttaaccctagtgaccccagaaaaagccatcaaattggccgcaaatgattttttcaggcaccagctgtctaaggacgggcagaaacttaccttgcttaaggagtag

SEQ ID NO: 313052 - DNA, 408 bp, Artificial Sequence
  derived and/or modified sequence
atggccgacaaacagatctccctcccagccaagctgatcaatggaggtattgctgggcttatcggcgtgacgtgcgtgtttcctatagacctagctaagactcggttacagaatcagcagaacgggcagagggtctacacctccatgtcagactgcctgatcaaaactgtgaggagtgaggggtattttggaatgtacagaggcgcagctgtaaacctcacgcttgtgacgccggagaaggccattaagttggccgcaaacgatttctttcggcaccagttatctaaagatggacagaaactgactctgttgaaggagatgttggccggatgcggcgctgggacttgtcaggtcatcgtcaccactccaatggaaatgctaaagatccaactccaggatgccggatag

SEQ ID NO: 313053 - DNA, 2894 bp, Artificial Sequence
  derived and/or modified sequence
ggaagcctctgcttgcccaaagtgaaagagaaagtgcccccccacccaagcccgccccaccccgccccacggccaatccctgcggcccctcgcctcctcccccggcagcttccccttctgtgtgagtgctgggctggagtgtggaagagccatccagagtgagtgcctggggcagagtgagagcaggaccagcgggcaggtggcggagcgggggtcggtggtggatggcccagccctggaaagccgaggtgaaggttacgagtccctgaggatctgtgggtgtgagccagccgcgtggccctgggcaacggcgctgccggacagaagtggcggttgctgacgcctggaaattcccctgaaggtggagcaccacccaacccccctgggtcccaccctccctcaaggcctcctccacctccacctccaccccgcctggcctggcgtccacctctgcggctcctacctgggtgcaatcgagttaaatggctgataagcagatcagcctgccagccaagctcatcaatggcggcatcgccgggctgatcggtgtcacctgcgtgtttcccatcgacctggccaagaccaggctgcagaaccagcagaacggccagcgcgtgtacacgagcatgtccgactgcctcatcaagaccgtccgctccgagggctacttcggcatgtaccggggagctgctgtgaacttgaccctcgtcacccccgagaaggccatcaagctggcagccaacgacttcttccgacatcagctctctaaggacgggcagaagctgaccctgcttaaagagatgctggcgggctgtggggctggcacctgccaggtgatcgtgaccacgcccatggagatgctgaagatccagctgcaggatgcagggcgcattgccgcccagaggaagatcctggctgcccagggccagctctcggcccaggggggtgcccagccctcagtggaggctccagctgcccctcggcccacggccacccagctgacccgcgacctgctgcggagccgtggcattgccggtctctacaagggactcggggccacgctgctcagggatgtccccttctctgtggtgtacttcccgctctttgccaacctgaaccagctgggccgcccggcgtccgaggagaagtcgcctttctacgtgtccttcctggccggctgtgtggctgggagtgccgccgctgtggccgtcaacccctgtgatgtggtgaagacgcggctccagtcacttcagcgaggcgtcaacgaggacacctactctgggatcctggactgtgccaggaagatcctgcggcacgagggcccctcggccttcctgaagggcgcctactgccgcgcgctggtcatcgcgccccttttcggcatcgcacaggtggtctacttcctgggcatcgcggagtccctgctggggctgctgcaggacccccaggcctgagcccagcacccgctccaccccagccagctgggcagggccggtgtggggctggagccaggcagctagcccaggacggagcaagggaagacccctccccagccctcccgtcggcaggggcagcagggggcagggtgcagggtccacataggtggtgcacacgcaagccccccggggtgctgcctgcaccgttgggatcaatgtctcatttatgtagaaaatgcagaaatctttacattcctcaagctagcccctgccccaatcctgccctggcctgaacacccccagggacagagctggtctctgggctgggggcccccgggcctgggccgggcaggctggaccatacccccagtccaccagctccagtctccacagccatcctggcccacacaggcaccccacacaaacctatttattgaatctgctggacccaagcggctctccagcccttccgtccttccccagccgctcttgtcgccttggcaggacttgactctgcctccctggccagccttgcaagaggactggggtctcctgccctctctgttgagccaggaatcccaagtgaggggttgccctgaggtctgactcttggggcaagcccgccacccactgtgggactttctggtgggctcctcagctcccaccccaggctggggcccagattgtgaggtctgtgtgcatgtgtgtgtgtatgtgtgtgtgcatgcgtgtgtgtgttgtggggatctggcctggcccttggggatggggctgctggggactgccccccttcccgccgtggccaggcgctctgtgtgctgtgtgtgccccaggctctgttgaccccgtccaggaactaacttacccagcttggtctctcctgagtcctccaccctggcctgggattggccagggagcagggcgggcattgggaccagtgtggagcctgagggtgcctgccctgctctggagggagggccaggagctgccacacccccaagtcctctcagggcccaccctcctttttcagcctctgcataaggcccctgggtacactgcagaagccccatccttcccgcctccgggcataaggcccctgaccacacttcagaagccccatcccccctgccaccgggcgatccctgctgtgagccgaagctctccctgccccgccctggccatgtgatcgtgttggtgacagaccctgatgtgctggtgctgtgtccccaaaaccggggccctccacagaggccccttcccagcgacactacctggggctcaggcctggacccccccagttcacggttgctcctgggagctgcccctcccgtcacatcagaaccttggaagctgctgctgctgcttacagaattatatttttttcttttgaagagttttaagaagttgtaactttttgtgtcttgtcatgtcagagaataaataaatattctaagtaga

SEQ ID NO: 313054 - DNA, 591 bp, Artificial Sequence
  derived and/or modified sequence
gtgcacgtgagccccgagcgtgagcggcgtgtgaggctggctgggaagacgctggcggtggggagggggggactgaaaggaagccaggtggtcccaggggacagaagtggcggttgctgacgcctggaaattcccctgaaggtggagcaccacccaacccccctgggtcccaccctccctcaaggcctcctccacctccacctccaccccgcctggcctggcgtccacctctgcggctcctacctgggtgcaatcgagttaaatggctgataagcagatcagcctgccagccaagctcatcaatggcggcatcgccgggctgatcggtgtcacctgcgtgtttcccatcgacctggccaagaccaggctgcagaaccagcagaacggccagcgcgtgtacacgagcatgtccgactgcctcatcaagaccgtccgctccgagggctacttcggcatgtaccggggagctgctgtgaacttgaccctcgtcacccccgagaaggccatcaagctggcagccaacgacttcttccgacatcagctctctaaggacgggcagaagctgaccctgcttaaagagatgctggcggg

SEQ ID NO: 313055 - DNA, 620 bp, Artificial Sequence
  derived and/or modified sequence
gtgagcggcgtgtgaggctggctgggaagacgctggcggtggggagggggggactgaaaggaagccaggtggtcccagggaagtggcggttgctgacgcctggaaattcccctgaaggtggagcaccacccaacccccctgggtcccaccctccctcaaggcctcctccacctccacctccaccccgcctggcctggcgtccacctctgcggctcctacctgggtgcaatcgagttaaatggctgataagcagatcagcctgccagccaagctcatcaatggcggcatcgccgggctgatcggtgtcacctgcgtgtttcccatcgacctggccaagaccaggctgcagaaccagcagaacggccagcgcgtgtacacgagcatgtccgactgcctcatcaagaccgtccgctccgagggctacttcggcatgtaccggggagctgctgtgaacttgaccctcgtcacccccgagaaggccatcaagctggcagccaacgacttcttccgacatcagctctctaaggacgggcagaagctgaccctgcttaaagagatgctggcgggctgtggggctggcacctgccaggtgatcgtgaccacgcccatggagatgctga

SEQ ID NO: 313056 - DNA, 594 bp, Artificial Sequence
  derived and/or modified sequence
agcatgggactgggtggcaggtgcctcccgctgctgcaccctcaggacgcagtgacggcttcagtctggggtggacagaagtggcggttgctgacgcctggaaattcccctgaaggtggagcaccacccaacccccctgggtcccaccctccctcaaggcctcctccacctccacctccaccccgcctggcctggcgtccacctctgcggctcctacctgggtgcaatcgagttaaatggctgataagcagatcagcctgccagccaagctcatcaatggcggcatcgccgggctgatcggtgtcacctgcgtgtttcccatcgacctggccaagaccaggctgcagaaccagcagaacggccagcgcgtgtacacgagcatgtccgactgcctcatcaagaccgtccgctccgagggctacttcggcatgtaccggggagctgctgtgaacttgaccctcgtcacccccgagaaggccatcaagctggcagccaacgacttcttccgacatcagctctctaaggacgggcagaagctgaccctgcttaaagagatgctggcgggctgtggggctggcacctgccaggtgatcg

SEQ ID NO: 313057 - DNA, 579 bp, Artificial Sequence
  derived and/or modified sequence
ccccttctgtgtgagtgctgggctggagtgtggaagagccatccagagacagaagtggcggttgctgacgcctggaaattcccctgaaggtggagcaccacccaacccccctgggtcccaccctccctcaaggcctcctccacctccacctccaccccgcctggcctggcgtccacctctgcggctcctacctgggtgcaatcgagttaaatggctgataagcagatcagcctgccagccaagctcatcaatggcggcatcgccgggctgatcggtgtcacctgcgtgtttcccatcgacctggccaagaccaggctgcagaaccagcagaacggccagcgcgtgtacacgagcatgtccgactgcctcatcaagaccgtccgctccgagggctacttcggcatgtaccggggagctgctgtgaacttgaccctcgtcacccccgagaaggccatcaagctggcagccaacgacttcttccgacatcagctctctaaggacgggcagaagctgaccctgcttaaagagatgctggcgggctgtggggctggcacctgccaggtgatcgtgaccacgccc

SEQ ID NO: 313058 - DNA, 552 bp, Artificial Sequence
  derived and/or modified sequence
aaaagccggagctggctggggtgcacgtgagccccgagcgtgagcggcgtgacagaagtggcggttgctgacgcctggaaattcccctgaaggtggagcaccacccaacccccctgggtcccaccctccctcaaggcctcctccacctccacctccaccccgcctggcctggcgtccacctctgcggctcctacctgggtgcaatcgagttaaatggctgataagcagatcagcctgccagccaagctcatcaatggcggcatcgccgggctgatcggtgtcacctgcgtgtttcccatcgacctggccaagaccaggctgcagaaccagcagaacggccagcgcgtgtacacgagcatgtccgactgcctcatcaagaccgtccgctccgagggctacttcggcatgtaccggggagctgctgtgaacttgaccctcgtcacccccgagaaggccatcaagctggcagccaacgacttcttccgacatcagctctctaaggacgggcagaagctgaccctgcttaaagagatgctggcgggctgtggggct

SEQ ID NO: 313059 - DNA, 558 bp, Artificial Sequence
  derived and/or modified sequence
atgggaggagagctatacctgggatagctgagcccaggtcggggggtcttagggcgcccgggaccccagcccctagctcgaagggggcaggtgccggctgctgctctctctgtgctgaaggatgtgggggatggtcaccacagctgtccaggtcgaggtgctccgaagtggcggttgctgacgcctggaaattcccctgaaggtggagcaccacccaacccccctgggtcccaccctccctcaaggcctcctccacctccacctccaccccgcctggcctggcgtccacctctgcggctcctacctgggtgcaatcgagttaaatggctgataagcagatcagcctgccagccaagctcatcaatggcggcatcgccgggctgatcggtgtcacctgcgtgtttcccatcgacctggccaagaccaggctgcagaaccagcagaacggccagcgcgtgtacacgagcatgtccgactgcctcatcaagaccgtccgctccgagggctacttcggcatgtaccggggagctgctgtgaacttgaccctcgtcacccccg

SEQ ID NO: 313060 - DNA, 535 bp, Artificial Sequence
  derived and/or modified sequence
gtgagtgctgggctggagtgtggaagagccatccagagtgagtgcctggggcagagtgagagcaggaccagcgggcaggtggcggagcgggggtcggtggtggatggcccagccctggaaagccgaggtgaaggttacgagtccctgaggatctgtgggtgtgagccagccgcgtggccctgggcaacggcgctgccgaagtggcggttgctgacgcctggaaattcccctgaaggtggagcaccacccaacccccctgggtcccaccctccctcaaggcctcctccacctccacctccaccccgcctggcctggcgtccacctctgcggctcctacctgggtgcaatcgagttaaatggctgataagcagatcagcctgccagccaagctcatcaatggcggcatcgccgggctgatcggtgtcacctgcgtgtttcccatcgacctggccaagaccaggctgcagaaccagcagaacggccagcgcgtgtacacgagcatgtccgactgcctcatcaagaccgtccgctccga

SEQ ID NO: 313061 - DNA, 1790 bp, Artificial Sequence
  derived and/or modified sequence
acatacgtgtccccgagggtgggtgtccggggcccgagcccaaggaagaaaggccgacccgtgtgggacgcacacgtgggagttcaccggacatctgtggacacgtgcgtggccggagtcgcggtggccaggcggaggacggagcggtcggctgagccccagcagtagggcaggggcctgagccggcctccgagcgcagagagcggcccccaacccgcttctcctttgtcctctggccgaggcatcgcgcagttggagtccccttccgggaccctccagccagcaggatagaaagcaccgccccaagaggacggggacagcgggagattgaatggggagccgccggccagactcggagcctcacccccattgcctttcttgggggacagaagtggcggttgctgacgcctggaaattcccctgaaggtggagcaccacccaacccccctgggtcccaccctccctcaaggcctcctccacctccacctccaccccgcctggcctggcgtccacctctgcggctcctacctgggtgcaatcgagttaaatggctgataagcagatcagcctgccagccaagctcatcaatggcggcatcgccgggctgatcggtgtcacctgcgtgtttcccatcgacctggccaagaccaggctgcagaaccagcagaacggccagcgcgtgtacacgagcatgtccgactgcctcatcaagaccgtccgctccgagggctacttcggcatgtaccggggagctgctgtgaacttgaccctcgtcacccccgagaaggccatcaagctggcagccaacgacttcttccgacatcagctctctaaggacgggcagaagctgaccctgcttaaagagatgctggcgggctgtggggctggcacctgccaggtgatcgtgaccacgcccatggagatgctgaagatccagctgcaggatgcagggcgcattgccgcccagaggaagatcctggctgcccagggccagctctcggcccaggggggtgcccagccctcagtggaggctccagctgcccctcggcccacggccacccagctgacccgcgacctgctgcggagccgtggcattgccggtctctacaagggactcggggccacgctgctcagggatgtccccttctctgtggtgtacttcccgctctttgccaacctgaaccagctgggccgcccggcgtccgaggagaagtcgcctttctacgtgtccttcctggccggctgtgtggctgggagtgccgccgctgtggccgtcaacccctgtgatgtggtgaagacgcggctccagtcacttcagcgaggcgtcaacgaggacacctactctgggatcctggactgtgccaggaagatcctgcggcacgagggcccctcggccttcctgaagggcgcctactgccgcgcgctggtcatcgcgccccttttcggcatcgcacaggtggtctacttcctgggcatcgcggagtccctgctggggctgctgcaggacccccaggcctgagcccagcacccgctccaccccagccagctgggcagggccggtgtggggctggagccaggcagctagcccaggacggagcaagggaagacccctccccagccctcccgtcggcaggggcagcagggggcagggtgcagggtccacataggtggtgcacacgcaagccccccggggtgctgcctgcaccgttgggatcaatgtctcatttatgtagaaaatgcagaaatctttacattcctcaagctagcccctgccccaatcctgccctggc

SEQ ID NO: 313062 - DNA, 605 bp, Artificial Sequence
  derived and/or modified sequence
gagggcggagcgcgcgcggcgccgagcggacgcgcctccccgcctaggtgctggccgagcgcggggcgggcaggcgagcgcggcggcggcggcgagcgtggacagaagtggcggttgctgacgcctggaaattcccctgaaggtggagcaccacccaacccccctgggtcccaccctccctcaaggcctcctccacctccacctccaccccgcctggcctggcgtccacctctgcggctcctacctgggtgcaatcgagttaaatggctgataagcagatcagcctgccagccaagctcatcaatggcggcatcgccgggctgatcggtgtcacctgcgtgtttcccatcgacctggccaagaccaggctgcagaaccagcagaacggccagcgcgtgtacacgagcatgtccgactgcctcatcaagaccgtccgctccgagggctacttcggcatgtaccggggagctgctgtgaacttgaccctcgtcacccccgagaaggccatcaagctggcagccaacgacttcttccgacatcagctctctaaggacgggcagaagctgaccctgcttaaagagatgctggcgggctgtggggctggc

SEQ ID NO: 313063 - DNA, 589 bp, Artificial Sequence
  derived and/or modified sequence
agctctgcaggccctaggtggagctgccatgggaggagagctatacctgggatagctgagcccaggtcggggggtcttagggcgcccgggaccccagcccctagctcgaagggggcaggtgccggctgctgctctctctgtgctgaaggatgtgggggatggtcaccacagctgtccaggtcgaggtgctccggacagaagtggcggttgctgacgcctggaaattcccctgaaggtggagcaccacccaacccccctgggtcccaccctccctcaaggcctcctccacctccacctccaccccgcctggcctggcgtccacctctgcggctcctacctgggtgcaatcgagttaaatggctgataagcagatcagcctgccagccaagctcatcaatggcggcatcgccgggctgatcggtgtcacctgcgtgtttcccatcgacctggccaagaccaggctgcagaaccagcagaacggccagcgcgtgtacacgagcatgtccgactgcctcatcaagaccgtccgctccgagggctacttcggcatgtaccggggagctgctgtgaacttgaccctcgtcacccc

SEQ ID NO: 313064 - DNA, 585 bp, Artificial Sequence
  derived and/or modified sequence
catacgtgtccccgagggtgggtgtccggggcccgagcccaaggaagaaaggccgacccgtgtgggacgcacacgtgggagttcaccggacatctgtggacacgacagaagtggcggttgctgacgcctggaaattcccctgaaggtggagcaccacccaacccccctgggtcccaccctccctcaaggcctcctccacctccacctccaccccgcctggcctggcgtccacctctgcggctcctacctgggtgcaatcgagttaaatggctgataagcagatcagcctgccagccaagctcatcaatggcggcatcgccgggctgatcggtgtcacctgcgtgtttcccatcgacctggccaagaccaggctgcagaaccagcagaacggccagcgcgtgtacacgagcatgtccgactgcctcatcaagaccgtccgctccgagggctacttcggcatgtaccggggagctgctgtgaacttgaccctcgtcacccccgagaaggccatcaagctggcagccaacgacttcttccgacatcagctctctaaggacgggcagaagctgaccctgcttaaagaga

SEQ ID NO: 313065 - DNA, 684 bp, Artificial Sequence
  derived and/or modified sequence
agtgacggcttcagtctggggtggtgggtgaggggctgcgtgagagagggaggctgggggaggattactcttcgggtggccccaccctcactcattcccattccctcatccttctaggacagaagtggcggttgctgacgcctggaaattcccctgaaggtggagcaccacccaacccccctgggtcccaccctccctcaaggcctcctccacctccacctccaccccgcctggcctggcgtccacctctgcggctcctacctgggtgcaatcgagttaaatggctgataagcagatcagcctgccagccaagctcatcaatggcggcatcgccgggctgatcggtgtcacctgcgtgtttcccatcgacctggccaagaccaggctgcagaaccagcagaacggccagcgcgtgtacacgagcatgtccgactgcctcatcaagaccgtccgctccgagggctacttcggcatgtaccggggagctgctgtgaacttgaccctcgtcacccccgagaaggccatcaagctggcagccaacgacttcttccgacatcagctctctaaggacgggcagaagctgaccctgcttaaagagatgctggcgggctgtggggctggcacctgccaggtgatcgtgaccacgcccatggagatgctgaagatccagctgcaggatgcagg

SEQ ID NO: 313066 - DNA, 972 bp, Artificial Sequence
  derived and/or modified sequence
atggccgacaagcagatcagcctgcccgccaagctgatcaacggcggcatcgccggcctgatcggcgtgacctgcgtgttccccatcgacctggccaagaccagactgcagaaccagcagaacggccagagagtgtacaccagcatgagcgactgcctgatcaagaccgtgagaagcgagggctacttcggcatgtacagaggcgccgccgtgaacctgaccctggtgacccccgagaaggccatcaagctggccgccaacgacttcttcagacaccagctgagcaaggacggccagaagctgaccctgctgaaggagatgctggccggctgcggcgccggcacctgccaggtgatcgtgaccacccccatggagatgctgaagatccagctgcaggacgccggcagaatcgccgcccagagaaagatcctggccgcccagggccagctgagcgcccagggcggcgcccagcccagcgtggaggcccccgccgcccccagacccaccgccacccagctgaccagagacctgctgagaagcagaggcatcgccggcctgtacaagggcctgggcgccaccctgctgagagacgtgcccttcagcgtggtgtacttccccctgttcgccaacctgaaccagctgggcagacccgccagcgaggagaagagccccttctacgtgagcttcctggccggctgcgtggccggcagcgccgccgccgtggccgtgaacccctgcgacgtggtgaagaccagactgcagagcctgcagagaggcgtgaacgaggacacctacagcggcatcctggactgcgccagaaagatcctgagacacgagggccccagcgccttcctgaagggcgcctactgcagagccctggtgatcgcccccctgttcggcatcgcccaggtggtgtacttcctgggcatcgccgagagcctgctgggcctgctgcaggacccccaggcctag

SEQ ID NO: 313067 - DNA, 333 bp, Artificial Sequence
  derived and/or modified sequence
atggccgacaagcagatcagcctgcccgccaagctgatcaacggcggcatcgccggcctgatcggcgtgacctgcgtgttccccatcgacctggccaagaccagactgcagaaccagcagaacggccagagagtgtacaccagcatgagcgactgcctgatcaagaccgtgagaagcgagggctacttcggcatgtacagaggcgccgccgtgaacctgaccctggtgacccccgagaaggccatcaagctggccgccaacgacttcttcagacaccagctgagcaaggacggccagaagctgaccctgctgaaggagatgctggccggctag

SEQ ID NO: 313068 - DNA, 384 bp, Artificial Sequence
  derived and/or modified sequence
atggccgacaagcagatcagcctgcccgccaagctgatcaacggcggcatcgccggcctgatcggcgtgacctgcgtgttccccatcgacctggccaagaccagactgcagaaccagcagaacggccagagagtgtacaccagcatgagcgactgcctgatcaagaccgtgagaagcgagggctacttcggcatgtacagaggcgccgccgtgaacctgaccctggtgacccccgagaaggccatcaagctggccgccaacgacttcttcagacaccagctgagcaaggacggccagaagctgaccctgctgaaggagatgctggccggctgcggcgccggcacctgccaggtgatcgtgaccacccccatggagatgctgtag

SEQ ID NO: 313069 - DNA, 360 bp, Artificial Sequence
  derived and/or modified sequence
atggccgacaagcagatcagcctgcccgccaagctgatcaacggcggcatcgccggcctgatcggcgtgacctgcgtgttccccatcgacctggccaagaccagactgcagaaccagcagaacggccagagagtgtacaccagcatgagcgactgcctgatcaagaccgtgagaagcgagggctacttcggcatgtacagaggcgccgccgtgaacctgaccctggtgacccccgagaaggccatcaagctggccgccaacgacttcttcagacaccagctgagcaaggacggccagaagctgaccctgctgaaggagatgctggccggctgcggcgccggcacctgccaggtgatctag

SEQ ID NO: 313070 - DNA, 372 bp, Artificial Sequence
  derived and/or modified sequence
atggccgacaagcagatcagcctgcccgccaagctgatcaacggcggcatcgccggcctgatcggcgtgacctgcgtgttccccatcgacctggccaagaccagactgcagaaccagcagaacggccagagagtgtacaccagcatgagcgactgcctgatcaagaccgtgagaagcgagggctacttcggcatgtacagaggcgccgccgtgaacctgaccctggtgacccccgagaaggccatcaagctggccgccaacgacttcttcagacaccagctgagcaaggacggccagaagctgaccctgctgaaggagatgctggccggctgcggcgccggcacctgccaggtgatcgtgaccaccccctag

SEQ ID NO: 313071 - DNA, 342 bp, Artificial Sequence
  derived and/or modified sequence
atggccgacaagcagatcagcctgcccgccaagctgatcaacggcggcatcgccggcctgatcggcgtgacctgcgtgttccccatcgacctggccaagaccagactgcagaaccagcagaacggccagagagtgtacaccagcatgagcgactgcctgatcaagaccgtgagaagcgagggctacttcggcatgtacagaggcgccgccgtgaacctgaccctggtgacccccgagaaggccatcaagctggccgccaacgacttcttcagacaccagctgagcaaggacggccagaagctgaccctgctgaaggagatgctggccggctgcggcgcctag

SEQ ID NO: 313072 - DNA, 237 bp, Artificial Sequence
  derived and/or modified sequence
atggccgacaagcagatcagcctgcccgccaagctgatcaacggcggcatcgccggcctgatcggcgtgacctgcgtgttccccatcgacctggccaagaccagactgcagaaccagcagaacggccagagagtgtacaccagcatgagcgactgcctgatcaagaccgtgagaagcgagggctacttcggcatgtacagaggcgccgccgtgaacctgaccctggtgaccccctag

SEQ ID NO: 313073 - DNA, 180 bp, Artificial Sequence
  derived and/or modified sequence
atggccgacaagcagatcagcctgcccgccaagctgatcaacggcggcatcgccggcctgatcggcgtgacctgcgtgttccccatcgacctggccaagaccagactgcagaaccagcagaacggccagagagtgtacaccagcatgagcgactgcctgatcaagaccgtgagaagctag

SEQ ID NO: 313074 - DNA, 345 bp, Artificial Sequence
  derived and/or modified sequence
atggccgacaagcagatcagcctgcccgccaagctgatcaacggcggcatcgccggcctgatcggcgtgacctgcgtgttccccatcgacctggccaagaccagactgcagaaccagcagaacggccagagagtgtacaccagcatgagcgactgcctgatcaagaccgtgagaagcgagggctacttcggcatgtacagaggcgccgccgtgaacctgaccctggtgacccccgagaaggccatcaagctggccgccaacgacttcttcagacaccagctgagcaaggacggccagaagctgaccctgctgaaggagatgctggccggctgcggcgccggctag

SEQ ID NO: 313075 - DNA, 321 bp, Artificial Sequence
  derived and/or modified sequence
atggccgacaagcagatcagcctgcccgccaagctgatcaacggcggcatcgccggcctgatcggcgtgacctgcgtgttccccatcgacctggccaagaccagactgcagaaccagcagaacggccagagagtgtacaccagcatgagcgactgcctgatcaagaccgtgagaagcgagggctacttcggcatgtacagaggcgccgccgtgaacctgaccctggtgacccccgagaaggccatcaagctggccgccaacgacttcttcagacaccagctgagcaaggacggccagaagctgaccctgctgaaggagtag

SEQ ID NO: 313076 - DNA, 408 bp, Artificial Sequence
  derived and/or modified sequence
atggccgacaagcagatcagcctgcccgccaagctgatcaacggcggcatcgccggcctgatcggcgtgacctgcgtgttccccatcgacctggccaagaccagactgcagaaccagcagaacggccagagagtgtacaccagcatgagcgactgcctgatcaagaccgtgagaagcgagggctacttcggcatgtacagaggcgccgccgtgaacctgaccctggtgacccccgagaaggccatcaagctggccgccaacgacttcttcagacaccagctgagcaaggacggccagaagctgaccctgctgaaggagatgctggccggctgcggcgccggcacctgccaggtgatcgtgaccacccccatggagatgctgaagatccagctgcaggacgccggctag

SEQ ID NO: 313077 - DNA, 1731 bp, Artificial Sequence
  derived and/or modified sequence
ggcccgggtgcgccgcggcgctgggggcggcaggttgcggcggcgccggagcgggtctccaggctggcgagcgcccaggacaggcatgttgttgggactggcggccatggagctgaaggtgtgggtggatggcatccagcgtgtggtctgtggggtctcagagcagaccacctgccaggaagtggtcatcgcactagcccaagcaataggccagactggccgctttgtgcttgtgcagcggcttcgggagaaggagcggcagttgctgccacaagagtgtccagtgggcgcccaggccacctgcggacagtttgccagcgatgtccagtttgtcctgaggcgcacagggcccagcctagctgggaggccctcctcagacagctgtccacccccggaacgctgcctaattcgtgccagcctccctgtaaagccacgggctgcgctgggctgtgagccccgcaaaacactgacccccgagccagcccccagcctctcacgccctgggcctgcggcccctgtgacacccacaccaggctgctgcacagacctgcggggcctggagctcagggtgcagaggaatgctgaggagctgggccatgaggccttctgggagcaagagctgcgccgggagcaggcccgggagcgagagggacaggcacgcctgcaggcactaagtgcggccactgctgagcatgccgcccggctgcaggccctggacgctcaggcccgtgccctggaggctgagctgcagctggcagcggaggcccctgggcccccctcacctatggcatctgccactgagcgcctgcaccaggacctggctgttcaggagcggcagagtgcggaggtgcagggcagcctggctctggtgagccgggccctggaggcagcagagcgagccttgcaggctcaggctcaggagctggaggagctgaaccgagagctccgtcagtgcaacctgcagcagttcatccagcagaccggggctgcgctgccaccgcccccacggcctgacaggggccctcctggcactcaggtcggagtggttctggggggaggctgggaggtgaggacctggcccagccccactccaagctgacttcccaacccacagggccctctgcctccagccagagaggagtccctcctgggcgctccctctgagtcccatgctggtgcccagcctaggccccgagggtatgtctgtgccccacctccccctggggcaccgggccctcctgtggctgcagccacctcagcctgtgtcctcccgcagtggcccccatgacgcagaactcctggaggtagcagcagctcctgccccagagtggtgtcctctggcagcccagccccaggctctgtgacagcctagtgagggctgcaagaccatcctgcccggaccacagaaggagagttggcggtcacagagggctcctctgccaggcagtgggaagccctgggtttggcctcaggagctgggggtgcagtgggggactgccctagtccttgccaggtcgccagcaccctggagaagcatggggcgtagccagctcggaacttgccaggccccaaaggccacgactgcctgttggggacaggagatgcatggacagtgtgctcaagctgtgggcatgtgcttgcctgcgggagaggtccttcactgtgtgtacacagcaagagcatgtgtgtgccacttcccctaccccaacgtgaaaacctcaataaactgcc

SEQ ID NO: 313078 - DNA, 2090 bp, Artificial Sequence
  derived and/or modified sequence
gatgcctgatctcatcaatctagcgggagagacaggataacctgtccgagagtatagcgccactatgactccgccggaaaaattactttaaaaatcgccaaaaattacttggagcaaagggcagtcggcggagcttcgccaaggctggcgcagtcgccgttttctcgacccggtgatggccgtcatctcgtgacaagaaacttaaggtcgacagaaaattcaggacccggagtcatgggtccctccggtgggtcgtggcaacagtcccccccgccaccgcccggcacccatctatctatattgtcttttgacgctgaagcgtgaggtgccccaggaaagagtttcccaagccctggctgccctcccccggcgcgctgggtcccggtgaggtctctaggtaggttttgacctgtagcagagaaccaattctggagaacagcctcacttctttgattgaatacttacataatgcattggaacatgacatgagattaaggtttaataatgatagaatgaagaccacaataaaagagacctctacttagctcagcaattcttacctttcttacctatttgatgaagatgtcttttgaaaggtgtactgcaaggaacaaaatgtttgtaaattctccttttaccaaggtttcttttttaattgatgccaaagagttccaatattgaacatcttaagtctgttacttggattacggattgagtttggagcttactcagaggactacaggagagtatccaggaagtggataattactgtaccttcctcatggaaaaagttttatttaaagtgttatttctcattgaatactatcaaaaaggaaaaaaaaatgacctaaacttttgagatagatttggctctagtaagtatttagttatatcacttgcatatctgggagaagaaataagagactatcatcagtacattcccatctactaaaaaaatttattttacacatgtcaagggattacttataacttccattttattactaatagcttgaacccttttaatgaagacctaactcctccaccagaaatttaagtttatgttcttactttgtttacttataaaatacatctcaggtatttcggatgtcttttttttttctaagcctatatgaaatgaaaaatatattggcaaaataaatgtttaaaccttttacgttaaaattactttgaaagatgaaaagttagtgctgtttttgtctacgttatactgaaattaaatgtttataatttatattttgggtttatgtataaatcatggaatttatgcaaaaatatgagtagtacagattctcctctaattctgtaggactttgaataatgtgatatttttcttataattggacccttgtgttttgaagaaatgccaactgcttgaagaatctccttgttatttgtattatttgctatagggttagatgttgagaaattctgctgacaaaaaattttaagccagttttacactaaatgttcctcagtctgattaatttgttattggatgtattctgtatctttcttttgtaatttgtaacttttatccacttagcacgaatgattctattaaagaaaatcattaggaagtggtagaaactttaaatcgccccagagtttgcctgtttccatattttattatcttataatcttcgggagtgcttacacttatggagctaacattttcagagatacagcttcttatagtaacactaaaactttcttcctctttggactgaatacctataattataactatatggtagtttaagtttccttgtgattagtcaaaaataccattttagtatgaagcaatgaagtctattatttgttgtcccataattgagaaagcttaaatacaccttttattaagagtttgtaaattctagcttagtctacacagatttttatatcaatttgtttatatttttattaatgtcatttctggaagtgtgaaaatgttaatgttcaacaagcaacattaaaaatagatttgaaacatttatatatagagaggtacacatttatttactgtttaggtactgaagattatcacttaataaaaaatatatatccca

SEQ ID NO: 313079 - protein, 387 aa, Artificial Sequence
  derived and/or modified sequence
MACTIQKAEALDGAHLMQILWYDEEESLYPAVWLRDNCPCSDCYLDSAKARKLLVEALDVNIGIKGLIFDRKKVYITWPDEHYSEFQADWLKKRCFSKQARAKLQRELFFPECQYWGSELQLPTLDFEDVLRYDEHAYKWLSTLKKVGIVRLTGASDKPGEVSKLGKRMGFLYLTFYGHTWQVQDKIDANNVAYTTGKLSFHTDYPALHHPPGVQLLHCIKQTVTGGDSEIVDGFNVCQKLKKNNPQAFQILSSTFVDFTDIGVDYCDFSVQSKHKIIELDDKGQVVRINFNNATRDTIFDVPVERVQPFYAALKEFVDLMNSKESKFTFKMNPGDVITFDNWRLLHGRRSYEAGTEISRHLEGAYADWDVVMSRLRILRQRVENGN

SEQ ID NO: 313080 - protein, 68 aa, Artificial Sequence
  derived and/or modified sequence
MACTIQKAEALDGAHLMQILWYDEEESLYPAVWLRDNCPCSDCYLDSAKARKLLVEALDVNIGIKGLI

SEQ ID NO: 313081 - DNA, 1164 bp, Artificial Sequence
  derived and/or modified sequence
atggcctgcaccatccaaaaagccgaagctctcgatggagcccatttgatgcagatcctgtggtacgatgaagaggagtcgctgtatcccgctgtctggttgcgagacaactgcccctgtagcgactgttatctagatagtgcaaaggctcgcaagttgctagtcgaagccctagacgtaaacatcggcatcaaaggactgatctttgacagaaagaaggtgtacatcacctggcctgacgaacactatagcgaatttcaggctgattggctgaaaaaacgatgttttagcaagcaggctagagcaaagctccagagggaactctttttcccagagtgccaatactggggctccgaacttcaactgcccactttggacttcgaagatgtcctcaggtacgacgaacacgcgtataaatggctcagtacacttaagaaagtcggaatagtgcggctaaccggcgccagcgacaaacccggagaagtaagcaagttaggcaaaaggatgggcttcttgtatcttaccttctatgggcatacatggcaggtgcaggataagatagacgccaacaatgtagcttacacaaccggaaaactctccttccacacagattatccggctctgcatcaccctccaggagtccagctcctccactgtataaagcaaacagtgaccggcggcgactccgaaatcgtcgatggtttcaatgtctgccagaaactcaagaagaacaaccctcaggctttccaaatcctttcaagcactttcgtggactttaccgatattggagtcgactattgcgatttttcagtgcagtccaaacataagatcattgagcttgacgacaaagggcaggtggtaaggataaatttcaacaatgcaacaagggacaccatctttgacgttccagttgagagagtacagccgttttatgccgccctgaaggagttcgttgacttgatgaactcaaaggagtctaaatttacattcaaaatgaatcctggggatgttataacgttcgacaattggaggttgctgcatggccgaaggtcatacgaggccggtaccgagatctctagacatctggaaggcgcttatgccgactgggacgtagtgatgagccgcctgagaattttaaggcagcgcgtggagaacggtaattag

SEQ ID NO: 313082 - DNA, 1164 bp, Artificial Sequence
  derived and/or modified sequence
atggcctgtaccattcagaaagcagaggcattggatggcgcacatctcatgcagattctttggtacgatgaagaagaatccctgtatcccgccgtttggctccgggataattgtccatgcagcgattgctacctggatagcgctaaggctcggaaactgctggtggaagcccttgacgtcaatataggcataaagggcctcatctttgatcgaaagaaggtgtatataacatggccagacgagcactactccgagtttcaagcagattggctgaagaaaagatgtttttccaagcaagcaagagccaaattacagcgcgagctattttttccagagtgccaatattgggggtctgagcttcagctgcctaccctggacttcgaagatgtgctgcggtacgacgaacacgcgtataagtggttgtcgaccctgaagaaagtcggcatcgtgcggcttacgggagcctcagataaacctggggaagtttctaaacttggaaagaggatgggatttctgtacctgacgttttacgggcacacctggcaggtgcaggacaagatcgacgccaataacgtggcctatacaaccgggaagctgtcatttcataccgattatccagccctgcatcaccccccaggcgttcaattgctgcactgtattaaacagactgtaactggcggcgattccgagattgttgacggcttcaacgtttgtcagaagttgaagaagaacaatccgcaggctttccagattctgagtagtaccttcgtggactttacggacatcggcgtggactactgcgacttcagtgtgcagagcaagcacaaaatcatcgagcttgatgacaagggacaggtggtgcgaattaacttcaacaatgctacacgagacactatttttgatgtgcccgtcgagcgcgttcagcccttttacgcagctttgaaagaatttgttgacctgatgaactcgaaggagtcaaagtttactttcaagatgaacccaggtgatgttatcacttttgataactggcgccttctgcacgggaggcgctcctacgaggcaggcactgagatcagccgtcatctcgaaggagcctatgccgactgggatgtggtgatgtctaggctacgtatcttgcgtcagagagtggaaaacggcaattag

SEQ ID NO: 313083 - DNA, 1164 bp, Artificial Sequence
  derived and/or modified sequence
atggcatgtacgattcagaaggctgaggccctcgacggcgcgcatttaatgcagatcctatggtatgacgaagaagagagtctgtaccccgccgtgtggctcagagacaactgtccctgctccgattgttacctcgactcagcaaaagccagaaaacttcttgtggaggctctagatgtgaacattggaatcaagggactgattttcgacaggaaaaaggtgtacatcacatggcccgatgaacactacagtgaattccaggcggattggctcaaaaagcgctgtttctccaaacaggccagagcaaaattgcagagagaactgttctttcccgaatgccaatattggggttcagagctccagctccctacactggatttcgaagatgtactcagatacgatgagcatgcgtataaatggttgagcacactgaagaaggtgggaatcgtgcggctcactggggcttcagacaaacccggcgaggtgtcaaagctgggaaagcgaatgggttttctgtacctcaccttttacggccacacttggcaagtgcaggataaaattgacgccaacaatgtcgcatatactacggggaagctctcctttcatactgattatcccgctctgcatcacccacctggagtgcagttgcttcattgcatcaaacagaccgttacaggaggcgacagcgagattgtagacggcttcaacgtttgtcagaaacttaaaaagaataacccccaggccttccagatcctttcttccacttttgtggactttactgacatcggcgtggactattgtgacttcagcgttcagtctaagcacaaaatcattgagttggatgataaggggcaggtagtacgcattaatttcaacaacgctactagggacaccatctttgacgtgcctgtggagcgggtacaaccattttacgccgcacttaaagagtttgttgacttgatgaattctaaggagtccaagttcacattcaagatgaacccgggagacgtcattactttcgacaattggaggcttttgcatgggcggcgtagttatgaggcagggacagaaatctcccgccatctggaaggcgcctacgctgactgggatgttgtgatgagtaggctgcgtattctgcgtcagcgggtggaaaatgggaattag

SEQ ID NO: 313084 - DNA, 1164 bp, Artificial Sequence
  derived and/or modified sequence
atggcctgcactattcagaaggccgaggcccttgatggtgcccatctgatgcagatactttggtatgatgaggaagaatcactttatccggctgtgtggctgcgagataattgtccctgttccgactgctacctcgattctgcaaaagcacggaaactcctggtggaggcactggacgttaacattggtataaaggggttgatctttgatcgcaaaaaggtctatattacctggccggatgagcactatagtgagttccaagctgattggctgaagaagcgatgtttttcaaagcaagcccgagcaaagctgcagcgcgagttgttttttcccgagtgtcaatattgggggtcagaactgcaattgcctaccctagacttcgaagacgtgctgcgctacgatgagcatgcgtataaatggctcagcacactgaaaaaagttggaatcgtcaggctgacaggcgcttccgacaagcccggcgaggtcagtaagctgggcaaaagaatgggtttcctctatctgaccttctacggtcatacgtggcaggtacaagacaaaatcgacgccaataacgtcgcttataccacgggaaaactgagtttccataccgactaccccgcactacatcatcccccaggcgtgcaacttctccattgtattaaacagacagttaccgggggggacagcgagattgtggacggattcaatgtctgccagaagctgaagaaaaataaccctcaggcattccagattctcagctcaaccttcgtcgacttcactgatataggagtcgactactgcgactttagcgtgcagtcaaagcataagatcatcgaattggacgataagggccaagttgtaagaatcaacttcaacaatgctacacgtgatacgatctttgacgttcccgttgagcgagtgcaaccattctacgctgcactcaaagagttcgtcgacctgatgaactccaaggagagtaagttcactttcaagatgaaccccggggatgtgattacattcgataattggcgtcttttgcacgggcgccgctcctatgaggccgggaccgaaatatcaagacatctcgagggcgcatatgctgattgggatgtggtgatgtcaaggctgcggatcctacgccagagagtggagaacggcaattag

SEQ ID NO: 313085 - DNA, 207 bp, Artificial Sequence
  derived and/or modified sequence
atggcttgcaccatacaaaaggctgaagccctagatggcgcacacctgatgcaaattttatggtatgatgaggaggagtcactgtatcccgcagtttggctgcgggataattgcccatgctccgactgttatttagactctgccaaggcccgtaaattgctggtcgaggctctggatgtcaacatcggcattaaaggactgatctag

SEQ ID NO: 313086 - DNA, 1164 bp, Artificial Sequence
  derived and/or modified sequence
atggcctgcaccatccagaaggccgaggccctggatggagcccacctgatgcagatcctgtggtatgatgaggaggagagcctgtacccagctgtgtggctgcgggacaactgcccctgcagcgactgctacctggacagcgccaaggccaggaagctgctggtggaggccctggatgtgaacatcggcatcaagggcctcatctttgacaggaagaaggtgtacatcacctggccagatgagcactacagcgagttccaggccgactggctgaagaagcgctgcttcagcaagcaggcccgggccaagctgcagcgggagctgttcttccctgagtgccagtactggggcagcgagctgcagctgcccaccctggactttgaagatgtgctgcgctatgatgagcacgcctacaagtggctgagcaccctgaagaaggtgggcatcgtgcggctgactggagccagtgacaagccaggagaggtgtccaagctgggcaagaggatgggcttcctgtacctgaccttctacggccacacctggcaggtgcaggacaagattgatgccaacaacgtggcctacaccaccgggaagctgtccttccacacagactacccagccctgcaccaccccccaggagtgcagctgctgcactgcatcaagcagacagtgactggaggagacagcgagatcgtggatggcttcaacgtgtgccagaagctgaagaagaacaacccccaggccttccagatcctgagcagcacctttgtggacttcacagacatcggcgtggactactgtgacttctctgtgcagagcaagcacaagatcatcgagctggatgacaagggccaggtggtgcgcatcaacttcaacaatgccacccgggacaccatctttgatgtgcctgtggagcgggtgcagcccttctacgccgccctgaaggagtttgtggacctgatgaacagcaaggagagcaagttcaccttcaagatgaaccctggagatgtgatcacctttgacaactggaggctgctgcatggaagaagaagctatgaggccggcacagagatcagccgccacctggagggcgcctatgctgactgggatgtggtgatgagccggctgcgcatcctgcggcagagggtggagaatggaaattag

SEQ ID NO: 313087 - DNA, 207 bp, Artificial Sequence
  derived and/or modified sequence
atggcctgcaccatccagaaggccgaggccctggatggagcccacctgatgcagatcctgtggtatgatgaggaggagagcctgtacccagctgtgtggctgcgggacaactgcccctgcagcgactgctacctggacagcgccaaggccaggaagctgctggtggaggccctggatgtgaacatcggcatcaagggcctcatctag

SEQ ID NO: 313088 - DNA, 1164 bp, Artificial Sequence
  derived and/or modified sequence
atggcctgcaccatccagaaggccgaggccctggacggcgcccacttaatgcaaatactctggtatgacgaggaagagagcctttatccagctgtgtggctgagggacaattgtccttgctcagactgctacctcgacagcgcaaaagctcgcaagcttttggttgaagctctcgatgtgaacatcggcattaaaggattgatcttcgaccggaaaaaggtgtacataacctggcctgacgagcactatagcgagttccaggccgactggctcaagaaaaggtgcttctcaaaacaggcgcgcgcaaagctccagagggagctgttctttccagagtgccagtactggggatctgagctgcagctaccgacccttgactttgaagacgtcctacgctacgacgagcacgcctacaaatggctgtctacccttaagaaagtaggcattgttaggctgactggggcttctgataagcctggcgaggtgagcaaactaggaaaacgcatggggttcctttaccttacattctacggacatacctggcaagtgcaagataagatcgatgcaaacaacgtcgcatacaccaccggaaaactgtcctttcatactgattaccccgccctgcaccatccccccggcgtgcagcttcttcattgtatcaaacagaccgtgacaggcggcgattccgagattgtcgacggctttaacgtctgccaaaaattgaagaagaataatccccaggctttccaaatactctcctctaccttcgtggattttactgatatcggggtcgactactgtgacttcagcgtgcaatctaagcacaagattatagagctcgatgataaaggccaggtggtgcgaatcaacttcaacaatgcaactagggataccattttcgatgtacccgtggaacgcgtacaacccttctatgcagctttgaaggaattcgtagaccttatgaactccaaagaaagtaagtttacttttaaaatgaacccaggcgacgtgattacctttgataactggagactgttacacggaaggcgatcctatgaggcaggcaccgagatatccaggcatctggagggcgcatacgccgattgggatgtggtgatgagccggctcagaattctccgacaaagagttgagaatggaaactag

SEQ ID NO: 313089 - DNA, 1164 bp, Artificial Sequence
  derived and/or modified sequence
atggcctgcaccatccagaaggccgaggccctggacggcgcccacctcatgcagatcttgtggtatgacgaggaggaaagcttgtatcctgctgtgtggctgagggataactgtccatgttccgactgttacctcgactctgcgaaggctcgtaagctgctcgtcgaggcactggacgttaacattggcatcaaggggcttatttttgatagaaaaaaagtttacattacgtggcccgacgagcactattctgagtttcaagccgactggctgaaaaagcgctgtttcagcaagcaggcaagggccaagctgcagagggaactcttttttcctgagtgccaatactgggggtcagaattgcagctgcccacgctggactttgaggatgtgctgcgctacgacgaacatgcctataagtggctctccacactgaaaaaggtcggaattgtccgcctcacaggtgcttctgacaagcccggggaagtgtctaagttagggaaacggatgggattcctttatctcaccttttatggccatacctggcaggtgcaggacaagatcgatgcaaataacgtggcatacacgactggtaagctctcatttcataccgattatcctgcacttcatcatcctcctggggtgcagctgctgcattgcattaagcagacagtgaccggcggcgactctgagattgttgacggcttcaacgtctgtcagaagctgaaaaagaacaatccccaagcgtttcagatactgtcgtctacctttgtggacttcaccgatatcggagtagactattgtgacttcagcgtccagtccaagcataaaataattgaactcgacgataagggccaggtcgttcggatcaacttcaacaacgcaactagggatactatttttgatgtgccagtcgaacgagtacagcctttttacgccgccctgaaagaatttgtagatctcatgaattcaaaggagagtaaattcactttcaaaatgaatcctggcgatgtgatcaccttcgacaactggcggcttctgcacggacgacggagctacgaggctggtacagagatctctcgtcatctggagggagcctacgcagactgggatgtggttatgtcccggctcagaattctgagacagagggtggagaacggcaactag

SEQ ID NO: 313090 - DNA, 1164 bp, Artificial Sequence
  derived and/or modified sequence
atggcctgcaccatccagaaggccgaggccctggacggcgcccaccttatgcagatcttatggtatgatgaggaggaatctctgtaccctgccgtgtggctgcgtgataactgtccctgctccgattgctatttggactcagcaaaagccagaaagctcctggtggaagccctcgatgttaacattggcataaaagggctgatctttgaccgtaagaaggtgtatatcacttggcctgacgagcactatagtgagttccaagcagactggttaaaaaagcggtgcttcagtaagcaggcgcgggcaaagttgcaacgggagctattcttcccggaatgccagtattggggcagcgagctacagcttcccactctggacttcgaagacgtcttacggtatgacgagcacgcctataagtggctttccactcttaaaaaggttggaatcgtgaggctcaccggtgcctccgacaagccaggcgaggtgagtaagctggggaagagaatggggtttttgtatctgacgttttatggacatacttggcaggtccaggataaaatagatgcgaacaacgtggcttacaccacggggaaattgagctttcatacagactatccagctttacaccacccgcctggcgtccagctgctgcattgtataaagcagactgtaactggcggggatagcgagatagttgatggctttaatgtgtgccaaaaactcaaaaagaacaaccctcaggcttttcagatcctctcatctacctttgttgactttacggacataggggtcgactattgcgatttctctgtgcaatccaaacacaagatcattgaactcgatgataaaggacaggttgtccggattaactttaataatgctacgcgagatactatcttcgatgtgccggttgagagagtgcagccattctacgctgccttgaaggaatttgtggatttgatgaatagcaaagagagcaagttcacctttaagatgaacccgggtgacgttataacctttgataactggagactcctgcatgggcgcaggtcctacgaggccggcacagagatttccaggcacctggaaggcgcttacgccgattgggacgtggtgatgagtcgcctgaggattctccgccagagggtggaaaatggcaattag

SEQ ID NO: 313091 - DNA, 1164 bp, Artificial Sequence
  derived and/or modified sequence
atggcctgcaccatccagaaggccgaggccctggacggcgcccacttaatgcagattctttggtacgatgaggaagagtccctctatcccgcggtgtggcttagggataactgtccgtgttctgattgttacctagactctgccaaagcacggaagctgctcgtggaagctctcgatgttaacatcggtattaagggtctcattttcgaccggaaaaaggtgtacattacatggcccgatgaacactacagtgaattccaagcagattggctgaagaagcgatgtttctccaaacaagcacgagccaagctgcagagagagttgttttttcctgagtgtcagtactggggcagtgaactgcagttacctaccttggactttgaggacgttctgcggtacgacgaacatgcttataaatggctctctactttgaagaaagtggggattgtgagactgacaggtgcatctgacaagcccggtgaggtatccaaactggggaaaaggatgggctttctatatttaacattttacggccacacctggcaggtccaggacaaaatcgacgctaacaatgtggcctatacgacgggcaagctctctttccacacggattatcctgccctgcatcaccctcctggcgtgcagttgctgcactgtatcaagcagacagtaacaggaggggattccgagatagttgatggctttaacgtctgtcagaagctgaagaaaaataatccccaggcctttcagattctttcgtcaacctttgtagacttcacagacattggcgtagactactgcgattttagtgtgcagtcgaaacacaagatcatcgagctggatgacaagggacaagtcgtgagaatcaacttcaacaacgcaacaagggacacaatctttgacgtgcccgtagagcgggtgcagcctttttatgcagccttaaaagagtttgttgacctcatgaactcaaaggagagtaaatttaccttcaagatgaatcccggcgatgtgatcacattcgataattggcggcttcttcacggtcggagaagctacgaggccggaaccgaaatcagtagacatctggagggagcgtatgcggattgggatgttgtgatgtcacgccttagaattctacgccagcgggtggagaacggcaattag

SEQ ID NO: 313092 - DNA, 207 bp, Artificial Sequence
  derived and/or modified sequence
atggcctgcaccatccagaaggccgaggccctggacggcgcccacctaatgcaaatcttatggtatgatgaagaagagtctctgtaccccgcagtgtggctccgtgacaactgtccttgctccgactgttacctcgacagtgctaaggcccgaaaattgctcgtggaggcccttgacgtcaacattgggataaagggccttatctag

SEQ ID NO: 313093 - DNA, 1164 bp, Artificial Sequence
  derived and/or modified sequence
atggcctgtaccatccagaaggccgaggcattggacggcgcacaccttatgcagattctgtggtatgatgaagaagaatctctgtatccggcagtttggttaagagacaattgtccctgcagcgactgttatcttgactctgcaaaagctcggaagttgttagtcgaggcgctggacgttaacatcggaattaaaggactgatttttgaccggaagaaagtctatattacttggccagatgagcattactcagagtttcaggcagactggcttaaaaagcgctgtttttcaaagcaagcaagagccaagcttcagagagaactgttttttccggaatgccagtactgggggtcggagctccagctgccaacactcgatttcgaggacgtgctgcggtatgacgaacatgcttataagtggctctccactctcaaaaaggtgggcattgttaggttgacaggagcgtcggacaagccaggcgaagtttcaaagttagggaagcgcatgggttttctgtacctcactttttatggacatacatggcaagttcaagataagattgacgccaacaatgtcgcatacacaactggaaaactatcctttcacacagactatcccgcactccaccatccaccaggagtgcaactactgcattgcattaaacagaccgtgactggcggtgattcagagatcgtcgatggattcaacgtttgtcagaaactgaaaaaaaacaatccacaggcctttcagattctctcttccacatttgtggacttcaccgatatcggagtagattattgcgacttctccgtccagtccaaacataagattatcgagctggatgataaaggacaagttgtccggatcaatttcaacaacgctacaagggacacgatcttcgacgtaccagttgaaagggtgcagcctttttatgcagccttgaaagagtttgtcgacctcatgaactccaaagagtcaaagttcacatttaaaatgaaccccggagacgtgataaccttcgacaactggagacttctccacggacgacggtcgtacgaggccggaacagaaatcagccgacacttggaaggcgcatacgcggattgggatgttgtgatgagcaggctccggattttgaggcaacgggttgagaacggcaattag

SEQ ID NO: 313094 - DNA, 1164 bp, Artificial Sequence
  derived and/or modified sequence
atggcttgcaccatccagaaggctgaggccttggatggtgcccacctgatgcagatcctctggtacgatgaagaagaaagtctgtaccctgccgtatggttgcgcgataactgcccatgttctgactgctacctggattctgctaaggccaggaagcttctagtcgaggctctcgatgtgaacatcggcattaagggcctaatcttcgaccgcaaaaaggtctatatcacttggcccgatgagcactacagcgagttccaagctgattggttgaaaaaacgatgtttttctaaacaagctcgtgcaaagctgcagagagaactctttttcccagaatgccaatattggggatctgaactacagttgccaacacttgactttgaggacgttctgagatacgacgaacatgcatacaagtggctgtcaacactgaaaaaagtcggcatcgttagattgacaggagcttctgacaaacccggagaggtttctaagctgggtaaaagaatgggcttcctgtatctcacattctacgggcacacatggcaggtgcaagacaaaatcgacgccaacaatgtagcctacacaacaggcaaactgagtttccataccgattaccctgcactgcatcacccacctggggtccaacttcttcattgcatcaaacagaccgtgaccggcggtgattccgagatagtagacgggtttaatgtgtgccagaagctgaagaagaacaaccctcaagccttccaaatcctcagctctacatttgtggatttcaccgacatcggcgtggattactgtgatttttcagtgcagtcgaagcacaagattatagagctggacgacaagggacaggtggttaggattaacttcaacaatgccactcgtgacaccatcttcgacgtcccagtggagcgcgttcagcccttttatgctgccctgaaggaattcgtggacctgatgaacagtaaagagagcaagtttacgtttaagatgaaccccggagacgtcatcacctttgacaattggcgacttcttcatgggaggcgtagctacgaagctggtaccgagatcagccgacatcttgaaggggcatacgcagactgggacgttgttatgtcccgattgagaatcttacgacagagggtcgaaaatggaaactag

SEQ ID NO: 313095 - DNA, 1164 bp, Artificial Sequence
  derived and/or modified sequence
atggcctgcaccatccagaaagcggaggccctggatggagcccacctaatgcagatactttggtacgatgaagaggaaagcctctaccccgctgtgtggctccgagataactgcccctgctcagattgctatctagactcagcaaaagcgcgaaagctactggtggaggctcttgatgtgaatatcggaatcaaagggttgatttttgaccgtaaaaaggtatatattacctggccagatgagcattactctgagtttcaggccgactggctgaagaagagatgtttttcaaagcaagctagggctaagctgcagcgcgaattatttttcccagaatgccagtattggggtagcgagctgcagctgcccacccttgactttgaagacgtactccggtacgacgagcacgcctacaaatggctttcaacgctgaagaaggttggaatcgtgaggctcactggtgccagtgacaagcctggcgaggtcagtaagttgggaaagcgcatgggctttctttacctgaccttttacggccacacctggcaggtacaggacaagatcgatgctaacaatgtggcgtatacgaccggcaagctgagtttccatacagactacccggctctccaccatccccctggagttcagctgctgcattgcataaagcaaacagtgactgggggagacagcgaaatcgttgatgggttcaatgtgtgtcagaagctgaagaaaaataacccgcaggcctttcagatcctgtcctctacatttgtcgatttcaccgacatcggggtcgactattgcgatttttctgtgcaatctaaacacaagataatcgagctggacgacaagggccaggttgttagaatcaacttcaataatgctacgcgggacacaatattcgacgtccctgtagaacgtgtccagcccttctatgctgctctaaaggagtttgtggaccttatgaactcaaaggagagcaaatttacatttaaaatgaatcccggagacgtaattacatttgacaactggaggttgctacacggcaggcggtcgtacgaagcaggtaccgaaatttcacgccacctggaaggcgcttacgccgactgggatgtcgtgatgagtaggctgcggattttacgccaaagggtggagaacggcaactag

SEQ ID NO: 313096 - DNA, 1164 bp, Artificial Sequence
  derived and/or modified sequence
atggcttgcactattcagaaggcggaagctctggacggcgctcacttaatgcagatcttatggtatgatgaagaagagagtctgtaccctgccgtatggctgcgcgacaattgtccctgcagtgactgctatttagatagtgccaaagcgagaaagctgctggttgaagcgttggatgtcaatattggcattaaggggttgattttcgaccgcaaaaaggtgtacatcacctggcccgacgaacattacagcgagtttcaggctgactggctgaagaagcgatgcttctcaaaacaggccagggccaaactacagcgagaactgttcttcccggagtgccagtactggggatcagaactacaattacctaccctggactttgaagacgtgctccggtatgacgagcatgcttacaaatggttgagtacactcaagaaagttggtattgtgcggctgacgggcgcttccgataaacccggagaggttagcaaattaggcaaacgtatgggtttcctgtacctgaccttttatggacacacctggcaagtgcaagataagatcgatgctaataatgtggcttacacaaccggtaagttatcctttcacaccgactatcctgccttgcatcatcccccaggagtgcagcttctgcattgcatcaaacaaaccgtgaccggcggtgatagcgaaatcgtggacggcttcaacgtttgccagaagctcaaaaaaaataaccctcaggcctttcagatactcagtagcacattcgtggacttcacagatatcggggtcgattattgcgactttagcgttcagtctaaacacaagattattgagctggatgacaagggccaggttgttaggatcaactttaacaacgctaccagggatactattttcgatgtgccagtcgaaagggtgcagccgttctatgcggctcttaaggagttcgtagatctcatgaacagcaaagagtcaaaattcactttcaaaatgaatcccggtgacgtgataaccttcgataactggaggctcctgcacggcagacggagctacgaggctggcacagaaattagccgccatcttgaaggggcttacgctgattgggatgtggtgatgtcccgactacggatactgcggcaaagagtggaaaacgggaattag

SEQ ID NO: 313097 - DNA, 207 bp, Artificial Sequence
  derived and/or modified sequence
atggcatgcactattcagaaagctgaagcactagatggtgcgcatctgatgcagatcttgtggtacgatgaagaagagagcctttatccggctgtttggctgcgggacaattgcccctgctcagactgttacctggactccgcaaaggctaggaaactgctggtcgaagctctggatgttaacattggaattaagggtctaatttag

SEQ ID NO: 313098 - DNA, 1886 bp, Artificial Sequence
  derived and/or modified sequence
aagaagtgaactgcttgttcacttgctgctgttgccactgctggtacagaaatagaaggtaagacagcacaaaaaaacaaagacaaaaaacctccaagctcccttcagtagttgctacaccttcagattgagacatccttcctcatttacaaacctcagctgtgtctgggggcagggccacagtgaaactgccaggagcaaaaaggcttccaagaaaaagtaccacatcagattggaaactggggacagatcattcctgggatgtgacgggcaccagaatgctccctctccaaaggatctaaggaccaaagctgacagtttctttacttgcaggtagctgacagcatctactcctgaagaccggaaacatggcttgtaccatccaaaaggcagaagcacttgacggggctcatttgatgcagatcctctggtatgatgaggaagagtctctctacccagctgtatggttgagagacaactgtccgtgctctgattgctacctggattccgcaaaagcacggaaacttctagtggaagctcttgatgtgaacattggaattaaaggcttgatatttgacagaaaaaaggtgtacatcacatggcccgatgagcattacagtgaattccaggctgattggctgaagaaaagatgcttttccaagcaggccagagcaaagctccaaagagaattgttttttccagaatgccaatactggggctcagagctccagctacccactttggattttgaagatgttttaagatatgatgaacacgcatacaagtggctctccaccctcaagaaagtaggcatagtaagactcaccggagcatctgacaaaccaggagaagtttcaaaacttgggaaaaggatgggtttcctctatctcacattttatggacatacttggcaagtgcaagacaaaatcgatgcaaacaatgtggcttacacaactgggaagctaagctttcacactgattatccagccctccatcatccacctggggttcagcttcttcactgcataaagcaaacagtcacagggggtgattcagaaattgtagatgggtttaatgtgtgccaaaaactaaagaaaaataatcctcaggcattccagattttgtcctctacctttgtggactttacagacattggagtggattactgtgatttttctgtacaatcaaaacataaaattatagagttagatgataaaggccaagtggttcgcatcaacttcaataacgcaactagggacacaatatttgatgtgcctgttgaaagagttcagcctttttatgctgctctgaaggagtttgttgacctcatgaacagcaaagaatccaagtttaccttcaagatgaatccaggtgatgtgattacttttgataactggcgcttacttcatggccgacgtagctatgaagcaggaactgagatatcccgccatctagaaggagcttatgctgactgggatgtggtcatgtcaaggcttcgtatcttaaggcagagggtggagaatggaaactgaagtcacctgtagataattttaataagattccaatgaccatattttgtgagatatggcacattattcacagaccatgatctttgtgatttacatataatttccttaacaatgaacatgtaacttctctcacaagagtactctttactttgtaatcatatacaatgtcaactttttagatgtttcaccactcttttgcaaataaagcatcctttctgctctgttgcatgcctgctctaatttcttttgcccatatatgagtatctccagaatgtctacaaatagtttttgtagcaaatgaaaatttcttcaaataagccttttgtttcaaataaaacttgtctcaaaacatgcttc

SEQ ID NO: 313099 - DNA, 1596 bp, Artificial Sequence
  derived and/or modified sequence
acagtatgtgaaatactctcaccagaacaaaggtcccagcgtcaataagtcaaaccgcagactctgacagctgagtgaatagcagaggccagagtccacttgaagtgttcacactctcagaggccaagtttagatcttatctgcctgagattccttttaacactgatttgtcatagcaggtagctgacagcatctactcctgaagaccggaaacatggcttgtaccatccaaaaggcagaagcacttgacggggctcatttgatgcagatcctctggtatgatgaggaagagtctctctacccagctgtatggttgagagacaactgtccgtgctctgattgctacctggattccgcaaaagcacggaaacttctagtggaagctcttgatgtgaacattggaattaaaggcttgatatttgacagaaaaaaggtgtacatcacatggcccgatgagcattacagtgaattccaggctgattggctgaagaaaagatgcttttccaagcaggccagagcaaagctccaaagagaattgttttttccagaatgccaatactggggctcagagctccagctacccactttggattttgaagatgttttaagatatgatgaacacgcatacaagtggctctccaccctcaagaaagtaggcatagtaagactcaccggagcatctgacaaaccaggagaagtttcaaaacttgggaaaaggatgggtttcctctatctcacattttatggacatacttggcaagtgcaagacaaaatcgatgcaaacaatgtggcttacacaactgggaagctaagctttcacactgattatccagccctccatcatccacctggggttcagcttcttcactgcataaagcaaacagtcacagggggtgattcagaaattgtagatgggtttaatgtgtgccaaaaactaaagaaaaataatcctcaggcattccagattttgtcctctacctttgtggactttacagacattggagtggattactgtgatttttctgtacaatcaaaacataaaattatagagttagatgataaaggccaagtggttcgcatcaacttcaataacgcaactagggacacaatatttgatgtgcctgttgaaagagttcagcctttttatgctgctctgaaggagtttgttgacctcatgaacagcaaagaatccaagtttaccttcaagatgaatccaggtgatgtgattacttttgataactggcgcttacttcatggccgacgtagctatgaagcaggaactgagatatcccgccatctagaaggagcttatgctgactgggatgtggtcatgtcaaggcttcgtatcttaaggcagagggtggagaatggaaactgaagtcacctgtagataattttaataagattccaatgaccatattttgtgagatatggcacattattcacagaccatgatctttgtgatttacatataatttccttaacaatgaacatgtaacttctctcacaagagtactctttactttgtaatcatatacaatgtcaactttttagatgtttcaccactcttttgcaaataaagcatcctttctgctc

SEQ ID NO: 313100 - DNA, 1724 bp, Artificial Sequence
  derived and/or modified sequence
tctgggggcagggccacagtgaaactgccaggagcaaaaaggcttccaagaaaaagtaccacatcagattggaaactggggacagatcattcctgggatgtgacgggcaccagaatgctccctctccaaaggatctaaggaccaaagctgacagtttctttacttgcaggtagctgacagcatctactcctgaagaccggaaacatggcttgtaccatccaaaaggcagaagcacttgacggggctcatttgatgcagatcctctggtatgatgaggaagagtctctctacccagctgtatggttgagagacaactgtccgtgctctgattgctacctggattccgcaaaagcacggaaacttctagtggaagctcttgatgtgaacattggaattaaaggcttgatatttgacagaaaaaaggtgtacatcacatggcccgatgagcattacagtgaattccaggctgattggctgaagaaaagatgcttttccaagcaggccagagcaaagctccaaagagaattgttttttccagaatgccaatactggggctcagagctccagctacccactttggattttgaagatgttttaagatatgatgaacacgcatacaagtggctctccaccctcaagaaagtaggcatagtaagactcaccggagcatctgacaaaccaggagaagtttcaaaacttgggaaaaggatgggtttcctctatctcacattttatggacatacttggcaagtgcaagacaaaatcgatgcaaacaatgtggcttacacaactgggaagctaagctttcacactgattatccagccctccatcatccacctggggttcagcttcttcactgcataaagcaaacagtcacagggggtgattcagaaattgtagatgggtttaatgtgtgccaaaaactaaagaaaaataatcctcaggcattccagattttgtcctctacctttgtggactttacagacattggagtggattactgtgatttttctgtacaatcaaaacataaaattatagagttagatgataaaggccaagtggttcgcatcaacttcaataacgcaactagggacacaatatttgatgtgcctgttgaaagagttcagcctttttatgctgctctgaaggagtttgttgacctcatgaacagcaaagaatccaagtttaccttcaagatgaatccaggtgatgtgattacttttgataactggcgcttacttcatggccgacgtagctatgaagcaggaactgagatatcccgccatctagaaggagcttatgctgactgggatgtggtcatgtcaaggcttcgtatcttaaggcagagggtggagaatggaaactgaagtcacctgtagataattttaataagattccaatgaccatattttgtgagatatggcacattattcacagaccatgatctttgtgatttacatataatttccttaacaatgaacatgtaacttctctcacaagagtactctttactttgtaatcatatacaatgtcaactttttagatgtttcaccactcttttgcaaataaagcatcctttctgctctgttgcatgcctgctctaatttcttttgcccatatatgagtatctccagaatgtctacaaatagtttttgtagcaaatgaaaatttcttcaaataagccttttgtttcaaataaaacttgtctcaaaacatgcttcta

SEQ ID NO: 313101 - DNA, 1725 bp, Artificial Sequence
  derived and/or modified sequence
gcagagaaaggagggcatcaagcttaggggaccaatccctgtctttctaccagtccctgataactactcaagctccctttaaagaggctcatattggaatactctgttgacaagtagataccacttcacctctgctagggtgagcgctggtagctcctccctgttaaatgcccatctcaatgcctctgccctaagtgagttgtgcaataaatgagctgtcactctgaacaggtgggaaagaagtgaactgcttgttcacttgctgctgttgccactgctggtacagaaatagaaggtaagacaggtagctgacagcatctactcctgaagaccggaaacatggcttgtaccatccaaaaggcagaagcacttgacggggctcatttgatgcagatcctctggtatgatgaggaagagtctctctacccagctgtatggttgagagacaactgtccgtgctctgattgctacctggattccgcaaaagcacggaaacttctagtggaagctcttgatgtgaacattggaattaaaggcttgatatttgacagaaaaaaggtgtacatcacatggcccgatgagcattacagtgaattccaggctgattggctgaagaaaagatgcttttccaagcaggccagagcaaagctccaaagagaattgttttttccagaatgccaatactggggctcagagctccagctacccactttggattttgaagatgttttaagatatgatgaacacgcatacaagtggctctccaccctcaagaaagtaggcatagtaagactcaccggagcatctgacaaaccaggagaagtttcaaaacttgggaaaaggatgggtttcctctatctcacattttatggacatacttggcaagtgcaagacaaaatcgatgcaaacaatgtggcttacacaactgggaagctaagctttcacactgattatccagccctccatcatccacctggggttcagcttcttcactgcataaagcaaacagtcacagggggtgattcagaaattgtagatgggtttaatgtgtgccaaaaactaaagaaaaataatcctcaggcattccagattttgtcctctacctttgtggactttacagacattggagtggattactgtgatttttctgtacaatcaaaacataaaattatagagttagatgataaaggccaagtggttcgcatcaacttcaataacgcaactagggacacaatatttgatgtgcctgttgaaagagttcagcctttttatgctgctctgaaggagtttgttgacctcatgaacagcaaagaatccaagtttaccttcaagatgaatccaggtgatgtgattacttttgataactggcgcttacttcatggccgacgtagctatgaagcaggaactgagatatcccgccatctagaaggagcttatgctgactgggatgtggtcatgtcaaggcttcgtatcttaaggcagagggtggagaatggaaactgaagtcacctgtagataattttaataagattccaatgaccatattttgtgagatatggcacattattcacagaccatgatctttgtgatttacatataatttccttaacaatgaacatgtaacttctctcacaagagtactctttactttgtaatcatatacaatgtcaactttttagatgtttcaccactcttttgcaaataaagcatcctttctgctctgtt

SEQ ID NO: 313102 - DNA, 703 bp, Artificial Sequence
  derived and/or modified sequence
gacaagtagataccacttcacctctgctagggtgagcgctggtagctcctccctgttaaatgcccatctcaatgcctctgccctaagtgagttgtgcaataaatgagctgtcactctgaacaggtgggaaagaagtgaactgcttgttcacttgctgctgttgccactgctggtacagaaatagaaggtaagacagcacaaaaaaacaaagacaaaaaacctccaagctcccttcagtagttgctacaccttcagattgagacatccttcctcatttacaaacctcagctgtgtctgggggcagggccacagtgaaactgccaggagcaaaaaggcttccaagaaaaagtaccacatcagattggaaactggggacagatcattcctgggatgtgacgggcaccagaatgctccctctccaaaggatctaaggaccaaagctgacagtttctttacttgcaggtagctgacagcatctactcctgaagaccggaaacatggcttgtaccatccaaaaggcagaagcacttgacggggctcatttgatgcagatcctctggtatgatgaggaagagtctctctacccagctgtatggttgagagacaactgtccgtgctctgattgctacctggattccgcaaaagcacggaaacttctagtggaagctcttgatgtgaacattggaattaaaggcttgatatt

SEQ ID NO: 313103 - DNA, 1164 bp, Artificial Sequence
  derived and/or modified sequence
atggcctgcaccatccagaaggccgaggccctggacggcgcccacctgatgcagatcctgtggtacgacgaggaggagagcctgtaccccgccgtgtggctgagagacaactgcccctgcagcgactgctacctggacagcgccaaggccagaaagctgctggtggaggccctggacgtgaacatcggcatcaagggcctgatcttcgacagaaagaaggtgtacatcacctggcccgacgagcactacagcgagttccaggccgactggctgaagaagagatgcttcagcaagcaggccagagccaagctgcagagagagctgttcttccccgagtgccagtactggggcagcgagctgcagctgcccaccctggacttcgaggacgtgctgagatacgacgagcacgcctacaagtggctgagcaccctgaagaaggtgggcatcgtgagactgaccggcgccagcgacaagcccggcgaggtgagcaagctgggcaagagaatgggcttcctgtacctgaccttctacggccacacctggcaggtgcaggacaagatcgacgccaacaacgtggcctacaccaccggcaagctgagcttccacaccgactaccccgccctgcaccacccccccggcgtgcagctgctgcactgcatcaagcagaccgtgaccggcggcgacagcgagatcgtggacggcttcaacgtgtgccagaagctgaagaagaacaacccccaggccttccagatcctgagcagcaccttcgtggacttcaccgacatcggcgtggactactgcgacttcagcgtgcagagcaagcacaagatcatcgagctggacgacaagggccaggtggtgagaatcaacttcaacaacgccaccagagacaccatcttcgacgtgcccgtggagagagtgcagcccttctacgccgccctgaaggagttcgtggacctgatgaacagcaaggagagcaagttcaccttcaagatgaaccccggcgacgtgatcaccttcgacaactggagactgctgcacggcagaagaagctacgaggccggcaccgagatcagcagacacctggagggcgcctacgccgactgggacgtggtgatgagcagactgagaatcctgagacagagagtggagaacggcaactag

SEQ ID NO: 313104 - DNA, 207 bp, Artificial Sequence
  derived and/or modified sequence
atggcctgcaccatccagaaggccgaggccctggacggcgcccacctgatgcagatcctgtggtacgacgaggaggagagcctgtaccccgccgtgtggctgagagacaactgcccctgcagcgactgctacctggacagcgccaaggccagaaagctgctggtggaggccctggacgtgaacatcggcatcaagggcctgatctag

SEQ ID NO: 313105 - protein, 475 aa, Artificial Sequence
  derived and/or modified sequence
MAGRPHPYDGNSSDPENWDRKLHSRPRKLYKHSSTSSRIAKGGVDHTKMSLHGASGGHERSRDRRRSSDRSRDSSHERTESQLTPCIRNVTSPTRQHHVEREKDHSSSRPSSPRPQKASPNGSISSAGNSSRNSSQSSSDGSCKTAGEMVFVYENAKEGARNIRTSERVTLIVDNTRFVVDPSIFTAQPNTMLGRMFGSGREHNFTRPNEKGEYEVAEGIGSTVFRAILDYYKTGIIRCPDGISIPELREACDYLCISFEYSTIKCRDLSALMHELSNDGARRQFEFYLEEMILPLMVASAQSGERECHIVVLTDDDVVDWDEEYPPQMGEEYSQIIYSTKLYRFFKYIENRDVAKSVLKERGLKKIRLGIEGYPTYKEKVKKRPGGRPEVIYNYVQRPFIRMSWEKEEGKSRHVDFQCVKSKSITNLAAAAADIPQDQLVVMHPTPQVDELDILPIHPPSGNSDLDPDAQNPML

SEQ ID NO: 313106 - protein, 64 aa, Artificial Sequence
  derived and/or modified sequence
MAGRPHPYDGNSSDPENWDRKLHSRPRKLYKHSSTSSRIAKGGVDHTKMSLHGASGGHERSRDR

SEQ ID NO: 313107 - protein, 66 aa, Artificial Sequence
  derived and/or modified sequence
MAGRPHPYDGNSSDPENWDRKLHSRPRKLYKHSSTSSRIAKGGVDHTKMSLHGASGGHERSRDRRR

SEQ ID NO: 313108 - DNA, 1428 bp, Artificial Sequence
  derived and/or modified sequence
atggcaggcagaccacacccttacgacggaaattctagtgacccggaaaactgggaccgcaaactccactctcgcccgcggaaactgtataaacactcatcgactagcagccggatcgcgaaaggaggagtggatcataccaaaatgtccctgcacggggccagtggtggccacgaacggagccgggacagaaggcggagtagtgatcgctcccgggactcatcccacgaaaggacagagagtcagctcactccttgcatcaggaatgtgacatctccgacaagacagcatcacgtggagcgcgaaaaggaccactctagctctagaccgtccagcccccgtccacagaaggcatcaccaaatggctccattagctccgcgggaaatagttcccgcaatagctcacagtcctcctccgatggttcttgcaagaccgcaggtgagatggtctttgtttacgaaaatgctaaagagggagcccgtaacatcagaacaagtgagagagttacactgatagttgataatacccggtttgtcgtcgatccatctatctttacagctcagcctaacaccatgctggggcgcatgtttgggtcaggtcgcgagcataacttcacacgccccaacgagaaaggagaatacgaggtggctgaaggaataggaagcacagtctttagagcgattctggattattataagactggtattatccgatgtcccgacggcattagcatccccgaactgcgagaagcttgtgactatctatgtatctcctttgagtattctacaataaaatgtcgggacctgagcgctctcatgcatgaactgagcaatgatggcgcaagacggcagtttgaattttatctggaggaaatgattttgccgctcatggtggccagcgcccagtcgggagagcgggaatgccacatcgtcgtgctaactgacgatgatgtagtcgattgggacgaagaatatcccccacagatgggcgaggaatatagccaaattatttatagcacgaagctgtacagatttttcaagtatatagagaatcgtgatgttgccaaatcagtgttgaaagagcggggtctcaaaaagatacggctaggaatcgaaggatatcctacatacaaggagaaagtgaagaaacgtcccgggggtcgaccggaagtaatctacaattatgtgcagagacccttcatacgaatgtcgtgggaaaaggaagagggcaaaagcagacacgtggactttcagtgcgtgaagagcaagtcaatcacaaatttagccgccgcagccgccgatattccccaggatcagctagtggttatgcatcctaccccgcaggtggacgagttggatatcctgccaattcacccaccctctggcaatagcgacctggacccggatgcccagaatcctatgctctag

SEQ ID NO: 313109 - DNA, 195 bp, Artificial Sequence
  derived and/or modified sequence
atggccgggcggccacacccctatgatggtaattcctccgatcccgaaaattgggatagaaagcttcactccaggccaaggaagttgtataagcactcatcaacgtcatcccgcatagcgaagggcggggtggatcatactaagatgtccctgcatggcgctagcgggggacacgagcgaagcagggaccgttag

SEQ ID NO: 313110 - DNA, 201 bp, Artificial Sequence
  derived and/or modified sequence
atggcaggacgcccccacccatacgacgggaactctagcgaccccgagaattgggatcggaagctacactcgagacctcgaaagctctacaaacatagtagcactagttcccggattgctaagggaggtgtggatcacaccaaaatgtctttgcatggagcctccggaggacacgaacgctcgagggatcgcaggcggtag

SEQ ID NO: 313111 - DNA, 1428 bp, Artificial Sequence
  derived and/or modified sequence
atggccggccggccccacccctatgatggcaacagcagtgaccctgagaactgggacaggaagctgcacagccggcccaggaagctgtacaagcacagcagcaccagcagcagaattgccaagggcggcgtggaccacaccaagatgagcctgcacggggccagcggcggccacgagaggagccgggacagaagaagaagcagtgacaggagccgggacagcagccatgagaggacagagagccagctgaccccctgcatcagaaatgtgaccagccccacccggcagcaccacgtggagcgggagaaggaccacagcagcagccggcccagcagcccccggccccagaaggccagccccaacggcagcatcagcagcgctggcaacagcagcaggaacagcagccagagcagcagtgatggcagctgcaagacagctggggagatggtgtttgtgtatgaaaatgccaaggagggcgccaggaacatccgcaccagcgagcgggtgaccctcatcgtggacaacaccaggtttgtggtggaccccagcatcttcaccgcccagcccaacaccatgctgggccgcatgtttggaagtggccgggagcacaacttcacccggcccaatgaaaaaggagaatatgaggtggccgagggcatcggcagcacagtgttccgggccatcctggactactacaagacaggcatcatccgctgcccagatggcatcagcatccctgagctgcgggaggcctgtgactacctgtgcatcagctttgagtacagcaccatcaagtgccgggacctgagcgccctgatgcatgagctgagcaatgatggagcccggcggcagtttgagttctacctggaggagatgatcctgcccctgatggtggccagcgcccagagcggggagcgggagtgccacatcgtggtgctgacagatgatgatgtggtggactgggatgaggagtacccaccccagatgggagaggagtacagccagatcatctacagcaccaagctgtaccgcttcttcaagtacatcgagaacagagatgtggccaagtctgtgctgaaggagcggggcctgaagaagatccggctgggcatcgagggctaccccacctacaaggagaaggtgaagaagaggcctgggggccggcctgaggtgatctacaactacgtgcagaggcccttcatccgcatgtcctgggagaaggaggagggcaagagccgccacgtggacttccagtgtgtgaagagcaagagcatcaccaacctggccgctgctgctgctgacatcccccaggaccagctggtggtgatgcaccccaccccccaggtggatgagctggacatcctgcccatccaccccccatctggcaacagcgacctggaccctgatgcccagaaccccatgctgtag

SEQ ID NO: 313112 - DNA, 195 bp, Artificial Sequence
  derived and/or modified sequence
atggccggccggccccacccctatgatggcaacagcagtgaccctgagaactgggacaggaagctgcacagccggcccaggaagctgtacaagcacagcagcaccagcagcagaattgccaagggcggcgtggaccacaccaagatgagcctgcacggggccagcggcggccacgagaggagccgggacagatag

SEQ ID NO: 313113 - DNA, 201 bp, Artificial Sequence
  derived and/or modified sequence
atggccggccggccccacccctatgatggcaacagcagtgaccctgagaactgggacaggaagctgcacagccggcccaggaagctgtacaagcacagcagcaccagcagcagaattgccaagggcggcgtggaccacaccaagatgagcctgcacggggccagcggcggccacgagaggagccgggacagaagaagatag

SEQ ID NO: 313114 - DNA, 1428 bp, Artificial Sequence
  derived and/or modified sequence
atggccggccggccccacccctacgacggcaacagcagcgaccccgagaactgggacaggaagctgcacagcaggccccgcaaattgtataaacacagttcgaccagttcccgcattgctaaagggggagtcgatcacacgaaaatgtcactgcacggcgcctcgggtggccatgagagatccagggaccgtaggcggtcctcagatcgcagcagggatagctcacacgagcggacggagtctcagctcaccccctgcatccgcaatgtcacttctcccacgagacaacaccatgtcgagcgtgagaaggatcattcaagctcacggccctcgagtccacgcccacaaaaggcatcacctaatggaagtatatccagcgctggtaacagttccagaaattccagtcagtcgagttcagatggcagctgtaagaccgccggggaaatggtgttcgtttacgaaaacgcaaaggaaggcgctcggaacataaggacgtcagagcgggtgaccctaatcgtggacaatacaagattcgtagtagacccaagtattttcacagcccagcccaatacaatgctcggacggatgtttgggtcagggcgtgagcacaattttacacgtccgaatgagaagggtgagtacgaagtggcagaagggattggctccactgtgtttcgagcaatcctcgattattacaagactggaatcattagatgccccgatggtattagtataccagaactccgggaggcctgcgattatctttgtatatcgttcgagtatagcactatcaagtgcagggatcttagcgccctcatgcacgagttatccaatgatggagccaggagacagttcgagttttatctcgaagagatgatcttgcctctgatggttgcctcagcccagagtggggagagggagtgccacatcgtggtgcttacggacgatgacgtcgtggactgggacgaggagtaccccccccaaatgggagaggaatattctcaaatcatatactccaccaagctatatcgattttttaagtacatagagaacagagatgtggctaaatcggtactgaaagagagaggcctcaaaaaaattcggctgggcatcgagggatacccaacatacaaagagaaagttaagaagcggcctggaggtcggccggaagttatatacaactatgttcagcgcccattcattcgcatgtcctgggagaaagaggaggggaagagtcgacatgtagactttcagtgtgtcaagagtaagagcatcacaaatctcgccgccgccgctgccgatattccacaggaccagcttgttgtgatgcaccccactccacaggtggacgagctggatatcctccctatccaccccccctccgggaactctgatctggacccagatgcgcagaatcccatgctttag

SEQ ID NO: 313115 - DNA, 195 bp, Artificial Sequence
  derived and/or modified sequence
atggccggccggccccacccctacgacggcaacagcagcgaccccgaaaactgggaccggaagctgcattccagaccacgcaaactgtacaaacacagtagtaccagcagccggatcgcaaaaggaggcgtcgatcatactaaaatgtctctgcacggcgcgagtggggggcacgagcgttcaagagatcggtag

SEQ ID NO: 313116 - DNA, 201 bp, Artificial Sequence
  derived and/or modified sequence
atggccggccggccccacccctacgacggcaacagcagcgaccccgagaattgggatcgcaaattgcacagcaggccccgtaaattatataagcattcctcaaccagttcaaggatcgcgaaggggggagtcgatcacacaaaaatgagtctgcatggagcaagcggcggtcacgagcggagcagagataggcgacgctag

SEQ ID NO: 313117 - DNA, 1428 bp, Artificial Sequence
  derived and/or modified sequence
atggccggtaggccccatccctacgacggcaattccagcgaccccgaaaattgggatcgaaaactgcattctcgacccagaaagctgtataagcactccagcacaagcagcagaattgctaaaggcggagttgaccatacgaagatgtcattgcacggcgcttccggcggtcacgagcggtctcgggaccgcagacgcagttctgatagatctcgcgactcatcccatgagcgaacggagtcccagctgaccccctgtatccggaatgttacatcaccaacacggcaacaccatgtcgagagagagaaagatcactcgagtagtaggccttcttctccccgtccccagaaggccagtcctaacgggtcgatctcttccgcgggtaactcaagccggaatagcagccagtccagttccgacggtagttgtaaaacagccggtgagatggtgtttgtctacgagaacgcaaaggagggggctcgcaacatcaggaccagcgaaagagtgacattgatcgttgataacaccagatttgtcgtcgacccgtccatcttcacagctcaacccaacacaatgctgggtaggatgttcggcagcgggcgtgagcataatttcacccgccctaatgaaaagggtgagtatgaagtggccgagggaattgggtccacagtctttcgggctatacttgattattataagactgggattattcgatgcccggatggcatcagtataccggagctgagagaggcctgtgactatctgtgcatcagcttcgaatactctaccattaagtgtcgtgatctgtccgccctgatgcacgagctctctaatgacggcgcacggagacagtttgaattttacctcgaagaaatgattctgcctctgatggtcgcttcagcccagagcggtgaaagagaatgccatatagtggtgctgacggatgatgacgtggtcgactgggatgaggaataccctccccagatgggagaggagtattcccagattatatattctacaaaactgtatcggttttttaaatacatcgaaaatcgcgatgtggccaagtccgtgctgaaagagcgtggcctgaagaagattcgtctggggatagaaggctatcccacttataaggaaaaggttaaaaaacgaccgggagggagacccgaggtaatctataactacgttcagcgtccttttattcggatgagctgggagaaggaggaggggaagtcacgacatgtagattttcagtgcgtgaaatctaagtccataacgaacctagccgctgcagccgctgatattcctcaagaccaacttgtagtcatgcaccctactcctcaggtcgacgagctggacatactgccaattcacccaccgtcaggtaatagcgacctggacccggacgcccagaaccccatgctttag

SEQ ID NO: 313118 - DNA, 195 bp, Artificial Sequence
  derived and/or modified sequence
atggcaggcaggccccatccatacgacggtaattccagcgatcccgaaaattgggaccgaaaactccattcgaggcctaggaagctgtacaagcattcaagcaccagctcaagaatcgcgaaagggggagtcgaccatacaaagatgagcctgcatggcgctagcggcggtcacgaacgttctcgcgaccggtag

SEQ ID NO: 313119 - DNA, 201 bp, Artificial Sequence
  derived and/or modified sequence
atggctggcagacctcacccttacgacggcaactctagtgatcctgaaaactgggaccgcaagcttcatagtcgtccgaggaagctatataagcactccagcaccagctcccggatcgctaaagggggtgtggaccacactaagatgagtctgcatggggcatcaggtggtcacgagagaagtcgtgatcgaaggagatag

SEQ ID NO: 313120 - DNA, 2504 bp, Artificial Sequence
  derived and/or modified sequence
tctcgcggtaagaggctgaggagccggcctgcaacctgccggggcggctccgctacgcgcagccgcctcagtggcttcctccacagccacctccggagggatctggctgaggaggaagtggaggtgtcactggccccggcctttgccccaatcttgtgtgggcactgaagggggactacaggttcgagagttatgggtgctacatgtgtgctttcagagcagtagtgtgaggaagcttggagtgggatggcaggacggcctcatccctatgatggtaactccagtgatccagagaattgggatcggaaattgcatagtagacctcgtaaactttataaacattcaagtacttcctcgcgtattgctaaaggaggagttgaccacaccaaaatgagtctacatggtgctagtgggggacatgagagatcaagagatagacgaaggtcaagtgacagatcacgagattcatctcatgaaagaacggagtctcagctcactccttgtattagaaatgtgacttctccaacacgacagcaccatgttgaacgagaaaaagatcacagttcctctcgtccaagcagtccgcgtcctcaaaaagcatccccaaatggttccattagcagtgctgggaacagcagcagaaacagtagtcagtcaagttcagatggtagctgtaagacagctggggagatggtgtttgtatatgaaaatgcaaaagaaggagctcggaatataagaacgtcagaacgagtgacactaatagtggataacactagatttgttgtagacccatccatttttactgcacagccaaatacaatgttgggcaggatgtttggatctggccgagaacataactttacacgacccaatgagaaaggagagtatgaggtggcagagggaattggttccactgtgtttcgagcgattctggattactataaaacaggaataatccgttgtcctgatggcatatctattcctgaactgagagaagcatgtgactatctttgtatctcttttgaatatagcactattaaatgtagagatctcagtgccctaatgcatgagttatcaaatgatggtgctcgtagacaatttgaattttatctggaagaaatgatcctccctctcatggtagctagtgcccagagtggggaacgggaatgtcatatagtggtgcttacagatgatgatgtggttgattgggatgaagaatatccaccacagatgggagaagaatattcacaaattatttatagcacaaaattatatagatttttcaagtatattgaaaacagagatgtggccaagtcagttttgaaggagaggggtcttaagaagattagattgggaatagaaggttatcctacctacaaagaaaaagtaaagaaaaggcctggaggccgcccagaagtgatctacaactatgtccaaagaccctttattcgaatgtcctgggagaaggaagaaggaaagagtcggcatgtagactttcagtgtgtaaagagtaaatctatcaccaatcttgcagcagctgcagcagacattccccaggaccagctggtagtcatgcatccaactccacaagtggatgagctggatattctccctatccatcccccttctggcaacagtgacctcgatcctgatgcacagaatccaatgctgtgatgctgatcttccttgaaaccatagcatgctactcttcacagtgacgttgtactctcctcattctgcactgcaaggccactcttcttcattgtgagatgcacataacaatgtttaggatattgcagtgtaggcttttttaaagaccaaaggtagctgaatggtttttttttaaatgagtacaactctagcattttgaagttccagttgtaaatgtatttgtttaccagtaggtttgtgaaattggttctttgtatgggggatggtcctttttcacacagctaggtcttttcagaagtggtggaaattggcagctggggtactttcagtttggactgatattcatcacacctcagataaaatgcagagtaatatatagttgcactttataaatggtggttaaatggaaatgttcaagccattttatagttgtgatgcacaatataatttaagtgcttctgtcaaagtattcctccagtacaatttgtatagtttgctgcccttgatgagcaaaaagtatttatcttgggcttatctgaatgatcaggatgagatttaatgcccatatcttaccagttcagttatctccagagccatttcaccctttagagtgagtcacatgcagggagtgtgaatgtcagaggtggtttattatccagtctgccttacccttaatctgttcacagatatttatttactaatgctttttttttcttaagagttatgggataggaaaatgaagtgtttgctcttcatttactaaatgattgtaaacttgagtttttcatcaaaataaaattccattgttttaatgtttctgaccaaatttataa

SEQ ID NO: 313121 - DNA, 508 bp, Artificial Sequence
  derived and/or modified sequence
gatctggctgaggaggaagtggaggtgtcactggccccggcctttgccccaatcttgtgtgggcactgaagggggactacagggcagaggaaccccgtgccccgcccctttcctgtcatctcagacgaacgcagcgacatcctgaggaaggcgcatcacaataggggataaggtggtgggcagcctccctctgggtgaagaggagtgagaccccactaacgtgctgcgtggttttatgttgtaaccattttacgtgtggttatgggtgctacatgtgtgctttcagagcagtagtgtgaggaagcttggagtgggatggcaggacggcctcatccctatgatggtaactccagtgatccagagaattgggatcggaaattgcatagtagacctcgtaaactttataaacattcaagtacttcctcgcgtattgctaaaggaggagttgaccacaccaaaatgagtctacatggtgctagtgggggacatgagagatcaagagatagac

SEQ ID NO: 313122 - DNA, 616 bp, Artificial Sequence
  derived and/or modified sequence
gcggtaagaggctgaggagccggcctgcaacctgccggggcggctccgctacgcgcagccgcctcagtggcttcctccacagccacctccggagggatctggctgaggaggaagtggaggtgtcactggccccggcctttgccccaatcttgtgtgggcactgaagggggactacaggttcgagaggcagaggaaccccgtgccccgcccctttcctgtcatctcagacgaacgcagcgacatcctgaggaaggcgcatcacaataggggataaggtggtgggcagcctccctctgggtgaagaggagtgagaccccactaacgtgctgcgtggttttatgttgtaaccattttacgtgtggttatgggtgctacatgtgtgctttcagagcagtagtgtgaggaagcttggagtgggatggcaggacggcctcatccctatgatggtaactccagtgatccagagaattgggatcggaaattgcatagtagacctcgtaaactttataaacattcaagtacttcctcgcgtattgctaaaggaggagttgaccacaccaaaatgagtctacatggtgctagtgggggacatgagagatcaagagatagacgaagg

SEQ ID NO: 313123 - DNA, 1428 bp, Artificial Sequence
  derived and/or modified sequence
atggccggcagaccccacccctacgacggcaacagcagcgaccccgagaactgggacagaaagctgcacagcagacccagaaagctgtacaagcacagcagcaccagcagcagaatcgccaagggcggcgtggaccacaccaagatgagcctgcacggcgccagcggcggccacgagagaagcagagacagaagaagaagcagcgacagaagcagagacagcagccacgagagaaccgagagccagctgaccccctgcatcagaaacgtgaccagccccaccagacagcaccacgtggagagagagaaggaccacagcagcagcagacccagcagccccagaccccagaaggccagccccaacggcagcatcagcagcgccggcaacagcagcagaaacagcagccagagcagcagcgacggcagctgcaagaccgccggcgagatggtgttcgtgtacgagaacgccaaggagggcgccagaaacatcagaaccagcgagagagtgaccctgatcgtggacaacaccagattcgtggtggaccccagcatcttcaccgcccagcccaacaccatgctgggcagaatgttcggcagcggcagagagcacaacttcaccagacccaacgagaagggcgagtacgaggtggccgagggcatcggcagcaccgtgttcagagccatcctggactactacaagaccggcatcatcagatgccccgacggcatcagcatccccgagctgagagaggcctgcgactacctgtgcatcagcttcgagtacagcaccatcaagtgcagagacctgagcgccctgatgcacgagctgagcaacgacggcgccagaagacagttcgagttctacctggaggagatgatcctgcccctgatggtggccagcgcccagagcggcgagagagagtgccacatcgtggtgctgaccgacgacgacgtggtggactgggacgaggagtaccccccccagatgggcgaggagtacagccagatcatctacagcaccaagctgtacagattcttcaagtacatcgagaacagagacgtggccaagagcgtgctgaaggagagaggcctgaagaagatcagactgggcatcgagggctaccccacctacaaggagaaggtgaagaagagacccggcggcagacccgaggtgatctacaactacgtgcagagacccttcatcagaatgagctgggagaaggaggagggcaagagcagacacgtggacttccagtgcgtgaagagcaagagcatcaccaacctggccgccgccgccgccgacatcccccaggaccagctggtggtgatgcaccccaccccccaggtggacgagctggacatcctgcccatccacccccccagcggcaacagcgacctggaccccgacgcccagaaccccatgctgtag

SEQ ID NO: 313124 - DNA, 195 bp, Artificial Sequence
  derived and/or modified sequence
atggccggcagaccccacccctacgacggcaacagcagcgaccccgagaactgggacagaaagctgcacagcagacccagaaagctgtacaagcacagcagcaccagcagcagaatcgccaagggcggcgtggaccacaccaagatgagcctgcacggcgccagcggcggccacgagagaagcagagacagatag

SEQ ID NO: 313125 - DNA, 201 bp, Artificial Sequence
  derived and/or modified sequence
atggccggcagaccccacccctacgacggcaacagcagcgaccccgagaactgggacagaaagctgcacagcagacccagaaagctgtacaagcacagcagcaccagcagcagaatcgccaagggcggcgtggaccacaccaagatgagcctgcacggcgccagcggcggccacgagagaagcagagacagaagaagatag

SEQ ID NO: 313126 - protein, 385 aa, Artificial Sequence
  derived and/or modified sequence
MAAEPNKTEIQTLFKRLRAVPTNKACFDCGAKNPSWASITYGVFLCIDCSGVHRSLGVHLSFIRSTELDSNWNWFQLRCMQVGGNANALGAKKGLGAQKVSSQSFSEIERQAQVAEKLREQQAADAKKQAEESMVASMRLAYQELQIDRKKEEKKLQNLEGKKREQAERLGMGLVSRSSVSHSVLSEMQVIEQETPVSAKSSRSQLDLFDDVGTFASGPPKYKDNPFSLGESFGSRWDTDAAWGMDRVEEKEPEVTISSIRPISERATNRREVESRSSGLESSEARQKFAGAKAISSDMFFGREVDAEYEARSRLQQLSGSSAISSSDLFGDMDGAHGAGSVSLGNVLPTADIAQFKQGVKSVAGKMAVLANGVMNSLQDRYGSY

SEQ ID NO: 313127 - DNA, 400 bp, Artificial Sequence
  derived and/or modified sequence
ctgcacttgtggaggttcccattcctcccttccctcagttcctacccgccatctgcctcagaacaccacataatctcatcctaccctttacaccacaagacccccaggactcccaggcaatactctgctttaactcaggaaattttaacctggcatttggtaattgagatgttcacccttcctcaaaaggacttcagggctcccaccacctgtctgggccccacctgcatgcaggacctgggcagtagccatggggaagatctggaaggagaatgctccagaaaactggaccagaagctgccagagctccgtggagtgggtgatcctgccatgatctcctctgatacctcctacctgtcctctagaggaagaatgattaaatggttctgggattcagctg

SEQ ID NO: 313128 - protein, 18 aa, Artificial Sequence
  derived and/or modified sequence
MLQQELLSRTSLETQKLD

SEQ ID NO: 313129 - protein, 281 aa, Artificial Sequence
  derived and/or modified sequence
MEPRDGSPEARSSDSESASASSSGSERDAGPEPDKAPRRLNKRRFPGLRLFGHSKSKSPTCQKLSPKWCFLDATTASRFYRIDRAQEHLNYVTEIAQDEIYILDPELLGASARPDLPTPTSPLPTSPCSPTPRSLQGDAAPPQGEELIEAAKRNDFCKLQELHRAGGDLMHRDEQSRTLLHHAVSTGSKDVVRYLLDHAPPEILDAVEENGETCLHQAAALGQRTICHYIVEAGASLMKTDQQGDTPRQRAEKAQDTELAAYLENRQHYQMIQREDQETAV

SEQ ID NO: 313130 - DNA, 846 bp, Artificial Sequence
  derived and/or modified sequence
atggagcccagagacggcagccccgaggccagaagcagcgacagcgagagcgccagcgccagcagcagcggcagcgagagagacgccggccccgagcccgacaaggcccccagaagactgaacaagagaagattccccggcctgagactgttcggccacagcaagagcaagagccccacctgccagaagctgagccccaagtggtgcttcctggacgccaccaccgccagcagattctacagaatcgacagagcccaggagcacctgaactacgtgaccgagatcgcccaggacgagatctacatcctggaccccgagctgctgggcgccagcgccagacccgacctgcccacccccaccagccccctgcccaccagcccctgcagccccacccccagaagcctgcagggcgacgccgcccccccccagggcgaggagctgatcgaggccgccaagagaaacgacttctgcaagctgcaggagctgcacagagccggcggcgacctgatgcacagagacgagcagagcagaaccctgctgcaccacgccgtgagcaccggcagcaaggacgtggtgagatacctgctggaccacgccccccccgagatcctggacgccgtggaggagaacggcgagacctgcctgcaccaggccgccgccctgggccagagaaccatctgccactacatcgtggaggccggcgccagcctgatgaagaccgaccagcagggcgacacccccagacagagagccgagaaggcccaggacaccgagctggccgcctacctggagaacagacagcactaccagatgatccagagagaggaccaggagaccgccgtgtag

SEQ ID NO: 313131 - DNA, 1707 bp, Artificial Sequence
  derived and/or modified sequence
ggcggcgggcaggcagcggcccggccagctatgcggggtcctgcggccgcggctggcggcacttcctggagcggcggcggcagcggcttcccgggcacctgggcgtggggagcgggggcgcgcggcgcggggcgggcggagcgagcgcgcgccatggaggtggcgggcggcgcggagcgggcgtgctgagccccggccgccggcccggcatgggcgtctcccgcgggccctccgccggccggggctagggccggatggagccgcgggacggtagccccgaggcccggagcagcgactccgagtcggcttccgcctcgtccagcggctccgagcgcgacgccggtcccgagccggacaaggcgccgcggcgactcaacaagcggcgcttcccggggctgcggctcttcgggcacagtaaatccaagtccccgacatgccagaaactgtcccccaagtggtgcttcctggacgccaccactgccagccgcttctacaggatcgaccgagcccaggagcacctcaactatgtgactgagatcgcacaggatgagatttatatcctggaccctgagctgctgggggcatcggcccggcctgacctcccaacccccacttcccctctccccacctcaccctgctcacccacgccccggtcactgcaaggggatgctgcaccccctcaaggtgaagagctgattgaggctgccaagaggaacgacttctgtaagctccaggagctgcaccgagctgggggcgacctcatgcaccgagacgagcagagtcgcacgctcctgcaccacgcagtcagcactggcagcaaggatgtggtccgctacctgctggaccacgcccccccagagatccttgatgcggtggaggaaaacggggagacctgtttgcaccaagcagcggccctgggccagcgcaccatctgccactacatcgtggaggccggggcctcgctcatgaagacagaccagcagggcgacactccccggcagcgggctgagaaggctcaggacaccgagctggccgcctacctggagaaccggcagcactaccagatgatccagcgggaggaccaggagacggctgtgtagcgggccgcccacgggcagcaggagggacaatgcggccaggggacgagcgccttccttgcccacctcactgccacattccagtgggacggccacggggggacctaggccccagggaaagagccccatgccgccccctaaggagccgcccagacctagggctggactcaggagctgggggggcctcacctgttcccctgaggaccccgccggacccggaggctcacagggaacaagacacggctgggttggatatgcctttgccggggttctggggcagggcgctccctggccgcagcagatgccctcccaggagtggaggggctggagagggggaggccttcgggaagaggcttcctgggccccctggtcttcggccgggtccccagcccccgctcctgccccaccccacctcctccgggcttcctcccggaaactcagcgcctgctgcacttgcctgccctgccttgcttggcacccgctccggcgaccctccccgctcccctgtcatttcatcgcggactgtgcggcctgggggtggggggcgggactctcacggtgacatgtttacagctgggtgtgactcagtaaagtggatttttttttcttt

SEQ ID NO: 313132 - DNA, 846 bp, Artificial Sequence
  derived and/or modified sequence
atggaacctagagatgggtctccggaggctcggtcatccgacagtgaatccgctagtgcctccagtagtggatccgagagagacgccggacctgaaccagataaggccccacgcaggctgaataagcgccgcttccctgggctcagactctttgggcactcgaagagtaagtcacctacttgccagaaactgtctcccaagtggtgcttcctagacgccacgacagcgagtcgtttctaccggattgatagggcccaggaacatctcaactacgtcactgagatagctcaagatgagatatatatcctcgaccctgagctgctcggcgcctcagctcgccctgacctcccgacgccgacctcaccgttgccgaccagcccttgtagcccaacgccccgctctctccagggggacgccgctccgccccagggcgaggagctcatagaagctgccaagcgaaacgatttctgcaagctacaggaactgcatcgcgccggcggggacctcatgcaccgggatgagcagtcacgcactctactccaccacgctgtgtctaccggtagtaaggacgtcgtaaggtatcttctggatcacgcacccccagaaattctagatgctgtggaggaaaatggagagacctgcctccaccaggctgccgccctgggacaacgaaccatttgccactacattgtggaggccggggcgagtcttatgaaaactgaccagcagggggatacaccgaggcagagagccgagaaggctcaggatacagagctggcagcctaccttgaaaataggcagcactaccagatgattcaaagggaagatcaagagactgctgtctag

SEQ ID NO: 313133 - DNA, 846 bp, Artificial Sequence
  derived and/or modified sequence
atggagcccagagatggcagccctgaggcccggagcagtgacagcgagagcgccagcgccagcagcagcggcagcgagagagatgctggccctgagccagacaaggccccccggcggctgaacaagaggcgcttccctggcctgcggctgtttggccacagcaagagcaagagccccacctgccagaagctgagccccaagtggtgcttcctggatgccaccacagccagccgcttctacagaattgaccgggcccaggagcacctgaactacgtgacagaaattgcccaggatgagatctacatcctggaccctgagctgctgggcgccagcgcccggccagacctgcccacccccaccagccccctgcccaccagcccctgcagccccacccccaggagcctgcagggagatgctgccccaccccagggcgaggagctgattgaggccgccaagagaaatgacttctgcaagctgcaggagctgcacagagctggaggagacctgatgcacagagatgagcagagcaggaccctgctgcaccacgctgtgtccacaggcagcaaggatgtggtgcgctacctgctggaccacgcccctcctgagatcctggatgctgtggaggagaatggagagacctgcctgcaccaggccgccgccctgggccagaggaccatctgccactacatcgtggaggccggggccagcctgatgaagacagaccagcagggcgacaccccccggcagagagctgagaaggcccaggacacagagctggccgcctacctggagaaccggcagcactaccagatgatccagcgggaggaccaggagacagctgtgtag

SEQ ID NO: 313134 - DNA, 846 bp, Artificial Sequence
  derived and/or modified sequence
atggagccccgggacggcagccccgaggcccggagcagcgacagcgaaagcgcatccgcatcgagttctgggtcagagcgggacgcgggccctgagcccgacaaggctccacgccggctgaacaaaaggcgattccccgggcttcgcctctttgggcactcaaagagcaagagccccacatgccagaaactttccccgaagtggtgctttctcgatgcaaccacagcctcaaggttctaccgaatcgatcgggctcaggagcacctcaattacgttactgagatagcccaggatgaaatatacattcttgacccagagcttctgggcgcatccgctcggcccgacttgcccaccccgaccagtcctctgccaaccagcccctgcagcccaactccgcggtctctccagggagatgccgccccccctcagggagaagagcttattgaggctgctaagagaaatgacttctgtaaactccaggaactgcaccgggcggggggggatctcatgcatagggacgaacagtcaagaacactgcttcaccatgcggtgagcactggttctaaggatgtggtgcgatacctcttggatcacgcgccccctgaaatcctcgatgccgtggaggaaaacggtgaaacatgtctccaccaagccgctgcactgggtcagcgaaccatttgtcactacatcgtggaagctggcgcatctctgatgaaaacagatcaacaaggagatactccaaggcagagggcagagaaggctcaggatacagagcttgcggcctacctcgagaacaggcagcactaccaaatgatacaacgcgaggaccaggagaccgctgtttag

SEQ ID NO: 313135 - DNA, 846 bp, Artificial Sequence
  derived and/or modified sequence
atggagcctcgagacggttcccccgaggccaggagcagcgattcagagtccgctagtgcctctagctctggctctgagcgggacgctggaccagagcctgataaagcacccagacgcttaaacaagaggaggtttccagggctcaggctcttcgggcacagcaagtcaaagagtcccacttgtcaaaaactttcccctaagtggtgcttcctcgatgctaccacagcttcccgcttttatcggatcgaccgggctcaagagcatctcaattacgtcactgagatcgcccaagatgaaatttacatcttggaccccgagctgctcggggcttcggctcggccagacctccccacaccaacctctccacttccaactagcccttgtagtccgacacccaggagcctgcagggtgatgctgcaccccctcagggagaagagctcatagaagccgctaaaagaaatgatttttgcaagctacaggagttgcaccgagcgggaggggacttaatgcaccgggacgagcaatctcgcaccctcttgcatcatgccgtgtccacagggtcaaaggacgttgtgcggtatctcctggaccacgcgccaccggagatcctggatgcggtggaagaaaatggagagacctgtctgcatcaggcggcagcccttggtcagagaactatttgccactatatcgtggaggctggcgcaagccttatgaagacggaccagcaaggcgatactccacggcagagggccgaaaaagcgcaagataccgaactggctgcttatctggaaaatcgtcagcattaccagatgatccagagggaggaccaggaaaccgccgtctag

SEQ ID NO: 313136 - DNA, 822 bp, Artificial Sequence
  derived and/or modified sequence
gattccaggagtcgtggtgaccagggaggggagccgggccagcgggcggcaggagactaggggagctgagccatgggcttgggggagagcggggccgggagctcgaaggagaccagaagagcagggtcgggggctcgagggagacgaggagagcggggccgggggtttgggagagagacaaggagagcggggcggaggcttgggggagaccaggagtaaatcacaaaaatttactttggaaaccgtggcttctggcagaaacagatcagtgtcgggacaaagtacacgggcctggtgtgaaactaagccacaaacccatttaccctgtctgacctgcctccgccaccaggacccagtctcagtgaaatgggaaaggttcccttgtcctcctcgaagggcgtgcgatgaggatgtggctcacttcttcagtgccccgcttctcaagcctctaggggaacatacagacaggcaggctgaggggctcccaccccacggcagtgtctaggggtgaatgtttgcagctcctgaagccccagcaggcatgtgttagagggtgctctttcagtttagccttgtaggtggcttgtgttagtcagctgttagactccctgccttatcgcaaggacagagggctttctgtatccctaggtttcttgccttgatgtactggagcaatcagatcacacggcggcttggagaaacccagggaccatgggcgcctccaggctctataccctggtgctggtcctgcagcctcagcgagttctcctgggcatgaaaaagcgaggcttcggggccggccggtggaatggctttgggggc

SEQ ID NO: 313137 - protein, 209 aa, Artificial Sequence
  derived and/or modified sequence
MASGILVNVKEEVTCPICLELLTQPLSLDCGHSFCQACLTANHKKSMLDKGESSCPVCRISYQPENIRPNRHVANIVEKLREVKLSPEGQKVDHCARHGEKLLLFCQEDGKVICWLCERSQEHRGHHTFLTEEVAREYQVKLQAALEMLRQKQQEAEELEADIREEKASWKTQIQYDKTNVLADFEQLRDILDWEESNELQNLEKEEED

SEQ ID NO: 313138 - protein, 72 aa, Artificial Sequence
  derived and/or modified sequence
MASGILVNVKEEVTCPICLELLTQPLSLDCGHSFCQACLTANHKKSMLDKGESSCPVCRISYQPENIRPNRH

SEQ ID NO: 313139 - protein, 271 aa, Artificial Sequence
  derived and/or modified sequence
MASGILVNVKEEVTCPICLELLTQPLSLDCGHSFCQACLTANHKKSMLDKGESSCPVCRISYQPENIRPNRHVANIVEKLREVKLSPEGQKVDHCARHGEKLLLFCQEDGKVICWLCERSQEHRGHHTFLTEEVAREYQVKLQAALEMLRQKQQEAEELEADIREEKASWKTQIQYDKTNVLADFEQLRDILDWEESNELQNLEKEEEDILKSLTNSETEMVQQTQSLRELISDLEHRLQGSVMELLQDGERDLEEARNFSKKSKESVSSS

SEQ ID NO: 313140 - DNA, 816 bp, Artificial Sequence
  derived and/or modified sequence
atggccagcggcatcctggtgaacgtgaaggaggaggtgacctgccccatctgcctggagctgctgacccagcccctgagcctggactgcggccacagcttctgccaggcctgcctgaccgccaaccacaagaagagcatgctggacaagggcgagagcagctgccccgtgtgcagaatcagctaccagcccgagaacatcagacccaacagacacgtggccaacatcgtggagaagctgagagaggtgaagctgagccccgagggccagaaggtggaccactgcgccagacacggcgagaagctgctgctgttctgccaggaggacggcaaggtgatctgctggctgtgcgagagaagccaggagcacagaggccaccacaccttcctgaccgaggaggtggccagagagtaccaggtgaagctgcaggccgccctggagatgctgagacagaagcagcaggaggccgaggagctggaggccgacatcagagaggagaaggccagctggaagacccagatccagtacgacaagaccaacgtgctggccgacttcgagcagctgagagacatcctggactgggaggagagcaacgagctgcagaacctggagaaggaggaggaggacatcctgaagagcctgaccaacagcgagaccgagatggtgcagcagacccagagcctgagagagctgatcagcgacctggagcacagactgcagggcagcgtgatggagctgctgcaggacggcgagagagacctggaggaggccagaaacttcagcaagaagagcaaggagagcgtgagcagcagctag

SEQ ID NO: 313141 - DNA, 816 bp, Artificial Sequence
  derived and/or modified sequence
atggcttctggtatcctggttaacgttaaagaggaggttacttgcccaatctgtctggaactgctcacccagccgttgagtcttgactgtgggcactcattttgccaggcgtgccttaccgcaaatcataagaagtctatgcttgacaaaggagaatcctcgtgccccgtgtgcaggattagttaccagcccgaaaacataaggcccaatcgtcatgtggctaacatcgttgagaaactgagagaagtgaagcttagtccggagggccaaaaggtcgaccattgtgcaagacacggtgagaaattgctgcttttttgtcaggaggatggcaaggtgatttgttggttgtgcgagcggtcacaagaacaccggggtcaccacacgttccttacagaagaggtagcgcgcgaataccaagtaaagctgcaagctgctctagaaatgctccgccaaaagcagcaggaggctgaggaacttgaggctgacatccgggaggagaaggcctcctggaagacccaaatccagtatgacaagaccaatgtgttagctgacttcgagcagttacgggacattctcgactgggaggaatccaatgaattgcagaacttagagaaagaggaggaggatatcctgaagagcctgaccaacagtgagaccgaaatggtacagcaaacccagtcactacgcgaactgatttcagatctggaacatcgcctgcagggctctgtgatggaattactccaggacggcgagcgtgacctggaagaagcaaggaatttttctaaaaaatccaaggagtccgtttcctccagctag

SEQ ID NO: 313142 - DNA, 816 bp, Artificial Sequence
  derived and/or modified sequence
atggccagcggcatcctggtgaatgtgaaggaggaggtgacctgccccatctgcctggagctgctgacccagcccctgagcctggactgtggccacagcttctgccaggcctgcctgacagccaaccacaagaagtccatgctggacaagggggagagcagctgccctgtgtgccgcatctcctaccagcctgagaacatccggcccaacagacatgtggccaacatcgtggagaagctgcgggaggtgaagctgagccctgagggccagaaggtggaccactgtgcccggcacggggagaagctgctgctcttctgccaggaggatggcaaggtgatctgctggctgtgtgagaggagccaggagcaccggggccaccacaccttcctgacagaggaggtggcccgggagtaccaggtgaagctgcaggccgccctggagatgctgcggcagaagcagcaggaggccgaggagctggaggccgacatccgggaggagaaggcctcctggaagacccagatccagtatgacaagaccaacgtgctggccgactttgagcagctgcgggacatcctggactgggaggagagcaatgagctgcagaacctggagaaggaggaggaggacatcctgaagagcctgaccaacagcgagacagagatggtgcagcagacccagagcctgcgggagctgatcagtgacctggagcaccggctgcagggctctgtgatggagctgctgcaggatggagagcgggacctggaggaggccaggaacttcagcaagaagagcaaggagagcgtgagcagcagctag

SEQ ID NO: 313143 - DNA, 816 bp, Artificial Sequence
  derived and/or modified sequence
atggccagcggcatcctggtgaacgtgaaggaggaggtgacctgccctatctgtctcgaactactgacacagcccctctccttagattgcgggcactcattctgtcaggcatgtctcacagctaaccataagaaatctatgctggacaagggggaatcatcttgtccagtctgtcgcatcagttaccaacctgagaatattcgtccgaaccgacatgtagccaacattgtcgaaaaacttagagaagttaaactctcccctgaagggcagaaagtagatcattgtgcgagacacggtgagaaactgctcctcttttgccaggaagatggcaaagtgatttgctggctgtgcgaaaggtcccaggagcatcgaggccaccatacgtttctgacggaagaggttgcccgtgagtaccaggttaagctgcaggccgccctggagatgttgcgacagaagcagcaggaagcagaggaacttgaagcagacatccgagaagagaaagcatcttggaaaacgcagatacagtacgataagacaaatgttctggctgactttgagcaactgagagacatcctagactgggaggagtccaatgagctgcaaaacctggagaaagaggaagaggacattctgaagtccctcaccaactctgagactgagatggtgcagcaaacacagagcttacgtgagttgatctctgacctggagcaccggctgcaggggagcgtcatggagcttctgcaggatggggagcgagatctggaagaagctaggaactttagcaaaaagtctaaggaatccgtcagtagctcatag

SEQ ID NO: 313144 - DNA, 816 bp, Artificial Sequence
  derived and/or modified sequence
atggcttcaggcattcttgtgaatgtgaaagaagaggtgacttgccccatatgcttagaactcctaacacagcctctgtcgttggattgtggacactcattctgccaggcatgcctgacggccaatcacaaaaagtccatgctggataaaggagaatcatcatgcccagtgtgcagaatcagttatcaaccagaaaacattcgccctaaccggcacgttgctaatatcgttgaaaaactgagggaagtcaagctgtcaccagagggtcagaaagtagaccactgcgcaagacacggtgagaagctgctgctcttttgccaggaggatggcaaagttatttgctggttgtgtgagcgatctcaggagcacagaggacaccatacgtttttgactgaagaagttgcaagggagtaccaggtcaagctacaggctgcgctagagatgctcagacagaaacagcaggaggccgaagaacttgaggccgatattcgcgaagaaaaagcctcatggaagacacagatccagtatgataaaactaatgtgctggcggactttgagcagctacgggacatcctcgattgggaggaatctaacgaactgcagaacctggaaaaggaggaggaggatatcctcaagagtctaactaacagcgaaacagaaatggtccagcagactcagtcattaagggaactgatctcggacctggagcatagactccagggatccgtcatggaactactgcaggatggggagagagacctggaggaggccagaaattttagcaaaaagtcgaaggagtctgtctcttctagttag

SEQ ID NO: 313145 - DNA, 2759 bp, Artificial Sequence
  derived and/or modified sequence
gtgaacaagaggaacctcagcagccaggacaggcaggagcagtggaatagctactatggcttctggaatcctggttaatgtaaaggaggaggtgacctgccccatctgcctggaactcctgacacaacccctgagcctggactgcggccacagcttctgccaagcatgcctcactgcaaaccacaagaagtccatgctagacaaaggagagagtagctgccctgtgtgccggatcagttaccagcctgagaacatacggcctaatcggcatgtagccaacatagtggagaagctcagggaggtcaagttgagcccagaggggcagaaagttgatcattgtgcacgccatggagagaaacttctactcttctgtcaggaggacgggaaggtcatttgctggctttgtgagcggtctcaggagcaccgtggtcaccacacgttcctcacagaggaggttgcccgggagtaccaagtgaagctccaggcagctctggagatgctgaggcagaagcagcaggaagctgaagagttagaagctgacatcagagaagagaaagcttcctggaagactcaaatacagtatgacaaaaccaacgtcttggcagattttgagcaactgagagacatcctggactgggaggagagcaatgagctgcaaaacctggagaaggaggaggaagacattctgaaaagccttacgaactctgaaactgagatggtgcagcagacccagtccctgagagagctcatctcagatctggagcatcggctgcaggggtcagtgatggagctgcttcaggacggagaacgtgaccttgaagaagccagaaacttttccaaaaaatcaaaggagagtgtttcgagctcctgatctgaaaggaatgctagaagtgtttagagagctgacagatgtccgacgctactgggttgatgtgacagtggctccaaacaacatttcatgtgctgtcatttctgaagataagagacaagtgagctctccgaaaccacagataatatatggggcacgagggacaagataccagacatttgtgaatttcaattattgtactggcatcctgggctctcaaagtatcacatcagggaaacattactgggaggtagacgtgtccaagaaaactgcttggatcctgggggtatgtgctggcttccaacctgatgcaatgtgtaatattgaaaaaaatgaaaattatcaacctaaatacggctactgggttatagggttagaggaaggagttaaatgtagtgctttccaggatagttccttccatactccttctgttcctttcattgtgcccctctctgtgattatttgtcctgatcgtgttggagttttcctagactatgaggcttgcactgtctcattcttcaatatcacaaaccatggatttctcatctataagttttctcactgttctttttctcagcctgtatttccatatttaaatcctagaaaatgtggagtccccatgactctgtgctcaccaagctcttgaaccttcttacacactcagccccttctgtacagcacctcttgtccaggtgcatctcatacacctgaactcatttgcatcattttaaccatcttttccttgctgtctcccttctttctatttgaacgtccttcactcatcagtaaaatgtaataattgccttgtgccatattgtccccaatattttattgacatttgatagcaatttttttcatcattttccgtactcctaaggaaaactgacctatacctcataaaatgagaccgctatttaggtattacttctgccagatatttatcacccaattgcctctgacactgactaagaagatgaagaaaagcttttcaacagcctttctatatcatcgtgtgataattgttcaccaatgaatgagtccttagccctgtgtcagtttaccctcgatgcccttatttgtgagttaaagagaaaatatcataaatggtatactcttaagtatagaggttttgtatctagaggatctcagttcaactcctgtctctccatataccagcagtgtaactgtgaataacatacttaaatggctgtgcttatttccttttcttttcttttttctttttttttttttttgagatgaagttttgctcttgttccccaggctggagtgcaatggcacgatctcggttcactgcaacctccacctctcagattcaagcaattctcctgcctcagcctcccaagtagctgggattacaggtgcccaccaccacccctggctaaatttgtattttcagtagagacggggtttccccatgttggttaggctcgtctagaacctctgacctcaggtgatccacccgcctcggcctcccaaagtgctgggattacaggcgtgagccacggcgcccagcctgtgcttattttcttaaaataatttttgtattaaaaacttcacattaaataagtgctaatgttttattgcatagtagggtgactagagttaacaataacctattgcatatattttgaaatagctagaagagaggattttgaaagttctcaacacaaagaaatgacacatatttgaggtgatggatatgctaattaccctggttcggttattacgcaatgtatacatgtatcaaaacatcacactgtaccacataaatatgtatatttattatttgtcaattaaaagcaaaataaaacaaaaaaccttcatctaatactttggatcattgtgaaaaaataaattcctgaagtataaa

SEQ ID NO: 313146 - protein, 2417 aa, Artificial Sequence
  derived and/or modified sequence
MSVMLWRWEQNNTTMKLQIYTDWANHYLAKSGHKRLIRDLQQDVTDGVLLAQIIQVVANEKIEDINGCPKNRSQMIENIDACLNFLAAKGINIQGLSAEEIRNGNLKAILGLFFSLSRYKQQQQQPQKQHLSSPLPPAVSQVAGAPSQCQAGTPQQQVPVTPQAPCQPHQPAPHQQSKAQAEMQSSASSKDSSQSKIIRFTLGQKKISRLPGPTARVSAAGSEAKTRGGSTTANNRRSQSFNNYDKSKPVTSPPPPPSSHEKEPLASSASSHPGMSDNAPASLESGSSSTPTNCSTSSAIPQPGAATKPWRSKSLSVKHSATVSMLSVKPPGPEAPRPTPEAMKPAPNNQKSMLEKLKLFNSKGGSKAGEGPGSRDTSCERLETLPSFEESEELEAASRMLTTVGPASSSPKIALKGIAQRTFSRALTNKKSSLKGNEKEKEKQQREKDKEKSKDLAKRASVTERLDLKEEPKEDPSGAAVPEMPKKSSKIASFIPKGGKLNSAKKEPMAPSHSGIPKPGMKSMPGKSPSAPAPSKEGERSRSGKLSSGLPQQKPQLDGRHSSSSSSLASSEGKGPGGTTLNHSISSQTVSGSVGTTQTTGSNTVSVQLPQPQQQYNHPNTATVAPFLYRSQTDTEGNVTAESSSTGVSVEPSHFTKTGQPALEELTGEDPEARRLRTVKNIADLRQNLEETMSSLRGTQVTHSTLETTFDTNVTTEMSGRSILSLTGRPTPLSWRLGQSSPRLQAGDAPSMGNGYPPRANASRFINTESGRYVYSAPLRRQLASRGSSVCHVDVSDKAGDEMDLEGISMDAPGYMSDGDVLSKNIRTDDITSGYMTDGGLGLYTRRLNRLPDGMAVVRETLQRNTSLGLGDADSWDDSSSVSSGISDTIDNLSTDDINTSSSISSYANTPASSRKNLDVQTDAEKHSQVERNSLWSGDDVKKSDGGSDSGIKMEPGSKWRRNPSDVSDESDKSTSGKKNPVISQTGSWRRGMTAQVGITMPRTKPSAPAGALKTPGTGKTDDAKVSEKGRLSPKASQVKRSPSDAGRSSGDESKKPLPSSSRTPTANANSFGFKKQSGSAAGLAMITASGVTVTSRSATLGKIPKSSALVSRSAGRKSSMDGAQNQDDGYLALSSRTNLQYRSLPRPSKSNSRNGAGNRSSTSSIDSNISSKSAGLPVPKLREPSKTALGSSLPGLVNQTDKEKGISSDNESVASCNSVKVNPAAQPVSSPAQTSLQPGAKYPDVASPTLRRLFGGKPTKQVPIATAENMKNSVVISNPHATMTQQGNLDSPSGSGVLSSGSSSPLYSKNVDLNQSPLASSPSSAHSAPSNSLTWGTNASSSSAVSKDGLGFQSVSSLHTSCESIDISLSSGGVPSHNSSTGLIASSKDDSLTPFVRTNSVKTTLSESPLSSPAASPKFCRSTLPRKQDSDPHLDRNTLPKKGLRYTPTSQLRTQEDAKEWLRSHSAGGLQDTAANSPFSSGSSVTSPSGTRFNFSQLASPTTVTQMSLSNPTMLRTHSLSNADGQYDPYTDSRFRNSSMSLDEKSRTMSRSGSFRDGFEEESWEKSSVDNFVSRLHSSLHFSLPLFHHARYELVHGSSLSLVSSTSSVYSTPEEKCQSEIRKLRRELDASQEKVSALTTQLTANAHLVAAFEQSLGNMTIRLQSLTMTAEQKDSELNELRKTIELLKKQNAAAQAAINGVINTPELNCKGNGTAQSADLRIRRQHSSDSVSSINSATSHSSVGSNIESDSKKKKRKNWVNELRSSFKQAFGKKKSPKSASSHSDIEEMTDSSLPSSPKLPHNGSTGSTPLLRNSHSNSLISECMDSEAETVMQLRNELRDKEMKLTDIRLEALSSAHQLDQLREAMNRMQSEIEKLKAENDRLKSESQGSGCSRAPSQVSISASPRQSMGLSQHSLNLTESTSLDMLLDDTGECSARKEGGRHVKIVVSFQEEMKWKEDSRPHLFLIGCIGVSGKTKWDVLDGVVRRLFKEYIIHVDPVSQLGLNSDSVLGYSIGEIKRSNTSETPELLPCGYLVGENTTISVTVKGLAENSLDSLVFESLIPKPILQRYVSLLIEHRRIILSGPSGTGKTYLANRLSEYIVLREGRELTDGVIATFNVDHKSSKELRQYLSNLADQCNSENNAVDMPLVIILDNLHHVSSLGEIFNGLLNCKYHKCPYIIGTMNQATSSTPNLQLHHNFRWVLCANHTEPVKGFLGRFLRRKLMETEISGRVRNMELVKIIDWIPKVWHHLNRFLEAHSSSDVTIGPRLFLSCPIDVDGSRVWFTDLWNYSIIPYLLEAVREGLQLYGRRAPWEDPAKWVMDTYPWAASPQQHEWPPLLQLRPEDVGFDGYSMPREGSTSKQMPPSDAEGDPLMNMLMRLQEAANYSSPQSYDSDSNSNSHHDDILDSSLESTL

SEQ ID NO: 313147 - DNA, 7260 bp, Artificial Sequence
  derived and/or modified sequence
atggcaattgacctgtattgcggactagcctgtttgtggggcatccatgagcctagacaaatatacaccgactgggctaatcactacctggctaaatcaggccacaagcgactaatccgggatttacagcaggacgtaaccgatggagtactgctagcgcagatcattcaggtggtggcaaatgaaaagattgaggacataaacggctgccccaagaacaggagccagatgatagagaatattgacgcatgcttgaattttcttgccgccaagggtatcaatattcagggtctctccgctgaggagatccggaatggcaacctcaaagcgatcctcgggctctttttttccctgagccgatataagcagcagcagcagcaaccgcaaaaacaacacttgtcatccccccttcccccggcggtgagtcaagtcgcgggagcaccgagtcagtgtcaagcagggacacctcaacagcaagttcccgtgacaccacaggcaccgtgtcagcctcatcaaccagctccacatcagcagtccaaggctcaggccgaaatgcagagctctgcttcttccaaagacagtagccagtccaagattataagattcactctggggcagaagaaaatttcacggttaccaggccctacggctcgggtcagtgcagccggatccgaagcaaaaaccaggggtggctcgacaaccgcaaataatagacgctcgcaaagtttcaacaactacgacaagagcaagccagtgacctctcccccgccacccccttcatctcatgagaaagaacctctcgcttctagtgcctccagccaccctggaatgagtgataatgcaccagcctccctagagagcggaagcagctcgactcccactaattgtagtacctctagtgcgattcctcaacctggcgcagcaaccaaaccgtggaggtcaaaatccttgtctgtgaagcactccgctacagtctctatgctctccgtaaaacctccaggccccgaggcccccagaccaacacccgaagcgatgaaaccagctccgaacaatcaaaaaagtatgctggagaaacttaaactgtttaattctaaaggaggcagtaaggccggtgagggaccaggatcccgcgatactagctgtgaacgcctcgagacactgccctcatttgaagagtcagaagagctggaagctgcgagtcgaatgttaacaacagtgggcccagcttcctcctctcctaaaattgctctaaaaggcatcgcccagcggaccttcagtcgggctctgacaaataaaaaatcttctctgaaaggcaacgaaaaagaaaaggaaaaacagcagagagagaaggataaggagaagagtaaggacctagctaaacgtgcctccgtgacagaaagactcgacctgaaagaagagcccaaggaagatccaagcggagccgcagtccccgagatgccaaagaagtctagtaagatcgctagctttatccctaaaggcggtaagttaaacagtgccaagaaagagcccatggcccccagccacagcggaatcccaaagcccggtatgaagtccatgcccggaaagtcgccttccgctcccgccccatctaaggagggagaacgctcccgtagtgggaaactgtcaagcggtttaccccagcagaagcctcaacttgacggacggcactccagttccagttcctctctggcaagtagtgaagggaagggacccggcggcaccaccctaaatcattctatctcctcccagaccgtttcaggctctgttggaaccacacagaccaccgggtccaatacagtatctgtgcagctgccacagcctcagcaacagtataatcacccaaatacggctactgtggccccctttctgtacagaagccagacggataccgaaggaaatgtgaccgcagagtccagctctacaggagtgtctgtggagccatcccatttcactaagactggtcagcccgccctcgaagaactcaccggcgaagatcccgaggctcgacggctgcgaacagtaaaaaacatagcagacctgcgccagaaccttgaagaaacgatgtcttctctgaggggcactcaggtgacccattctactctggagactacattcgacaccaatgtcactaccgaaatgtcgggtagaagcattctgtctctgaccggaaggcccacccccctgtcctggagacttggccagtccagtccacggctgcaggcaggcgatgctccatccatgggaaatggctacccaccccgcgcgaatgctagccggtttattaacacagaaagtggcaggtatgtctatagcgctcctctgaggcgccagttagcatcccgcggctctagtgtctgccacgttgacgtctcggataaagcaggggatgagatggacctcgagggtatctccatggatgcacctggatatatgagcgatggcgatgttctcagcaagaatatccgcactgatgacatcacaagtgggtatatgactgacggcggtctggggctgtatacccggaggttgaaccgcctgccggatggcatggcagtagtgcgtgagactctgcaacggaacacctcactgggcctcggcgatgcagacagctgggacgattcttccagcgtaagctccggcatcagcgatacaattgataacctcagcaccgacgacataaatacttctagttcaattagctcatacgccaacacccccgcctcaagccgaaagaaccttgatgtgcagaccgacgccgagaagcatagccaagttgagcgaaatagtttatggagtggggacgatgtgaagaaatccgacggcggttccgactccggaataaaaatggaacctggctcaaagtggcgccggaaccccagcgatgtgagtgatgaaagcgacaagtccacttctggcaagaagaaccctgtaatctcccagaccggttcgtggaggcgggggatgactgcgcaggttggtataaccatgcctagaaccaaaccatcagcccccgcaggcgctcttaagacacctgggacgggaaagaccgatgatgccaaggtatcagaaaaaggccgccttagtcccaaggccagccaggtaaagcgaagcccaagtgacgccggccgatcaagtggtgacgaatccaagaagcctctcccctcatcctcccgaacacctacagccaatgcaaacagcttcggcttcaagaaacagagcggcagtgccgccggcctggctatgattaccgctagcggcgtgacggtgaccagtcgaagtgccacattaggaaagattcccaagagcagtgctcttgtaagtcggagcgccgggcgaaagtcaagcatggacggcgcccaaaatcaagacgacggctacctcgctctgtcttcacggactaatcttcagtatcggtccctaccccggccatcaaaatccaattctcggaatggcgcaggcaacagaagttccacctcctctatcgacagcaacatcagttctaagagcgcaggtctgccggtacctaaactgcgagaaccgagtaaaaccgccttgggtagtagtctgcctgggttggtaaatcaaaccgataaggaaaagggaatcagttctgacaatgagtccgtagcgtcatgcaactccgtcaaagtcaatccagcagcccaaccggttagcagcccggctcaaacaagtctccagcctggggccaaatacccggacgtggctagcccaacattgcggcgactgtttggcggcaagccgaccaaacaggtgccgatcgctactgcagaaaacatgaagaatagcgtcgtaatctccaatcctcatgcgactatgacacaacaaggcaatctggatagtccttccggatccggcgtgttgagcagcggcagcagctctcctctgtattcaaagaatgttgacctgaaccaaagtcctctggctagtagcccctctagcgctcactcggccccctccaactctctgacatggggaaccaacgcatcgtcttcatcagccgtgtcaaaagatggactcggattccagtccgtttcatcactgcacacatcttgcgaatcaatagatatttcactatccagtggcggggtcccctcacacaattctagcacggggctcattgcctcctccaaggacgactctttgactcctttcgtgcgcaccaattccgtgaagacgacgctgtctgaatctcccctcagttcacctgctgcctcgcccaagttttgtagaagcacactccctagaaaacaggacagcgatcctcatctggaccggaataccctaccaaaaaaaggcttgagatacactccgacctcccagcttcgcacgcaggaggacgcaaaggaatggctgcgaagccactccgccggcggactccaggatacagcggcaaacagccccttttcatccggaagttcagtgacctccccgagtgggacacggttcaatttctcacagcttgcaagcccgaccaccgtaacccagatgtctctgagcaacccaacgatgttacgcacgcattcactcagcaatgctgatggacagtatgacccgtatacggactccaggtttcgcaactcatctatgtccctggatgagaaaagccgaacaatgtcaaggagtggctcattcagggatggttttgaggaggaatcctgggagaaatcttccgtagacaattttgtgagccgactgcacagttcactgcatttcagccttccactgtttcatcacgctcgctacgaattagtacacggctccagtctgagcctggtttcctcaacttcgtcagtgtactctactccagaagagaaatgccaaagcgaaatcaggaagcttaggcgggaacttgatgcatcacaagagaaagtgtctgccctgacaacacaactgacagccaacgcccacctggtggccgccttcgagcagtctctggggaacatgactataagactacagagtctcacgatgactgcagagcaaaaagattccgagctaaacgagctcagaaaaaccattgaacttctgaagaagcaaaatgcagcagcccaggcagccatcaatggagtgattaacacgcccgagttaaattgcaaagggaatggtacagcccagagcgcagacctgcgaataagaagacaacactcaagcgattccgtaagctcaatcaatagcgcaacgtcacactccagcgtagggagcaatattgaatccgacagtaagaagaagaaaagaaaaaattgggtgaacgaactccggtccagttttaagcaggcgttcggaaagaagaaatcaccaaagtccgctagcagtcattccgatatagaggagatgaccgactcgtccctgccttcctcacccaaactgccccataacggctctacaggttccacaccgcttctacgtaacagtcattcaaattcgttaatctcagaatgcatggattctgaggctgaaacagtgatgcagcttcgcaacgagttgcgggacaaagaaatgaaacttacggatataagactggaagctcttagcagcgcccaccaattggaccaactgcgcgaggccatgaataggatgcagagcgagattgaaaagttgaaggcagaaaacgacagattgaaaagcgagtctcaaggttccggttgctcccgagctcctagccaagtcagtatttccgcttctccgaggcagtcgatggggctctcgcagcacagtctcaatctcactgagtccaccagcctggatatgctgttggatgataccggggagtgctctgcgcgcaaggaaggggggcgtcacgtaaaaattgtcgtgagcttccaggaggagatgaagtggaaagaggatagtcgccctcacctttttttgataggctgcatcggggttagcggtaaaacaaagtgggatgttctggacggggtcgttaggcggctcttcaaggaatatattattcatgtggacccagtgtcccagctggggctgaactctgactcagtgctcggctactccataggagaaatcaaaaggtcaaatacgagcgagaccccggagttgcttccctgcggctatctcgtcggcgagaacacgaccatcagcgtgaccgtgaaagggctggcagaaaattcactggacagcttggtttttgaatccctgatccctaagcccatcttgcagaggtacgtcagtctccttatagaacataggaggatcatcctttctggcccatccgggacggggaagacttacctcgccaataggctttctgaatatatcgtgttgagagaaggtcgggagctaacagacggcgttattgctactttcaacgtggatcacaagagtagtaaagaacttagacagtatctcagcaaccttgcagaccagtgtaatagcgagaataatgccgtggacatgcccctggtaattatcctcgacaaccttcaccacgtttcatcactcggtgagatcttcaatggtttgcttaattgcaaataccacaagtgtccatacatcattggcaccatgaaccaggctacttcctccacgcccaatctacagctgcatcataatttccgttgggtcctctgcgctaatcacactgagcctgtaaagggttttctgggtcgttttctgcgacgcaagctgatggagaccgaaattagcggtagagttcgcaatatggagcttgttaagatcatagattggatccctaaagtttggcaccatctcaaccggttcctcgaggctcattcctcttcggacgttacaatcggacctaggctgttcctcagttgccccattgatgtagacggaagtagggtctggttcacagatttatggaactacagcattatcccttacctactcgaagcggtacgcgaagggctacagttgtacggtcggagggccccgtgggaggaccctgccaagtgggtcatggatacatatccttgggccgcaagtccacagcaacacgagtggcctcctttactccagcttaggccagaagatgtcggctttgacggctatagtatgccacgcgaagggagcacgtcaaagcaaatgcccccttctgacgctgaaggggatccccttatgaacatgctcatgaggcttcaggaggcagcgaactattcttcccctcagagctatgactctgattctaattccaatagccaccacgacgacattctggattctagcctcgaatccaccctttag

SEQ ID NO: 313148 - DNA, 7260 bp, Artificial Sequence
  derived and/or modified sequence
atggccatcgacctgtactgcggcctggcctgcctgtggggcatccacgagccccggcagatctacacagactgggccaaccactacctggccaagagcggccacaagaggctcatccgggacctgcagcaggatgtgacagatggagtgctgctggcccagatcatccaggtggtggccaatgagaagattgaggacatcaatggctgccccaagaacagaagccagatgattgaaaatattgatgcctgcctgaacttcctggccgccaagggcatcaacatccagggcctgtctgctgaggagatcagaaatggaaacctgaaggccatcctgggcctcttcttcagcctgagccgctacaagcagcagcagcagcagccccagaagcagcacctgagcagccccctgcccccagctgtgtcccaggtggccggggcccccagccagtgccaggccggcaccccccagcagcaggtgcctgtgaccccccaggccccctgccagccccaccagcctgccccccaccagcagagcaaggcccaggccgagatgcagagcagcgccagcagcaaggacagcagccagagcaagatcatccgcttcaccctgggccagaagaagatcagccggctgcccggccccacagcccgggtgtctgctgctggcagcgaggccaagacccggggcggcagcaccacagccaacaacagaagaagccagagcttcaacaactatgacaagagcaagcctgtgaccagccccccacctccacccagcagccatgagaaggagcccctggccagcagcgccagcagccaccctggcatgtctgacaatgccccagccagcctggagagcggcagcagcagcacccccaccaactgcagcaccagcagcgccatcccccagcctggagctgccaccaagccctggaggagcaagagcctgtctgtgaagcacagcgccaccgtgtccatgctgtctgtgaagcccccaggccctgaggccccccggcccaccccagaggccatgaagccagcccccaacaaccagaagtccatgctggagaagctgaagctgttcaacagcaaaggaggcagcaaggccggggagggccctggcagccgggacaccagctgtgagcggctggagaccctgcccagctttgaggagagcgaggagctggaggccgccagcaggatgctgaccaccgtgggccctgccagcagcagccccaagatcgccctgaagggcatcgcccagaggaccttcagccgggccctgaccaacaagaagagcagcctgaagggaaatgagaaggagaaggagaagcagcagcgggagaaggacaaggagaagagcaaggacctggccaagagggcctctgtgacagagcggctggacctgaaggaggagcccaaggaggaccccagcggggctgctgtgcctgagatgcccaagaagagcagcaagatcgccagcttcatccccaagggcggcaagctgaacagcgccaagaaggagcccatggcccccagccacagcggcatccccaagccaggcatgaagtccatgcctgggaagagccccagcgccccagcccccagcaaggagggggagaggagccgcagcggcaagctgagcagcggcctgccccagcagaagccccagctggatggccgccacagcagcagcagcagcagcctggccagcagcgagggcaagggccctgggggcaccaccctgaaccacagcatcagcagccagacagtgtctggctctgtgggcaccacccagaccaccggcagcaacacagtgtctgtgcagctgccccagccccagcagcagtacaaccaccccaacacagccaccgtggcccccttcctgtaccgcagccagacagacacagagggcaatgtgacagctgagagcagcagcactggagtgtctgtggagcccagccacttcaccaagacaggccagcctgccctggaggagctgactggagaagatcctgaggcccggcggctgaggacagtgaagaacattgctgacctgcggcagaacctggaggagaccatgagcagcctgcggggcacccaggtgacccacagcaccctggagaccacctttgacaccaacgtgaccacagagatgagcggccgcagcatcctgagcctgaccggccggcccacccccctgtcctggaggctgggccagagcagcccccggctgcaggccggagatgcccccagcatgggaaatggctacccaccccgggccaatgccagccgcttcatcaacacagagagcggccgctacgtgtacagcgcccccctgcggcggcagctggccagccggggcagctctgtgtgccacgtggatgtgtctgacaaggctggagatgagatggacctggagggcatctccatggatgcccctggctacatgtctgatggagatgtgctgagcaagaacatcagaacagatgacatcaccagcggctacatgacagatggcggcctgggcctgtacacccggcggctgaaccggctgcctgatggcatggctgtggtgcgggagaccctgcagaggaacaccagcctgggcctgggagatgctgacagctgggatgacagcagctctgtgagcagcggcatcagtgacaccatcgacaacctgagcacagatgacatcaacaccagcagcagcatcagcagctatgccaacaccccagccagcagcaggaagaacctggatgtgcagacagatgctgagaagcacagccaggtggagaggaacagcctgtggagcggagatgatgtgaagaagagtgatggcggcagtgacagcggcatcaagatggagcccggcagcaagtggaggaggaaccccagtgatgtgtctgatgaaagtgacaagagcaccagcggcaagaagaaccctgtgatcagccagacaggctcctggaggcggggcatgacagcccaggtgggcatcaccatgcccaggaccaagcccagcgccccagctggggccctgaagaccccaggcaccgggaagacagatgatgccaaggtgtctgagaagggccgcctgagccccaaggccagccaggtgaagaggagccccagtgatgctggccgcagcagtggagatgagagcaagaagcccctgcccagcagcagcaggacccccacagccaatgccaacagctttggcttcaagaagcagagcggcagcgctgctggcctggccatgatcacagccagcggcgtgacagtgaccagccgcagcgccaccctgggcaagatccccaagagcagcgccctggtgagccgctctgctggcaggaagagctccatggatggagcccagaaccaggatgatggctacctggccctgagcagcaggaccaacctgcagtaccgcagcctgccccggcccagcaagagcaacagcagaaatggagctggcaacagaagcagcaccagcagcattgacagcaacatcagcagcaagtctgctggcctgcctgtgcccaagctgcgggagcccagcaagacagccctgggcagcagcctgcccggcctggtgaaccagacagacaaggagaagggcatcagcagtgacaatgaatctgtggccagctgcaacagcgtgaaggtgaacccagctgcccagcctgtgagcagccctgcccagaccagcctgcagcccggggccaagtacccagatgtggccagccccaccctgcggcggctgtttggaggcaagcccaccaagcaggtgcccatcgccacagctgagaacatgaagaacagcgtggtgatcagcaacccccacgccaccatgacccagcagggcaacctggacagccccagcggcagcggcgtgctgagcagcggcagcagcagccccctgtacagcaagaatgtggacctgaaccagagccccctggccagcagccccagcagcgcccacagcgcccccagcaacagcctgacctggggcaccaatgccagcagcagcagcgctgtgtccaaggatggcctgggcttccagagcgtgagcagcctgcacaccagctgtgagagcattgacatcagcctgagcagcggcggcgtgcccagccacaacagcagcacaggcctgattgccagcagcaaggatgacagcctgaccccatttgtgaggaccaacagcgtgaagaccaccctgtctgagagccccctgagcagccctgctgccagccccaagttctgccgcagcaccctgcccaggaagcaggacagcgacccccacctggacaggaacaccctgcccaagaagggcctgcgctacacccccaccagccagctgcggacccaggaggatgccaaggagtggctgcggagccacagcgctgggggcctgcaggacacagctgccaacagccccttcagcagcggcagctctgtgaccagccccagcggcacccgcttcaacttcagccagctggccagccccaccaccgtgacccagatgagcctgagcaaccccaccatgctgcggacccacagcctgagcaatgctgatggccagtatgacccctacacagacagccgcttcaggaacagctccatgagcctggatgagaagagcaggaccatgagccgcagcggcagcttcagagatggctttgaggaggagagctgggagaagagctctgtggacaactttgtgtcccggctgcacagcagcctgcacttcagcctgcccctcttccaccacgcccgctatgagctggtgcacggcagcagcctgagcctggtgagcagcaccagctctgtgtacagcaccccagaggagaagtgccagagcgagatcaggaagctgcggcgggagctggatgccagccaggagaaggtgtctgccctgaccacccagctgacagccaatgcccacctggtggccgcctttgagcagagcctgggcaacatgaccatccggctgcagagcctgaccatgacagctgagcagaaggacagcgagctgaatgagctgaggaagaccatcgagctgctgaagaagcagaatgctgctgcccaggccgccatcaacggggtcatcaacaccccagagctgaactgcaagggaaatggaacagcccagagcgctgacctgcgcatccggcggcagcacagcagtgacagcgtgagcagcatcaacagcgccaccagccacagctctgtgggcagcaacatcgagagtgacagcaagaagaagaagaggaagaactgggtgaatgagctgcggagcagcttcaagcaggccttcggcaagaagaagagccccaagagcgccagcagccacagcgacatcgaggagatgacagacagcagcctgcccagcagccccaagctgccccacaacggcagcacaggcagcacccccctgctgaggaacagccacagcaacagcctcatcagcgagtgcatggacagcgaggccgagaccgtgatgcagctgagaaatgagctgcgggacaaggagatgaagctgacagacatccggctggaggccctgagcagcgcccaccagctggaccagctgcgggaggccatgaacaggatgcagagcgagattgagaagctgaaggcagaaaatgaccggctgaagtctgagagccagggcagcggctgcagccgggcccccagccaggtgtccatcagcgccagcccccggcagagcatgggcctgagccagcacagcctgaacctgacagagagcaccagcctggacatgctgctggatgacacaggagaatgttctgccaggaaggagggcggcagacatgtgaagatcgtggtgtccttccaggaggagatgaagtggaaggaggacagccggccccacctgttcctgattggctgcatcggcgtgtctgggaagaccaagtgggatgtgctggatggagtggtgcggcggctcttcaaggagtacatcatccacgtggaccctgtgtcccagctgggcctgaacagcgacagcgtgctgggctacagcatcggggagatcaagaggagcaacaccagcgagaccccagagctgctgccctgtggctacctggtgggggagaacaccaccatctctgtgacagtgaagggcctggccgagaacagcctggacagcctggtgtttgagagcctcatccccaagcccatcctgcagcgctacgtgtccctgctgattgagcaccggcgcatcatcctgagcggccccagcggcaccgggaagacctacctggccaaccggctgtctgagtacatcgtgctgcgggagggccgggagctgacagatggagtcatcgccaccttcaacgtggaccacaagagcagcaaggagctgcggcagtacctgagcaacctggccgaccagtgcaacagtgaaaataatgctgtggacatgcccctggtgatcatcctggacaacctgcaccacgtgagcagcctgggggagatcttcaacggcctgctgaactgcaagtaccacaagtgcccctacatcatcggcaccatgaaccaggccaccagcagcacccccaacctgcagctgcaccacaacttccgctgggtgctgtgtgccaaccacacagagcctgtgaagggcttcctgggccgcttcctgcggaggaagctgatggagacagagatcagcggccgggtgaggaacatggagctggtgaagatcatcgactggatccccaaggtgtggcaccacctgaaccgcttcctggaggcccacagcagcagtgatgtgaccatcggccccaggctcttcctgagctgccccattgatgtggatggcagccgggtgtggttcacagacctgtggaactacagcatcatcccctacctgctggaggccgtgcgggagggcctgcagctgtatggccggcgggccccctgggaggaccctgccaagtgggtgatggacacctacccctgggccgccagcccccagcagcacgagtggccacccctgctgcagctgcggccagaagatgtgggctttgatggctacagcatgccccgggagggcagcaccagcaagcagatgcccccatctgatgctgagggggaccccctgatgaacatgctgatgaggctgcaggaggccgccaactacagcagcccccagagctatgacagcgacagcaacagcaacagccaccatgatgacatcctggacagcagcctggagagcaccctgtag

SEQ ID NO: 313149 - DNA, 7260 bp, Artificial Sequence
  derived and/or modified sequence
atggccatcgacctgtactgcggcctggcctgcctgtggggcatccacgagcctcggcaaatatataccgactgggctaaccactatctcgcgaaaagtggtcataagaggctcatcagggacctgcagcaagatgtgacagatggggtgttactggcacagatcatccaagtggtcgctaacgaaaaaattgaggacataaatggctgccctaagaaccgcagccaaatgattgaaaacatagacgcgtgtctgaactttcttgccgccaagggaatcaatatccaaggccttagtgcggaggagattcgaaatgggaatctgaaagctatcttaggtttgtttttctctctgtccaggtacaagcaacagcagcagcagcctcagaagcaacacctgagttcccctctgcctcccgctgttagccaggttgccggcgctcccagccagtgccaggcaggcactccacagcagcaggtgccggtgacccctcaggctccttgccaaccccatcaaccagccccacaccagcagagcaaagcgcaagccgagatgcaatctagcgcttcctcaaaggattcttcccaatcaaagataattaggtttaccctcggccagaagaagatcagccggctgcccgggcctaccgcaagggtgagcgcggcagggtctgaagctaagacgcgggggggttctacaacagcaaacaacagaaggagccaatccttcaataattatgacaaatccaagccagtgacctccccacctcctcctccctcttcccatgagaaggaaccgcttgcaagttccgcatcctcccatcctgggatgtctgacaatgcgccggcgagcctggaatccggctcctcttccacccccactaattgcagcacatcctcagccataccccagcccggtgcagcaactaagccctggagaagcaaaagcttgagcgtgaagcatagtgctacggtgtcgatgctcagcgtcaagccccccgggcccgaagccccgaggccaacccctgaggccatgaagcctgcacccaataatcagaagtcaatgttggaaaagctgaagctatttaactctaaaggtggaagtaaagctggagaaggacccgggtcaagagatacatcttgcgagaggttggagactctgccatctttcgaagaatctgaagaactggaagctgcatcaaggatgctgacaacggtaggccctgctagctcgagcccaaaaattgcgctgaaaggaatagcccaaagaacctttagccgggcgctgactaacaaaaagagctctctgaagggaaacgagaaagagaaggaaaaacagcagagagaaaaggacaaagagaagtcaaaggacctcgccaaaagagccagcgtaacagaaagattggatctcaaggaagaaccgaaggaggatccgtcgggcgcagctgtcccagagatgcctaagaaatcatccaagatagcttctttcattcctaagggcggcaagcttaatagcgcgaagaaggagccgatggcaccatctcattctggtatccctaaacccggcatgaaaagcatgcctggaaaatccccctccgcacctgcacccagtaaagaaggggaacgttctcgcagcggcaaactctcctctgggctgcctcaacagaaacctcaactggacggacgacacagctctagctccagcagtcttgctagcagcgagggcaagggtcctggaggcacaactctcaatcactccatctcttcccagaccgtttctggctctgttggaaccactcagacaacagggagtaacacagtttcagtacagctccctcagccgcaacagcagtataatcacccgaataccgctactgtggctcctttcctctaccgatcgcagactgacacagagggaaacgtgactgccgagtcttcttctacaggcgtaagcgtggaaccgagccattttacaaagactggccagcccgcactcgaggagctgactggtgaagacccagaggcgaggcgcctgaggaccgtaaagaacatcgccgacctgagacagaacctggaagagaccatgtcaagcttgagaggcacgcaggttacgcatagcacactagaaacgacgtttgatactaatgttaccactgaaatgtcaggccggagtattctgtcacttactggccggccaactcctctgtcctggcgcctgggacagtccagccctcggttgcaagctggagatgccccaagtatgggcaacggttatcctcctcgggcaaacgccagccgcttcatcaacacggagtcaggtcgctacgtctactccgcccctctgcggcgccagctggcgtctcgtggctcctcagtgtgtcacgtagacgtctctgataaagcaggtgatgagatggatttagagggaatctccatggacgctccagggtacatgagcgatggtgacgtactgtcaaagaatattcggacagatgacataacatctgggtacatgactgacggcggcctgggcctctacactcggcgtctcaaccgccttccggacggcatggctgttgttcgtgagacactgcagagaaacacttccctgggattgggcgacgccgattcctgggacgatagttcctccgtgagcagcggtatcagcgatacaattgataatttgtccaccgacgatatcaatacatcgtcgagtatttcctcatacgccaacacgcctgcatccagcaggaaaaacttagatgtgcaaactgatgcagagaaacactctcaggtcgaacggaacagtttgtggtctggcgatgacgtgaaaaaatctgacggcgggtccgattcaggaattaaaatggaacctgggtcaaaatggcggcgaaatcctagcgacgttagtgacgaatccgacaagtctacgagtggcaagaaaaacccggttataagccagaccggttcctggagaagaggcatgaccgcccaggtgggaatcacaatgccaagaaccaagccaagcgcgcccgcaggcgctctgaagaccccagggacaggcaagacagacgatgccaaggtgtccgagaagggtaggctaagccctaaggcttcccaggtgaagagatcgcccagtgacgcgggacggtcaagtggagacgaatccaagaaaccactgccttcatcgagccggacgcctacggcaaatgcaaattccttcggattcaagaaacagtctggtagcgctgcgggattagcaatgatcactgccagcggggttactgtcactagcagaagtgctaccctcggcaagatacctaagtcatccgccttagtgagcaggtccgccggccggaagtctagtatggacggagcccaaaaccaggacgacggctacctggccctgtcttcccggaccaatctccaatatcggtccctgcctagacccagtaagtctaacagcaggaatggcgcaggcaatagatccagtacaagcagcatcgattccaatatctccagtaagtctgctggccttcccgtgcccaagttgagagagccatccaaaacggcacttggcagtagcctccccggcctcgtcaaccagacggacaaagagaagggaatctccagcgacaatgagtccgtggcttcatgcaattcggtgaaggtgaacccagcagcccaaccagtttccagccctgcccagacgtctctccaaccaggagctaaatatccagacgtcgcaagccccactctcagaaggctgttcggggggaaacccaccaagcaggtgccgatagcaacagccgagaacatgaagaatagcgtagtgatcagcaatcctcacgcaactatgacacaacagggaaatcttgacagcccctccggtagcggggtgttgtcctctggaagctcttcccccttatactccaagaacgtggaccttaaccagtccccactcgcttcaagccctagctccgctcattcagccccaagtaactctttgacatgggggacaaatgcttcgagctcctccgctgttagtaaggacggtcttggcttccaatcagtgtcttccctgcataccagttgtgagagtatcgatatttctcttagctcgggaggcgtacccagccataactcgagtacaggcctgatcgctagtagcaaggatgacagcctgacaccatttgtccgcaccaactccgtgaagacaaccctttcagaatcacccttgagctctccagccgctagccccaaattttgcagaagcaccctgccaagaaaacaggacagcgaccctcacctcgatagaaataccctgccgaagaaaggcctgcggtacacgcctacatcccagttgagaacccaagaagacgcgaaagaatggttaagatctcatagcgccggaggccttcaggatactgcagctaactccccattcagcagcggcagttccgtcacgagcccatccggaaccagatttaacttcagccaactcgccagcccaacgaccgtaactcagatgagtctttcaaaccctacaatgctacggacccattcgttgtccaacgctgatggacaatacgacccttacactgactctagatttaggaattcatccatgtcattggatgagaagtcgaggaccatgagccgatctgggtcattcagagacggtttcgaggaagagtcttgggaaaagagcagcgtggataattttgtctcccggcttcactcatccttgcatttctccctcccacttttccatcacgccaggtatgaactggttcacggctccagtctgagtcttgtctccagtacctccagcgtgtactctactcctgaggaaaaatgtcagagcgaaatccggaagctgcgaagggagttggacgcctcccaggaaaaggtgtccgccctcactacacaattaaccgctaacgcacacctcgtggctgcctttgaacaatccctcggtaatatgactatcagacttcagtctttgacaatgactgccgagcagaaagattcagaactaaatgagctgcgcaaaacgatcgagctcttgaaaaaacaaaatgccgctgcacaggctgctattaacggggtgatcaatacacccgagttgaactgtaaaggcaatggcaccgctcagtcagccgatctccgtataaggcgacaacacagttctgattccgtttccagtatcaattccgcgacctcccatagttcagtcggcagtaatattgagtctgactcaaaaaaaaaaaagcgcaaaaactgggtgaacgagttacgctctagttttaaacaagcattcggaaagaaaaaatctccgaagtcagcctcgtctcattcagacatagaagagatgaccgattctagtctgcctagctcaccaaaattgccccacaacgggtccacaggcagtactcctcttctccgaaattcacactccaatagccttataagtgagtgtatggacagcgaggctgagactgtcatgcagctgagaaatgagctgcgtgataaagaaatgaagctgacagacatcaggcttgaagccctgtccagcgcccaccagcttgaccaactccgagaagctatgaatagaatgcagtctgagatagagaaacttaaagccgaaaacgacagactgaagagcgaaagtcaaggcagcggttgttcccgggcaccaagccaagtctccatctccgcatcccctcgccagtcaatgggactgtcccaacatagtctcaatctcacagaatctacatctttggatatgctcctggatgacacaggggagtgttctgcacggaaagagggcggcagacatgttaagatcgtggtgagctttcaggaagagatgaaatggaaagaggactctaggcctcacttatttctcattggttgcatcggcgtcagtgggaaaactaagtgggacgtgctggatggcgtggtgcggcgcctctttaaagaatatatcattcatgtcgacccagtctcacagctggggctcaatagcgatagtgtcctgggctattcaattggcgaaattaagcgaagcaacacctcagagacacctgagctcctcccctgcggctacctggtgggcgaaaatactacaatcagcgtgacagtcaagggcctggccgaaaattctctggactcacttgtgttcgagtccctcatcccgaaacccatcttgcagagatacgtatccttgctgatagaacatcgccgcatcatcctctctggaccctctggcactggtaagacctatcttgccaatcgcctgagcgaatatatcgtcctccgcgaggggcgggagctgacagacggcgtgatcgccacctttaacgtcgatcacaagagttccaaagagttaaggcagtacttgtcgaatctggcagaccagtgcaactccgaaaacaatgcagtcgatatgcccttagtgattattctcgacaatcttcaccacgtttcctcactgggtgaaatcttcaacgggctcctaaattgtaaataccataagtgtccctacattattggcaccatgaaccaagccacctcctcgactcccaacctgcagctccatcataactttcgatgggtgctgtgcgccaaccatacagaacccgtgaaaggctttctcggccggttcctgaggcgaaagcttatggagaccgaaatatccggcagagtgcgtaacatggagcttgttaagatcatcgattggattcctaaggtgtggcaccacctcaaccggttccttgaagcccacagtagttcagatgtaaccatcggccctcggctgtttctgtcatgccctatagacgtcgatggcagccgcgtctggtttaccgacctgtggaactactctattattccttacttactggaagctgtgcgcgagggattacagttgtacgggcgtagggccccatgggaggacccggcaaagtgggttatggatacatacccctgggcggcctcacctcagcagcacgagtggcctcccctgcttcaattgcggcctgaggatgttgggtttgacggctactcaatgccaagagaggggagcacaagcaaacagatgcccccctctgacgcggagggcgatccgctgatgaacatgctaatgcgtttacaagaagccgctaattactcaagcccccagtcctatgactctgattcaaactcaaactctcatcatgatgacatcctggattcttccttagagtcaaccctgtag

SEQ ID NO: 313150 - DNA, 10600 bp, Artificial Sequence
  derived and/or modified sequence
atggctattgatctctactgcggtttggcttgtctgtggggaatacatgagccccgacaaatctacacagactgggccaatcattacctagccaaatccggccacaagcgtctcatcagggatctccagcaagatgtgacagatggcgtcctcctggcccagattatccaggttgtggcaaatgaaaagattgaagacatcaatggctgtccgaagaacagatcccaaatgattgaaaacatagatgcctgcttgaatttcctggcagctaagggaataaacatccaggggctgtctgcagaagagatcaggaatggaaacctcaaggccattctaggcctcttcttcagcctctcccgatacaagcagcagcagcagcagccccagaagcagcacctctcctcacctctgccgcccgccgtatcccaggtggccggggccccctcccagtgccaggctggcacccctcagcagcaggtgccagtcactccccaagccccgtgccagcctcaccagccagcgccacatcagcagtcaaaagcacaagctgaaatgcagtccagtgcatcatccaaggactcatctcaaagcaaaatcatccgcttcactctgggtcagaaaaagatctctagacttccaggtcctaccgcgagggtatccgctgcaggcagcgaggccaaaacacgcggagggtcaactactgctaacaaccgacgcagccagagctttaacaactatgataaatccaaaccagtcacctccccacccccaccgccaagcagccacgagaaagagcctttggcaagttcagcctcctcccaccccggaatgagtgacaatgcacctgcttccttggagagcggcagcagctccacccctactaattgcagtacctcctcggccatcccgcagcccggtgcagccaccaagccttggcgcagcaaatccctcagcgtgaagcacagtgccacggtatccatgctctcggtcaagcctcctgggcctgaggcccccaggcccacacctgaagccatgaagccggcccccaacaatcagaagtccatgctggaaaagctgaaacttttcaacagtaaagggggctcaaaggcaggtgaggggccggggtcccgggacacaagctgtgagcggctggagactctgcccagcttcgaagagagcgaggagctggaggccgccagtcgcatgctcaccaccgtgggccctgcttccagcagccccaagattgcactcaagggcattgcccagaggacttttagccgggcactgaccaacaagaagagttctctgaaaggcaatgagaaagagaaggagaaacaacagcgggagaaggataaggagaaaagcaaggaccttgccaagagagcctctgtgacggagaggctggacctcaaggaggagccaaaagaagaccccagtggagcagctgtgcccgagatgccaaaaaagtcctccaagattgccagcttcatccccaaaggggggaagctcaacagtgccaagaaggagcccatggccccttcccacagtggaataccaaaaccaggaatgaaaagcatgcccgggaaatccccaagtgccccagcgccttccaaggaaggggagcggagccggagtgggaagctgagctcaggactcccccagcagaagccccagctggacggcagacactccagttcctcttccagcctggcgtcctcagaaggaaaaggcccaggagggaccaccctgaaccacagcatcagcagccagactgtcagtgggtctgtcgggaccacccagaccacaggaagcaataccgtcagtgttcagctacctcagccccagcagcaatacaaccatcccaacactgccacggttgcacctttcctgtacaggtctcagacggacactgaagggaatgttactgccgagtcaagctcaacaggtgtgagcgtggagcccagccacttcaccaagactggacagcctgctctggaagaactcactggggaagatcctgaggctcggcggctgcggacagtgaagaacatcgctgatctgcggcagaatttggaggaaaccatgtccagtttaaggggaactcaggttacacacagcacattggaaaccacgtttgacaccaatgtcaccacggagatgagtggccgtagcatactcagcttgacagggaggcccacacctctgtcctggagactgggccagtccagccctcggctccaagcaggagacgccccctcaatgggcaatgggtatccccctcgagccaacgccagcaggttcatcaacactgagtcaggtcgctatgtgtactccgcccctctgagaaggcagctggcctcccggggcagtagtgtctgccatgtggacgtctcagacaaggcaggagatgagatggacctggaaggcatcagcatggatgcccccggctacatgagcgacggggatgttctgagcaagaacatccggaccgatgacattacaagcggatacatgactgatggtggacttggcctctatacccgtcgcctgaaccggctccctgatgggatggctgtggtacgggagaccctgcaacgaaatacctccctgggcctcggagacgctgacagctgggacgacagcagctccgtcagcagcggcatcagcgacaccatagacaacctcagcactgatgacatcaacaccagctcctccatcagctcttatgccaacacacctgcctcctctcgaaaaaacctggatgtgcagactgatgctgagaagcactcacaggtggagaggaattccctgtggtctggtgatgatgtcaagaaatcagacggaggctcagacagcggcataaaaatggagccaggttccaagtggaggcggaatccttctgatgtgtctgacgagtccgacaaaagcacgtcgggcaagaagaatcctgtcatctcccagacaggctcatggcggcgaggcatgacagctcaggtgggcatcaccatgccaaggacgaagccttcagccccggcaggcgcactgaagaccccaggaactggaaaaacagacgacgcaaaggtgtctgagaaaggaaggctttctcctaaagcctcccaggtgaagcgctccccatcagatgcaggccggagcagtggtgacgaatccaaaaagcccctccccagcagctctaggacacctactgccaatgccaacagctttgggttcaagaagcagagtggttccgccgccggcctggccatgatcacagccagcggggtgactgtcaccagcaggtcagccacactgggcaaaatcccaaagtcatctgcactcgtcagtcggtctgctggtcggaagtcaagtatggatggggctcagaatcaggatgacgggtatctagccctaagctcccggacaaaccttcagtaccggagtttgccgaggcccagtaagtccaacagccggaacggggctgggaacaggtctagcaccagcagcatagattccaacattagcagcaagtccgcaggcctgccagtgcccaaactgagggagccttccaaaacagccctaggcagctctctaccaggtctggtcaaccaaacagacaaggagaaaggcatctcatcagacaacgagagtgtggcttcctgtaactcggtgaaagtgaatccggcagcccagcctgtgtccagtccggctcagaccagtctccagcctggagccaagtacccagatgtggcctctcccacactccgcagactctttggtgggaagcctaccaagcaagtgcccatcgccacagctgaaaacatgaaaaattcggtggtcatctccaatcctcatgccaccatgactcagcaaggtaacctagactccccgtcaggcagtggcgtcctgagcagtgggagcagcagtcctctctacagcaagaatgtggacctcaaccagtctccgctagcctccagccccagctcagcccactcggccccttccaacagcctcacctggggcaccaacgccagcagctcctccgcagttagcaaggatggcctgggctttcagtctgtcagcagcctccacaccagctgtgagtccatcgacatctccctcagcagtggaggggtccccagccacaattcttccactggcctcatcgcctcctccaaggacgactccttgactccctttgtcagaactaacagtgtgaagaccacactgtcagaaagccctctctcttcccctgctgctagccctaagttctgcagaagtactctgcccaggaaacaggacagtgacccgcaccttgataggaacactttgcctaagaaaggactcaggtatactcccacctcccagcttcgcacgcaagaagatgcaaaagaatggttacggtcccattctgcaggaggccttcaggacaccgctgccaattcccccttttcctctggctccagcgtgacttctccctccggaacaagattcaacttttcccagcttgcgagtcccaccactgtcacccagatgagcttgtccaacccgaccatgctgaggactcacagcctctccaatgctgatgggcagtatgatccatacactgacagccgcttccggaatagctccatgtccctggatgagaagagcagaaccatgagccgttcaggctcattccgggatgggtttgaagaagaatcatgggagaaaagttctgtggacaactttgtcagccgtcttcacagctcacttcatttctctcttcctttgttccatcacgcaaggtatgagttagttcatggatcctcactctccttggtttccagcacatcgtcagtttattctacaccagaagaaaaatgccagtcagagattcgcaagctgcggcgggaactggatgcctcccaggagaaagtttcagctttgaccacccagctgacagcaaatgctcaccttgtggcagcctttgaacagagtcttggtaacatgacaatcaggctccagagtctgaccatgacagctgagcagaaggactcagaactgaatgagttaagaaaaaccattgagctgctaaagaaacagaacgcagctgcccaggctgccattaatggagtaattaacacacctgagctcaactgcaaaggaaacggcactgcccagtctgcagacctccgcatccgcaggcagcactcctcagacagcgtctccagcatcaacagtgccaccagccactccagcgtgggcagcaacatagagagtgactcaaagaagaagaagcggaagaactgggtcaatgagttacgcagctccttcaagcaagctttcgggaagaagaagtccccaaaatctgcgtcctctcattcagatattgaggagatgacggattcttctttgccttcctcaccaaagttaccgcacaatgggtccacaggttccaccccactgctgaggaattctcactccaactctctaatttcagaatgcatggatagtgaagctgagaccgtcatgcagctccgaaatgagttaagagacaaggagatgaagctgacggatatccgcttagaagctctcagttctgcccaccagctggaccagctccgggaggccatgaacaggatgcagagtgaaatagagaagctgaaagctgagaatgatcggctgaagtcagagtctcaaggcagtggctgcagccgggctccttcccaagtgtccatctctgcctccccgaggcagtccatgggcctctcccagcacagcttgaacctcactgagtcaaccagcctggacatgttgctggatgacactggtgaatgctcggctcggaaggaaggaggcaggcatgttaagatagttgtcagctttcaggaggaaatgaagtggaaggaggattccagaccacatctctttcttattggctgcattggagttagtggcaagacgaagtgggatgtgctcgatggggtggttagacggctgttcaaagaatacatcattcatgtcgacccagtgagtcagctagggctgaattcagacagcgttcttggctacagcattggagaaatcaagcgcagcaacacttccgaaacaccggagctgcttccttgtggctatctggttggagagaacacgaccatctcagtgactgtgaaagggctcgcagaaaacagcctggactcactggtgtttgagtccttgattcccaagcccatcctgcagcgctacgtctccctcctgatagagcaccgtcggatcattctctctggccccagcggcactgggaaaacctacctggccaaccggctgtctgagtatatagtgcttcgagagggacgggagttgacagacggggttatcgccacctttaacgtggaccataagtccagcaaggaattgcgccagtacctgtccaaccttgctgaccagtgcaacagtgagaacaatgctgtggacatgcccctcgtcatcatcctggacaacctacaccacgtgagctctctgggagagatcttcaatgggctgctcaactgcaagtaccacaaatgcccttacataattggcacaatgaaccaggctacctcttcgactcccaacctgcagcttcaccataacttcagatgggtgctttgtgccaaccacacggagcctgtgaagggtttccttggccgattcctgaggaggaagctcatggaaacagagatcagtgggcgggtgcgcaatatggagctggtaaaaatcattgactggattcccaaggtctggcatcacctcaaccgcttcctggaggctcacagttcctcggacgtcaccatcggcccccggctcttcctgtcatgccccatcgatgtggacggctcgagagtgtggttcaccgacttgtggaactattccattatcccctatctcctggaagccgtcagagaaggactccagctctatggaaggcgcgccccctgggaggatcctgccaagtgggtgatggacacatatccatgggcagccagcccacaacagcacgagtggcctcccctgctgcagttacggcctgaggatgtcggcttcgacggctactccatgcctcgggagggatcgacaagcaagcagatgccccccagtgatgctgaaggtgacccgctgatgaacatgctgatgaggctgcaggaggcagccaactactccagcccccagagctatgacagcgactccaacagcaacagccatcacgatgacatcttggactcctctttggagtccactctgtgacaggggcccggagcccagcgccctcctcttctcctcaccgcattccacctgcatcccccacatcaccctgaagatgacttcctgagccagcccccagccacagccttagagctgcgggaacaccgagaccccccgtccttcagcctcgacctgggtgcaggcatcccgggccagctgcctgcggaccgcttccttccacagcgagaactgcactaccttctgttgtactttaattattgttttgccttgttgctgtgacctccctaagacactgaagatacttctcgggaaaggatcatcgccgttgaaatgaaaagagagacagagagaaaaaaaaaaagagaacccacatgaagctctgaaaccaaacagcatcctgccatgagcttcccagagacagaagagactggagcaaagtcggaaacacagagaagcacggcttcccctcagcacagaccctccagactgggtctcagagccgtgccacccaccctcccacacagccggccacagggagaactggtgctaaccagggtgcttgctttggtcacgttcaacgcactacagagctacgacacagggaaaccttaggagcaaataaaccgtgctttcatgttttttaaatggtgctttccttacccgagaggtattttgcctgttccaatcaaaccaccccattcaggtccatcagcctctgattaatatccgtgagagtgagtgacggagtgagagtgtgagcgagtggatgtggctgtcagtgcagaacagcatgtgtctctttccttctgatatatgaatgaatcaggtttttttttttttttttctgcaaacactgtgtatagtgagacttgttctactttggagaacaggttaccttttgaaaatgaggttgagtttcttcctttctgatgcattgatttttgaagatttttttttcccccttcccctcttggtcagaatcaatcctttggtgaaagtaagaaccgcaggagttgagttttggtttggtcctgctcagttttggtttttagttgtccatcctcacagtcctacacactcgcctcctcctgctagggctgggggtatctgtgtcctttaaaatggatgaggacctggtcctcgacatgtgggtgagccatggaccttgccttcccttctcgtccttgagggtttagaacacacaccaacacctccagcgtccccgccccagcttccggtggggtgatgcggtcaccctgcaaaagacttgcactttcctcagaaccaacatgacgcagctcaataagggtgagggtcactccctcccagaagccccgtctggacgagccttgcctgacctcttcggtgctgaccttcccaaagtgatgccttactggttttgtactaactgtgttcattttacataagtgtcgtgcctgcctggggtttgttttttttgtcattgttttccccattgaaacaaacagggctaaaaagtcatctgttcattaggagaactcaagttgctgtgacttttctcatccaaaagactcatttgtgtggatgcgtgaccatgggaaaaagaaaaaaaaaaagatccattttttaggttcttttcggtctccagctgacaacccaactggacaatgatctgtctggtgcaggagaaggcaaaagtttctacaagtctacatgaccttgctgatacttgttctaatagaaacccagtctgctgtgtcttcaacatactggtattttcattacaaagtatggtaaatttttgagttgtttgtttctgttttgtaaagagaatccttattggacaccagtgaaggtgtctctgttttaatgatcagggtttttattccatcttttgcatttcttctatttctgaaggtttgtctcttggcatctttttttagtttcttaccataagagtttgacccgaaactgctcacttcacattggatgacaccatgttcttcctctttgaaaagaaaaggggaatgtgtcccactagtgaaaggaaaacttttcaacactatccctgctttagtctcagcaaactcagactattctgcttagccttcattagtcatctgggtgtgagtgtgtcttgttctgtttttctttttaataaaacttttaaaccatatatttagcctgtgaccaggggggccaaaccctaagatttctggtaaacctgaagggtggccctcctcagacaatttatctcccagcaatgaccctactacactcgcgtactgtgaatttgggaggaggtaaagttgacttctcctcgtgggcagttttccaatcaccttgtgagtagacacctgccaatattgtttgaaacctttttttaatatgacatcctctcttgtcattctcttctcccctttcccacagacttccctcctgggtccaggttcagaaccaagacttctgtacctagtgctgcctgattggtgaacattgacttcaagtagcatagcccttgtgtgactcacaactccgtgtccttcctaaagtttcgggaagcagggttgtctaatatgcacatttcttattttggtcatatttttactttagtgtcactcaccttttacaaagtgactttgtactcatttagggctctatcggaaatgcttccattttgccttttctacagttaggccaattttgaaatatataaattctatgcaacatttatgttgagttaccaatggaagccaaaagttctcttcccaaactgccaagaatgatacaggccataattgaaatgggaataccttttaagtttcattaggggtggggtgggagtgggacaggaacaagacttgcctagatctttgttgtatcttggggacttttactttgttgtttgatgcttaaacttcaaaattctctgtattcaaatttgattgtggcgaatctacttcaaaaaggaaaaataatccaactttgtggatattaaatggaaggtttgctgttttgatctagttgtttccagtggagcagttttatgaaatatgttctataagatgtacattttttcattgtaacatagaaattgtaaataattgattaaagtgctgcattttgatgaattttttctagccatttttaaagagaaaactaggaattgagtattttgtgtacggtatgtttccatcctccctccccttcctcctcccctcctctctctctcttcctacctatttaattttcatttgtcatgaggtttttggatttgccaatgatctgctggacatcatgccccatgtcatagagaataaagctgatgattgtaccagtcttaaattattcatgattcaataaaattgatgcttatttattc

SEQ ID NO: 313151 - DNA, 7259 bp, Artificial Sequence
  derived and/or modified sequence
atggctatagacctctattgcggtttagcatgcttgtggggcatacatgagccaaggcagatctacaccgattgggctaaccactacctcgcgaaaagcggacacaagaggctgattagggacctacagcaggatgtgacggacggagtgctgctggcccaaatcatccaggtagtcgcaaatgaaaaaattgaagacatcaatggatgtccaaaaaatagaagtcaaatgattgagaatatcgatgcttgtttaaattttctcgcagctaagggaatcaatatccaagggctgtccgccgaggagatcagaaacggaaacctgaaagccatcctcgggctattctttagcttgtccaggtataaacagcagcagcagcagccacagaagcagcatctaagtagtcccttgcctccagccgtatcccaggttgccggagcgccttcccagtgtcaggccggaaccccacaacagcaggtgccagtcacaccacaggctccatgtcagccccatcagcctgcaccacaccagcagtcgaaagcacaggccgaaatgcagagcagcgccagctctaaagactctagccagtccaaaattattcggttcaccctgggccagaaaaagatttcccggctacctggccctaccgccagggtttcagcagccggttccgaggcaaagactagaggcggttctaccactgccaacaatagacgctcacaatccttcaacaactatgacaagagcaagcctgtgacatcaccccctcctcctccgagcagccatgagaaagagccactggccagcagtgccagttcacacccaggcatgtccgacaacgccccagcctccctggaatcggggtcgtcttctacgccaactaattgttctacaagctctgctatccctcagccgggagcggctacaaagccttggaggagcaagtccctgtccgtgaagcatagtgccactgtatccatgctctccgtgaaacctcctggtcctgaagcccctcgtccaacaccggaagcaatgaaaccggcaccgaataaccaaaagtctatgctggagaagctgaagctattcaactcaaaaggaggctccaaagcaggggaaggtcctggctctcgcgacacgtcctgcgagcgtctggaaacattacccagcttcgaagaatcggaagaactggaggctgcgtcgagaatgctaacaactgtgggccctgccagcagcagtcccaaaattgcgctgaagggaattgcccagagaacattcagcagggcccttacaaataaaaaatcctctctgaaggggaacgaaaaagaaaaagaaaagcagcaacgcgaaaaagataaggagaagagcaaagatttagccaagagagccagcgtgaccgagaggctggacctgaaagaggagccaaaggaggaccctagtggggctgcagtgccagaaatgcctaagaagtctagcaaaattgcctccttcatccctaaggggggaaaactgaattctgcaaagaaagaaccgatggccccttcgcattctggaatcccaaagcctggcatgaaaagtatgcccggaaagtcaccctctgccccagccccttccaaagagggcgaacgatcgagatctgggaaactcagttctggcctgcctcaacagaagcctcaattggacggcagacattcatcatcctcatcctctcttgcttcttctgagggcaaagggcctgggggaacaaccttgaatcacagcattagctcccaaaccgtatctggatcagtggggaccactcagactacaggctctaatacagtgagcgtgcagctgccacagccacagcagcaatataaccaccctaatactgcaacagtggcaccctttttgtacaggtcgcagacggatacagaagggaacgtcacagcagagtcttcatctactggcgtgtcagtggagccctcccactttactaaaaccggtcagcccgctttagaggaactgacgggggaagatcctgaagctcggagactgcggacggttaagaatatcgctgacctacgacaaaatctggaagagactatgtcctccctccggggtacccaggtgacccacagcacgctggagacgactttcgatacaaacgtgaccacagagatgtcaggcaggtccatcctgagcctcactggtaggcctacacccctgagttggcgtctggggcagagctcgccgagactgcaggcgggagatgccccttcaatgggtaatgggtaccctccccgtgccaacgcaagcagattcattaatacagaatctggacgatatgtgtattccgcaccactgcggcgtcagttggctagtagaggttcatccgtgtgccatgtggatgtgtctgacaaagccggtgacgaaatggacctcgaagggatcagcatggatgctcccggttacatgagcgacggagacgtcctcagcaagaatataaggacagatgatattacctccggctatatgaccgacggcggtcttggcctgtacactcgtcgcctcaatcgcttaccagacgggatggcggtggtgagagagaccctgcagcgtaacactagcctcgggctcggggatgccgattcctgggatgactcctcttcagtcagctcaggcatatctgacaccatcgacaacctgtcaacggatgacattaataccagttcatccattagttcttacgctaacactccagccagcagccgaaaaaacctagacgttcagaccgacgctgaaaaacattcgcaggtggagaggaacagtctgtggagcggagacgatgtaaaaaaatccgacggtgggagcgactcgggcatcaaaatggagcctggcagtaagtggcggcgaaacccatcagatgtgtcagacgaatccgataaatccaccagcgggaagaaaaatcccgtgatctcccaaacaggctcatggcgccgaggtatgaccgcacaggtgggtatcaccatgcctcgcacgaagccttccgctcctgctggcgcactgaaaacccccggtacggggaagacggatgacgccaaagtgtctgaaaagggccgtttgtctcctaaggcatctcaagtaaagcggagcccctccgacgccggacgctctagcggtgacgagtcgaaaaagccactaccttcctcttcacgcacccctactgcaaacgccaatagctttggttttaagaaacaaagcgggtcagccgcaggtcttgccatgatcaccgcatctggcgtgacggtgacatcccggtcagccacattggggaaaatacctaagtcatccgcattagtgtcacggtcggccggaaggaaaagcagcatggatggcgcacagaaccaggacgacggatacctagccctcagcagccggacaaacctgcaatatcggagtctgcccaggcctagtaagtcaaacagcagaaatggcgctggaaaccgttcctctacttcatcaatcgactctaatatcagttccaagtcagcaggactccctgttccaaaactgagagagccctctaaaaccgctctggggtcttccctgcccggtctggtgaatcagaccgataaagaaaagggcatcagctcagataacgaatcagtagccagttgcaatagtgttaaagtgaacccagcggctcaacccgtgtcctcgcccgcacagacctctttgcaaccaggagccaagtacccagatgtagcatcgccaacactgcgcaggctgttcggcggtaaacctacaaaacaggtaccgatcgccacggccgagaatatgaaaaactccgtggttatctcgaacccccacgccactatgactcagcaaggcaacttggattcaccttctggtagcggcgttctgtcatctggtagttccagccctctctactctaagaacgtggatttaaatcagtccccactcgccagctcgccaagctctgctcactccgccccttcgaatagcctcacatggggtacaaacgcctcatcctcatcagctgtttccaaggacgggctcgggtttcagtcagtttcgtccctgcacactagttgtgaaagcatcgatatctcactttccagcggaggggttccaagccacaatagttctaccggccttatagcttcaagtaaggacgacagccttaccccgtttgtgaggacgaattcggttaaaaccacactttcagaaagcccactctcctctccagccgcatcacctaaattctgtcgtagcaccctgcctagaaagcaggactcagatcctcatctggacagaaacactcttccaaagaaaggccttaggtacactcctacttcccagcttaggacccaggaggatgcgaaggagtggctccgatcgcattctgctggtggcctacaggataccgcggcaaattccccattcagtagcggcagcagcgtcaccagtcccagcgggactcggttcaattttagtcaactcgcttccccaactacagtgactcagatgtccctgagcaaccctacaatgcttaggacccattcgctgtctaatgccgatgggcagtatgacccatacactgacagtagatttaggaacagctcaatgagcctcgacgagaagtctcgaactatgagccgcagcgggtccttccgtgatggattcgaagaagagagctgggaaaaaagtagcgtcgacaacttcgtcagcaggctccactcatctcttcacttctccttgccactgtttcatcacgccagatacgagttagtacatggatcgagcctcagcctggtgagctccaccagcagtgtgtacagcacacctgaggaaaagtgtcagtcagagattagaaagctgagacgggagctcgatgccagtcaggagaaggtttcagcactgacaacacagctgacagctaacgcgcacttagtcgccgctttcgagcagtcgttaggtaacatgactattcggctgcaatcattgactatgacagctgaacagaaggatagcgagcttaatgagctgcggaagactatcgagttgttgaagaagcagaacgccgcagcacaagcggcaattaacggagtgatcaataccccagagctgaactgtaaaggtaacggaacagcacagtcggcagacctgcgtatacgacggcagcattcctccgactccgtgtcgtccataaatagcgctacatctcacagtagtgtgggtagcaatattgagagtgactccaaaaaaaagaagcggaaaaattgggtcaatgagctgaggtcttctttcaaacaggcgttcgggaaaaaaaagtccccaaaaagcgcatcatcccactccgacatcgaggaaatgaccgacagctctcttccttcatcccccaaactacctcataacggctccaccggatccacgcctctgcttcgcaatagtcacagtaattcacttatttccgagtgcatggactccgaggccgagaccgtaatgcagctgaggaatgagttgagagacaaggaaatgaagcttacggatattcggctagaagctctgtcctctgcacatcagctggaccaactgcgagaggctatgaacagaatgcagtccgagattgagaagctgaaggctgaaaatgatcggctcaaaagtgaatctcagggcagcggatgtagccgagcccctagccaagtgagcatttcggcgtcaccaagacaatctatgggcctgtcacagcactcattaaatctgaccgaatcaacctctctggacatgctgctggatgataccggggaatgcagcgctcgaaaggaaggtggcaggcacgtgaagatagtggttagcttccaagaggagatgaagtggaaggaagactccagaccgcatctgtttctgataggctgtattggggtgtccggaaaaacaaagtgggacgtcctggacggagtggtgagacggctatttaaagaatatatcatccatgtagatcccgtgtcacagctcgggctgaactctgattctgttctgggatattccatcggggaaatcaagcggtctaacaccagtgaaactccggaacttttaccgtgcggatatctggtgggcgagaacacaaccatcagcgtgactgtgaaaggcttggccgagaactctctggatagccttgtgttcgagtctctgatacccaagccaatactccagagatacgtatcacttttaattgaacaccggaggattattctgagtggccctagcggaacggggaagacttatttggcgaatcgactcagcgaatacattgtactgcgggagggacgcgaacttacggacggtgtgattgccacctttaatgtcgaccataagagctcaaaagaactgaggcagtacctgtccaatctcgcagaccagtgcaactcggagaacaatgccgtagatatgccgctggtgattatccttgacaacctccatcatgtgtcctctctcggagagatattcaatggcctgctcaactgtaagtatcacaagtgtccatacatcatcgggactatgaaccaggcgacatccagcacgcctaatctgcagttgcaccacaactttcgctgggtgctgtgtgctaatcacaccgaaccagtgaaaggctttttaggcaggtttctccgcagaaaattgatggaaacagagatctccgggcgtgtgcgcaatatggaactcgtcaaaattatcgattggattccaaaggtgtggcatcacctaaatcggttcttagaagctcactctagcagcgatgtgaccatcgggccacgactgtttctttcttgcccaatcgacgttgacggcagccgcgtgtggtttacggatctgtggaattatagcataattccgtacctgttagaggccgtgagggaaggcctgcagttgtatggcagacgggcaccgtgggaggacccggctaagtgggtgatggatacatatccctgggccgcttctccccaacaacatgagtggcctcctctgcttcagctgaggccagaagatgtcgggttcgatggctactccatgccccgagaaggatcaacatctaaacaaatgccacccagcgacgcggagggcgatcccttgatgaacatgctgatgagactacaggaagcagccaactatagcagcccccagagttatgacagcgattctaatagcaacagtcaccacgatgatatcctggacagctccctagagtctaccctcta

SEQ ID NO: 313152 - DNA, 7260 bp, Artificial Sequence
  derived and/or modified sequence
atggccatcgacctgtactgcggcctggcctgcctgtggggcatccacgagcccagacagatctacaccgactgggccaaccactacctggccaagagcggccacaagagactgatcagagacctgcagcaggacgtgaccgacggcgtgctgctggcccagatcatccaggtggtggccaacgagaagatcgaggacatcaacggctgccccaagaacagaagccagatgatcgagaacatcgacgcctgcctgaacttcctggccgccaagggcatcaacatccagggcctgagcgccgaggagatcagaaacggcaacctgaaggccatcctgggcctgttcttcagcctgagcagatacaagcagcagcagcagcagccccagaagcagcacctgagcagccccctgccccccgccgtgagccaggtggccggcgcccccagccagtgccaggccggcaccccccagcagcaggtgcccgtgaccccccaggccccctgccagccccaccagcccgccccccaccagcagagcaaggcccaggccgagatgcagagcagcgccagcagcaaggacagcagccagagcaagatcatcagattcaccctgggccagaagaagatcagcagactgcccggccccaccgccagagtgagcgccgccggcagcgaggccaagaccagaggcggcagcaccaccgccaacaacagaagaagccagagcttcaacaactacgacaagagcaagcccgtgaccagccccccccccccccccagcagccacgagaaggagcccctggccagcagcgccagcagccaccccggcatgagcgacaacgcccccgccagcctggagagcggcagcagcagcacccccaccaactgcagcaccagcagcgccatcccccagcccggcgccgccaccaagccctggagaagcaagagcctgagcgtgaagcacagcgccaccgtgagcatgctgagcgtgaagccccccggccccgaggcccccagacccacccccgaggccatgaagcccgcccccaacaaccagaagagcatgctggagaagctgaagctgttcaacagcaagggcggcagcaaggccggcgagggccccggcagcagagacaccagctgcgagagactggagaccctgcccagcttcgaggagagcgaggagctggaggccgccagcagaatgctgaccaccgtgggccccgccagcagcagccccaagatcgccctgaagggcatcgcccagagaaccttcagcagagccctgaccaacaagaagagcagcctgaagggcaacgagaaggagaaggagaagcagcagagagagaaggacaaggagaagagcaaggacctggccaagagagccagcgtgaccgagagactggacctgaaggaggagcccaaggaggaccccagcggcgccgccgtgcccgagatgcccaagaagagcagcaagatcgccagcttcatccccaagggcggcaagctgaacagcgccaagaaggagcccatggcccccagccacagcggcatccccaagcccggcatgaagagcatgcccggcaagagccccagcgcccccgcccccagcaaggagggcgagagaagcagaagcggcaagctgagcagcggcctgccccagcagaagccccagctggacggcagacacagcagcagcagcagcagcctggccagcagcgagggcaagggccccggcggcaccaccctgaaccacagcatcagcagccagaccgtgagcggcagcgtgggcaccacccagaccaccggcagcaacaccgtgagcgtgcagctgccccagccccagcagcagtacaaccaccccaacaccgccaccgtggcccccttcctgtacagaagccagaccgacaccgagggcaacgtgaccgccgagagcagcagcaccggcgtgagcgtggagcccagccacttcaccaagaccggccagcccgccctggaggagctgaccggcgaggaccccgaggccagaagactgagaaccgtgaagaacatcgccgacctgagacagaacctggaggagaccatgagcagcctgagaggcacccaggtgacccacagcaccctggagaccaccttcgacaccaacgtgaccaccgagatgagcggcagaagcatcctgagcctgaccggcagacccacccccctgagctggagactgggccagagcagccccagactgcaggccggcgacgcccccagcatgggcaacggctacccccccagagccaacgccagcagattcatcaacaccgagagcggcagatacgtgtacagcgcccccctgagaagacagctggccagcagaggcagcagcgtgtgccacgtggacgtgagcgacaaggccggcgacgagatggacctggagggcatcagcatggacgcccccggctacatgagcgacggcgacgtgctgagcaagaacatcagaaccgacgacatcaccagcggctacatgaccgacggcggcctgggcctgtacaccagaagactgaacagactgcccgacggcatggccgtggtgagagagaccctgcagagaaacaccagcctgggcctgggcgacgccgacagctgggacgacagcagcagcgtgagcagcggcatcagcgacaccatcgacaacctgagcaccgacgacatcaacaccagcagcagcatcagcagctacgccaacacccccgccagcagcagaaagaacctggacgtgcagaccgacgccgagaagcacagccaggtggagagaaacagcctgtggagcggcgacgacgtgaagaagagcgacggcggcagcgacagcggcatcaagatggagcccggcagcaagtggagaagaaaccccagcgacgtgagcgacgagagcgacaagagcaccagcggcaagaagaaccccgtgatcagccagaccggcagctggagaagaggcatgaccgcccaggtgggcatcaccatgcccagaaccaagcccagcgcccccgccggcgccctgaagacccccggcaccggcaagaccgacgacgccaaggtgagcgagaagggcagactgagccccaaggccagccaggtgaagagaagccccagcgacgccggcagaagcagcggcgacgagagcaagaagcccctgcccagcagcagcagaacccccaccgccaacgccaacagcttcggcttcaagaagcagagcggcagcgccgccggcctggccatgatcaccgccagcggcgtgaccgtgaccagcagaagcgccaccctgggcaagatccccaagagcagcgccctggtgagcagaagcgccggcagaaagagcagcatggacggcgcccagaaccaggacgacggctacctggccctgagcagcagaaccaacctgcagtacagaagcctgcccagacccagcaagagcaacagcagaaacggcgccggcaacagaagcagcaccagcagcatcgacagcaacatcagcagcaagagcgccggcctgcccgtgcccaagctgagagagcccagcaagaccgccctgggcagcagcctgcccggcctggtgaaccagaccgacaaggagaagggcatcagcagcgacaacgagagcgtggccagctgcaacagcgtgaaggtgaaccccgccgcccagcccgtgagcagccccgcccagaccagcctgcagcccggcgccaagtaccccgacgtggccagccccaccctgagaagactgttcggcggcaagcccaccaagcaggtgcccatcgccaccgccgagaacatgaagaacagcgtggtgatcagcaacccccacgccaccatgacccagcagggcaacctggacagccccagcggcagcggcgtgctgagcagcggcagcagcagccccctgtacagcaagaacgtggacctgaaccagagccccctggccagcagccccagcagcgcccacagcgcccccagcaacagcctgacctggggcaccaacgccagcagcagcagcgccgtgagcaaggacggcctgggcttccagagcgtgagcagcctgcacaccagctgcgagagcatcgacatcagcctgagcagcggcggcgtgcccagccacaacagcagcaccggcctgatcgccagcagcaaggacgacagcctgacccccttcgtgagaaccaacagcgtgaagaccaccctgagcgagagccccctgagcagccccgccgccagccccaagttctgcagaagcaccctgcccagaaagcaggacagcgacccccacctggacagaaacaccctgcccaagaagggcctgagatacacccccaccagccagctgagaacccaggaggacgccaaggagtggctgagaagccacagcgccggcggcctgcaggacaccgccgccaacagccccttcagcagcggcagcagcgtgaccagccccagcggcaccagattcaacttcagccagctggccagccccaccaccgtgacccagatgagcctgagcaaccccaccatgctgagaacccacagcctgagcaacgccgacggccagtacgacccctacaccgacagcagattcagaaacagcagcatgagcctggacgagaagagcagaaccatgagcagaagcggcagcttcagagacggcttcgaggaggagagctgggagaagagcagcgtggacaacttcgtgagcagactgcacagcagcctgcacttcagcctgcccctgttccaccacgccagatacgagctggtgcacggcagcagcctgagcctggtgagcagcaccagcagcgtgtacagcacccccgaggagaagtgccagagcgagatcagaaagctgagaagagagctggacgccagccaggagaaggtgagcgccctgaccacccagctgaccgccaacgcccacctggtggccgccttcgagcagagcctgggcaacatgaccatcagactgcagagcctgaccatgaccgccgagcagaaggacagcgagctgaacgagctgagaaagaccatcgagctgctgaagaagcagaacgccgccgcccaggccgccatcaacggcgtgatcaacacccccgagctgaactgcaagggcaacggcaccgcccagagcgccgacctgagaatcagaagacagcacagcagcgacagcgtgagcagcatcaacagcgccaccagccacagcagcgtgggcagcaacatcgagagcgacagcaagaagaagaagagaaagaactgggtgaacgagctgagaagcagcttcaagcaggccttcggcaagaagaagagccccaagagcgccagcagccacagcgacatcgaggagatgaccgacagcagcctgcccagcagccccaagctgccccacaacggcagcaccggcagcacccccctgctgagaaacagccacagcaacagcctgatcagcgagtgcatggacagcgaggccgagaccgtgatgcagctgagaaacgagctgagagacaaggagatgaagctgaccgacatcagactggaggccctgagcagcgcccaccagctggaccagctgagagaggccatgaacagaatgcagagcgagatcgagaagctgaaggccgagaacgacagactgaagagcgagagccagggcagcggctgcagcagagcccccagccaggtgagcatcagcgccagccccagacagagcatgggcctgagccagcacagcctgaacctgaccgagagcaccagcctggacatgctgctggacgacaccggcgagtgcagcgccagaaaggagggcggcagacacgtgaagatcgtggtgagcttccaggaggagatgaagtggaaggaggacagcagaccccacctgttcctgatcggctgcatcggcgtgagcggcaagaccaagtgggacgtgctggacggcgtggtgagaagactgttcaaggagtacatcatccacgtggaccccgtgagccagctgggcctgaacagcgacagcgtgctgggctacagcatcggcgagatcaagagaagcaacaccagcgagacccccgagctgctgccctgcggctacctggtgggcgagaacaccaccatcagcgtgaccgtgaagggcctggccgagaacagcctggacagcctggtgttcgagagcctgatccccaagcccatcctgcagagatacgtgagcctgctgatcgagcacagaagaatcatcctgagcggccccagcggcaccggcaagacctacctggccaacagactgagcgagtacatcgtgctgagagagggcagagagctgaccgacggcgtgatcgccaccttcaacgtggaccacaagagcagcaaggagctgagacagtacctgagcaacctggccgaccagtgcaacagcgagaacaacgccgtggacatgcccctggtgatcatcctggacaacctgcaccacgtgagcagcctgggcgagatcttcaacggcctgctgaactgcaagtaccacaagtgcccctacatcatcggcaccatgaaccaggccaccagcagcacccccaacctgcagctgcaccacaacttcagatgggtgctgtgcgccaaccacaccgagcccgtgaagggcttcctgggcagattcctgagaagaaagctgatggagaccgagatcagcggcagagtgagaaacatggagctggtgaagatcatcgactggatccccaaggtgtggcaccacctgaacagattcctggaggcccacagcagcagcgacgtgaccatcggccccagactgttcctgagctgccccatcgacgtggacggcagcagagtgtggttcaccgacctgtggaactacagcatcatcccctacctgctggaggccgtgagagagggcctgcagctgtacggcagaagagccccctgggaggaccccgccaagtgggtgatggacacctacccctgggccgccagcccccagcagcacgagtggccccccctgctgcagctgagacccgaggacgtgggcttcgacggctacagcatgcccagagagggcagcaccagcaagcagatgccccccagcgacgccgagggcgaccccctgatgaacatgctgatgagactgcaggaggccgccaactacagcagcccccagagctacgacagcgacagcaacagcaacagccaccacgacgacatcctggacagcagcctggagagcaccctgtag

SEQ ID NO: 313153 - protein, 79 aa, Artificial Sequence
  derived and/or modified sequence
MEGDCLSCMKYLMFVFNFFIFLGGACLLAIGIWVMVDPTGFREIVAANPLLLTGAYILLAMGGLLFLLGFLGCCGAVRE

SEQ ID NO: 313154 - protein, 146 aa, Artificial Sequence
  derived and/or modified sequence
MEGDCLSCMKYLMFVFNFFIFLGGACLLAIGIWVMVDPTGFREIVAANPLLLTGAYILLAMGGLLFLLGFLGCCGAVRENKCLLLFFFLFILIIFLAELSAAILAFIFRENLTREFFTKELTKHYQGNNDTDVFSATWNSVMITVS

SEQ ID NO: 313155 - DNA, 747 bp, Artificial Sequence
  derived and/or modified sequence
atggagggcgactgcctgagctgcatgaagtacctgatgttcgtgttcaacttcttcatcttcctgggcggcgcctgcctgctggccatcggcatctgggtgatggtggaccccaccggcttcagagagatcgtggccgccaaccccctgctgctgaccggcgcctacatcctgctggccatgggcggcctgctgttcctgctgggcttcctgggctgctgcggcgccgtgagagagaacaagtgcctgctgctgttcttcttcctgttcatcctgatcatcttcctggccgagctgagcgccgccatcctggccttcatcttcagagagaacctgaccagagagttcttcaccaaggagctgaccaagcactaccagggcaacaacgacaccgacgtgttcagcgccacctggaacagcgtgatgatcaccttcggctgctgcggcgtgaacggccccgaggacttcaagttcgccagcgtgttcagactgctgaccctggacagcgaggaggtgcccgaggcctgctgcagaagagagccccagagcagagacggcgtgctgctgagcagagaggagtgcctgctgggcagaagcctgttcctgaacaagcagggctgctacaccgtgatcctgaacaccttcgagacctacgtgtacctggccggcgccctggccatcggcgtgctggccatcgagctgttcgccatgatcttcgccatgtgcctgttcagaggcatccagtag

SEQ ID NO: 313156 - DNA, 240 bp, Artificial Sequence
  derived and/or modified sequence
atggagggcgactgcctgagctgcatgaagtacctgatgttcgtgttcaacttcttcatcttcctgggcggcgcctgcctgctggccatcggcatctgggtgatggtggaccccaccggcttcagagagatcgtggccgccaaccccctgctgctgaccggcgcctacatcctgctggccatgggcggcctgctgttcctgctgggcttcctgggctgctgcggcgccgtgagagagtag

SEQ ID NO: 313157 - DNA, 441 bp, Artificial Sequence
  derived and/or modified sequence
atggagggcgactgcctgagctgcatgaagtacctgatgttcgtgttcaacttcttcatcttcctgggcggcgcctgcctgctggccatcggcatctgggtgatggtggaccccaccggcttcagagagatcgtggccgccaaccccctgctgctgaccggcgcctacatcctgctggccatgggcggcctgctgttcctgctgggcttcctgggctgctgcggcgccgtgagagagaacaagtgcctgctgctgttcttcttcctgttcatcctgatcatcttcctggccgagctgagcgccgccatcctggccttcatcttcagagagaacctgaccagagagttcttcaccaaggagctgaccaagcactaccagggcaacaacgacaccgacgtgttcagcgccacctggaacagcgtgatgatcaccgtgagctag

SEQ ID NO: 313158 - DNA, 747 bp, Artificial Sequence
  derived and/or modified sequence
atggagggggattgcttgagctgcatgaagtacctgatgtttgtatttaacttttttattttcctcggtggagcctgcctgctggcaattggcatctgggtgatggtggatcccaccggttttcgggaaatcgttgcagccaatcccttgctactgactggggcttacatcctgctggctatgggggggctgctattcctgctcggtttcctgggttgttgtggagcggtgcgagaaaacaagtgtctgcttctcttttttttcctgtttatcttaatcatctttcttgcggaactgagtgcagctatccttgcctttatcttccgggagaatcttacccgtgagttttttacaaaggaattgactaaacactaccaaggtaataacgatacagatgtgttttctgcaacatggaattccgtcatgatcacgttcgggtgttgtggggtaaacggccctgaagacttcaagttcgcatctgtgtttagactgctgacactggacagcgaagaggtaccagaggcctgttgcagaagagagccccagtcgcgagacggcgtcctgctctcacgagaggaatgcttgcttggccggtcgctctttctgaataaacaaggttgctacacggttatcttgaatacatttgaaacctacgtatatctggctggggcgctggcgataggcgttctcgcgattgagcttttcgccatgatatttgccatgtgtctcttcagggggatccagtag

SEQ ID NO: 313159 - DNA, 747 bp, Artificial Sequence
  derived and/or modified sequence
atggaaggcgactgcctttcatgtatgaaatatcttatgtttgtgtttaacttttttatcttcctgggcggagcctgtctgttggctatcggtatctgggtgatggttgatcccacagggttccgcgagattgtggccgccaatccccttctccttactggcgcctatatcttactggccatgggaggcctcctgttcctgttagggtttctcggctgttgtggtgccgtccgcgaaaataaatgtctgctgttgttcttctttctgttcattctgatcatttttctcgcagaactgtctgcagcaattttggcgtttattttccgcgaaaacctgacccgagagttttttacaaaggagctgactaaacattaccaaggaaacaatgatacagacgtttttagcgccacctggaactcagtcatgataactttcggctgctgcggggtcaatgggcccgaagatttcaagtttgcttcggtcttccggctactgacactggactcagaggaggtcccagaggcatgctgtaggcgtgagcctcaaagccgggacggcgtgctgctgagtcgtgaggaatgtctcctaggaagatcgttatttttgaataaacaggggtgctacaccgttattctcaacacattcgagacatacgtgtatttggccggtgccctggccatcggcgtacttgcaattgagttgtttgctatgatattcgccatgtgtctgttcagaggcatccagtag

SEQ ID NO: 313160 - DNA, 240 bp, Artificial Sequence
  derived and/or modified sequence
atggagggagactgtctttcctgcatgaagtatctcatgtttgtctttaacttctttatatttctgggcggtgcttgtctgctcgctatagggatttgggtgatggtcgaccctacagggttccgcgagattgtggccgccaatcctctccttctgactggcgcctacatcctcctggccatgggagggctcctgtttttgttgggattccttgggtgctgtggcgccgtccgcgagtag

SEQ ID NO: 313161 - DNA, 441 bp, Artificial Sequence
  derived and/or modified sequence
atggagggggactgcctaagctgcatgaaatacttgatgtttgtatttaatttctttatctttctgggcggtgcctgtcttttggccattggaatctgggtaatggtggacccgacggggtttcgtgaaatagtggccgcgaacccgctcttgctgaccggcgcatacatcttgctggcgatgggtggactgctcttcctcctgggattcttggggtgttgcggcgccgtcagagagaataagtgcctgctcttattcttcttcttgtttattcttattatcttcctggccgagctgagtgccgcaattctagcttttatctttcgcgaaaacctgacacgcgagttcttcaccaaggaactcacaaagcattaccagggtaataatgataccgacgtcttcagcgctacatggaactcagtgatgattactgtatcctag

SEQ ID NO: 313162 - DNA, 747 bp, Artificial Sequence
  derived and/or modified sequence
atggagggggactgcctgagctgcatgaagtacctgatgtttgtgttcaacttcttcatcttcctgggcggggcctgcctgctggccatcggcatctgggtgatggtggaccccaccggcttccgggagatcgtggccgccaaccccctgctgctgactggagcctacatcctgctggccatgggcggcctgctcttcctgctgggcttcctgggctgctgcggggctgtgcgggagaacaagtgcctgctgctcttcttcttcctgttcatcctgatcatcttcctggccgagctgtctgctgccatcctggccttcatcttccgggagaacctgacccgggagttcttcaccaaggagctgaccaagcactaccagggcaacaatgacacagatgtgttttctgccacctggaacagcgtgatgatcaccttcggctgctgcggcgtgaatggacctgaggacttcaagtttgccagcgtcttccggctgctgaccctggacagcgaggaggtgcctgaggcctgctgccggcgggagccccagagcagagatggagtgctgctgagccgggaggagtgcctgctgggccgcagcctcttcctgaacaagcagggctgctacaccgtcatcctgaacacctttgagacctacgtgtacctggccggggccctggccatcggcgtgctggccatcgagctgtttgccatgatctttgccatgtgcctcttccggggcatccagtag

SEQ ID NO: 313163 - DNA, 240 bp, Artificial Sequence
  derived and/or modified sequence
atggagggggactgcctgagctgcatgaagtacctgatgtttgtgttcaacttcttcatcttcctgggcggggcctgcctgctggccatcggcatctgggtgatggtggaccccaccggcttccgggagatcgtggccgccaaccccctgctgctgactggagcctacatcctgctggccatgggcggcctgctcttcctgctgggcttcctgggctgctgcggggctgtgcgggagtag

SEQ ID NO: 313164 - DNA, 441 bp, Artificial Sequence
  derived and/or modified sequence
atggagggggactgcctgagctgcatgaagtacctgatgtttgtgttcaacttcttcatcttcctgggcggggcctgcctgctggccatcggcatctgggtgatggtggaccccaccggcttccgggagatcgtggccgccaaccccctgctgctgactggagcctacatcctgctggccatgggcggcctgctcttcctgctgggcttcctgggctgctgcggggctgtgcgggagaacaagtgcctgctgctcttcttcttcctgttcatcctgatcatcttcctggccgagctgtctgctgccatcctggccttcatcttccgggagaacctgacccgggagttcttcaccaaggagctgaccaagcactaccagggcaacaatgacacagatgtgttttctgccacctggaacagcgtgatgatcaccgtgtcctag

SEQ ID NO: 313165 - DNA, 747 bp, Artificial Sequence
  derived and/or modified sequence
atggagggcgactgcctgagctgcatgaagtacctgatgttcgtgttcaactttttcatcttcctcggtggagcgtgtcttctcgctatcggaatctgggtgatggttgaccccactgggttccgggagattgtggctgctaacccattactccttaccggggcttacatactactagccatgggaggactgctgttcctgctgggctttctgggctgctgtggggccgtccgggagaacaaatgcctgttgttgttttttttcctgttcattctaattatatttttagctgaacttagtgctgccatcctggcattcatcttcagagagaatctgacaagggagttttttacaaaagagcttacaaagcactatcagggaaacaacgacacagatgtgttttctgctacttggaactcagttatgattacgttcggatgctgtggcgtgaacggccccgaggatttcaagttcgccagtgtctttcgtcttttgacgctcgatagcgaagaggtgccggaagcatgttgcaggagggaaccacagagccgagatggggtcctcctgtcccgagaggagtgcctactcgggcggtcgctctttctgaacaagcagggctgctacacagttatattgaacacgtttgaaacgtacgtgtatttagctggtgccctagcaatcggagtcctggccattgaactcttcgccatgatctttgctatgtgtctcttcaggggcatccagtag

SEQ ID NO: 313166 - DNA, 747 bp, Artificial Sequence
  derived and/or modified sequence
atggagggcgactgcctgagctgcatgaagtacctgatgttcgtgtttaacttcttcatcttcctcggaggagcctgcttactggccattggaatttgggtgatggttgacccaaccggcttccgcgaaatcgtggccgccaatcccctgctcctcaccggggcatacatcctcctcgcaatgggagggctccttttcttactcggattcctcgggtgctgcggtgccgttcgcgaaaacaagtgtctgctccttttcttcttcctgttcatcttaatcattttcctagctgaactgagcgccgcaatcctggctttcatcttcagagagaacctgacgcgcgagttcttcacaaaggagcttacaaagcactaccagggtaataatgacacagatgttttcagtgccacgtggaactcggttatgatcaccttcgggtgctgtggagtgaacggcccagaggatttcaagtttgctagcgtttttcggcttttaaccctggattccgaagaggtgcccgaggcctgctgtcggagagaaccacagagccgggatggtgtcctgttgtcacgtgaagaatgcctcctcgggcggtccctgttcctcaacaaacaaggctgctataccgtcattttgaacacattcgaaacgtacgtgtacctcgcaggcgcgctggctattggagtgctcgccattgagcttttcgcaatgatctttgcgatgtgcctattcaggggtatccaatag

SEQ ID NO: 313167 - DNA, 240 bp, Artificial Sequence
  derived and/or modified sequence
atggagggcgactgcctgagctgcatgaagtacctgatgttcgtgttcaacttttttatttttctggggggtgcatgtctactggccattgggatatgggttatggttgatccgacgggcttcagggagatcgtcgctgcaaatcccttgctgctgactggcgcatatatacttctcgcaatgggcgggttgctgttcttactgggtttcctcggatgttgcggcgctgtgagagaatag

SEQ ID NO: 313168 - DNA, 441 bp, Artificial Sequence
  derived and/or modified sequence
atggagggcgactgcctgagctgcatgaagtacctgatgttcgtgttcaatttttttattttcctgggcggagcttgtctccttgcaatcggcatctgggtgatggtggaccctacaggatttagagagatcgtagcggccaatcccttactcctgactggggcttatatcctcctcgccatgggcgggctgctgttcctgctgggattcttgggctgttgtggcgccgtccgcgagaataaatgcctgctccttttcttttttctattcatactgattatttttctcgctgagctttcagccgctatcctggcctttattttcagagagaacttaacacgggagttctttactaaggaactgacaaagcactatcagggcaataacgacaccgacgttttctccgcaacctggaacagcgtgatgatcacagttagctag

SEQ ID NO: 313169 - DNA, 747 bp, Artificial Sequence
  derived and/or modified sequence
atggaaggtgactgcctgtcttgtatgaagtacctaatgtttgtattcaacttttttatctttctcgggggagcttgtctgctggccatcggaatatgggttatggttgacccaaccgggtttcgggagattgtggccgcaaaccctctgcttctcacaggtgcctatattctactggcgatgggaggtctgctctttctcctgggtttcctcggatgctgtggtgcagtcagagagaataagtgtctgctgttgttcttcttcctcttcatcctgattatttttctggccgagctgtcggccgcaattcttgcattcatcttcagggaaaacttgacgagggaattctttacaaaggagctgaccaaacactaccagggcaataacgatactgacgtgttcagtgccacttggaacagcgtgatgattaccttcggttgttgcggcgttaatggaccagaggacttcaagttcgcgtcagtgtttaggctcctgacactcgatagcgaagaggttccagaggcctgttgtagaagagaaccccagtctcgggacggtgtcctgctatctagggaggaatgtttgctcggacgctcattattcctgaacaagcaggggtgttatactgtcatattgaatacctttgaaacgtatgtgtaccttgcaggcgctctagccattggcgtgctagccattgagctctttgcaatgatttttgctatgtgcctgttccggggaatccagtag

SEQ ID NO: 313170 - DNA, 747 bp, Artificial Sequence
  derived and/or modified sequence
atggagggagactgcctgagttgcatgaagtatctgatgtttgtgtttaacttctttatcttcctggggggagcctgtctgctcgcaatcgggatctgggtcatggtagacccaacgggttttagagagatagttgcggcaaatccactgctgctcacaggagcctacatcctacttgcaatgggcggactgctgtttctgctgggttttctcggctgctgcggggcagtcagagaaaacaagtgtctgctgctgttttttttcctctttattctcataatattcctcgctgagctctcagccgctattctggcttttattttccgggagaatttaacacgtgagttcttcacaaaggaacttactaaacattatcagggtaacaacgacactgatgtgttctccgccacttggaactcagtcatgatcacatttggttgctgcggggtgaatgggccagaggactttaaatttgcttcagttttccggctgctgacactggattctgaggaggtacctgaagcttgctgtcgcagggagccacagagcagagatggagtgcttctaagtcgcgaggagtgcttattgggaaggtccctattcttaaacaagcaggggtgttacacagtaatcctgaatacttttgaaacctatgtctaccttgcgggtgctctagcgatcggagtgctggccatcgaattattcgcaatgatctttgctatgtgccttttccgaggcatccaatag

SEQ ID NO: 313171 - DNA, 240 bp, Artificial Sequence
  derived and/or modified sequence
atggaaggggactgcctgtcttgcatgaagtacctgatgttcgtctttaacttctttatctttctggggggtgcatgcttactggccattggcatttgggtgatggtcgacccaacaggattccgagaaatcgtagccgctaatccccttctcctgactggggcttatatcttgctagctatgggtggcctgctcttcttgctagggttccttggatgctgtggggctgtgagggaatag

SEQ ID NO: 313172 - DNA, 441 bp, Artificial Sequence
  derived and/or modified sequence
atggaaggcgattgtttgtcgtgcatgaaataccttatgttcgtctttaacttctttatatttctgggaggagcctgtctcctagcgataggtatttgggtgatggtcgacccgactgggttccgagagatagtcgccgcaaacccccttttactgacaggagcatacatcctcctggccatgggtggactgctattcctcctcggttttcttggctgctgcggtgcagtacgggagaacaagtgtcttttgctgttcttttttctgttcatactaatcatcttcctggccgagctctcggcggctatcctcgctttcatctttagggagaacctaacccgcgaattcttcaccaaggaactgaccaaacactatcagggtaataacgacacagatgtatttagcgcaacgtggaacagcgtgatgattacagtctcctag

SEQ ID NO: 313173 - protein, 371 aa, Artificial Sequence
  derived and/or modified sequence
MPGCPCPGCGMAGPRLLFLTALALELLERAGGSQPALRSRGTATACRLDNKESESWGALLSGERLDTWICSLLGSLMVGLSGVFPLLVIPLEMGTMLRSEAGAWRLKQLLSFALGGLLGNVFLHLLPEAWAYTCSASPGGEGQSLQQQQQLGLWVIAGILTFLALEKMFLDSKEEGTSQAPNKDPTAAAAALNGGHCLAQPAAEPGLGAVVRSIKVSGYLNLLANTIDNFTHGLAVAASFLVSKKIGLLTTMAILLHEIPHEVGDFAILLRAGFDRWSAAKLQLSTALGGLLGAGFAICTQSPKGVVGCSPAAEETAAWVLPFTSGGFLYIALVNVLPDLLEEEDPWRSLQQLLLLCAGIVVMVLFSLFVD

SEQ ID NO: 313174 - protein, 797 aa, Artificial Sequence
  derived and/or modified sequence
MDCSAPKEMNKLPANSPEAAAAQGHPDGPCAPRTSPEQELPAAAAPPPPRVPRSASTGAQTFQSADARACEAERPGVGSCKLSSPRAQAASAALRDLREAQGAQASPPPGSSGPGNALHCKIPFLRGPEGDANVSVGKGTLERNNTPVVGWVNMSQSTVVLATDGITSVLPGSVATVATQEDEQGDENKARGNWSSKLDFILSMVGYAVGLGNVWRFPYLAFQNGGGAFLIPYLMMLALAGLPIFFLEVSLGQFASQGPVSVWKAIPALQGCGIAMLIISVLIAIYYNVIICYTLFYLFASFVSVLPWGSCNNPWNTPECKDKTKLLLDSCVISDHPKIQIKNSTFCMTAYPNVTMVNFTSQANKTFVSGSEEYFKYFVLKISAGIEYPGEIRWPLALCLFLAWVIVYASLAKGIKTSGKVVYFTATFPYVVLVILLIRGVTLPGAGAGIWYFITPKWEKLTDATVWKDAATQIFFSLSAAWGGLITLSSYNKFHNNCYRDTLIVTCTNSATSIFAGFVIFSVIGFMANERKVNIENVADQGPGIAFVVYPEALTRLPLSPFWAIIFFLMLLTLGLDTMFATIETIVTSISDEFPKYLRTHKPVFTLGCCICFFIMGFPMITQGGIYMFQLVDTYAASYALVIIAIFELVGISYVYGLQRFCEDIEMMIGFQPNIFWKVCWAFVTPTILTFILCFSFYQWEPMTYGSYRYPNWSMVLGWLMLACSVIWIPIMFVIKMHLAPGRFIERLKLVCSPQPDWGPFLAQHRGERYKNMIDPLGTSSLGLKLPVKDLELGTQC

SEQ ID NO: 313175 - DNA, 2394 bp, Artificial Sequence
  derived and/or modified sequence
atggactgcagcgcccccaaggagatgaacaagctgcccgccaacagccccgaggccgccgccgcccagggccaccccgacggcccctgcgcccccagaaccagccccgagcaggagctgcccgccgccgccgccccccccccccccagagtgcccagaagcgccagcaccggcgcccagaccttccagagcgccgacgccagagcctgcgaggccgagagacccggcgtgggcagctgcaagctgagcagccccagagcccaggccgccagcgccgccctgagagacctgagagaggcccagggcgcccaggccagccccccccccggcagcagcggccccggcaacgccctgcactgcaagatccccttcctgagaggccccgagggcgacgccaacgtgagcgtgggcaagggcaccctggagagaaacaacacccccgtggtgggctgggtgaacatgagccagagcaccgtggtgctggccaccgacggcatcaccagcgtgctgcccggcagcgtggccaccgtggccacccaggaggacgagcagggcgacgagaacaaggccagaggcaactggagcagcaagctggacttcatcctgagcatggtgggctacgccgtgggcctgggcaacgtgtggagattcccctacctggccttccagaacggcggcggcgccttcctgatcccctacctgatgatgctggccctggccggcctgcccatcttcttcctggaggtgagcctgggccagttcgccagccagggccccgtgagcgtgtggaaggccatccccgccctgcagggctgcggcatcgccatgctgatcatcagcgtgctgatcgccatctactacaacgtgatcatctgctacaccctgttctacctgttcgccagcttcgtgagcgtgctgccctggggcagctgcaacaacccctggaacacccccgagtgcaaggacaagaccaagctgctgctggacagctgcgtgatcagcgaccaccccaagatccagatcaagaacagcaccttctgcatgaccgcctaccccaacgtgaccatggtgaacttcaccagccaggccaacaagaccttcgtgagcggcagcgaggagtacttcaagtacttcgtgctgaagatcagcgccggcatcgagtaccccggcgagatcagatggcccctggccctgtgcctgttcctggcctgggtgatcgtgtacgccagcctggccaagggcatcaagaccagcggcaaggtggtgtacttcaccgccaccttcccctacgtggtgctggtgatcctgctgatcagaggcgtgaccctgcccggcgccggcgccggcatctggtacttcatcacccccaagtgggagaagctgaccgacgccaccgtgtggaaggacgccgccacccagatcttcttcagcctgagcgccgcctggggcggcctgatcaccctgagcagctacaacaagttccacaacaactgctacagagacaccctgatcgtgacctgcaccaacagcgccaccagcatcttcgccggcttcgtgatcttcagcgtgatcggcttcatggccaacgagagaaaggtgaacatcgagaacgtggccgaccagggccccggcatcgccttcgtggtgtaccccgaggccctgaccagactgcccctgagccccttctgggccatcatcttcttcctgatgctgctgaccctgggcctggacaccatgttcgccaccatcgagaccatcgtgaccagcatcagcgacgagttccccaagtacctgagaacccacaagcccgtgttcaccctgggctgctgcatctgcttcttcatcatgggcttccccatgatcacccagggcggcatctacatgttccagctggtggacacctacgccgccagctacgccctggtgatcatcgccatcttcgagctggtgggcatcagctacgtgtacggcctgcagagattctgcgaggacatcgagatgatgatcggcttccagcccaacatcttctggaaggtgtgctgggccttcgtgacccccaccatcctgaccttcatcctgtgcttcagcttctaccagtgggagcccatgacctacggcagctacagataccccaactggagcatggtgctgggctggctgatgctggcctgcagcgtgatctggatccccatcatgttcgtgatcaagatgcacctggcccccggcagattcatcgagagactgaagctggtgtgcagcccccagcccgactggggccccttcctggcccagcacagaggcgagagatacaagaacatgatcgaccccctgggcaccagcagcctgggcctgaagctgcccgtgaaggacctggagctgggcacccagtgctag

SEQ ID NO: 313176 - DNA, 2394 bp, Artificial Sequence
  derived and/or modified sequence
atggattgcagcgcccctaaggaaatgaacaaattgcccgctaacagtcctgaggcagcagctgcccagggtcatccagacggaccttgcgctcccagaacaagtccagaacaggagctgccagcggctgctgcaccacccccacctagggtccccagaagtgcctccaccggtgcccagactttccagagcgccgacgcccgggcttgtgaagctgaacgccccggcgtgggcagctgtaaactatcatcgcctcgcgcacaggcagccagtgcagctttacgagacctcagagaagctcaaggtgcgcaggctagtcctcccccaggaagcagtggacccggaaatgctttacactgcaagatcccgtttttgagggggcccgagggcgatgctaatgtgagtgtgggcaagggtacacttgagcgcaataacacaccagtggtcgggtgggttaacatgtcccagtccactgtagtgctggctactgatggaatcaccagcgtgctgccaggtagcgtggccactgttgcgacacaggaagatgagcagggtgacgagaataaagcccgggggaactggagcagtaaattggattttattctctcaatggtcggctacgctgtaggtctgggaaacgtctggcgctttccttatcttgcatttcagaacggaggtggagcttttcttattccatacctgatgatgctagccttagccgggttgcccatatttttcctggaagtctctcttggccaatttgccagccaaggccccgttagcgtctggaaagccatacctgccctccaaggctgtggcattgctatgctaataatttcggttctcattgcaatctactataacgtcattatatgctacacactgttttacctgttcgcatcctttgttagcgtcctcccatggggatcctgcaacaacccctggaacacccccgaatgcaaagataagaccaagttgctgctcgactcttgtgtgatcagcgaccatcctaaaattcagattaagaattctactttttgtatgacagcatatccgaatgtgaccatggtgaattttacatcacaggcaaataaaacatttgtgtcggggagcgaagagtatttcaaatacttcgtgttgaaaatctccgccggcattgagtacccaggcgagatcagatggccactggctctctgcctcttcttggcctgggtgatcgtgtatgctagcctagctaagggaatcaagacgagcggcaaagttgtgtacttcaccgctacatttccctacgtggtgctcgtgattctgctgattcgcggagtaactttaccgggcgccggcgccgggatttggtatttcatcaccccaaaatgggaaaagctcactgacgccactgtatggaaggacgccgctacacagatcttttttagcctctccgcggcctggggaggactcatcacactgtctagttataataagtttcacaacaattgttatagggatacactgatcgtcacgtgcaccaatagtgcgacaagcatctttgctggttttgtgatcttctccgtcataggattcatggctaatgagcgcaaggtgaatattgaaaatgtggccgaccagggccctggcattgcatttgtggtctatccagaagctttgacccgcctccccctgtctcctttttgggctatcattttcttcctcatgttgcttaccctcgggctggataccatgttcgcaacgatcgaaacaatcgttacaagcatatccgatgagtttccaaaatacctgagaacacataaacctgtcttcacactgggttgttgcatctgtttttttatcatggggttcccaatgatcacacaaggcggtatctatatgttccaactggttgatacttacgcagccagctacgcacttgtcatcattgcaattttcgagctcgtggggatcagctacgtgtacggtctgcagcggttttgtgaagatatcgagatgatgattggatttcagcccaatattttctggaaagtgtgttgggctttcgtcactcccacaatcctgacatttatactgtgcttctctttctaccagtgggaaccaatgacctatggttcctacaggtaccccaactggtctatggtgctgggctggctcatgctcgcctgctcggtgatctggattcctataatgtttgtcatcaaaatgcacctggccccaggacgttttattgaacgactgaagctggtatgtagcccgcagcccgactgggggccgtttctggctcagcataggggcgagcgctacaagaatatgatagatcccctgggcacttcgtcattggggctgaaactcccggtcaaagacttggaactggggactcagtgttag

SEQ ID NO: 313177 - DNA, 2394 bp, Artificial Sequence
  derived and/or modified sequence
atggactgcagcgcccccaaggagatgaacaagctgcctgccaacagccctgaggccgctgctgcccagggccacccagatggcccctgtgcccccaggaccagccctgagcaggagctgcctgctgctgctgcccctcctccaccccgggtgcccaggtctgccagcactggagcccagaccttccagagcgcagatgcccgggcctgtgaggccgagaggcctggggtgggcagctgcaagctgagcagcccccgggcccaggccgccagcgctgccctgcgggacctgcgggaggcccagggcgcccaggccagccccccacctggcagcagcggccctggaaatgccctgcactgcaagatccccttcctgcggggcccagaaggagatgccaacgtgtctgtgggcaagggcaccctggagaggaacaacacccctgtggtgggctgggtgaacatgagccagagcacagtggtgctggccacagatggcatcacctctgtgctgcccggctctgtggccaccgtggccacccaggaggatgagcagggagatgagaacaaggcccggggcaactggagcagcaagctggacttcatcctgtccatggtgggctatgctgtgggcctgggcaatgtgtggaggttcccctacctggccttccagaatggaggaggagccttcctgatcccctacctgatgatgctggccctggccggcctgcccatcttcttcctggaggtgtccctgggccagtttgccagccagggccctgtgtctgtgtggaaggccatcccagccctgcagggctgcggcatcgccatgctgatcatctctgtgctgattgccatctactacaacgtcatcatctgctacaccctcttctacctgtttgccagctttgtgtctgtgctgccctggggcagctgcaacaacccctggaacaccccagagtgcaaggacaagaccaagctgctgctggacagctgtgtgatcagtgaccaccccaagatccagatcaagaacagcaccttctgcatgacagcctacccaaatgtgaccatggtgaacttcaccagccaggccaacaagacctttgtgtctggcagcgaggagtacttcaagtactttgtgctgaagatctctgctggcatcgagtacccaggagagatccgctggcccctggccctgtgcctcttcctggcctgggtgattgtgtatgccagcctggccaagggcatcaagaccagcggcaaggtggtgtacttcaccgccaccttcccctacgtggtgctggtgatcctgctgatccggggcgtgaccctgcccggggccggggccggcatctggtacttcatcacccccaagtgggagaagctgacagatgccaccgtgtggaaggatgctgccacccagatcttcttcagcctgtctgctgcctggggcggcctcatcaccctgagcagctacaacaagttccacaacaactgctacagagacaccctcatcgtgacctgcaccaacagcgccaccagcatctttgctggcttcgtcatcttcagcgtcatcggcttcatggccaatgaaaggaaggtgaacattgaaaatgtggccgaccagggccctggcatcgcctttgtggtgtacccagaggccctgacccggctgcccctgagccccttctgggccatcatcttcttcctgatgctgctgaccctgggcctggacaccatgtttgccaccatcgagaccatcgtgaccagcatcagtgatgagttccccaagtacctgcggacccacaagcctgtgttcaccctgggctgctgcatctgcttcttcatcatgggcttccccatgatcacccagggcggcatctacatgttccagctggtggacacctacgccgccagctatgccctggtgatcatcgccatctttgagctggtgggcatctcctatgtgtatggcctgcagcgcttctgtgaagatattgagatgatgattggcttccagcccaacatcttctggaaggtgtgctgggcctttgtgacccccaccatcctgaccttcatcctgtgcttctccttctaccagtgggagcccatgacctacggcagctaccgctaccccaactggagcatggtgctgggctggctgatgctggcctgcagcgtcatctggatccccatcatgtttgtgatcaagatgcacctggcccctggccgcttcatcgagcggctgaagctggtgtgcagcccccagcctgactggggccccttcctggcccagcacagaggagagcgctacaagaacatgattgaccccctgggcaccagcagcctgggcctgaagctgcctgtgaaggacctggagctgggcacccagtgctag

SEQ ID NO: 313178 - DNA, 2394 bp, Artificial Sequence
  derived and/or modified sequence
atggactgcagcgcccccaaggagatgaacaagctgcccgccaactcccctgaagccgccgccgcacaaggccaccccgatggcccttgtgcaccccggactagcccagagcaggagttgcctgctgcggccgccccccctccgccacgggtaccgcgtagtgcgtccacgggcgcgcagacattccagagcgccgacgctcgggcctgtgaggcagagcgtcctggagtgggctcatgtaaactttcctccccgagggcccaagcggcttctgccgcactgcgtgatttgcgcgaggcccagggagcccaggccagtccccctcccggctccagcggcccaggaaacgcgcttcattgcaaaatcccttttctccgaggaccggagggggatgccaacgtgtcagttgggaaaggcactttggagagaaataacacccccgttgtgggctgggtgaatatgagtcagtcaacagtagtgctggcaacagacggaatcactagcgttttgccagggagcgttgctactgttgcaacccaagaagacgaacagggggacgagaacaaagccagaggcaactggtccagcaagctcgacttcatcctgtctatggtgggatacgccgtcggcctcgggaatgtgtggcgttttccttatctagcttttcagaacgggggaggagcgtttctcatcccttatctgatgatgttagcactcgcaggcctgcctatctttttcctagaggtatccctgggccagtttgcctcccagggcccggtgtcagtttggaaggccattcccgccctgcagggatgtggtatcgctatgctgatcatcagcgtgctgatcgccatctattacaacgttatcatctgctatacattgttttatctgttcgcatcctttgtgtccgtgctgccttggggttcctgcaataatccctggaacacgcctgaatgtaaggacaagaccaagctgctgctcgattcatgcgttatatctgaccatccaaaaatacagataaaaaatagtaccttttgcatgacagcatatcccaacgtgacaatggtcaatttcacaagccaagcaaataagactttcgtttccggtagcgaggagtacttcaaatactttgtcctgaaaatctctgccggcatagaataccctggcgagattcgctggccactcgcgctatgtctgttcctggcgtgggtgattgtgtatgcctcattggccaaaggcatcaaaaccagcggtaaggtagtctacttcaccgctacgtttccatacgtggtactcgtgatcctgctgattcgtggggtgaccctgccgggtgccggtgccgggatctggtactttattacccccaagtgggagaagcttaccgacgctaccgtgtggaaagacgcggccacgcagatattcttctcgctctctgcagcctggggcgggttgataaccctgtctagctacaacaagttccataacaactgttatcgggacacattaatcgtgacctgtaccaacagtgctacttccattttcgccggcttcgtgatcttctctgtgattggattcatggccaacgagcgcaaagtcaacatcgagaatgtggcggaccagggacctggtatcgccttcgtagtgtaccccgaggctctcacccgtctgcctctgagtcctttttgggcaatcatctttttccttatgctgttgacacttggacttgataccatgttcgctaccatcgaaaccattgtgacctcaatctccgacgagttcccaaaataccttcgaacccacaagccggtgttcacactgggctgttgcatatgttttttcattatgggcttccccatgatcactcaaggcggtatctacatgttccaactggtcgatacttatgcagcgagttacgctttggtaattattgccatttttgaactcgtggggatctcctacgtctatggattgcaacgcttttgtgaggacattgaaatgatgatcggcttccagcccaacattttctggaaagtgtgctgggcattcgtgacacccaccatattgacttttatcctgtgtttttctttctaccaatgggagccaatgacctatggcagttatcgctatcctaactggtctatggtattgggatggttgatgcttgcgtgttccgtgatctggatacctatcatgtttgtgatcaagatgcatctggctcccggcaggttcatcgaaagacttaaactcgtgtgcagcccccaacccgactggggacctttcttagcgcagcacaggggcgagcgctacaagaatatgattgacccactgggcacaagttcgctcgggctcaagctgcccgtgaaagacctcgaattaggaactcagtgttag

SEQ ID NO: 313179 - DNA, 2394 bp, Artificial Sequence
  derived and/or modified sequence
atggattgcagcgctcccaaggagatgaataaattacctgcaaatagtccagaagctgcggctgctcagggacaccccgacggtccctgtgcgccaagaactagtcctgagcaggaactgccagccgctgccgctccaccccctcctagggtacccagatcggcatccaccggagctcagactttccaaagcgccgacgcaagggcctgcgaggccgagcggcctggggtaggatcctgcaaattaagctctcctcgggctcaggctgcctcggcggctttgagggatctgagggaggctcaaggggcacaggcctcaccccctcctggatcaagtggaccaggaaacgccctgcactgcaagatccccttcttgcgaggtccagagggagacgcgaatgtgtcagttggaaaaggaactctcgagaggaataacacacccgttgttggctgggtgaacatgtctcagtcaactgtggtgctggccacagatgggatcacctcggtcctacccggatcggtggctaccgttgccacacaggaagacgaacagggcgatgaaaataaggcgaggggtaattggtcctctaaactcgatttcatcctctccatggttggatatgcggtgggtctgggaaacgtttggcgttttccttacctcgctttccagaatggcggaggcgcatttctgatcccttatctgatgatgcttgctttagcagggttgcccatattcttcttagaggtaagcttaggccagtttgcgtcccaaggccctgttagcgtttggaaagcgatcccagccctgcaggggtgcggcatcgcaatgctgattatctcagtgctaatcgcaatctactataatgtaatcatttgctacacccttttttacctgtttgcaagctttgtgagcgtgctgccatggggaagctgcaacaacccctggaacacgcctgaatgtaaagacaagaccaaactgctgttggactcatgcgtcattagtgaccaccctaaaattcagatcaaaaatagcactttctgcatgacagcttatcctaacgtgactatggtgaacttcacaagccaggctaacaagacatttgtgagtggctcagaggaatacttcaaatacttcgtcctaaaaatcagcgctgggatagagtaccctggagaaattaggtggcccctggccctctgcttgtttctggcatgggttatcgtgtacgccagccttgcaaaaggcattaagacatctgggaaggtagtgtattttactgcaacctttccatacgtggtgctggtgattttgctaattaggggcgttacactgcctggcgcaggcgcaggcatctggtactttatcacgcccaaatgggagaagttaactgacgcgacagtctggaaagatgctgcaacacagatttttttcagtctgtctgcggcttggggtggcctgattacgttgagctcatataataagtttcataacaattgctacagagatacccttattgtgacatgtaccaactcagctacctccattttcgcaggcttcgtcattttttctgtgattgggttcatggccaacgagcgtaaggtcaacattgagaatgtcgcagaccagggccctggaatcgcgttcgtcgtgtatcccgaggcactcacacgcttgcccctgagtccgttttgggccattatattttttctaatgttgcttacactgggcctggacaccatgtttgcaacgattgagacaatcgtgacgtccattagcgatgagttccccaaatacctacgaacccacaagccagtgttcaccctcgggtgctgtatctgtttctttatcatgggtttcccaatgattacccagggtggcatatacatgttccagttagtggatacatatgccgcatcctacgctctggtgatcatcgccattttcgagcttgtcggaatttcttatgtctatgggctccagagattctgcgaggacatcgagatgatgataggctttcaacccaatattttctggaaagtgtgctgggcatttgtaactcctaccatcctgactttcatactgtgtttctcattctaccaatgggagccaatgacatacggaagctatcgctaccctaactggtctatggtgctcgggtggctgatgctggcatgttcggttatctggatcccgataatgtttgtgatcaaaatgcatctcgcccctggacgctttatcgagaggctcaagctggtatgttctccccagccagactggggcccattccttgcacaacacagaggggagaggtacaaaaacatgattgaccctttaggcacctccagcctaggcctgaagctcccagtcaaggacctcgagctggggactcaatgctag

SEQ ID NO: 313180 - DNA, 7084 bp, Artificial Sequence
  derived and/or modified sequence
cacgccaaacacgcagccccctcccgctggagtgacaactggccagcatactctaggctgttgtccctttaaaacttgaatccaagggggtaatgatttatcaaacttgtattatcaagaaaatgtcaaaccaagggcaccttgctttgcactgacgcaaacccggcctttcccaaggagatatagaaagcgcctctcctgcctgagccaaacccagtcttgtcaatagcgggtttcaccctccaccagttcagtctgttgcctgtgtcagacatggattgcagtgctcccaaggaaatgaataaactgccagccaacagcccggaggcggcggcggcgcagggccacccggatggcccatgcgctcccaggacgagcccggagcaggagcttcccgcggctgccgccccgccgccgccacgtgtgcccaggtccgcttccaccggcgcccaaactttccagtcagcggacgcgcgagcctgcgaggctgagcggccaggagtggggtcttgcaaactcagtagcccgcgggcgcaggcggcctctgcagctctgcgggacttgagagaggcgcaaggcgcgcaggcctcgccccctcccgggagctccgggcccggcaacgcgctgcactgtaagatcccttttctgcgaggcccggagggggatgcgaacgtgagtgtgggcaagggcaccctggagcggaacaatacccctgttgtgggctgggtgaacatgagccagagcaccgtggtgctggccacggatggaatcacgtccgtgctcccgggcagcgtggccaccgttgccacccaggaggacgagcaaggggatgagaataaggcccgagggaactggtccagcaaactggacttcatcctgtccatggtggggtacgcagtggggctgggcaatgtctggaggtttccctacctggccttccagaacgggggaggtgctttcctcatcccttacctgatgatgctggctctggctggattacccatcttcttcttggaggtgtcgctgggccagtttgccagccagggaccagtgtctgtgtggaaggccatcccagctctacaaggctgtggcatcgcgatgctgatcatctctgtcctaatagccatatactacaatgtgattatttgctatacacttttctacctgtttgcctcctttgtgtctgtactaccctggggctcctgcaacaacccttggaatacgccagaatgcaaagataaaaccaaacttttattagattcctgtgttatcagtgaccatcccaaaatacagatcaagaactcgactttctgcatgaccgcttatcccaacgtgacaatggttaatttcaccagccaggccaataagacatttgtcagtggaagtgaagagtacttcaagtactttgtgctgaagatttctgcagggattgaatatcctggcgagatcaggtggccactagctctctgcctcttcctggcttgggtcattgtgtatgcatcattggctaaaggaatcaagacttcaggaaaagtggtgtacttcacggccacgttcccgtatgtcgtactcgtgatcctcctcatccgaggagtcaccctgcctggagctggagctgggatctggtacttcatcacacccaagtgggagaaactcacggatgccacggtgtggaaagatgctgccactcagattttcttctctttatctgctgcatggggaggcctgatcactctctcttcttacaacaaattccacaacaactgctacagggacactctaattgtcacctgcaccaacagtgccacaagcatctttgccggcttcgtcatcttctccgttatcggcttcatggccaatgaacgcaaagtcaacattgagaatgtggcagaccaagggccaggcattgcatttgtggtttacccggaagccttaaccaggctgcctctctctccgttctgggccatcatctttttcctgatgctcctcactcttggacttgacactatgtttgccaccatcgagaccatagtgacctccatctcagacgagtttcccaagtacctacgcacacacaagccagtgtttactctgggctgctgcatttgtttcttcatcatgggttttccaatgatcactcagggtggaatttacatgtttcagcttgtggacacctatgctgcctcctatgcccttgtcatcattgccatttttgagctcgtggggatctcttatgtgtatggcttgcaaagattctgtgaagatatagagatgatgattggattccagcctaacatcttctggaaagtctgctgggcatttgtaaccccaaccattttaacctttatcctttgcttcagcttttaccagtgggagcccatgacctatggctcttaccgctatcctaactggtccatggtgctcggatggctaatgctcgcctgttccgtcatctggatcccaattatgtttgtgataaaaatgcatctggcccctggaagatttattgagaggctgaagttggtgtgctcgccacagccggactggggcccattcttagctcaacaccgcggggagcgttacaagaacatgatcgaccccttgggaacctcttccttgggactcaaactgccagtgaaggatttggaactgggcactcagtgctagtccagtggtgtgggatggtccagacttgatcctgtttttcctctctgcctcctcctaatgttttccatagctctcctcccatttttcttcatctttcttcctacatcttggttcacatccacgcatgagagtgattatgtagaaaagtaggcatagtgtcgcatgctgcagtaaagagctacatagaccacctgaagcgctgtttgcctgtgcccatggtgactgtttctggtcaggttggtcccctgaccacacgttttaccctgcagaggaggatcagttaggtgagcactggtaggtatgcgtggttttgtcaatagagaggtatccactgtgtgatggcatggggggtgccagtaaggcatgtatagagtggccgaattacaagactttatttggacttgaacagaactgagcaatgtggtgatcttgttcagacacacaaagttcaagacaggtttttttttttttcagagagttagcagtggtcagaaaatgttttggatgtaagacaagaccattcaatttggacaccactgaggtggttaagtttatatttccagtcaccactggggatctgtttccttcgtttggatcagcaatctccagttaccactaactcagatgctacagtctacacattgtgactttgattgaactgtcagttttcttccctcaactgtctttttttgttttaaataaccacatttgtgagttcttttggtcatttcctccacctctgcccaagaagccatcatataagttgtgcctcattttgtacgttcatagtagagctccatgctcatttctacatgatatttagcaccatggttcaatgtcacgatcctgtgtttcttctctaaatgtctttctataagctgtagacaccttgtcttttgacctctgggaaaacaagacttaccctggttctgtctatatattatatatataggacacatgctcttaaaagacagataacttcttaatttttactctttttcattcacagtaaatgccaactgtggtcatagagaaatcaaagaaatggagagtttaatagaaagcaaccacaatattcactgcactggtagtacattttaggacatggtatttatagaactttctgataaatacagcttaggtaagtagcgagtgagccaattaagactatagcttttaagactacatttagccaattcaattttaagagttccctattcacagtactcattttaacggcactctaatgagagctgatcatatgtctgcagaaattggcaaagtgtaaactttattatcttcttgtatcctgaacatgcatatatgaaatttttaaaatgtgacatgtgttcatgtagtgtgtacttgtagtggtgttttctgtccttataaatatcttttgaattctgtagagatggtgagtttagtatagtgtagtctggggattttattttcccttacagtaataatatctaaacctaaaattgtttcctttaggggagatcatttcaatcattttcttcatttatcttcatagtacagggtctcaggcaaagtttttcagttcaaatcttgtatattgttgtgacattttcatcctgtttaacagcaatgaaacccaacaacaggctttaatgtacatttttttttaaaagatttcatttgttaaaaaaagtctcaactcattttactgagctctcccttttctagggcaagtatcatcgccatttgccaacatcaatatgaacttccagtttttaagagtagcttgtgaaaggttttagaaaaggaaacaaagatgggttttgaactttagattttcatgtcttttgtctgcagtgtatatttgttctcccctctccttctcctcctttccccccttgtctcccaaagctcaaacttgcttgagtctatcatagagactaaaccttgagcttcccctaaacttagctttaggaagctgagctgtggcctcacctgtctgccatgaacacagatttctctaagaaagccatattgatgagaagcccccaattactgcagcagacgtcgcacaatggtaccaaaaatgagcctctccagctgatacctggtagagtgagaggagccaggaggaataacttaggcctggaaattatctgcaggctttgcaatttgaaggttgagaaagagagcttaaatcaattagcattctctcatgggactggtatgtttgtgtcaggatgaatggtttttggctctcctgttgcctcttggctaaaactctgattgagccaatggttgcagtctgatgctggacgccaacccaatttctgctaattattgcttttgtgattaaaagaaggtgggggtggggggctcccacagatgctgccaggtttgttttgtacaaactgaaagttaacttaattgtgagaacggagacctcatcactagctgcatgttttggatttgggggcatttacatttgtgttaattatgatttgtccaggtaagatgcagtagctgctccctgagcagctgtttcccccccaccccacttcactataatttccaagatttatttccctttgtttaaagggacacgcttaggtgaaaggttccaaatttacctggaaatggttaccttgtaaatttagcttgtctaatggattgtttccatgatattaaaatgtacagtcaattggaagaaaaaaaatgaaaaaaataaaatgaataacattgttagaaactggcacctgaaaacttcccttcaaagtgggggaaaaaaccgagtagctgaggaaagactttcattggttcactgtgtagaatggtggagcattttccacttgtgagattatttcataacaccaacaaatgccagaaactcattcagaaaaaaagccatatgtgaaaaacagtaatcctgtcatatccttagaggagaaaaaatgtatatttcttaacaagtggtgttgtgacttcttatgcaaatgtcttgcatattagtaacttttattatctttaggactgtgcttatcaggtacaaatgtgtctagttctgttttattgtttctttttcctttatatttatgtattgcatgaggtctgtggtcaatgcaaaatcatgatgacctcaatgtctttgaaatttgcaatgtgtttttaatatgtaagaaatgtaatcaacttgtatttcagtaagcagcactttaaaaagagtttaacatgatgacctttaaatggataggacttgggttgtttttatggtaatgttgcattggagttgagttttcctttaattaagttcttgtttcctcatctatgtgtctctcagtgcttcctgtccacctttgctctcagcatggtttcccatgcctaaaagtaagattttcttttctctttgttcccttggctgtaggtcattgtcctcttcccagaggctagcacaataactgttgctcaatgtaagatgagatggcaagatcatactactgttgttgcacctggatttgagttgggacatgcttctttgaggcagatgattcaagagaggacgtgctgtgtggcaggtgttttgcaggaccaaaaggccaaggccaacagaggagcatttccttctctttcacactgggtatcaagcagaaaacttccaggctgggagcaaaggtgtgggtgattctgccttgatactcatttccccacaaagtggccctaggatttgtgaaagtgaagcttcctatctttcccagattttgctttaattgcccagaaaggccaagtagttttgaaatgtggtctttgctcaggtcacctctgagcagcctgcagccaaagagaaagtgttttcagattaggtattcatcacctctgaaaagcaagcagtggtttgacttgcctgccacggattaaatacatcttcaggtaaccatttgccttacaggtgtattttactgttaggatgattcttagtaattgactaaaaactgttttgtctctcatttgtttgtggtttttgcactttattatggacctgtaaaggaataggttaattcttacattgtgtacttggctaatgtcctaaatgcaggcatcttttgtgggtactgttgcccatgaataaacatatgttccctaatcaggtccttatatttttccattaactatacatgaagaaaatatattatgttacaaatgatgcatcatatatatatatatatatatatatatatcttatagattacatattatatactgcacattattcatttaagaagtcattcttgaggccctacctcaaattttctatttatgtataaaaatgcaatttattgtattatatatttgcctattatgtactgatataaattagaatttaccctaataatgtatgagttcacaaaaccctaaataaatgtcagtgtttaaaacatga

SEQ ID NO: 313181 - protein, 674 aa, Artificial Sequence
  derived and/or modified sequence
MDKFWWHAAWGLCLVPLSLAQIDLNITCRFAGVFHVEKNGRYSISRTEAADLCKAFNSTLPTMAQMEKALSIGFETCRYGFIEGHVVIPRIHPNSICAANNTGVYILTSNTSQYDTYCFNASAPPEEDCTSVTDLPNAFDGPITITIVNRDGTRYVQKGEYRTNPEDIYPSNPTDDDVSSGSSSERSSTSGGYIFYTFSTVHPIPDEDSPWITDSTDRIPATTLMSTSATATETATKRQETWDWFSWLFLPSESKNHLHTTTQMAGTSSNTISAGWEPNEENEDERDRHLSFSGSGIDDDEDFISSTISTTPRAFDHTKQNQDWTQWNPSHSNPEVLLQTTTRMTDVDRNGTTAYEGNWNPEAHPPLIHHEHHEEEETPHSTSTIQATPSSTTEETATQKEQWFGNRWHEGYRQTPKEDSHSTTGTAAASAHTSHPMQGRTTPSPEDSSWTDFFNPISHPMGRGHQAGRRMDMDSSHSITLQPTANPNTGLVEDLDRTGPLSMTTQQSNSQSFSTSHEGLEEDKDHPTTSTLTSSRDQDTFHPSGGSHTTHGSESDGHSHGSQEGGANTTSGPIRTPQIPEWLIILASLLALALILAVCIAVNSRRRCGQKKKLVINSGNGAVEDRKPSGLNGEASKSQEMVHLVNKESSETPDQFMTADETRNLQNVDMKIGV

SEQ ID NO: 313182 - DNA, 2025 bp, Artificial Sequence
  derived and/or modified sequence
atggataagttttggtggcacgccgcctgggggctgtgccttgtccctttgtcactcgcgcagatcgatttgaacatcacctgtcggtttgccggagtgttccacgtggagaaaaacggacgctactctatttcacggacagaggccgctgatctgtgcaaggcatttaattctacgttgcccactatggcccagatggaaaaagccttatctataggttttgagacttgccgttatggtttcatcgaaggacatgtagtcataccccgcatacacccgaactccatctgtgctgcaaacaatacaggggtgtatattctaacgagcaacacttcccagtacgatacatactgctttaacgcaagcgccccccccgaagaggactgcacatcagtgactgacctccccaacgcctttgatgggcccatcactatcaccattgttaaccgcgatggaacccgatacgtgcaaaaaggtgagtacagaactaaccctgaagatatctaccctagcaacccaaccgatgacgacgtttctagcggcagctcctccgaacgttcaagcacttctggaggctacatcttttacacattcagcactgtccaccccattcctgatgaagactccccctggatcacggactctaccgatcgaatccccgccaccaccctgatgtcaaccagcgcaacggccaccgaaaccgctacaaagcggcaggaaacgtgggattggttcagctggctgtttttgccttctgagagcaaaaatcacctgcataccaccacccagatggcgggtacaagctccaacacaatctcagccggatgggagcccaatgaagagaatgaagacgagcgcgataggcacctctccttttctgggagcggcattgacgacgacgaagactttatatcatctacaattagcaccacgccaagagccttcgaccatactaaacaaaaccaggactggactcagtggaacccttcccactcaaatccagaagtcttgctgcagacaactacccgaatgacagacgtggatagaaacggcacaaccgcatacgaagggaactggaatccagaagctcaccctcccctaatccatcacgagcatcacgaggaggaagaaactccccacagtacttcgacaatccaggcgacaccgagctctacaaccgaagaaacggcaactcagaaggagcaatggttcggtaacaggtggcacgaggggtatcggcagacccccaaagaagactctcattccaccacgggtactgctgccgcatccgcccatacgtcgcatccaatgcaaggccgaacaaccccctccccagaggacagtagctggacagacttcttcaatccaattagccacccgatgggtcggggccatcaagcaggccggcgcatggacatggattcatctcacagtatcaccctgcaaccaacagcgaaccctaacacaggtctggtggaggacttagacagaaccggccccctttccatgaccacacagcagtcgaattcccagtctttctccaccagccacgaagggctggaagaagacaaggaccatccaacgacctcaacactcaccagtagtagagaccaagacacattccaccccagcggcggctcacacacgactcacggaagcgagtccgacggtcatagtcacggctctcaggaaggaggcgccaacactacttcagggcctatacggactccacagatccctgagtggcttatcatccttgcaagcctattggccctggctctgatattagccgtgtgtattgctgttaacagtcgacgtcgatgcggtcagaagaagaaactcgtcataaattctggaaacggcgccgtcgaggataggaaaccatctgggcttaatggagaggcctcgaaaagccaagagatggtgcatctagtgaacaaggagagctctgaaacccccgatcagttcatgacagccgacgaaacacgtaatttgcagaacgtggacatgaagatcggcgtatag

SEQ ID NO: 313183 - DNA, 2025 bp, Artificial Sequence
  derived and/or modified sequence
atggacaagttctggtggcacgccgcctggggcctgtgcctggtgcccctgagcctggcccagattgacctgaacatcacctgccgctttgctggggtcttccacgtggagaagaatggccgctacagcatcagcaggacagaagctgctgacctgtgcaaggccttcaacagcaccctgcccaccatggcccagatggagaaggccctgagcatcggctttgagacctgccgctatggcttcatcgagggccacgtggtgatcccccgcatccaccccaacagcatctgtgccgccaacaacacaggagtgtacatcctgaccagcaacaccagccagtatgacacctactgcttcaatgccagcgcccccccagaggaggactgcacctctgtgacagacctgcccaatgcctttgatggccccatcaccatcaccatcgtgaacagagatggcaccaggtatgtgcagaagggggagtaccgcaccaaccctgaggacatctaccccagcaaccccacagatgatgatgtgagcagcggcagcagcagcgagaggagcagcaccagcggcggctacatcttctacaccttcagcacagtgcaccccatcccagatgaggacagcccctggatcacagacagcacagaccgcatcccagccaccaccctgatgagcaccagcgccacagccacagaaacagccaccaagaggcaggagacctgggactggttctcctggctgttcctgcccagcgagagcaagaaccacctgcacaccaccacccagatggccggcaccagcagcaacaccatctctgctggctgggagcccaatgaagaaaatgaagatgagcgggacagacacctgtccttcagcggcagcggcattgatgatgatgaggacttcatcagcagcaccatcagcaccaccccccgggcctttgaccacaccaagcagaaccaggactggacccagtggaaccccagccacagcaaccctgaggtgctgctgcagaccaccaccaggatgacagatgtggacagaaatggcaccacagcctatgagggcaactggaaccctgaggcccaccccccactcatccaccacgagcaccacgaggaggaggagaccccccacagcaccagcaccatccaggccacccccagcagcaccacagaggagacagccacccagaaggagcagtggtttggaaaccgctggcatgagggctaccggcagacccccaaggaggacagccacagcaccaccggcacagctgctgccagcgcccacaccagccaccccatgcagggccgcaccacccccagccctgaggacagctcctggacagacttcttcaaccccatcagccaccccatgggccggggccaccaggccggccgcaggatggacatggacagcagccacagcatcaccctgcagcccacagccaaccccaacacaggcctggtggaggacctggacagaacaggccccctgtccatgaccacccagcagagcaacagccagagcttcagcaccagccatgagggcctggaggaggacaaggaccaccccaccaccagcaccctgaccagcagccgggaccaggacaccttccaccccagcggcggcagccacaccacccacggcagcgagagtgatggccacagccacggcagccaggagggcggggccaacaccaccagcggccccatccgcaccccccagatccctgagtggctgatcatcctggccagcctgctggccctggccctgatcctggccgtgtgcatcgctgtgaacagcagaagaagatgtggccagaagaagaagctggtgatcaacagcggaaatggagctgtggaggacaggaagcccagcggcctgaatggagaggccagcaagagccaggagatggtgcacctggtgaacaaggagagcagcgagaccccagaccagttcatgacagcagatgagaccaggaacctgcagaatgtggacatgaagattggagtgtag

SEQ ID NO: 313184 - DNA, 2025 bp, Artificial Sequence
  derived and/or modified sequence
atggacaagttctggtggcacgccgcctggggcctgtgcctggtgccattgtctctcgcacagatcgatctcaatattacatgccggtttgccggcgttttccatgtcgagaaaaatgggcggtattctatcagcaggaccgaagccgccgatctctgtaaagcctttaactcaaccctccctaccatggctcaaatggagaaggccctgtctattggattcgagacctgccggtacggattcatagaagggcatgtggtgataccacgtatccaccccaatagcatctgtgctgccaacaatactggagtatacatcctgacttccaacacttcacagtacgacacctactgtttcaatgcatccgcgccgcccgaggaggattgtacttccgtgaccgaccttcccaacgcttttgatgggccaatcacgattactattgttaaccgggacggaactcgctacgtacagaagggagaatatcggacgaatcctgaagatatctaccctagcaatcctaccgatgacgacgtatccagcggtagtagttcagaacgctcctcaaccagtggcggctatatcttttacacgttttcaacagtgcaccccattccagatgaagacagtccatggataaccgactctaccgatcggattcccgctactacgcttatgtcaaccagcgctaccgccaccgagactgctacgaagcgccaggagacgtgggattggttctcttggttgtttctgccttccgaaagtaagaaccaccttcacaccacaacgcagatggcggggacatcctccaatacaatttcggcggggtgggaacctaacgaagagaacgaagacgaaagagataggcatcttagcttctctgggagcggtatcgatgacgacgaagactttatcagcagcaccatcagcacaacaccccgagccttcgatcacaccaagcagaatcaggactggacacagtggaaccctagtcactctaaccctgaagttctgctgcagacaacaacccgcatgactgacgtggatcggaatggaactactgcctacgagggtaactggaacccagaagcgcatcctcctctgatccaccacgaacaccatgaggaggaagagacccctcactcaaccagtacgattcaggcaaccccctcctcaaccaccgaagagaccgccacacagaaagaacagtggtttggtaaccgatggcacgagggataccggcaaaccccaaaggaggactcccactccaccacagggaccgccgcggcatccgctcatacctcccatcctatgcaggggcgcacaactccttctcccgaggattcttcctggacagatttctttaatccaatcagtcacccgatgggtcgtgggcaccaagctggccggcgcatggacatggacagttcacacagcatcactttacagcctaccgccaatccaaatactggcctggtcgaagacctggacagaaccggaccactatcaatgactacgcagcagtcaaacagtcagagtttctcaacctctcatgaggggctggaagaagacaaagatcatcccacaacctcaacgcttacctctagtcgggaccaggacactttccaccccagtgggggctcgcatactacacacggatcggagtcagacggccacagtcacggcagtcaggaaggaggagccaatactaccagcggacccatccgtactccccagatcccagagtggctcattattctagcaagtttgctggccctggccttgattctcgccgtgtgtatcgcggtgaactcccgaagaaggtgcgggcagaaaaaaaagcttgttattaattctggcaatggagccgtagaggaccgcaaacccagtggcctaaatggcgaagcctccaagtcacaagagatggtacacttggtgaataaggaatctagcgagactcccgatcagttcatgacagcagatgagacccgcaacctgcagaatgtcgacatgaagattggcgtttag

SEQ ID NO: 313185 - DNA, 2025 bp, Artificial Sequence
  derived and/or modified sequence
atggacaagttttggtggcacgctgcttggggcctgtgtctcgtcccgttgagcctggcgcagatcgatttaaacattacctgtaggtttgcgggagtgttccacgttgaaaagaatggcagatactctatctccagaaccgaagctgccgatctctgtaaggccttcaattctaccctgcccaccatggcccagatggagaaagccctgagtatcggttttgaaacttgtcgatatggattcatcgagggccacgtcgttatccctagaatccatccgaatagtatctgcgccgcaaacaacaccggagtgtatatcttaaccagtaacacatcccagtatgacacttattgttttaacgcatcagcccctcctgaggaggattgcactagtgtaactgacctgccaaatgccttcgatggcccaatcaccattaccatagtcaacagggacggaactcgatatgtccagaaaggggagtaccgtaccaatccggaagacatctacccaagtaaccccaccgatgacgatgtcagctctggaagctccagtgagcgatcttccaccagcggaggttacattttttacacctttagcactgtgcatccgatccccgacgaagactccccctggataaccgactctactgaccggatcccagccacaacactgatgagcacttcggctactgctactgagaccgctacaaaacgacaagagacttgggactggttcagttggttattcctgccatccgaatccaagaatcatctccacacaaccactcagatggcaggaacctctagtaacaccataagcgcaggctgggaacccaacgaggaaaatgaagatgaaagggataggcacctttcctttagcgggagtggcatcgatgacgacgaagactttatatctagcactatctccacaactccgagagcctttgaccacactaaacagaaccaagattggacccagtggaatccaagccatagcaatccagaagtgctgctccaaaccactacccgcatgaccgatgttgaccgcaacgggactacagcttacgaaggaaactggaatcctgaggcccaccctcctctcattcatcatgagcaccatgaggaggaagagactcctcactccacatctacgattcaggcaactcccagctcaaccaccgaggagactgcgactcagaaggagcagtggttcggtaataggtggcatgaggggtaccgccagacaccaaaggaagatagccacagcactacaggcactgccgcagcttccgctcacacatcccatcccatgcaaggtcggacaacgcccagcccagaagatagctcatggaccgatttcttcaaccccatctcacacccaatggggagaggacatcaggctggaagacgtatggacatggatagtagtcatagtattaccctgcaacctaccgccaaccctaatacaggtctggttgaagacctagaccgcaccgggcctttaagcatgactacccagcagtctaatagccagagtttttccacctcccatgaaggtttggaagaggacaaagatcatcctacaacctccaccctaaccagcagccgggaccaggatactttccacccctccggtggcagtcatactacccacgggtcagaatctgatgggcattcacacggaagccaggaagggggagctaacaccacaagcggccctatcagaacacctcagatccccgagtggctaataatcctggcctcactcttggcgctggcccttatcctggccgtctgcatagcagtgaacagcagacggcgatgcggccagaagaaaaagctcgtgattaacagtggtaacggggcagtggaagaccggaagcctagtggcctaaacggcgaggcctctaagtcccaggagatggtccatctggtgaacaaagaaagctcagaaactcccgaccagttcatgacagctgacgaaacacgcaacctccagaacgtggacatgaagattggcgtgtag

SEQ ID NO: 313186 - DNA, 2294 bp, Artificial Sequence
  derived and/or modified sequence
cctcattgcccagcggaccccagcctctgccaggttcggtccgccatcctcgtcccgtcctccgccggcccctgccccgcgcccagggatcctccagctcctttcgcccgcgccctccgttcgctccggacaccatggacaagttttggtggcacgcagcctggggactctgcctcgtgccgctgagcctggcgcagatcgatttgaatataacctgccgctttgcaggtgtattccacgtggagaaaaatggtcgctacagcatctctcggacggaggccgctgacctctgcaaggctttcaatagcaccttgcccacaatggcccagatggagaaagctctgagcatcggatttgagacctgcaggtatgggttcatagaagggcacgtggtgattccccggatccaccccaactccatctgtgcagcaaacaacacaggggtgtacatcctcacatccaacacctcccagtatgacacatattgcttcaatgcttcagctccacctgaagaagattgtacatcagtcacagacctgcccaatgcctttgatggaccaattaccataactattgttaaccgtgatggcacccgctatgtccagaaaggagaatacagaacgaatcctgaagacatctaccccagcaaccctactgatgatgacgtgagcagcggctcctccagtgaaaggagcagcacttcaggaggttacatcttttacaccttttctactgtacaccccatcccagacgaagacagtccctggatcaccgacagcacagacagaatccctgctaccactttgatgagcactagtgctacagcaactgagacagcaaccaagaggcaagaaacctgggattggttttcatggttgtttctaccatcagagtcaaagaatcatcttcacacaacaacacaaatggctggtacgtcttcaaataccatctcagcaggctgggagccaaatgaagaaaatgaagatgaaagagacagacacctcagtttttctggatcaggcattgatgatgatgaagattttatctccagcaccatttcaaccacaccacgggcttttgaccacacaaaacagaaccaggactggacccagtggaacccaagccattcaaatccggaagtgctacttcagacaaccacaaggatgactgatgtagacagaaatggcaccactgcttatgaaggaaactggaacccagaagcacaccctcccctcattcaccatgagcatcatgaggaagaagagaccccacattctacaagcacaatccaggcaactcctagtagtacaacggaagaaacagctacccagaaggaacagtggtttggcaacagatggcatgagggatatcgccaaacacccaaagaagactcccattcgacaacagggacagctgcagcctcagctcataccagccatccaatgcaaggaaggacaacaccaagcccagaggacagttcctggactgatttcttcaacccaatctcacaccccatgggacgaggtcatcaagcaggaagaaggatggatatggactccagtcatagtataacgcttcagcctactgcaaatccaaacacaggtttggtggaagatttggacaggacaggacctctttcaatgacaacgcagcagagtaattctcagagcttctctacatcacatgaaggcttggaagaagataaagaccatccaacaacttctactctgacatcaagcagagaccaagacacattccaccccagtggggggtcccataccactcatggatctgaatcagatggacactcacatgggagtcaagaaggtggagcaaacacaacctctggtcctataaggacaccccaaattccagaatggctgatcatcttggcatccctcttggccttggctttgattcttgcagtttgcattgcagtcaacagtcgaagaaggtgtgggcagaagaaaaagctagtgatcaacagtggcaatggagctgtggaggacagaaagccaagtggactcaacggagaggccagcaagtctcaggaaatggtgcatttggtgaacaaggagtcgtcagaaactccagaccagtttatgacagctgatgagacaaggaacctgcagaatgtggacatgaagattggggtgtaacacctacaccattatcttggaaagaaacaaccgttggaaacataaccattacagggagctgggacacttaacagatgcaatgtgctactgattgtttcattgcgaatcttttttagcataaaattttctactctt

SEQ ID NO: 313187 - DNA, 2025 bp, Artificial Sequence
  derived and/or modified sequence
atggacaagttctggtggcacgccgcctggggcctgtgcctggtgcccctgagcctggcccagatcgacctgaacatcacctgcagattcgccggcgtgttccacgtggagaagaacggcagatacagcatcagcagaaccgaggccgccgacctgtgcaaggccttcaacagcaccctgcccaccatggcccagatggagaaggccctgagcatcggcttcgagacctgcagatacggcttcatcgagggccacgtggtgatccccagaatccaccccaacagcatctgcgccgccaacaacaccggcgtgtacatcctgaccagcaacaccagccagtacgacacctactgcttcaacgccagcgccccccccgaggaggactgcaccagcgtgaccgacctgcccaacgccttcgacggccccatcaccatcaccatcgtgaacagagacggcaccagatacgtgcagaagggcgagtacagaaccaaccccgaggacatctaccccagcaaccccaccgacgacgacgtgagcagcggcagcagcagcgagagaagcagcaccagcggcggctacatcttctacaccttcagcaccgtgcaccccatccccgacgaggacagcccctggatcaccgacagcaccgacagaatccccgccaccaccctgatgagcaccagcgccaccgccaccgagaccgccaccaagagacaggagacctgggactggttcagctggctgttcctgcccagcgagagcaagaaccacctgcacaccaccacccagatggccggcaccagcagcaacaccatcagcgccggctgggagcccaacgaggagaacgaggacgagagagacagacacctgagcttcagcggcagcggcatcgacgacgacgaggacttcatcagcagcaccatcagcaccacccccagagccttcgaccacaccaagcagaaccaggactggacccagtggaaccccagccacagcaaccccgaggtgctgctgcagaccaccaccagaatgaccgacgtggacagaaacggcaccaccgcctacgagggcaactggaaccccgaggcccacccccccctgatccaccacgagcaccacgaggaggaggagaccccccacagcaccagcaccatccaggccacccccagcagcaccaccgaggagaccgccacccagaaggagcagtggttcggcaacagatggcacgagggctacagacagacccccaaggaggacagccacagcaccaccggcaccgccgccgccagcgcccacaccagccaccccatgcagggcagaaccacccccagccccgaggacagcagctggaccgacttcttcaaccccatcagccaccccatgggcagaggccaccaggccggcagaagaatggacatggacagcagccacagcatcaccctgcagcccaccgccaaccccaacaccggcctggtggaggacctggacagaaccggccccctgagcatgaccacccagcagagcaacagccagagcttcagcaccagccacgagggcctggaggaggacaaggaccaccccaccaccagcaccctgaccagcagcagagaccaggacaccttccaccccagcggcggcagccacaccacccacggcagcgagagcgacggccacagccacggcagccaggagggcggcgccaacaccaccagcggccccatcagaaccccccagatccccgagtggctgatcatcctggccagcctgctggccctggccctgatcctggccgtgtgcatcgccgtgaacagcagaagaagatgcggccagaagaagaagctggtgatcaacagcggcaacggcgccgtggaggacagaaagcccagcggcctgaacggcgaggccagcaagagccaggagatggtgcacctggtgaacaaggagagcagcgagacccccgaccagttcatgaccgccgacgagaccagaaacctgcagaacgtggacatgaagatcggcgtgtag

SEQ ID NO: 313188 - protein, 396 aa, Artificial Sequence
  derived and/or modified sequence
MDKFWWHAAWGLCLVPLSLAQIDLNITCRFAGVFHVEKNGRYSISRTEAADLCKAFNSTLPTMAQMEKALSIGFETCRYGFIEGHVVIPRIHPNSICAANNTGVYILTSNTSQYDTYCFNASAPPEEDCTSVTDLPNAFDGPITITIVNRDGTRYVQKGEYRTNPEDIYPSNPTDDDVSSGSSSERSSTSGGYIFYTFSTVHPIPDEDSPWITDSTDRIPATNMDSSHSITLQPTANPNTGLVEDLDRTGPLSMTTRRDQDTFHPSGGSHTTHGSESDGHSHGSQEGGANTTSGPIRTPQIPEWLIILASLLALALILAVCIAVNSRRRCGQKKKLVINSGNGAVEDRKPSGLNGEASKSQEMVHLVNKESSETPDQFMTADETRNLQNVDMKIGV

SEQ ID NO: 313189 - DNA, 1191 bp, Artificial Sequence
  derived and/or modified sequence
atggataaattctggtggcacgcagcctggggtctgtgtcttgtccctttgtcccttgcccagattgacctgaatattacctgcagattcgccggagttttccatgtggaaaaaaacggacgatatagtatcagccgtaccgaggctgctgatctttgtaaggcctttaacagtactcttcccactatggcacagatggaaaaggccctgtctataggtttcgagacctgccgctatggcttcatagagggccacgtggtgattcccagaattcacccaaactctatttgtgcagccaataacacaggagtgtacattctcacaagtaacacttcacagtatgacacatattgcttcaacgccagtgcacctcccgaggaggactgcactagtgtcaccgatttgcccaatgctttcgatggtcccattacaattaccatcgtgaaccgggacggcacaagatacgtgcagaagggggaataccggacgaatcccgaggacatatacccaagtaacccaactgatgacgatgtgagttcagggtcgtcctctgaacgctccagcacatccgggggctatatcttttacacatttagcaccgtacatcccatcccggacgaagattcgccatggatcaccgatagcaccgaccgaattcccgcgactaatatggattctagccattccattactctgcagcctacagctaacccaaataccgggctggtcgaggatcttgacagaacgggccctctctcgatgaccacccggagggaccaggataccttccatccttctggaggctcacataccacacacggtagcgagtccgacggccattctcatggctcgcaggaaggcggcgccaacacaacctcaggtcccatcaggactcctcaaataccagaatggctgatcattcttgcttctcttttggccttggctctcatattggctgtgtgcatcgctgtgaactcgcgaagaaggtgcgggcagaagaaaaagctagtcatcaattcaggcaacggtgctgtggaggacaggaagcctagtgggctcaatggtgaagctagcaagagccaggagatggtacacctagtcaataaagagtcctcagagacccctgaccaattcatgacagccgacgaaacccgaaacctgcaaaatgttgacatgaaaatcggggtgtag

SEQ ID NO: 313190 - DNA, 1191 bp, Artificial Sequence
  derived and/or modified sequence
atggacaagttctggtggcacgccgcctggggcctgtgcctggtgcccctgagcctggcccagattgacctgaacatcacctgccgctttgctggggtcttccacgtggagaagaatggccgctacagcatcagcaggacagaagctgctgacctgtgcaaggccttcaacagcaccctgcccaccatggcccagatggagaaggccctgagcatcggctttgagacctgccgctatggcttcatcgagggccacgtggtgatcccccgcatccaccccaacagcatctgtgccgccaacaacacaggagtgtacatcctgaccagcaacaccagccagtatgacacctactgcttcaatgccagcgcccccccagaggaggactgcacctctgtgacagacctgcccaatgcctttgatggccccatcaccatcaccatcgtgaacagagatggcaccaggtatgtgcagaagggggagtaccgcaccaaccctgaggacatctaccccagcaaccccacagatgatgatgtgagcagcggcagcagcagcgagaggagcagcaccagcggcggctacatcttctacaccttcagcacagtgcaccccatcccagatgaggacagcccctggatcacagacagcacagaccgcatcccagccaccaacatggacagcagccacagcatcaccctgcagcccacagccaaccccaacacaggcctggtggaggacctggacagaacaggccccctgtccatgaccacccggcgggaccaggacaccttccaccccagcggcggcagccacaccacccacggcagcgagagtgatggccacagccacggcagccaggagggcggggccaacaccaccagcggccccatccgcaccccccagatccctgagtggctgatcatcctggccagcctgctggccctggccctgatcctggccgtgtgcatcgctgtgaacagcagaagaagatgtggccagaagaagaagctggtgatcaacagcggaaatggagctgtggaggacaggaagcccagcggcctgaatggagaggccagcaagagccaggagatggtgcacctggtgaacaaggagagcagcgagaccccagaccagttcatgacagcagatgagaccaggaacctgcagaatgtggacatgaagattggagtgtag

SEQ ID NO: 313191 - DNA, 1191 bp, Artificial Sequence
  derived and/or modified sequence
atggacaagttctggtggcacgccgcctggggcctgtgcctggtgccgctgtctcttgcgcaaatagacctcaacattacctgccggtttgcaggcgttttccacgtggagaaaaacggccggtatagtatttcaaggacggaagccgccgacctgtgcaaagctttcaattcaacattgccgaccatggctcaaatggagaaggcactcagcattggatttgagacttgtaggtatggcttcatcgaaggccacgttgtaatccccaggatccaccctaactcaatctgcgccgctaacaatacgggcgtctacatcttgacaagcaacacatcgcaatacgatacttattgttttaatgcatccgctccacccgaggaggattgtacatcagtcactgacctccccaatgcgttcgacgggcccataaccattactatagtcaatcgggatggcacccgatacgtccaaaagggggagtatcgcaccaatcctgaggatatctaccctagtaacccgaccgatgatgacgtgtcaagcgggagctctagcgaacggtcatccacgagcggaggatatatcttctatacctttagtacggtgcaccccatacccgatgaagattccccctggattactgactccacagacagaatccctgccaccaatatggacagcagccactccatcaccctgcagcctaccgctaaccctaatacaggtctggtggaggatctggaccgaaccggccccctgtctatgactacccggcgggaccaagatacatttcacccctctgggggctcgcacaccacacacggatctgaatccgatggccactcccacggcagccaggagggcggggccaatacaactagtggccccattaggaccccccagattccagaatggctgataatcctagcctctcttttggcattggccctgattctcgctgtgtgcattgccgtgaattccaggcgcaggtgtggccaaaagaaaaaactcgtcatcaactccggtaacggggccgttgaggatagaaaaccctccggcctgaacggcgaggcttccaagtcccaggagatggtccatctggtcaataaggagtcatcagagacaccagatcagtttatgactgccgatgagacaagaaacctacagaatgtggatatgaaaatcggagtctag

SEQ ID NO: 313192 - DNA, 1191 bp, Artificial Sequence
  derived and/or modified sequence
atggataaattttggtggcacgccgcttggggcttatgtctcgtgcccctgtcattggcccagattgatctcaacattacatgtaggttcgccggagtgttccacgtggagaaaaatggcagatattcaatctcacgtactgaggctgcggacctctgcaaagccttcaatagcactctgcctaccatggcacagatggaaaaggccctatcaataggtttcgagacttgcaggtacggctttatagagggccatgtcgtgatcccgcgaattcatccgaacagcatttgtgcggcaaacaacactggggtgtatatactgactagcaacacctcccaatatgacacttattgcttcaatgccagcgcaccacctgaagaggattgcactagcgtgacagacctccctaacgcctttgacggccctatcacaatcaccatcgtcaatcgggatggcacacggtacgtgcagaaaggtgaatataggaccaaccccgaggacatttacccttcaaatcctacagatgacgatgtctcatccggttcatcgtcagagcggtccagtacaagtgggggttatatattctatacattctcgactgtgcatcccattccagacgaggattctccatggatcactgatagcacagacagaatcccagctacaaacatggattcgagccactcgatcacccttcaacctacagccaaccccaatacaggtttagtagaagacctcgacagaacagggccattgagcatgaccactaggcgcgaccaggacacttttcacccaagtggaggcagccatactactcacggttctgaaagcgacgggcatagccacggctcacaggaggggggagctaacactaccagcggcccaatcaggacacctcaaatccccgagtggctcatcatcctggcgagtctcctcgccctcgctctgatcctggcggtctgcattgcagtgaattctagaagacgatgtggtcagaaaaaaaaactggtaattaacagtggtaacggagctgtggaagatagaaagccaagtggtttaaatggcgaggcatcaaagagccaggagatggtgcacttggtcaataaggaatcatcagagacgccggatcagttcatgaccgctgatgagactcggaatctccaaaacgtcgacatgaaaattggcgtctag

SEQ ID NO: 313193 - DNA, 1460 bp, Artificial Sequence
  derived and/or modified sequence
cctcattgcccagcggaccccagcctctgccaggttcggtccgccatcctcgtcccgtcctccgccggcccctgccccgcgcccagggatcctccagctcctttcgcccgcgccctccgttcgctccggacaccatggacaagttttggtggcacgcagcctggggactctgcctcgtgccgctgagcctggcgcagatcgatttgaatataacctgccgctttgcaggtgtattccacgtggagaaaaatggtcgctacagcatctctcggacggaggccgctgacctctgcaaggctttcaatagcaccttgcccacaatggcccagatggagaaagctctgagcatcggatttgagacctgcaggtatgggttcatagaagggcacgtggtgattccccggatccaccccaactccatctgtgcagcaaacaacacaggggtgtacatcctcacatccaacacctcccagtatgacacatattgcttcaatgcttcagctccacctgaagaagattgtacatcagtcacagacctgcccaatgcctttgatggaccaattaccataactattgttaaccgtgatggcacccgctatgtccagaaaggagaatacagaacgaatcctgaagacatctaccccagcaaccctactgatgatgacgtgagcagcggctcctccagtgaaaggagcagcacttcaggaggttacatcttttacaccttttctactgtacaccccatcccagacgaagacagtccctggatcaccgacagcacagacagaatccctgctaccaatatggactccagtcatagtataacgcttcagcctactgcaaatccaaacacaggtttggtggaagatttggacaggacaggacctctttcaatgacaacgcgtagagaccaagacacattccaccccagtggggggtcccataccactcatggatctgaatcagatggacactcacatgggagtcaagaaggtggagcaaacacaacctctggtcctataaggacaccccaaattccagaatggctgatcatcttggcatccctcttggccttggctttgattcttgcagtttgcattgcagtcaacagtcgaagaaggtgtgggcagaagaaaaagctagtgatcaacagtggcaatggagctgtggaggacagaaagccaagtggactcaacggagaggccagcaagtctcaggaaatggtgcatttggtgaacaaggagtcgtcagaaactccagaccagtttatgacagctgatgagacaaggaacctgcagaatgtggacatgaagattggggtgtaacacctacaccattatcttggaaagaaacaaccgttggaaacataaccattacagggagctgggacacttaacagatgcaatgtgctactgattgtttcattgcgaatcttttttagcataaaattttctactctt

SEQ ID NO: 313194 - DNA, 1191 bp, Artificial Sequence
  derived and/or modified sequence
atggacaagttctggtggcacgccgcctggggcctgtgcctggtgcccctgagcctggcccagatcgacctgaacatcacctgcagattcgccggcgtgttccacgtggagaagaacggcagatacagcatcagcagaaccgaggccgccgacctgtgcaaggccttcaacagcaccctgcccaccatggcccagatggagaaggccctgagcatcggcttcgagacctgcagatacggcttcatcgagggccacgtggtgatccccagaatccaccccaacagcatctgcgccgccaacaacaccggcgtgtacatcctgaccagcaacaccagccagtacgacacctactgcttcaacgccagcgccccccccgaggaggactgcaccagcgtgaccgacctgcccaacgccttcgacggccccatcaccatcaccatcgtgaacagagacggcaccagatacgtgcagaagggcgagtacagaaccaaccccgaggacatctaccccagcaaccccaccgacgacgacgtgagcagcggcagcagcagcgagagaagcagcaccagcggcggctacatcttctacaccttcagcaccgtgcaccccatccccgacgaggacagcccctggatcaccgacagcaccgacagaatccccgccaccaacatggacagcagccacagcatcaccctgcagcccaccgccaaccccaacaccggcctggtggaggacctggacagaaccggccccctgagcatgaccaccagaagagaccaggacaccttccaccccagcggcggcagccacaccacccacggcagcgagagcgacggccacagccacggcagccaggagggcggcgccaacaccaccagcggccccatcagaaccccccagatccccgagtggctgatcatcctggccagcctgctggccctggccctgatcctggccgtgtgcatcgccgtgaacagcagaagaagatgcggccagaagaagaagctggtgatcaacagcggcaacggcgccgtggaggacagaaagcccagcggcctgaacggcgaggccagcaagagccaggagatggtgcacctggtgaacaaggagagcagcgagacccccgaccagttcatgaccgccgacgagaccagaaacctgcagaacgtggacatgaagatcggcgtgtag

SEQ ID NO: 313195 - protein, 88 aa, Artificial Sequence
  derived and/or modified sequence
MGENEDEKQAQAGQVFENFVQASTCKGTLQAFNILTRHLDLDPLDHRNFYSKLKSKVTTWKAKALWYKLDKRGSHKEYKRGKSCTNTK

SEQ ID NO: 313196 - protein, 98 aa, Artificial Sequence
  derived and/or modified sequence
MGENEDEKQAQAGQVFENFVQASTCKGTLQAFNILTRHLDLDPLDHRNFYSKLKSKVTTWKAKALWYKLDKRGSHKEYKRGKSCTNTKCLIVGGGPCG

SEQ ID NO: 313197 - DNA, 99 bp, Artificial Sequence
  derived and/or modified sequence
agaaacagccagaaaacaattattacctacagcattaaaactattcaaatgacagcatatttttcagcagaaatcatgaaggccagaaggacgtgtcat

SEQ ID NO: 313198 - protein, 120 aa, Artificial Sequence
  derived and/or modified sequence
MGENEDEKQAQAGQVFENFVQASTCKGTLQAFNILTRHLDLDPLDHRNFYSKLKSKVTTWKAKALWYKLDKRGSHKEYKRGKSCTNTKCLIVGGGPCGLRTAIELAYLGAKVVVVEKRDS

SEQ ID NO: 313199 - protein, 134 aa, Artificial Sequence
  derived and/or modified sequence
MGENEDEKQAQAGQVFENFVQASTCKGTLQAFNILTRHLDLDPLDHRNFYSKLKSKVTTWKAKALWYKLDKRGSHKEYKRGKSCTNTKCLIVGGGPCGLRTAIELAYLGAKVVVVEKRDSFSRNNVLHLWPFTI

SEQ ID NO: 313200 - protein, 102 aa, Artificial Sequence
  derived and/or modified sequence
MGENEDEKQAQAGQVFENFVQASTCKGTLQAFNILTRHLDLDPLDHRNFYSKLKSKVTTWKAKALWYKLDKRGSHKEYKRGKSCTNTKCLIVGGGPCGLRTA

SEQ ID NO: 313201 - DNA, 6505 bp, Artificial Sequence
  derived and/or modified sequence
gacagatttcaatgtctgttgaaggcccccccacaccctccttcagtgccgggggcatggagggatatcttgggctcctgctgttttttaaaatgatgcgagctcatctcctgtcctgggtgtgaacgagtatatcttaccagggatgtaactgaacatttttttctgcattgtgttcctactgagcaacccaagatggccaggaactgctctgagtgcaaggagaagagggcagcacatatcctctgcacctactgcaatcgctggctgtgcagctcttgcacagaggaacaccgacacagccctgtccccgggggcccattctttcctcgggcccagaagggatctccaggagtgaatggtggtcccggagacttcaccttgtattgtcctctacacacacaggaagtactcaagctattctgtgagacatgtgatatgctcacttgccatagctgcctagtggtggaacacaaagaacacaggtgcagacatgttgaagaagttttgcaaaaccagaggatgcttctggaaggtgtgactacacaggtggcacataagaaatccagtctacagacatctgcaaagcaaattgaggacaggatttttgaagtgaagcatcagcataggaaggtggaaaaccagatcaaaatggccaagatggttctgatgaatgagctgaacaaacaggccaatgggctaatagaggaattagaggggattactaatgagagaaagcggaagctggaacagcagttacagagcatcatggttctcaaccgtcagtttgagcatgtgcagaatttcatcaactgggctgtctgcagcaaaaccagtgtcccttttcttttcagcaaagagctgattgtgtttcagatgcagcgattgctggagacaagttgtaacacagatcctggctccccttggagtatcagattcacctgggagcctaacttctggaccaagcagctagcttctcttggctgcataactactgaaggtggacaaatgtccagggcagatgctcctgcttatggaggcttacaggggtcatcacccttttatcaaagccaccagtctccagtggctcagcaagaggctcttagccacccctcacacaagttccagtctccagcagtgtgctcctcatctgtgtgctgctcccactgctccccagtctcgccttccctcaaaggccaggtccccccacccagcatacacccagcccacagcttcaggcagccccctgagatggtgccccagcagctggggtctctgcagtgctctgccctgctgcccagggagaaagagctggcctgcagccctcatccaccaaagctgctgcagccctggctggaaacccagccccccgtggagcaggagagcacatcccagcggctggggcagcagctgacttcccagcccgtgtgcattgtccccccacaggatgttcagcaaggagcccatgcccagcccaccttacagacaccctctatccaagtccagtttggccaccaccagaagctgaagctcagtcactttcagcagcagccacagcagcagctaccacctccaccaccacccctcccccatcccccacctccccttccccctcccccacagcagccacacccacctcttcctccatcccagcatctggcttctagtcagcacgagagccctcctggccctgcctgttctcagaacatggacataatgcatcacaagtttgagctggaggaaatgcagaaggacttggagcttcttctccaggctcaacagcccagcctgcaactgagtcagaccaaatctcctcagcatcttcagcaaaccattgtggggcagatcaactacatcgtgaggcagccagcacctgtccagtcccagagccaggaggagaccctgcaggctacagatgagcccccagcatctcagggctcaaagccggctctccctcttgacaagaatactgctgctgccttgccccaggcgtctggggaagaaacccctctcagtgtccccccagtggacagcaccatccagcactcctctccaaatgtggtgagaaagcactccacctcgctgagcatcatgggcttttccaacactctggagatggagttgtcatctaccaggttggagaggcccctagagccacagatccagagtgtgagcaacctgacagctggtgccccccaggcagtaccaagcctgctgagtgctccccccaaaatggtgtccagcctgacaagtgttcaaaaccaggccatgcccagcctgacaaccagtcacctacagactgtgcccagccttgtgcatagcacattccagtccatgcccaacctgataagtgactcccctcaggctatggcaagcctggcaagtgatcaccctcaggctgggcccagcctaatgtctggtcacacccaggctgtgccgagtctggcaacttgtcctctgcagagcatccctccagtttctgacatgcagccagaaactgggtccagctccagttctggccgaacttcagggagcctgtgtcccagagatggggctgatccctccctggagaatgctctgtgtaaggtaagtcctggggaaatgctatccaaacttcctttgttcatcattgggcaaaagattggccactgggacccttattctgaccttagcttaacagttctgagaccactaatgacaaccatgtctgagttctttgattcttgtcgacatttcacttttgaaagatggaaagtgaggattccactcgcttcactgacttactgggacaaggtcccatagtccccggtctggatgctcccaaggacttggccatcccctcagaactggaggagccaattaacctctctgtgaagaaacctccactggcgccagtggtcagcacgtctacagctctgcagcagtaccagaacccaaaagagtgtgagaattttgaacaaggagccctagagctggatgcaaaagagaaccagagcatcagagccttcaatagtgagcataagattccctatgtgcgactggagcgactcaagatctgtgctgcctcctcaggagagatgcctgtgttcaaactgaagccacagaagaatgatcaggatgggagcttcctgctgatcatcgagtgtggcactgagtcctccagcatgtccattaaggtcagccaggacagactgtctgaggccacccaggccccaggtctggagggaagaaaggtcactgtcacttctttggctgggcagcggccaccagaagtggagggcacatctcctgaagaacacagactcattcctcgaaccccaggagccaagaagggccccccagccccaatagagaatgaggacttctgtgctgtttgcctcaatggcggagagttactgtgctgtgaccgctgccccaaagtgttccacctctcctgccatgtgccagccttgctcagcttcccagggggagagtgggtgtgtaccttgtgccgcagcctgacccagcccgagatggagtacgactgtgagaatgcctgctataaccagcctggaatgcgggcatctcctggcctaagcatgtatgaccagaagaagtgtgagaagctggtattgtccttgtgctgcaataacctcagcctgcccttccatgaacctgtcagccccctggcccggcattattaccagattatcaagaggcccatggacctgtcaatcatccggaggaagctgcaaaagaaggacccagctcactataccaccccagaggaggtggtatcagatgtgcgcctcatgttctggaactgtgctaagttcaattatcctgactccgaggttgcagaggctggccgctgcctggaagtgttctttgagggctggttgaaggagatctacccggagaaacggtttgcccagccaaggcaggaggactcagactccgaggaggtgtctagtgagagtggatgttccactccccagggcttcccgtggcctccctacatgcaggagggcatccaacccaagaggcggcgacgacatatggagaatgaaagagcaaaaagaatgtcatttcgcctggccaacagcatctctcaggtgtgagagccaaaaggagactgggcactctggcagctgttgtcccatactgtcgaccattcctccccatcttgcagcttatcctcttcagagtgtggatggtagatgagtcttgttgaactgtgtagtgctcttctttgccatttgcatctacagcatttatttaggagccgtagtacatccactacagagaagatttcagtaataaacaggaaagaggaaggtatttattattaccagagtaatcagatgtataggctccacttgacaagaccacacctggttaggctcgggaaaacctactttccttggtgaatttttttctgcctgggaaagcagacccgtctaaccttttagtgtccagggctcaggagccatgtatacatctgaactcctcctgggctcagaagtgggtaaaagaagggagagaggtttagacatatggcaggactgtgatccctggcccagcacagccaaagactgtcactgtttgcctttgcttgtcctgtctggatagaggcacctgccatgtgcagactagtggaggcttctagaggccataggtctcaatttgtgcctatttgggttctaacggttttcagggtatttgttttgcatagtcactttcctgatgttgacataggtggctgctgtgaaaatgctgtggatggtgtgacattcttgactgagctgggtggctgtggagagaccacttaaatcttctggttcagatttcacttacagacttagtaagatgtccacttcagagcccgccctctgtgctacttactctgggctaatcacacttctttagggtgagaacctgccttcctagaagtgactgttggtgcttgtcagtggccatacccttcatcatcctcattcagaggtatggatcgtgagttctgcttgtgaatactgtgagacagctgctgtctgcttcaggtccagagttccatgggtggagagagtaacccacaaccagctcactcctctgggcctctcctcctgcttaaagattctagttctcaacctctccaagttcatgagccaaagatcagaagtgagtcttctgaccagcccgcctccaggctgtctacagccccaaaaaagccaacacttttctggcagccctttttgttggaggttagagaaggcctcagggaccaacaggggccagatctagacattcctgggggaagtttgtctaaggtggacagggggaaaaatcaagaggcaaaaagccagtgtcctttggtgaccatgaagcaacctcagagccttagttctcctagaatgcagagagaagcattctggaagccatgggaacaggagctcgaggctgcatcctgaatgcatctgcatggccctcgcagggtgtttgtgaggatactggaggtcaggctacctcccaagcaagggcttggttgagaaggaacccattgctcatattgttgggggagctatgaacctgacatgtcagtggccaggactgagacagctctccctggtcctgtcattgcatggctaatttcaggggagtctgaggtcatggctttatttttgctaacagatgaagttcaaggatgttcttgtttgtagggcctttgctaatgagcagttttttaattagaaaacatttcttctctctttgtgagttgatggtattgctcatttccttctctacccaacctgagagatcatcttcactttaaagcaaaccatgccccttggcttgccattctttcagcagcacatgccacgttctaagcagatgggcttccgtgatcccgttttctagtttggggtaactgagtcttgaatgctttactagtccggcaatctttggacttaggcttctgccctttgagactcacatgactttctggtttggggtctggtcatttccctttcaatttttgaatctccttctctgttcagttggcttggcaaagtaccctctgttctcatgtcactaattcctgctctaggtcatctttcctttgtgcagcccacattcccaccatcctgtgaactttgttgtacttggtgttgggcaactggtgagtgttgtgacaggctcagacctgatccttcctcaggagcaattggagaccacaaatttaaagcagaaatacctgttaaaagcttggctttccttatatgagtgaggctcccagcttgggtgtggcctcctgggctcacggatcagcttgctgggccagagggggtcttagtaatgtgctagagagacacatgctcccttctcatcgtagagagcctgcatgctgagaggctccctttacacacctgcctctcgctggcttttcctttagacctagccaccagtgttttgaatcatggttttgttttgtttttgcatgcaaaaaccagaacatgacttagaaatt

SEQ ID NO: 313202 - DNA, 9753 bp, Artificial Sequence
  derived and/or modified sequence
gacagatttcaatgtctgttgaaggcccccccacaccctccttcagtgccgggggcatggagggatatcttgggctcctgctgttttttaaaatgatgcgagctcatctcctgtcctgggtgtgaacgagtatatcttaccagggatgtaactgaacatttttttctgcattgtgttcctactgagcaacccaagatggccaggaactgctctgagtgcaaggagaagagggcagcacatatcctctgcacctactgcaatcgctggctgtgcagctcttgcacagaggaacaccgacacagccctgtccccgggggcccattctttcctcgggcccagaagggatctccaggagtgaatggtggtcccggagacttcaccttgtattgtcctctacacacacaggaagtactcaagctattctgtgagacatgtgatatgctcacttgccatagctgcctagtggtggaacacaaagaacacaggtgcagacatgttgaagaagttttgcaaaaccagaggatgcttctggaaggtgtgactacacaggtggcacataagaaatccagtctacagacatctgcaaagcaaattgaggacaggatttttgaagtgaagcatcagcataggaaggtggaaaaccagatcaaaatggccaagatggttctgatgaatgagctgaacaaacaggccaatgggctaatagaggaattagaggggattactaatgagagaaagcggaagctggaacagcagttacagagcatcatggttctcaaccgtcagtttgagcatgtgcagaatttcatcaactgggctgtctgcagcaaaaccagtgtcccttttcttttcagcaaagagctgattgtgtttcagatgcagcgattgctggagacaagttgtaacacagatcctggctccccttggagtatcagattcacctgggagcctaacttctggaccaagcagctagcttctcttggctgcataactactgaaggtggacaaatgtccagggcagatgctcctgcttatggaggcttacaggggtcatcacccttttatcaaagccaccagtctccagtggctcagcaagaggctcttagccacccctcacacaagttccagtctccagcagtgtgctcctcatctgtgtgctgctcccactgctccccagtctcgccttccctcaaaggccaggtccccccacccagcatacacccagcccacagcttcaggcagccccctgagatggtgccccagcagctggggtctctgcagtgctctgccctgctgcccagggagaaagagctggcctgcagccctcatccaccaaagctgctgcagccctggctggaaacccagccccccgtggagcaggagagcacatcccagcggctggggcagcagctgacttcccagcccgtgtgcattgtccccccacaggatgttcagcaaggagcccatgcccagcccaccttacagacaccctctatccaagtccagtttggccaccaccagaagctgaagctcagtcactttcagcagcagccacagcagcagctaccacctccaccaccacccctcccccatcccccacctccccttccccctcccccacagcagccacacccacctcttcctccatcccagcatctggcttctagtcagcacgagagccctcctggccctgcctgttctcagaacatggacataatgcatcacaagtttgagctggaggaaatgcagaaggacttggagcttcttctccaggctcaacagcccagcctgcaactgagtcagaccaaatctcctcagcatcttcagcaaaccattgtggggcagatcaactacatcgtgaggcagccagcacctgtccagtcccagagccaggaggagaccctgcaggctacagatgagcccccagcatctcagggctcaaagccggctctccctcttgacaagaatactgctgctgccttgccccaggcgtctggggaagaaacccctctcagtgtccccccagtggacagcaccatccagcactcctctccaaatgtggtgagaaagcactccacctcgctgagcatcatgggcttttccaacactctggagatggagttgtcatctaccaggttggagaggcccctagagccacagatccagagtgtgagcaacctgacagctggtgccccccaggcagtaccaagcctgctgagtgctccccccaaaatggtgtccagcctgacaagtgttcaaaaccaggccatgcccagcctgacaaccagtcacctacagactgtgcccagccttgtgcatagcacattccagtccatgcccaacctgataagtgactcccctcaggctatggcaagcctggcaagtgatcaccctcaggctgggcccagcctaatgtctggtcacacccaggctgtgccgagtctggcaacttgtcctctgcagagcatccctccagtttctgacatgcagccagaaactgggtccagctccagttctggccgaacttcagggagcctgtgtcccagagatggggctgatccctccctggagaatgctctgtgtaaggtaaaactggaggagccaattaacctctctgtgaagaaacctccactggcgccagtggtcagcacgtctacagctctgcagcagtaccagaacccaaaagagtgtgagaattttgaacaaggagccctagagctggatgcaaaagagaaccagagcatcagagccttcaatagtgagcataagattccctatgtgcgactggagcgactcaagatctgtgctgcctcctcaggagagatgcctgtgttcaaactgaagccacagaagaatgatcaggatgggagcttcctgctgatcatcgagtgtggcactgagtcctccagcatgtccattaaggtcagccaggacagactgtctgaggccacccaggccccaggtctggagggaagaaaggtcactgtcacttctttggctgggcagcggccaccagaagtggagggcacatctcctgaagaacacagactcattcctcgaaccccaggagccaagaagggccccccagccccaatagagaatgaggacttctgtgctgtttgcctcaatggcggagagttactgtgctgtgaccgctgccccaaagtgttccacctctcctgccatgtgccagccttgctcagcttcccagggggagagtgggtgtgtaccttgtgccgcagcctgacccagcccgagatggagtacgactgtgagaatgcctgctataaccagcctggaatgcgggcatctcctggcctaagcatgtatgaccagaagaagtgtgagaagctggtattgtccttgtgctgcaataacctcagcctgcccttccatgaacctgtcagccccctggcccggcattattaccagattatcaagaggcccatggacctgtcaatcatccggaggaagctgcaaaagaaggacccagctcactataccaccccagaggaggtggtatcagatgtgcgcctcatgttctggaactgtgctaagttcaattatcctgactccgaggttgcagaggctggccgctgcctggaagtgttctttgagggctggttgaaggagatctacccggagaaacggtttgcccagccaaggcaggaggactcagactccgaggaggtgtctagtgagagtggatgttccactccccagggcttcccgtggcctccctacatgcaggagggcatccaacccaagaggcggcgacgacatatggagaatgaaagagcaaaaagaatgtcatttcgcctggccaacagcatctctcaggtgtgagagccaaaaggagactgggcactctggcagctgttgtcccatactgtcgaccattcctccccatcttgcagcttatcctcttcagagtgtggatggtagatgagtcttgttgaactgtgtagtgctcttctttgccatttgcatctacagcatttatttgggagccgtagtacatccactacagagaagatttcagtaataaacaggaaagaggaaggtatttattattaccagagtaatcagatgtataggctccacttgacaagaccacacctggttaggctcgggaaaacctactttccttggtgaatttttttctgcctgggaaagcagacccgtctaaccttttagtgtccagggctcaggagccatgtatacatctgaactcctcctgggctcagaagtgggtaaaagaagggagagaggtttagacatatggcaggactgtgatccctggcccagcacagccaaagactgtcactgtttgcctttgcttgtcctgtctggatagaggcacctgccatgtgcagactagtggaggcttctagaggccataggtctcaatttgtgcctatttgggttctaacggttttcagggtatttgttttgcatagtcactttcctgatgttgacataggtggctgctgtgaaaatgctgtggatggtgtgacattcttgactgagctgggtggctgtggagagaccacttaaatcttctggttcagatttcacttacagacttagtaagatgtccacttcagagcccgccctctgtgctacttactctgggctaatcacacttctttagggtgagaacctgccttcctagaagtgactgttggtgcttgtcagtggccatacccttcatcatcctcattcagaggtatggatcgtgagttctgcttgtgaatactgtgagacagctgctgtctgcttcaggtccagagttccatgggtggagagagtaacccacaaccagctcactcctctgggcctctcctcctgcttaaagattctagttctcaacctctccaagttcatgagccaaagatcagaagtgagtcttctgaccagcccgcctccaggctgtctacagccccaaaaaagccaacacttttctggcagccctttttgttggaggttagagaaggcctcagggaccaacaggggccagatctagacattcctgggggaagtttgtctaaggtggacagggggaaaaatcaagaggcaaaaagccagtgtcctttggtgaccatgaagcaacctcagagccttagttctcctagaatgcagagagaagcattctggaagccatgggaacaggagctcgaggctgcatcctgaatgcatctgcatggccctcgcagggtgtttgtgaggatactggaggtcaggctacctcccaagcaagggcttggttgagaaggaacccattgctcatattgttgggggagctatgaacctgacatgtcagtggccaggactgagacagctctccctggtcctgtcattgcatggctaatttcaggggagtctgaggtcatggctttatttttgctaacagatgaagttcaaggatgttcttgtttgtagggcctttgctaatgagcagttttttaattagaaaacatttcttctctctttgtgagttgatggtattgctcatttccttctctacccaacctgagagatcatcttcactttaaagcaaaccatgccccttggcttgccattctttcagcagcacatgccacgttctaagcagatgggcttccgtgatcccgttttctagtttggggtaactgagtcttgaatgctttactagtccggcaatctttggacttaggcttctgccctttgagactcacatgactttctggtttggggtctggtcatttccctttcaatttttgaatctccttctctgttcagttggcttggcaaagtaccctctgttctcatgtcactaattcctgctctaggtcatctttcctttgtgcagcccacattcccaccatcctgtgaactttgttgtacttggtgttgggcaactggtgagtgttgtgacaggctcagacctgatccttcctcaggagcaattggagaccacaaatttaaagcagaaatacctgttaaaagcttggctttccttatatgagtgaggctcccagcttgggtgtggcctcctgggctcacggatcagcttgctgggccagagggggtcttagtaatgtgctagagagacacatgctcccttctcatcgtagagagcctgcatgctgagaggctccctttacacacctgcctctcgctggcttttcctttagacctagccaccagtgttttgaatcatggttttgttttgtttttgcatgcaaaaaccagaacatgacttagaaattaaaaaaaaaaaaatcctactagccaagtgactgcctgcagaggctcttcattaacatttgggctgatcctgcttttgacttattcccataatggcccagttttgaagtcagccaagtccttttgtccttgacaacatcatgcagtggaaatacggtgagttctagattcttatgggacagcatgcagccctagaggaaaaattgacttcttgggtatgctgagaaataagacagtaaaatggcttcagttgatgcaaggggattttagttaaaaattggttcaggatttttaaattttattttattttttggctgggcgcggtggctcacgcctgtaatcccagcactttgggaggctgaggtgggtggatcacctaaggacagcagttcgagaccagcctggccaacatagtgaaaccctgtctctactaaaaatacaaatatcagccaggtgtgatggcacatgcctgtaatcccagctacttgggaggctgaggcaggagaattgcttgaatccgggaggtggaggttgcagtgagctgagatcatgccattgcattccagcctgggcaacagaacgagactccgtctcaaaaaaaaaaaaattggttcaggatgaacttgcagagcactcttccacagaacatggttaggttagccctgcctgacttctagcaattgctaactatacaccttgcctgcctctaggacccctacctgagtggcaaccataccttccatatgctctgttccatggcagtccctgccatcccccaccagcggactctggctccctccctgtacccatttctagcaacagctccttgcctggctgctaagacggaggcgcctccttgtttgttcctgggctctgttctgctccctctctcactccatggagtcacttatagtcttcctttctgaacgccagaattgagcctttgctccttctggatcaccccttcctgggcttcttctccatccctcagtactgctaaaattgccctgctcctttagtccatttccatgacctcagccctctctctcctctccttgtcttttaactttctcctggacttcttcctctccccagcatgaacccagagcctatcacacactgatgtttttgtcagcatcctgaactttctcatgcccttcaactttatttatttatttatttatttattttttattttttgagagagagagtctcactctgtcatgcaggctggagtgcagtggtatgatgtcggctcattgcaacctctgccttctgggctcaggtgatcctcccatctcagcctcctgagtagctgggactacaggtgcatgccaccatgcctggctaatttttctactttaggtagagatggagtttcgccatgttgctcaagctggtatcaacactcctgggctcaagcagtctgcttcccttggcctcccaaagtgctgggattacaggcgtgagccactgcgccaggcgtatccccttcaattttgctgaaactatcagccattctccattttcggcatcatcatatttgctgcttccacctcctgggctgctatgcatgacagattcacagttggcagcctcagttgagctctcagtgttgactggaaattctttaacttgttgtgatccctttttttttccccacccatgcctccatctttgtcctccacaaatgactgagctcactgtctacttcacagaagacagcccctaaagcaagagcttccttgcctgctgttcctctctcccctctcattcatctgtgtctgtaactctccccaacccctccattcttgctcctatttaattctctatatcttgaatcctgttgtatgtcctccaagactgctccctcgcttactccactgctcccactccctggagtctccagcctctgtctccactggttacctccacacagcctgcaaacaagttctccacaagattaaaacagcatttctcagagtctgttaccccttacacattttccttgttaaccaagttacttttaaaaagatcctttttaaactgattcttcctcagctgttcttcagccctctatactttttcataaaagtcaccagtgactgcccagttgccaaatagaatgaatacctttcagtgctcagctgtcttgacctctccgcagcatttcacaccacccaccaaccctcagtgaaacaacctcctcccttagcttttatgacaccacaagtctctggattctcagagaatccagaaaaacaagtctctggattctctcctcttacctctcagcccacacaggctgagctgtccttgaaacctagatgggggaaatgtctgtggctgtctgtggtctcttcttttcaggagttgggtagggaggaagaatcacagctgctcctgcttcctctgtctgtctctctatttcctgagtcccttccttttcctgaactcagttctcctcatgccaaccatgtttatgagctcctgctgggaggacagcatctgtgagtccttccctctgtctctcccagacaacacagaggttttagcctgtttgctaagagaccccatctaagtcagcccaagggtgtggattaggttttacagcatccaggccgcagtctggctaaactggattaccaggctggtgggcagctcctcaccatgatcctgcaccagttagagcctgctgtagttgggaaggagcctgggattgtggtaagatgtgtttccgtgcatgtcagtgctgctaaccaggaggagaacctggcagggtgggtgcctgctgctgataacattcggatggagggagactagggagcgcggtggctgctcccttgctggggctcagctggagtcagcatgactccttatatcagggcctttcccacctgtgctgatcaccaccacctgcttgctccagttgtttctggagttggaggcagctattggttgctttcttggaggtaaggaggtatatactagaaagatatctgatttgagagtctgaacaccaaaatttttggctctttccattatgagctgtgtaaccttggatacagtttcctcatctataaagttgtggtgggagaatggctgagaacagtgatctctcagctctccagctgtaaagatgttaattatgattttaactctcaagatcaggccacataaggaacaggggaattccaggggtgggacacagctgggggagtccagaccagggcagggaaaggagactcacaagccaaacagagctgctttggggaaagttcttatcagctggtgctgcttcctgagccatatgcccattcctcaagctgtacccctttcttggctatgtaggatgagttcctcctaggcccttgttaggagtggctattggattctaagcggttggggcatgagggaggatattttaaagggaagtatagctgattttaaaagaacctatacattcaagaacaaataaaaaacagcacttttctttaccaagaa

SEQ ID NO: 313203 - protein, 513 aa, Artificial Sequence
  derived and/or modified sequence
LSSGHELAKEYMKPHVRPIMQELLHIVRETENDDVTNVIQKMICEYSQEVASIAVDMTQHLAEIFGKVLQSDEYEEVEDKTVMAMGILHTIDTILTVVEDHKEITQQLENICLRIIDLVLQKHVIEFYEEILSLAYSLTCHSISPQMWQLLGILYEVFQQDCFEYFTDMMPLLHNYVTIDTDTLLSNAKHLEILFTMCRKVLCGDAGEDAECHAAKLLEVIILQCKGRGIDQCIPLFVQLVLERLTRGVKTSELRTMCLQVAIAALYYNPDLLLHTLERIQLPHNPGPITVQFINQWMNDTDCFLGHHDRKMCIIGLSILLELQNRPPAVDAVVGQIVPSILFLFLGLKQVCATRQLVNREDRSKAEKADMEENEEISSDEEETNVTAQAMQSNNGRGEDEEEEDDDWDEEVLEETALEGFSTPLDLDNSVDEYQFFTQALITVQSRDAAWYQLLMAPLSEDQRTALQEVYTLAEHRRTVAEAKKKIEQQGGFTFENKGVLSAFNFGTVPSNN

SEQ ID NO: 313204 - protein, 280 aa, Artificial Sequence
  derived and/or modified sequence
MVNKIFSNISSINAFHSKFLLPELEKRMQEWETTPRIGDILQKLAPFLKMYGEYVKGFDNAMELVKNMTERIPQFKSVVEEIQKQKICGSLTLQHHMLEPVQRIPRYEMLLKDYLRKLPPDSLDWNDAKKSLEIISTAASHSNSAIRKMENLKKLLEIYEMLGEEEDIVNPSNELIKEGQILKLAARNTSAQERYLFLFNNMLLYCVPKFSLVGSKFTVRTRVGIDGMKIVETQNEEYPHTFQVSGKERTLELQASSAQDKEEWIKRRGFAMLPRLISNS

SEQ ID NO: 313205 - protein, 188 aa, Artificial Sequence
  derived and/or modified sequence
MFSCFLCILSFSSLSNYSDLKKESAVNLNAPRTPGRHGLTTTPQQKLLSQHLPQRQGNDTDKTQGAQTCVANGVMAAQNQMECEEEKAATLSSDTSIQASEPLLDTHIVNGERDETATAPASPTTDSCDGNASDSSYRTPGIGPVLPLEERGAETETKVQERENGESPLELEQLDQHHEMKVEHETSS

SEQ ID NO: 313206 - protein, 207 aa, Artificial Sequence
  derived and/or modified sequence
MEEIKPASASCVSKEKPSKVSDLISRFEGGSSLSNYSDLKKESAVNLNAPRTPGRHGLTTTPQQKLLSQHLPQRQGNDTDKTQGAQTCVANGVMAAQNQMECEEEKAATLSSDTSIQASEPLLDTHIVNGERDETATAPASPTTDSCDGNASDSSYRTPGIGPVLPLEERGAETETKVQERENGESPLELEQLDQHHEMKVEHETSS

SEQ ID NO: 313207 - DNA, 1833 bp, Artificial Sequence
  derived and/or modified sequence
gtgatggagagtgctgttatgatagatgaatctaggaaagcctctttggagatgtgatacctgaacagaaccccgaatgataagaagaaataccagtgttttaggagagattgtcctaagcagagaacagcagctgcaaagaccccaagacacatacacttggttattaagaatgggagcagcaaggagtatggcaagaacacagtgagttttcccttgagtgtgtgaggaagccctcagagtttgtgactgacttgtagaggttctagtggaggggatcagagtggaaacaaagagaccagttaaaaaggtatggcagcatgaataaaaaagttttgagagtattcattatgccttccaaataaaaaactctttggttcataatttgttcataaattaaggactggctacactgtactatttaaaaatgttaagaaacatcaataagtaaaaatgttaggaagagatgataaatacgtaagtattatatctaactaagtctttactaactagtcacattattaaacagtgcaaggatcaagaaaagttaagcgttgaaaaataaataaataagttataaataaaataaacagcccaaggaaatgttccagtccccataggtagactcggggtcatcttctttatttaaatctttatttaaatgtggatagcatcccaagagacttgggtctacactaagaatattcaaatccatgtttctgaaaccatcagagatagaaaaaaaaagtagcgaatatcccttttcaactggaataaacttgtcttaattctagaacttttccataccaatgttttcatgcttcctttgtattttatcttttagctcattatcaaattatagtgatttgaagaaagagtctgctgtgaacctaaatgctcctagaaccccaggaaggcatggattgacaaccacacctcaacaaaaactcctctcccagcacttgccacagaggcagggaaatgatacagataagactcagggtgcacagacttgtgtggccaacggtgtaatggcagcacaaaaccagatggaatgtgaggaggagaaagctgccactcttagctcagatacttctattcaagcttctgaacccttgcttgatacgcacatagtgaatggagaaagagatgaaactgccacagctcctgcatcacccacaacagacagctgtgatggaaatgcttctgacagtagctacaggactccaggcataggcccagtgctccccctagaagaaagaggggcagaaacagaaaccaaggtacaagagagggaaaatggggaaagccctctggaactggagcagctggaccagcaccatgagatgaaggtagagcatgagactagctcatgagcagggaaaaccctgcctattcgattgttgtcttaaaactctttatttattgcacccctgaaatgtatgaatcagatcacccacactggcagttaaacgattttcaagctctggctgctgattagcatttcccctatgctctaagcagatatttcactttttcttttcatgtagtttctgttaatatctctgttgtaatttcaggagtcagaacagtgtggaaactttaatataggaaatccacaaatgtattgtttttacatagaaagaaaatgttccttgttgctctagatgttggtgctgtatccctaatacttacgggccaagcaagaagaaattgtataatctttgttgttcagaagtttctaatagaataaataggcctgtaagatgaacttgccactagtaaatgttacttttaaggacatgaatatggaagtattaaattattcaacag

SEQ ID NO: 313208 - DNA, 567 bp, Artificial Sequence
  derived and/or modified sequence
atgttttcttgctttctctgcatcctgagcttttctagtctttcaaactactcagacttgaaaaaggaaagtgcagtgaacctaaacgcaccaagaacacctggaaggcacggtctgactacaacaccccaacaaaagctcttgagccaacacctcccccagagacaggggaacgataccgataaaacacagggggctcagacctgtgttgccaacggtgttatggccgcacagaatcagatggaatgtgaggaagaaaaagctgcaaccctgtcctctgacacctccatccaggcttctgagccactcctggacacacatatcgtgaacggcgagcgcgacgagactgccactgcccccgcttctcccactaccgatagttgcgacggcaacgcttccgacagtagttacagaacccctggcatcgggcctgttttgcccctggaagagaggggggcagaaaccgagacaaaggtccaagagagggagaacggagagtcacctctggagctggaacagctggaccagcaccacgaaatgaaggtcgagcacgaaacctcatcctag

SEQ ID NO: 313209 - DNA, 624 bp, Artificial Sequence
  derived and/or modified sequence
atggaggaaattaaacctgcatccgcctcctgcgtgagcaaagagaaaccttccaaagtctccgacttgatctcaaggtttgagggggggtcctcccttagcaactactccgatctgaagaaagagtcagccgtgaaccttaatgccccacgcacaccgggacgtcacggcctgacgactacacctcaacagaagctgctttctcagcatttgccacagcgtcaagggaacgacacagataagacccagggcgcccagacatgcgtcgctaatggtgtcatggccgcgcagaatcagatggagtgcgaagaagagaaggctgcgactctatcctccgacacttctatccaagcaagtgagccactcctggacacccacatagttaatggcgagcgggatgagactgctactgctccggcaagtccaactaccgatagctgcgatggcaacgccagcgacagttcctacaggacaccaggcatcggacctgtgttacccctggaggagcgcggggccgagacagaaaccaaggtgcaggagagggagaacggcgagtcacccctggaactggagcagctcgatcagcatcacgagatgaaagtcgaacatgaaactagttcttag

SEQ ID NO: 313210 - DNA, 567 bp, Artificial Sequence
  derived and/or modified sequence
atgttcagctgcttcctgtgcatcctgtccttcagcagcctgagcaactacagcgacctgaagaaggagagcgctgtgaacctgaatgcccccaggaccccaggaagacatggcctgaccaccaccccccagcagaagctgctgagccagcacctgccccagaggcagggcaatgacacagacaagacccagggcgcccagacctgtgtggccaacggggtgatggccgcccagaaccagatggagtgtgaggaggagaaggccgccaccctgagcagtgacaccagcatccaggccagcgagcccctgctggacacccacatcgtgaatggagagagagatgaaacagccacagccccagccagccccaccacagacagctgtgatggaaatgccagtgacagcagctaccgcaccccaggcatcggccctgtgctgcccctggaggagagaggagctgagacagagaccaaggtgcaggagagagaaaatggagagagccccctggagctggagcagctggaccagcaccacgagatgaaggtggagcacgagaccagcagctag

SEQ ID NO: 313211 - DNA, 624 bp, Artificial Sequence
  derived and/or modified sequence
atggaggagatcaagccagccagcgccagctgtgtgtccaaggagaagcccagcaaggtgtctgacctgatcagcagatttgaaggaggcagcagcctgagcaactacagcgacctgaagaaggagagcgctgtgaacctgaatgcccccaggaccccaggccgccacggcctgaccaccaccccccagcagaagctgctgagccagcacctgccccagaggcagggcaatgacacagacaagacccagggcgcccagacctgtgtggccaatggagtgatggccgcccagaaccagatggagtgtgaggaggagaaggccgccaccctgagcagtgacaccagcatccaggccagcgagcccctgctggacacccacatcgtgaatggagagagagatgaaacagccacagccccagccagccccaccacagacagctgtgatggaaatgccagtgacagcagctaccgcaccccaggcatcggccctgtgctgcccctggaggagagaggagctgagacagagaccaaggtgcaggagcgggagaatggagagagccccctggagctggagcagctggaccagcaccacgagatgaaggtggagcacgagaccagcagctag

SEQ ID NO: 313212 - DNA, 567 bp, Artificial Sequence
  derived and/or modified sequence
atgttcagctgcttcctgtgcatcctgagcttcagcagcctgagcaactattctgacctaaaaaaggagagcgccgtgaacctgaacgccccacgcactccgggacgccacggcctcaccaccactcctcaacagaaattactgtctcagcatctgccccagcgccagggcaacgatactgacaaaacacagggcgcacagacttgtgtggctaatggcgttatggcagcacagaaccagatggagtgtgaggaggaaaaggcggccacattgtcttccgacacctctatacaagccagtgaaccactactggatacccacattgtgaatggagaaagagatgagaccgcaaccgcgccagccagccccacgactgacagctgcgacgggaacgcaagtgactccagctataggacccctgggattgggcctgtgctgcccctagaggagcggggcgcggagacagagacaaaggtccaggagagggaaaatggcgaaagtcccttggagctcgaacaactcgatcagcatcacgaaatgaaggtagaacacgagacttcctcatag

SEQ ID NO: 313213 - DNA, 624 bp, Artificial Sequence
  derived and/or modified sequence
atggaggagatcaagcccgccagcgccagctgcgtgagcaaggagaagccatctaaggtgagcgatctcatatcacgattcgaaggcggcagtagtctgagcaactatagcgacctgaagaaagagagcgcagtgaatctgaatgccccccggactccaggacgccacgggctgactacaaccccacagcagaagctactttcacagcatctgccccagcgacagggaaacgacacagataagacacagggcgctcaaacatgtgtggctaacggcgtgatggcagcgcagaaccaaatggagtgcgaagaagagaaggctgcgaccctctcttctgatacaagtatacaagcttcggagccactgctcgatacccatatcgtgaatggagagcgcgacgaaacagccacagcacctgccagcccaactaccgattcctgtgacgggaatgctagcgattcctcatataggacccctggcatcgggcccgtccttccactggaggagcgtggcgccgagacggaaaccaaggtgcaagagcgggaaaacggagaatcacctctcgagctggagcagttggaccagcatcacgaaatgaaggtcgaacacgaaacttctagttag

SEQ ID NO: 313214 - DNA, 567 bp, Artificial Sequence
  derived and/or modified sequence
atgttcagctgcttcctttgcatcctgagcttttcctctctcagtaattattccgacctcaagaaggagagcgcagtcaatctgaacgcccctcgcactcctggccgacacggcttgacgacaacgccacaacagaaactcctcagccagcatttacctcaaaggcagggaaacgacaccgacaaaacccagggggctcaaacctgcgtggctaatggcgtgatggccgcacaaaaccagatggagtgtgaagaggagaaagcagccacactctcgagcgatacaagcatccaggccagcgagcctctcctggacacccacatcgtgaatggcgagcgggatgagacagctacagctcccgctagcccgacaacagactcttgtgatggaaacgcatctgattcttcctaccggacacccggtatcggacccgtgctgcccctggaagaacggggagcagagactgagacaaaggtgcaggagagagagaatggggagtcaccacttgaacttgaacagcttgaccagcaccacgagatgaaggtcgagcacgaaacatcctcctag

SEQ ID NO: 313215 - DNA, 624 bp, Artificial Sequence
  derived and/or modified sequence
atggaagagattaaaccggcttccgcttcatgcgtttctaaggagaagccatccaaagtctccgaccttatttcaagattcgagggcggatccagtcttagtaattatagcgatctaaagaaggaaagcgccgttaatctcaacgcacctagaactccgggacgccacggcctgaccactacaccccaacaaaagctcctgagtcagcacttgcctcagcgacagggaaacgacacagacaagacacagggagctcagacatgcgtcgctaacggcgtcatggccgcacagaaccaaatggaatgtgaggaggaaaaggccgctactctcagctcagataccagcatacaggcttcagagcctctcctagatacacatattgtgaatggcgagagggatgagaccgctacagctccggctagcccaacaacggattcatgtgacgggaacgcttccgactccagttaccgtacgcctggtatcggccctgtcctgcctttagaggagaggggggctgagaccgaaacgaaggttcaggagagggagaatggtgagtcacctctggagctcgagcagctcgaccagcatcacgagatgaaggtggagcacgaaacttcgtcttag

SEQ ID NO: 313216 - DNA, 567 bp, Artificial Sequence
  derived and/or modified sequence
atgttcagctgcttcctgtgcatcctgagcttcagcagcctgagcaactacagcgacctgaagaaggagagcgccgtgaacctgaacgcccccagaacccccggcagacacggcctgaccaccaccccccagcagaagctgctgagccagcacctgccccagagacagggcaacgacaccgacaagacccagggcgcccagacctgcgtggccaacggcgtgatggccgcccagaaccagatggagtgcgaggaggagaaggccgccaccctgagcagcgacaccagcatccaggccagcgagcccctgctggacacccacatcgtgaacggcgagagagacgagaccgccaccgcccccgccagccccaccaccgacagctgcgacggcaacgccagcgacagcagctacagaacccccggcatcggccccgtgctgcccctggaggagagaggcgccgagaccgagaccaaggtgcaggagagagagaacggcgagagccccctggagctggagcagctggaccagcaccacgagatgaaggtggagcacgagaccagcagctag

SEQ ID NO: 313217 - DNA, 624 bp, Artificial Sequence
  derived and/or modified sequence
atggaggagatcaagcccgccagcgccagctgcgtgagcaaggagaagcccagcaaggtgagcgacctgatcagcagattcgagggcggcagcagcctgagcaactacagcgacctgaagaaggagagcgccgtgaacctgaacgcccccagaacccccggcagacacggcctgaccaccaccccccagcagaagctgctgagccagcacctgccccagagacagggcaacgacaccgacaagacccagggcgcccagacctgcgtggccaacggcgtgatggccgcccagaaccagatggagtgcgaggaggagaaggccgccaccctgagcagcgacaccagcatccaggccagcgagcccctgctggacacccacatcgtgaacggcgagagagacgagaccgccaccgcccccgccagccccaccaccgacagctgcgacggcaacgccagcgacagcagctacagaacccccggcatcggccccgtgctgcccctggaggagagaggcgccgagaccgagaccaaggtgcaggagagagagaacggcgagagccccctggagctggagcagctggaccagcaccacgagatgaaggtggagcacgagaccagcagctag

SEQ ID NO: 313218 - DNA, 958 bp, Artificial Sequence
  derived and/or modified sequence
agccaatgaacttttgcttactgaaagagcttatgtcaaccgacttgacctcttagatcaggtattttattgcaaactgttggaagaagcaaaccgaggctcgtttccagcagagatggtgaataaaatcttttctaatatttcatcaataaatgccttccatagtaaattcctcttgccagagctggagaaacgaatgcaagaatgggaaactactcctagaattggagacatccttcagaaattggcaccattccttaagatgtatggagaatatgtgaaaggatttgataatgcaatggaattggttaaaaacatgacagaacgtattccccagttcaaatcagtggttgaagaaattcagaaacagaaaatctgtgggagcttaactttgcagcatcacatgctagaacctgttcagcggattccccggtatgagatgctccttaaggactatctaaggaaattgcctcctgattccctggactggaatgatgctaaaaaatcacttgaaattatatctacagcagcaagccattctaatagtgcaataaggaaaatggagaacctaaagaaactcttagagatttatgaaatgttgggagaagaagaagacattgtaaacccttcaaatgaactaataaaagaaggacagatcctcaaactagctgctcggaacacttcagcacaagaacgctaccttttcttattcaacaacatgttgctgtactgtgtgcccaaattcagcttggtaggctctaaattcacagttcgaaccagggttggcattgatggaatgaaaattgtagagactcaaaatgaagaatatccacatactttccaggtgtctgggaaagagagaacactggaactgcaggccagttctgcgcaagacaaagaagaatggatcaagagacgaggttttgccatgctgcccaggctgatctcgaactcctga

SEQ ID NO: 313219 - protein, 409 aa, Artificial Sequence
  derived and/or modified sequence
MKDTQDIQEASKAMQNKVHEQEDKNEKQKQREDKLGVYSLVHFSPKMLGSVATTLPLSSSNSSGMPLGYYLSSPQISRVTISTTGQLTSKATVGSCSRVENSLDASPFSVPKKQDESPMIGDGEDYFLSLFGDSKKLTAHSNYTQKTLKYFSMILEEVGQFTSSSLGDVEIAEVNVKGLFVKLINSSLDKEMAIGDHILQQNVNGQTISLYRFLPNIVMQANSTVTVWAAASEAKHQPPSDFLWKEQDKFRASPDCITILCKPNGQAIAWYTPIHWKQAWEKLDADVEFNRCSVVSPTFRKRVFQWTASTATITKEKQDQPKKDISNYQVEQAQVLLKREKEIPPTVFPNRSPWCQNPYVSAHPYCPLIEPHNTSTAGGRLDRQPRTRSTRPNRASGSKKKKTSESQKQ

SEQ ID NO: 313220 - protein, 291 aa, Artificial Sequence
  derived and/or modified sequence
MIGDGEDYFLSLFGDSKKLTAHSNYTQKTLKYFSMILEEVGQFTSSSLGDVEIAEVNVKGLFVKLINSSLDKEMAIGDHILQQNVNGQTISLYRFLPNIVMQANSTVTVWAAASEAKHQPPSDFLWKEQDKFRASPDCITILCKPNGQAIAWYTPIHWKQAWEKLDADVEFNRCSVVSPTFRKRVFQWTASTATITKEKQDQPKKDISNYQVEQAQVLLKREKEIPPTVFPNRSPWCQNPYVSAHPYCPLIEPHNTSTAGGRLDRQPRTRSTRPNRASGSKKKKTSESQKQ

SEQ ID NO: 313221 - protein, 163 aa, Artificial Sequence
  derived and/or modified sequence
  misc_feature (1)..(1): Xaa can be any naturally occurring amino acid
XDKFRASPDCITILCKPNGQAIAWYTPIHWKQAWEKLDADVEFNRCSVVSPTFRKRVFQWTASTATITKEKQDQPKKDISNYQVEQAQVLLKREKEIPPTVFPNRSPWCQNPYVSAHPYCPLIEPHNTSTAGGRLDRQPRTRSTRPNRASGSKKKKTSESQKQ

SEQ ID NO: 313222 - DNA, 1230 bp, Artificial Sequence
  derived and/or modified sequence
atgaaggacacccaggacatccaggaggccagcaaggccatgcagaacaaggtgcacgagcaggaggacaagaacgagaagcagaagcagagagaggacaagctgggcgtgtacagcctggtgcacttcagccccaagatgctgggcagcgtggccaccaccctgcccctgagcagcagcaacagcagcggcatgcccctgggctactacctgagcagcccccagatcagcagagtgaccatcagcaccaccggccagctgaccagcaaggccaccgtgggcagctgcagcagagtggagaacagcctggacgccagccccttcagcgtgcccaagaagcaggacgagagccccatgatcggcgacggcgaggactacttcctgagcctgttcggcgacagcaagaagctgaccgcccacagcaactacacccagaagaccctgaagtacttcagcatgatcctggaggaggtgggccagttcaccagcagcagcctgggcgacgtggagatcgccgaggtgaacgtgaagggcctgttcgtgaagctgatcaacagcagcctggacaaggagatggccatcggcgaccacatcctgcagcagaacgtgaacggccagaccatcagcctgtacagattcctgcccaacatcgtgatgcaggccaacagcaccgtgaccgtgtgggccgccgccagcgaggccaagcaccagccccccagcgacttcctgtggaaggagcaggacaagttcagagccagccccgactgcatcaccatcctgtgcaagcccaacggccaggccatcgcctggtacacccccatccactggaagcaggcctgggagaagctggacgccgacgtggagttcaacagatgcagcgtggtgagccccaccttcagaaagagagtgttccagtggaccgccagcaccgccaccatcaccaaggagaagcaggaccagcccaagaaggacatcagcaactaccaggtggagcaggcccaggtgctgctgaagagagagaaggagatcccccccaccgtgttccccaacagaagcccctggtgccagaacccctacgtgagcgcccacccctactgccccctgatcgagccccacaacaccagcaccgccggcggcagactggacagacagcccagaaccagaagcaccagacccaacagagccagcggcagcaagaagaagaagaccagcgagagccagaagcagtag

SEQ ID NO: 313223 - DNA, 1230 bp, Artificial Sequence
  derived and/or modified sequence
atgaaggatacccaggacattcaggaggcatcaaaagcaatgcagaataaggtgcatgagcaggaagacaaaaacgagaaacaaaagcagcgggaggacaagcttggcgtttacagtctcgtgcatttcagccccaagatgctcgggagtgtggccactaccctgccactctcctccagtaattcaagtggcatgccgttaggttactacctctcatcgcctcagattagcagggtgaccatatctacaacgggtcagctcacttccaaagccaccgttggatcttgctcacgcgtggaaaacagtctggatgccagcccttttagcgttccaaaaaagcaggatgagtccccgatgatcggcgatggtgaggattatttcctgagccttttcggagacagcaaaaagctgaccgcgcacagcaattatacacagaagaccctgaaatactttagcatgatacttgaggaggtagggcagtttacaagcagctcactgggcgacgtggaaattgccgaagtcaacgtgaaagggctattcgtaaagctgattaactcttcgctggacaaagaaatggctattggagaccatatactgcagcagaatgtgaatggccagaccatatccctctaccgctttctgcccaacatcgtgatgcaagccaacagtaccgtcaccgtttgggccgccgcatcagaagctaaacaccagcctccttccgattttctgtggaaggagcaagacaaatttagagcctctccggattgcataacaattctgtgcaagcccaacgggcaagccatcgcttggtacacgccaatacactggaagcaggcctgggaaaagctggacgcagatgtggagttcaaccggtgttcagtggttagccctactttccgaaagcgcgttttccaatggacggcaagtactgctaccattacaaaagaaaaacaggatcaacccaagaaggatatctctaattatcaggtcgagcaggctcaagtacttttgaagcgcgaaaaggaaatcccccctaccgtattccctaatagaagcccctggtgtcaaaatccttatgtctccgcacatccgtattgccctttaatagagccacacaatacttcaacggcgggaggccggttggaccggcagcctcggactcggtcgaccagaccaaatcgagcttcaggttctaagaaaaaaaaaacaagcgagagccaaaagcagtag

SEQ ID NO: 313224 - DNA, 1230 bp, Artificial Sequence
  derived and/or modified sequence
atgaaggacacccaggacatccaggaggccagcaaggccatgcagaacaaggtgcatgagcaggaggacaagaatgagaagcagaagcagcgggaggacaagctgggcgtgtacagcctggtgcacttcagccccaagatgctgggctctgtggccaccaccctgcccctgagcagcagcaacagcagcggcatgcccctgggctactacctgagcagcccccagatcagccgggtgaccatcagcaccaccggccagctgaccagcaaggccaccgtgggcagctgcagccgggtggagaacagcctggatgccagccccttctctgtgcccaagaagcaggatgagagccccatgattggagatggagaggactacttcctgagcctgtttggagacagcaagaagctgacagcccacagcaactacacccagaagaccctgaagtacttctccatgatcctggaggaggtgggccagttcaccagcagcagcctgggagatgtggagattgctgaggtgaatgtgaagggcctgtttgtgaagctgatcaacagcagcctggacaaggagatggccatcggggaccacatcctgcagcagaatgtgaatggccagaccatcagcctgtaccgcttcctgcccaacatcgtgatgcaggccaacagcacagtgacagtgtgggccgccgccagcgaggccaagcaccagccccccagcgacttcctgtggaaggagcaggacaagttccgggccagcccagactgcatcaccatcctgtgcaagcccaacggccaggccatcgcctggtacacccccatccactggaagcaggcctgggagaagctggatgctgatgtggagttcaaccgctgcagcgtggtgagccccaccttcaggaagagggtcttccagtggacagccagcacagccaccatcaccaaggagaagcaggaccagcccaagaaggacatcagcaactaccaggtggagcaggcccaggtgctgctgaagcgggagaaggagatcccccccaccgtcttccccaacagaagcccctggtgccagaacccctacgtgtctgcccacccctactgccccctgattgagccccacaacaccagcacagctgggggccgcctggaccggcagcccaggaccaggagcacccggcccaacagagccagcggcagcaagaagaagaagaccagcgagagccagaagcagtag

SEQ ID NO: 313225 - DNA, 1230 bp, Artificial Sequence
  derived and/or modified sequence
atgaaggacacccaggacatccaggaggccagcaaggccatgcagaataaggtccacgagcaggaggacaaaaatgagaaacaaaagcagagggaggataaactgggagtgtattccctcgtacatttctccccgaagatgctgggatccgtggcaactactttgccattgtcatctagcaattcctctggcatgcctctcggctactacctgagttccccccaaatcagcagagtgactatatcaacaactggccagctgaccagcaaagcaacagttgggtcgtgttccagagtcgagaattccctagacgcatctccattcagcgtcccaaagaagcaagatgagtcacctatgataggagatggagaagactatttcctttctctcttcggggattccaagaagctgacagctcactccaactacactcaaaagactcttaaatatttcagcatgattttggaagaggtcggccaatttacgagctcgtccctcggggacgtagagatcgcagaggtgaatgtaaagggcctttttgtcaaactcatcaacagctccctcgacaaagagatggctattggggatcatatcctacagcaaaatgtcaacggacagacaatatccctgtaccgttttctgccaaacatagtaatgcaggcaaatagcacagtgaccgtgtgggctgcagcttctgaagcaaagcatcaaccgccttctgacttcttatggaaagagcaggacaagtttcgagccagccctgattgcattacaatcctgtgtaagcccaacggtcaggctatcgcctggtatactcccatccactggaagcaggcatgggaaaaactagatgcggacgtggagttcaaccggtgtagcgtcgtgtcgccaacctttcgtaagcgggtgttccaatggacagcatccacggctacaataaccaaggagaagcaggaccagccaaaaaaggatatctctaactatcaggttgagcaggctcaggtcctcttgaagcgcgaaaaagaaatcccacctacagtgtttcccaatagatcgccctggtgtcagaatccctatgtctccgcacacccttattgcccgctgatcgagccccacaatacgagcacagccggagggagactagacagacaaccacgcacgcgctccacacgaccaaatcgagcttctggatccaagaaaaagaagaccagtgagtcgcagaagcagtag

SEQ ID NO: 313226 - DNA, 1230 bp, Artificial Sequence
  derived and/or modified sequence
atgaaggacactcaagatatccaagaagcttctaaggctatgcagaataaagtccacgagcaggaagataagaatgagaaacagaagcaaagggaagataagttaggcgtgtactcactcgtgcacttcagtcctaaaatgctaggctcagtggccacaacactgcccctgtcttcttcaaactcttccgggatgcccctgggctactacctatcctctcctcagattagccgagtgactatctccaccactggccaacttacttccaaggccaccgtggggagttgttctcgcgttgagaactcgcttgacgccagccccttctccgtgccgaagaagcaggatgaatctccaatgataggcgacggcgaagattattttttgtcattgttcggtgactctaagaaactgacggcacactccaactatacccaaaagaccctgaagtatttcagtatgattttggaggaggtgggccagttcacgtcaagctctctaggcgacgtggagatcgcagaggtgaacgtgaagggccttttcgtgaagctgattaactcctcacttgacaaggaaatggcaatcggcgatcacatcctccagcagaacgtgaacggacaaacaatctccctgtaccgctttctgccaaacattgtgatgcaggcaaactccactgtcaccgtatgggccgcagcaagcgaggccaagcaccagcctccttcggattttctatggaaagagcaggataagtttagagcttccccagactgcataaccatactgtgtaaaccaaatggccaggccatcgcgtggtatacacctatccactggaaacaggcatgggaaaaacttgacgccgacgtggagtttaaccgatgttccgtagtgtcgcctactttccgaaagagggtctttcagtggactgcttctaccgccaccatcactaaggaaaagcaggaccagcccaaaaaagacatttcaaattaccaggtggagcaggctcaggtcctgttgaagagggaaaaggagatcccccctacagtttttcctaatcggtctccctggtgtcagaatccatacgtttcagcccacccgtattgcccactgatcgagccccacaataccagcactgccggtggcaggctggaccgccagccacggacacgtagtacacgccctaatcgcgcttctgggtccaaaaaaaagaagacctcagaatctcagaaacagtag

SEQ ID NO: 313227 - DNA, 1677 bp, Artificial Sequence
  derived and/or modified sequence
gtagtcataaaggtctctttgccaagttactgccctctcaagctgcttccagtgaatgctacacacctgcaccatggtttgtccgacatccttagccaagatcaggattggctatgttggtacttacatatcctcatgagaattgtggttctggtactagtttggtaaagaaattattaaacctagctgatgcttgaaggtagttggattaacaggaaagaaaagagacttcttttctagccaagatgaaagatacacaagacattcaggaagcttcgaaggcaatgcagaataaagtccatgagcaggaagataagaatgagaaacaaaaacaaagagaagacaaacttggagtatattctttagtacatttttccccaaagatgttgggttcagttgccacaacactgccattgtcatcttcaaattccagtggaatgcctcttggttactatctgtctagtcctcagattagtagagtaactatatcaacaactggacaattgacttctaaagctactgtaggtagctgttccagagtggaaaacagcttggatgccagccccttctcagttccgaagaaacaggatgaatcacccatgattggggatggagaagattatttcctttctttgtttggtgattcaaagaaacttacagcacactcaaactacactcagaaaactttaaaatacttttctatgattcttgaagaagttggccaatttacctccagttctcttggagatgttgaaatagctgaagtgaatgtcaagggtttgttcgtgaagctcattaactcttcccttgacaaagaaatggcaattggagatcatattctccagcaaaatgtgaatggacaaaccatttctttgtaccgattccttccaaacatcgtaatgcaggcaaattccacagtaacagtgtgggcagcagcatctgaagcaaagcatcaacctccatcagattttctttggaaggaacaagacaagtttagagcaagtcctgattgtataacaatcctgtgcaaaccgaacggtcaagccattgcgtggtacacccctatccactggaagcaagcgtgggaaaaattagatgctgacgttgaatttaacagatgttcagtagtatctccaacattccgaaagcgtgtgtttcagtggacagcatctacagctacaataactaaagaaaaacaagatcaacctaagaaagatatctcaaattatcaggtggaacaagctcaagttcttcttaagagagagaaggaaatcccaccaaccgttttccctaatcgcagcccttggtgccagaatccctatgtctctgcacatccttactgtcctctgattgaaccacacaatacatccaccgctggaggcagattggatagacagcccaggactcggtcaaccagacctaatcgagcctcagggtctaagaaaaagaagacatctgagtcacaaaagcaataagcagtcaactcaacctttaaagtaatctagtccaccctcaaccagctactagaaaagcaaaagagaactcaaatccctgaggcctgctctgcaacctccctgctattccatgagagggtgaagacatcacatttctatatggaaaaaggatccaaaatttgtattgctgtagaattggtgaattatagatgcttgatgaaat

SEQ ID NO: 313228 - protein, 369 aa, Artificial Sequence
  derived and/or modified sequence
MKDTQDIQEASKAMQNKVHEQEDKNEKQKQREDKLGVYSLVHFSPKMLGSVATTLPLSSSNSSGMPLGYYLSSPQISRVTISTTGQLTSKATVGSCSRVENSLDASPFSVPKKQDESPMIGDGEDYFLSLFGDSKKLTAHSNYTQKTLKYFSMILEEVGQFTSSSLGDVEIAEVNVKGLFVKLINSSLDKEMAIGDHILQQNVNGQTISLYRFLPNIVMQANSTVTAIAWYTPIHWKQAWEKLDADVEFNRCSVVSPTFRKRVFQWTASTATITKEKQDQPKKDISNYQVEQAQVLLKREKEIPPTVFPNRSPWCQNPYVSAHPYCPLIEPHNTSTAGGRLDRQPRTRSTRPNRASGSKKKKTSESQKQ

SEQ ID NO: 313229 - protein, 105 aa, Artificial Sequence
  derived and/or modified sequence
QWTASTATITKEKQDQPKKDISNYQVEQAQVLLKREKEIPPTVFPNRSPWCQNPYVSAHPYCPLIEPHNTSTAGGRLDRQPRTRSTRPNRASGSKKKKTSESQKQ

SEQ ID NO: 313230 - DNA, 1110 bp, Artificial Sequence
  derived and/or modified sequence
atgaaggacacccaggacatccaggaggccagcaaggccatgcagaacaaggtgcacgagcaggaggacaagaacgagaagcagaagcagagagaggacaagctgggcgtgtacagcctggtgcacttcagccccaagatgctgggcagcgtggccaccaccctgcccctgagcagcagcaacagcagcggcatgcccctgggctactacctgagcagcccccagatcagcagagtgaccatcagcaccaccggccagctgaccagcaaggccaccgtgggcagctgcagcagagtggagaacagcctggacgccagccccttcagcgtgcccaagaagcaggacgagagccccatgatcggcgacggcgaggactacttcctgagcctgttcggcgacagcaagaagctgaccgcccacagcaactacacccagaagaccctgaagtacttcagcatgatcctggaggaggtgggccagttcaccagcagcagcctgggcgacgtggagatcgccgaggtgaacgtgaagggcctgttcgtgaagctgatcaacagcagcctggacaaggagatggccatcggcgaccacatcctgcagcagaacgtgaacggccagaccatcagcctgtacagattcctgcccaacatcgtgatgcaggccaacagcaccgtgaccgccatcgcctggtacacccccatccactggaagcaggcctgggagaagctggacgccgacgtggagttcaacagatgcagcgtggtgagccccaccttcagaaagagagtgttccagtggaccgccagcaccgccaccatcaccaaggagaagcaggaccagcccaagaaggacatcagcaactaccaggtggagcaggcccaggtgctgctgaagagagagaaggagatcccccccaccgtgttccccaacagaagcccctggtgccagaacccctacgtgagcgcccacccctactgccccctgatcgagccccacaacaccagcaccgccggcggcagactggacagacagcccagaaccagaagcaccagacccaacagagccagcggcagcaagaagaagaagaccagcgagagccagaagcagtag

SEQ ID NO: 313231 - DNA, 1110 bp, Artificial Sequence
  derived and/or modified sequence
atgaaagatacacaagatatacaggaagcatccaaagccatgcagaacaaggtgcacgagcaggaggacaagaatgaaaaacaaaagcagagggaggacaagttgggcgtgtatagcctggtacacttctctcccaagatgctaggcagtgtagccaccaccctgcctctttccagctctaatagttctggaatgccccttggttattatctttctagtcctcaaatcagccgggtcacgatctcaaccacggggcagttgacgtccaaagcgacggtcggatcttgttctcgcgtggagaactcactcgacgcctcaccattcagcgtcccaaagaaacaggacgagagtccaatgattggtgatggagaggactatttcctgtctctgttcggggatagcaagaaactgaccgctcacagtaattacacccagaagactctgaagtattttagcatgatacttgaagaggttgggcaattcacctctagctctctgggcgatgtggagatcgccgaagtgaacgtgaagggactgtttgtgaaactcatcaatagcagcctcgataaagagatggctattggcgatcacattctccagcagaacgtcaatgggcagactatctccctgtacagattcctccccaacatagtaatgcaggccaatagcacagtcaccgctattgcctggtatacgcctattcactggaagcaggcttgggagaagctggacgccgacgtggagtttaacagatgttctgtggtgagccccacattccggaagagagtgttccagtggaccgcctccacagctacaataacaaaggaaaagcaagaccagccaaagaaggatatcagtaactaccaggtggagcaggcccaggtgctcctgaagcgcgagaaagagattcctcctaccgtgtttccaaatagatcaccttggtgccagaacccttacgtgtctgcacacccatactgccctctcatagaaccacacaacacaagcacagccggagggagactagatcggcagccaagaactaggtctaccagacctaaccgggcatcagggtccaagaaaaagaagacctctgagtcccagaaacaatag

SEQ ID NO: 313232 - DNA, 1110 bp, Artificial Sequence
  derived and/or modified sequence
atgaaggacacccaggacatccaggaggccagcaaggccatgcagaacaaggtgcatgagcaggaggacaagaatgagaagcagaagcagcgggaggacaagctgggcgtgtacagcctggtgcacttcagccccaagatgctgggctctgtggccaccaccctgcccctgagcagcagcaacagcagcggcatgcccctgggctactacctgagcagcccccagatcagccgggtgaccatcagcaccaccggccagctgaccagcaaggccaccgtgggcagctgcagccgggtggagaacagcctggatgccagccccttctctgtgcccaagaagcaggatgagagccccatgattggagatggagaggactacttcctgagcctgtttggagacagcaagaagctgacagcccacagcaactacacccagaagaccctgaagtacttctccatgatcctggaggaggtgggccagttcaccagcagcagcctgggagatgtggagattgctgaggtgaatgtgaagggcctgtttgtgaagctgatcaacagcagcctggacaaggagatggccatcggggaccacatcctgcagcagaatgtgaatggccagaccatcagcctgtaccgcttcctgcccaacatcgtgatgcaggccaacagcacagtgacagccatcgcctggtacacccccatccactggaagcaggcctgggagaagctggatgctgatgtggagttcaaccgctgcagcgtggtgagccccaccttcaggaagagggtcttccagtggacagccagcacagccaccatcaccaaggagaagcaggaccagcccaagaaggacatcagcaactaccaggtggagcaggcccaggtgctgctgaagcgggagaaggagatcccccccaccgtcttccccaacagaagcccctggtgccagaacccctacgtgtctgcccacccctactgccccctgattgagccccacaacaccagcacagctgggggccgcctggaccggcagcccaggaccaggagcacccggcccaacagagccagcggcagcaagaagaagaagaccagcgagagccagaagcagtag

SEQ ID NO: 313233 - DNA, 1110 bp, Artificial Sequence
  derived and/or modified sequence
atgaaggacacccaggacatccaggaggccagcaaggccatgcagaacaaggtgcatgagcaggaggataaaaatgaaaagcagaagcagagggaagacaagctgggcgtatactctctggtccatttctccccaaaaatgttgggctcagtcgctactacactcccactgtcctcgtctaactcctccggcatgcctttgggctactatctgtcttcacctcagattagtagggttactatttctaccactgggcaactgacttcaaaagccaccgttggcagttgttctcgggtagaaaatagcctggatgctagcccattctccgtgccaaaaaaacaggacgaatctccaatgatcggggacggcgaagactacttcctgtcactgtttggggattctaaaaagcttacagcccacagtaactacacgcaaaaaacgctgaagtacttcagtatgatcctggaggaggtcgggcaattcacctcttcgtctctgggcgacgtcgagattgctgaggtcaacgtgaagggattgtttgtcaagctgattaactcatccttggataaagaaatggcgatcggcgaccacattctacagcagaatgtgaacggtcagacaatttcactctaccgatttctgcctaacattgtgatgcaggccaacagcactgtgactgctatcgcttggtacacgccaattcactggaagcaggcctgggaaaaactagacgctgacgtggagttcaatcggtgttccgtggttagtccaacgtttcgtaagcgcgtatttcagtggaccgctagtactgctaccatcacaaaggagaagcaggaccaacccaagaaggatatttccaactatcaggtggaacaagcacaggtgctgttaaagcgtgagaaggaaattccgcctacagtctttcccaataggtccccatggtgccagaacccctacgtttccgctcatccttactgcccactcattgagccacacaatacaagtacagcgggcgggaggctcgataggcagccacgaactagatcaacacgccctaatagggcatccggaagtaagaagaaaaagacatctgagagtcagaaacagtag

SEQ ID NO: 313234 - DNA, 1520 bp, Artificial Sequence
  derived and/or modified sequence
agtcataaaggtctctttgccaagttactgccctctcaagctgcttccagtgaatgctacacacctgcaccatggtttgtccgacatccttagccaagatcaggattggctatgttggtacttacatatcctcatgagaattgtggttctggtactagtttggtaaagaaattattaaacctagctgatgcttgaaggtagttggattaacaggaaagaaaagagacttcttttctagccaagatgaaagatacacaagacattcaggaagcttcgaaggcaatgcagaataaagtccatgagcaggaagataagaatgagaaacaaaaacaaagagaagacaaacttggagtatattctttagtacatttttccccaaagatgttgggttcagttgccacaacactgccattgtcatcttcaaattccagtggaatgcctcttggttactatctgtctagtcctcagattagtagagtaactatatcaacaactggacaattgacttctaaagctactgtaggtagctgttccagagtggaaaacagcttggatgccagccccttctcagttccgaagaaacaggatgaatcacccatgattggggatggagaagattatttcctttctttgtttggtgattcaaagaaacttacagcacactcaaactacactcagaaaactttaaaatacttttctatgattcttgaagaagttggccaatttacctccagttctcttggagatgttgaaatagctgaagtgaatgtcaagggtttgttcgtgaagctcattaactcttcccttgacaaagaaatggcaattggagatcatattctccagcaaaatgtgaatggacaaaccatttctttgtaccgattccttccaaacatcgtaatgcaggcaaattccacagtaacagccattgcgtggtacacccctatccactggaagcaagcgtgggaaaaattagatgctgacgttgaatttaacagatgttcagtagtatctccaacattccgaaagcgtgtgtttcagtggacagcatctacagctacaataactaaagaaaaacaagatcaacctaagaaagatatctcaaattatcaggtggaacaagctcaagttcttcttaagagagagaaggaaatcccaccaaccgttttccctaatcgcagcccttggtgccagaatccctatgtctctgcacatccttactgtcctctgattgaaccacacaatacatccaccgctggaggcagattggatagacagcccaggactcggtcaaccagacctaatcgagcctcagggtctaagaaaaagaagacatctgagtcacaaaagcaataagcagtcaactcaacctttaaagctttacctttatggtgtcatggtccagttgtatggaagagtaaaaagacctgcaatctaggctccctgccatgctggccaaagacattccacaacttaaagaaaatcaaatgcctgagcaaacgtagcgggttccgctttcatag

SEQ ID NO: 313235 - DNA, 1110 bp, Artificial Sequence
  derived and/or modified sequence
atgaaggatacacaggacattcaggaagcgagcaaggcaatgcagaataaagtccatgaacaggaggataagaatgagaaacagaaacaaagggaagacaagttaggagtctattctctggtgcactttagtcctaaaatgcttgggtcagtggctaccacgctccccctctctagctccaattcatctggcatgcctttaggatattacttatcgagtccacaaatttctcgggtgacaattagcacaactggccagctgacaagcaaagcaaccgtgggttcttgttcccgggttgaaaactcacttgacgcctccccgttttccgtgcccaagaaacaggatgaatcacccatgattggggacggcgaagattacttccttagtctcttcggggatagtaaaaagctcactgcacactctaattacacacaaaaaacacttaagtacttcagcatgattctcgaggaggttggccagtttactagttcctcgctcggcgacgtggagatcgccgaggtgaacgtgaaaggcctgttcgttaaactgatcaattctagtttagataaagagatggccattggtgatcacatccttcagcagaacgtgaacggccagactattagcctgtataggtttttacccaatatcgtgatgcaagcaaactctaccgttaccgccattgcttggtacacaccaatccactggaaacaggcatgggaaaagctggacgctgacgtggaatttaaccgctgttccgtggtgtcccccaccttcagaaaacgggtgttccagtggaccgcttctactgctaccatcacaaaggagaagcaagaccagcccaaaaaagatatttctaactaccaggtggagcaggcccaggtgctgctcaagagagaaaaggaaattcctcccacggtctttcccaaccgctctccgtggtgccagaatccttacgtatccgcccacccgtactgccccctaatcgaaccccataatacgagcaccgccggaggccgattagataggcaaccgagaaccaggagcacgcggcctaatcgcgcaagtggcagcaaaaaaaaaaaaacctcagagtcccagaaacagtag

SEQ ID NO: 313236 - DNA, 318 bp, Artificial Sequence
  derived and/or modified sequence
cagtggaccgccagcaccgccaccatcaccaaggagaagcaggaccagcccaagaaggacatcagcaactaccaggtggagcaggcccaggtgctgctgaagagagagaaggagatcccccccaccgtgttccccaacagaagcccctggtgccagaacccctacgtgagcgcccacccctactgccccctgatcgagccccacaacaccagcaccgccggcggcagactggacagacagcccagaaccagaagcaccagacccaacagagccagcggcagcaagaagaagaagaccagcgagagccagaagcagtag

SEQ ID NO: 313237 - DNA, 492 bp, Artificial Sequence
  derived and/or modified sequence
tgagacaagttcagagccagccccgactgcatcaccatcctgtgcaagcccaacggccaggccatcgcctggtacacccccatccactggaagcaggcctgggagaagctggacgccgacgtggagttcaacagatgcagcgtggtgagccccaccttcagaaagagagtgttccagtggaccgccagcaccgccaccatcaccaaggagaagcaggaccagcccaagaaggacatcagcaactaccaggtggagcaggcccaggtgctgctgaagagagagaaggagatcccccccaccgtgttccccaacagaagcccctggtgccagaacccctacgtgagcgcccacccctactgccccctgatcgagccccacaacaccagcaccgccggcggcagactggacagacagcccagaaccagaagcaccagacccaacagagccagcggcagcaagaagaagaagaccagcgagagccagaagcagtag

SEQ ID NO: 313238 - DNA, 318 bp, Artificial Sequence
  derived and/or modified sequence
caatggaccgccagcactgccacaatcacgaaagaaaaacaggatcaacctaagaaagatattagcaattatcaggtggaacaggcccaggtgttgttaaaaagagaaaaggaaattccccccaccgtgtttccaaatagaagtccctggtgccagaacccctacgtgtctgcccacccctattgccctctgatcgagccgcacaacacatctaccgccggggggcgcctagataggcagccaaggaccaggtctactagaccaaatagagctagtggctccaagaagaagaagacatcagaatcccagaaacagtag

SEQ ID NO: 313239 - DNA, 492 bp, Artificial Sequence
  derived and/or modified sequence
taggacaaattccgcgcgtctcccgactgtatcactatcttgtgcaagccaaacggacaggcaattgcgtggtacacgcctatccattggaagcaggcttgggaaaagctggacgccgacgtggaattcaacaggtgtagcgttgtgagtcccacattcaggaaacgcgtcttccagtggacagcatccaccgcgacgatcaccaaggagaaacaggatcagccaaagaaggatatttccaattatcaggtggagcaggctcaggttcttctgaagcgcgaaaaggaaatcccccccaccgtgtttccaaaccgaagcccctggtgtcaaaacccctacgtgagcgctcacccatactgtcccttgattgagccacataacacatccactgcaggaggccgtcttgatcgacagcccagaacccgcagtacaagaccgaatcgcgcaagtgggtcgaaaaagaagaaaacctcggaatctcagaagcagtag

SEQ ID NO: 313240 - DNA, 318 bp, Artificial Sequence
  derived and/or modified sequence
cagtggacagccagcacagccaccatcaccaaggagaagcaggaccagcccaagaaggacatcagcaactaccaggtggagcaggcccaggtgctgctgaagcgggagaaggagatcccccccaccgtcttccccaacagaagcccctggtgccagaacccctacgtgtctgcccacccctactgccccctgattgagccccacaacaccagcacagctgggggccgcctggaccggcagcccaggaccaggagcacccggcccaacagagccagcggcagcaagaagaagaagaccagcgagagccagaagcagtag

SEQ ID NO: 313241 - DNA, 492 bp, Artificial Sequence
  derived and/or modified sequence
tgagacaagttccgggccagcccagactgcatcaccatcctgtgcaagcccaacggccaggccatcgcctggtacacccccatccactggaagcaggcctgggagaagctggatgctgatgtggagttcaaccgctgcagcgtggtgagccccaccttcaggaagagggtcttccagtggacagccagcacagccaccatcaccaaggagaagcaggaccagcccaagaaggacatcagcaactaccaggtggagcaggcccaggtgctgctgaagcgggagaaggagatcccccccaccgtcttccccaacagaagcccctggtgccagaacccctacgtgtctgcccacccctactgccccctgattgagccccacaacaccagcacagctgggggccgcctggaccggcagcccaggaccaggagcacccggcccaacagagccagcggcagcaagaagaagaagaccagcgagagccagaagcagtag

SEQ ID NO: 313242 - DNA, 318 bp, Artificial Sequence
  derived and/or modified sequence
cagtggaccgccagcaccgccaccatcaccaaggagaagcaggaccaaccaaagaaagacatctcaaattatcaggtggagcaggcccaggtgcttctcaagagggagaaggagattccgcctaccgtcttccccaatcgctctccttggtgccaaaacccttacgtgagcgcccacccatattgtcctcttatcgaaccccacaacacgtcaaccgccggaggccgtctggacaggcagccgcggaccaggtcaacgcgaccgaatcgggcctccggttccaaaaaaaagaagaccagcgaaagccagaagcaatag

SEQ ID NO: 313243 - DNA, 492 bp, Artificial Sequence
  derived and/or modified sequence
tgagacaagttccgggccagccccgactgcatcaccatcctgtgcaagcccaacgggcaagcaatcgcttggtatacaccaatccactggaaacaggcctgggagaaactggacgcagacgtggaatttaacagatgctctgttgtctctcctaccttcagaaaaagggtctttcaatggacagccagcacggccactataacgaaggaaaaacaggatcagcccaaaaaggatattagcaattaccaagtggagcaggcgcaagtgttgctaaagagagaaaaagagatccctccgaccgtgttccctaatcgctcaccctggtgtcagaatccgtacgtgagcgctcacccatactgtcccttaatcgagcctcacaacaccagcaccgccggcggccgcctggatcggcagccccgcacgcgcagcaccaggccaaatagggccagtggatctaagaaaaagaagacatctgagtcacaaaagcaatag

SEQ ID NO: 313244 - DNA, 318 bp, Artificial Sequence
  derived and/or modified sequence
cagtggaccgcaagcacagctaccatcaccaaagagaagcaagaccaacctaagaaggacatcagtaactaccaggtggaacaggcccaagtgctgctcaaaagagaaaaagagatccccccaacagtcttcccgaaccggtccccctggtgtcagaacccctatgtgtccgcccatccctattgcccactcatcgaacctcacaatacctcaacggccggaggccgactggaccgccagcctcgcaccagaagtacaaggcctaaccgcgcttcgggctctaaaaagaagaagacgagtgagtcacagaagcagtag

SEQ ID NO: 313245 - DNA, 492 bp, Artificial Sequence
  derived and/or modified sequence
taggataagtttcgcgcttctcccgattgcattacgatattatgtaagcccaacggacaggcgatcgcgtggtacacgcccatccattggaagcaggcttgggagaaactcgatgccgatgtcgaattcaatagatgtagcgtggtcagtcctacatttcggaaacgcgtcttccagtggaccgcctctaccgctacaattactaaggaaaagcaggatcagccaaaaaaagacatctccaattaccaggttgaacaggcacaggtgcttctgaaacgggaaaaggagattccacctacagtgtttcctaatcggagcccttggtgccaaaacccctacgtgtccgcacacccatactgcccactgatcgaaccacataacaccagcaccgctgggggaagactggaccggcagccacgtacaaggtctacgcgacctaaccgggcttctggaagcaagaaaaaaaagacctccgagtctcagaagcagtag

SEQ ID NO: 313246 - DNA, 454 bp, Artificial Sequence
  derived and/or modified sequence
cagtggacagcatctacagctacaataactaaagaaaaacaagatcaacctaagaaagatatctcaaattatcaggtggaacaagctcaagttcttcttaagagagagaaggaaatcccaccaaccgttttccctaatcgcagcccttggtgccagaatccctatgtctctgcacatccttactgtcctctgattgaaccacacaatacatccaccgctggaggcagattggatagacagcccaggactcggtcaaccagacctaatcgagcctcagggtctaagaaaaagaagacatctgagtcacaaaagcaataagcagtcaactcaacctttaaaggcttcctattctttacttgacttaagatgaaaactacagccacgtgaaccctaacttgttggtattctggactctcctggtagaaatgacttaattttactactccatacagcc

SEQ ID NO: 313247 - DNA, 636 bp, Artificial Sequence
  derived and/or modified sequence
agacaagtttagagcaagtcctgattgtataacaatcctgtgcaaaccgaacggtcaagccattgcgtggtacacccctatccactggaagcaagcgtgggaaaaattagatgctgacgttgaatttaacagatgttcagtagtatctccaacattccgaaagcgtgtgtttcagtggacagcatctacagctacaataactaaagaaaaacaagatcaacctaagaaagatatctcaaattatcaggtggaacaagctcaagttcttcttaagagagagaaggaaatcccaccaaccgttttccctaatcgcagcccttggtgccagaatccctatgtctctgcacatccttactgtcctctgattgaaccacacaatacatccaccgctggaggcagattggatagacagcccaggactcggtcaaccagacctaatcgagcctcagggtctaagaaaaagaagacatctgagtcacaaaagcaataagcagtcaactcaacctttaaagactttcaggattaagcatttcctggccaagaaacaaaagcaaaatcgtcccattccccagtggattcggatgaaaactggtaatacaatcaggtacaactccaaaaggagacaatggagaagaa

SEQ ID NO: 313248 - protein, 856 aa, Artificial Sequence
  derived and/or modified sequence
MANETQKVGAIHFPFPFTPYSIQEDFMAELYRVLEAGKIGIFESPTGTGKSLSLICGALSWLRDFEQKKREEEARLLETGTGPLHDEKDESLCLSSSCEGAAGTPRPAGEPAWVTQFVQKKEERDLVDRLKAEQARRKQREERLQQLQHRVQLKYAAKRLRQEEEERENLLRLSREMLETGPEAERLEQLESGEEELVLAEYESDEEKKVASRVDEDEDDLEEEHITKIYYCSRTHSQLAQFVHEVKKSPFGKDVRLVSLGSRQNLCVNEDVKSLGSVQLINDRCVDMQRSRHEKKKGAEEEKPKRRRQEKQAACPFYNHEQMGLLRDEALAEVKDMEQLLALGKEARACPYYGSRLAIPAAQLVVLPYQMLLHAATRQAAGIRLQDQVVIIDEAHNLIDTITGMHSVEVSGSQLCQAHSQLLQYVERYGKRLKAKNLMYLKQILYLLEKFVAVLGGNIKQNPNTQSLSQTGTELKTINDFLFQSQIDNINLFKVQRYCEKSMISRKLFGFTERYGAVFSSREQPKLAGFQQFLQSLQPRTTEALAAPADESQASTLRPASPLMHIQGFLAALTTANQDGRVILSRQGSLSQSTLKFLLLNPAVHFAQVVKECRAVVIAGGTMQPVSDFRQQLLACAGVEAERVVEFSCGHVIPPDNILPLVICSGISNQPLEFTFQKRELPQMIFQEPKSAHQVEQVLLAYSRCIQACGQERGQVTGALLLSVVGGKMSEGINFSDNLGRCVVMVGMPFPNIRSAELQEKMAYLDQTLPRAPGQAPPGKALVENLCMKAVNQSIGRAIRHQKDFASVVLLDQRYARPPVLAKLPAWIRARVEVKATFGPAIAAVQKFHREKSASS

SEQ ID NO: 313249 - DNA, 3724 bp, Artificial Sequence
  derived and/or modified sequence
ttctaactcagtggcgtttgccctgattcccggggcctggctttcagcgtagcaattctgccggcgaagaaggtgagcgcagtgctgtgtggcagcagagctccttaggacgaggagcagcgggacgaggaagggcagactggtgaaatcgcaaactgggcgtctgttccggcgccggacccctatttgcaaaggtccatggctaatgaaacacagaaggttggtgccatccattttccttttcccttcacaccctattccatccaggaagacttcatggcagagctgtaccgggttttggaggctggcaagattgggatatttgagagtccaactggcactgggaagtccttaagtcttatttgtggggccctctcttggctccgtgactttgaacagaagaagcgtgaagaagaggcacgactccttgaaactggaactggccccttacatgatgagaaagatgaatccctgtgtctgtcttcttcctgcgaaggggctgcaggcaccccgaggcctgctggagaaccggcctgggttactcagtttgtgcagaagaaagaagagagggacctggtggaccgactaaaggcggagcaggccaggaggaagcagcgagaagaacgcctgcagcagctgcagcacagggtgcagctcaagtatgcagccaagcgcctgaggcaggaagaagaagaaagagagaatctcctccgcctcagcagggagatgctagagacaggcccggaggctgagcggctggagcagctggagtctggggaggaggagctggtcctcgccgaatacgagagtgatgaggagaaaaaggtggcgagcagagtggatgaggatgaggatgacctggaggaagaacacataactaagatttattactgtagtcggacacactcccagctggcccagtttgtgcatgaggtgaagaagagcccctttggcaaggatgttcggctggtctcccttggctcccggcagaacctttgtgtaaatgaagacgtgaaaagcctaggttctgtgcagcttatcaacgaccgctgtgtggacatgcagagaagcaggcacgagaagaagaaaggagctgaggaggagaagccaaagaggaggaggcaggagaagcaggcagcctgccccttctacaaccacgagcagatgggccttctccgggatgaggccctggcagaggtgaaggacatggagcagctgctggcccttgggaaggaggcccgggcctgtccctattacgggagccgccttgccatccctgcagcccagctggtggtgctgccctatcagatgctgctgcatgcggccactcggcaggccgcgggcatccggctgcaggaccaggtggtgatcatcgacgaggcgcacaacctgatcgacaccatcacgggcatgcacagcgtggaggtcagcggctcccagctctgccaggcccattcccagctgctgcagtacgtggagcgatacgggaagcgtttgaaggccaagaacctgatgtacctgaagcagatcctgtatttgctggagaaattcgtggctgtgctaggggggaacattaagcaaaatcccaatacacagagtctgtcacagacagggacggagctgaagaccatcaacgactttctcttccagagccagatcgacaacatcaacctgttcaaggtgcagcgatactgtgagaagagcatgatcagcagaaagctctttggattcactgaacggtacggagcagtgttctcatcccgggagcagcccaaactggctgggtttcagcaattcctgcagagcctgcagcccaggacgactgaagctcttgcagcccctgcagacgagagtcaggccagcaccctgcgaccagcttctccactgatgcacatccaaggcttcctggcagctctcactacggccaaccaggacggcagggtcatcctgagccgccaaggcagcctcagtcagagcaccctgaagtttttgctcctgaatccagctgtgcactttgcccaagtggtgaaggaatgccgggcagtggtcattgcggggggtaccatgcagccggtgtctgacttccggcagcagctgctggcctgtgccggggtggaagctgagcgcgtggtggagttttcctgtggtcacgtgatccctccagacaacatcctgcccctcgtcatctgcagcgggatctccaaccagccgctggaattcacgttccagaaaagagagctgcctcagatgatattccaggaacctaagagcgcacaccaggtggagcaggtgctgctggcatattccaggtgcatccaggcctgtggccaggagagaggccaggtgacaggggccctgctcctctctgtggttggaggaaagatgagtgaagggatcaacttctctgacaacctaggccggtgtgtggtgatggtgggcatgcccttccccaacatcaggtctgcagagctgcaggagaagatggcctacttggatcaaaccctccccagagcccccggccaggcacccccagggaaggctctggtggagaacctgtgcatgaaggccgtcaaccagtccataggcagggccatcaggcaccagaaggattttgccagcgtagtgctcctggaccagcgatatgcccggccccctgtcctggccaagctgccggcctggatccgagcccgtgtggaggtcaaagctacctttggccccgccattgctgctgtgcagaagtttcaccgggagaagtcggcctcttcctgatgggcaaccacaccactgcctggcgccgtgcccttcctttgtcctgcccgctggagacagtgtttgtcgtgggcgtggtctgcggggatcctgttacaaaggtgaaacccaggaggagagtgtggagtccagagtgctgccaggacccaggcacaggcgttagctcccgtaggagaaaatgggggaatcctgaatgaacagtgggtcctggctgtccttggggcgttccagggcagctcccctcctggaatagaatctttctttccatcctgcatggctgagagccaggcttccttcctggtctccgcaggaggctgtggcagctgtggcatccactgtggcatctccgtcctgcccaccttcttaagaggcgagatggagcaggcccatctgcctctgccctttctagccaaggttatagctgccctggactgctcactctctggtctcaatttaaaatgatccatggccacagggctcctgcccaggggcttgtcaccttcccctcctccttcctgagtcactccttcagtagaaggccctgctccctatcctgtcccacagccctgcctggatttgtatccttggcttcgtgccagttcctccaagtctatggcacctccctccctctcaaccacttgagcaaactccaagacaccttctaccccaacaccagcaattatgccaagggccgttaggctctcaacatgactatagagaccccgtgtcatcacggagacctttgttcctgtgggaaaatatccctcccacctgcaacagctgcccctgctgactgcgcctgtcttctccctctgaccccagagaaaggggctgtggtcagctgggatcttctgccaccatcagggacaaacgggggcaggaggaaagtcactgatgcccagatgtttgcatcctgcacagctataggtccttaaataaaagtgtgctgttggtt

SEQ ID NO: 313250 - protein, 288 aa, Artificial Sequence
  derived and/or modified sequence
MANETQKVGAIHFPFPFTPYSIQEDFMAELYRVLEAGKIGIFESPTGTGKSLSLICGALSWLRDFEQKKREEEARLLETGTGPLHDEKDESLCLSSSCEGAAGTPRPAGEPAWVTQFVQKKEERDLVDRLKAEQARRKQREERLQQLQHRVQLKYAAKRLRQEEEERENLLRLSREMLETGPEAERLEQLESGEEELVLAEYESDEEKKVASRAPSDATSSRHPPDASFPAALNFLQRTRPSSVLSEDLLMQRAVAKHPALLPWQMSSSPLRPGSEWMRMRMTWRKNT

SEQ ID NO: 313251 - DNA, 867 bp, Artificial Sequence
  derived and/or modified sequence
atggccaacgagacccagaaggtgggcgccatccacttccccttccccttcaccccctacagcatccaggaggacttcatggccgagctgtacagagtgctggaggccggcaagatcggcatcttcgagagccccaccggcaccggcaagagcctgagcctgatctgcggcgccctgagctggctgagagacttcgagcagaagaagagagaggaggaggccagactgctggagaccggcaccggccccctgcacgacgagaaggacgagagcctgtgcctgagcagcagctgcgagggcgccgccggcacccccagacccgccggcgagcccgcctgggtgacccagttcgtgcagaagaaggaggagagagacctggtggacagactgaaggccgagcaggccagaagaaagcagagagaggagagactgcagcagctgcagcacagagtgcagctgaagtacgccgccaagagactgagacaggaggaggaggagagagagaacctgctgagactgagcagagagatgctggagaccggccccgaggccgagagactggagcagctggagagcggcgaggaggagctggtgctggccgagtacgagagcgacgaggagaagaaggtggccagcagagcccccagcgacgccaccagcagcagacacccccccgacgccagcttccccgccgccctgaacttcctgcagagaaccagacccagcagcgtgctgagcgaggacctgctgatgcagagagccgtggccaagcaccccgccctgctgccctggcagatgagcagcagccccctgagacccggcagcgagtggatgagaatgagaatgacctggagaaagaacacctag

SEQ ID NO: 313252 - DNA, 675 bp, Artificial Sequence
  derived and/or modified sequence
atggccgagctgtacagagtgctggaggccggcaagatcggcatcttcgagagccccaccggcaccggcaagagcctgagcctgatctgcggcgccctgagctggctgagagacttcgagcagaagaagagagaggaggaggccagactgctggagaccggcaccggccccctgcacgacgagaaggacgagagcctgtgcctgagcagcagctgcgagggcgccgccggcacccccagacccgccggcgagcccgcctgggtgacccagttcgtgcagaagaaggaggagagagacctggtggacagactgaaggccgagcaggccagaagaaagcagagagaggagagactgcagcagctgcagcacagagtgcagctgaagtacgccgccaagagactgagacaggaggaggaggagagagagaacctgctgagactgagcagagagatgctggagaccggccccgaggccgagagactggagcagctggagagcggcgaggaggagctggtgctggccgagtacgagagcgacgaggagaagaaggtggccagcagagtggacgaggacgaggacgacctggaggaggagcacatcaccaagatctactactgcagcagaacccacagccagctggcccagttcgtgcacgaggtgaagaagagcccctag

SEQ ID NO: 313253 - DNA, 883 bp, Artificial Sequence
  derived and/or modified sequence
gccagtttctaactcagtggcgtttgccctgattcccggggcctggctttcagcgtagcaattctgccggcgaagaaggtgagcgcagtgctgtgtggcagcagagctccttaggacgaggagcagcgggacgaggaagggcagactggtgaaatcgcaaactgggcgtctgttccggcgccggacccctatttgcaaaggaagacttcatggcagagctgtaccgggttttggaggctggcaagattgggatatttgagagtccaactggcactgggaagtccttaagtcttatttgtggggccctctcttggctccgtgactttgaacagaagaagcgtgaagaagaggcacgactccttgaaactggaactggccccttacatgatgagaaagatgaatccctgtgtctgtcttcttcctgcgaaggggctgcaggcaccccgaggcctgctggagaaccggcctgggttactcagtttgtgcagaagaaagaagagagggacctggtggaccgactaaaggcggagcaggccaggaggaagcagcgagaagaacgcctgcagcagctgcagcacagggtgcagctcaagtatgcagccaagcgcctgaggcaggaagaagaagaaagagagaatctcctccgcctcagcagggagatgctagagacaggcccggaggctgagcggctggagcagctggagtctggggaggaggagctggtcctcgccgaatacgagagtgatgaggagaaaaaggtggcgagcagagtggatgaggatgaggatgacctggaggaagaacacataactaagatttattactgtagtcggacacactcccagctggcccagtttgtgcatgaggtgaagaagagcccctt

SEQ ID NO: 313254 - DNA, 867 bp, Artificial Sequence
  derived and/or modified sequence
atggcaaatgaaacgcagaaggtgggggctatccattttcctttccctttcacaccctactccatccaggaggacttcatggctgaactctatcgtgtcctcgaggctgggaaaattggcatcttcgaatcccccacaggcacaggcaaatcattgtctctcatctgcggagccttgagctggcttcgggatttcgagcagaaaaagcgtgaggaggaagctagactgctagagactggcactggccccctccacgatgagaaggacgagtccttgtgtctatctagcagttgcgaaggcgcagcagggacgccgagaccagcaggtgaacccgcttgggtcactcaatttgtgcagaagaaagaggaacgcgacctggtggacaggctgaaagcggagcaggccagacgaaaacagagggaagaacgcctccagcaactgcaacaccgcgtccagctgaaatacgctgccaagcgcctccgccaggaagaggaagagcgagaaaatttattgcgactcagccgtgaaatgctggagactggtccagaagcagagcgtttggaacagctggagtctggggaggaagaactcgtgttagctgagtatgaatcagatgaggagaagaaagtggcgtctagggccccctctgatgctactagctcccgccatccacccgacgcatcttttccggcagccctcaacttcctgcaacgcacacgcccctccagcgtgctgagtgaagatctcttaatgcaacgagccgtggccaagcaccccgccttgcttccctggcagatgtcatcttcccctctgcgaccgggctctgaatggatgcggatgcggatgacatggcgcaagaatacctag

SEQ ID NO: 313255 - DNA, 675 bp, Artificial Sequence
  derived and/or modified sequence
atggctgaactttacagggtgcttgaggctggaaagattggcatcttcgagagccctaccggcactgggaaatccctctcccttatctgtggggccctgagctggctgcgggattttgaacagaagaagcgagaagaagaggccagacttttagaaaccggcactggacctcttcatgatgagaaggacgagagtctgtgcctgtcatcttcctgtgaaggggccgctgggacccctagaccagctggcgaacctgcttgggttacccagtttgtgcagaaaaaagaagaaagggatctggtagatcgtctgaaggcggagcaggctcgtagaaaacaacgggaagagaggctccagcagctgcaacatcgcgtgcagcttaagtacgccgctaagcgccttcgacaggaggaggaggagagggaaaacctgctgagactctccagggagatgctggaaaccggaccggaggctgagcggctcgagcagctggagtccggtgaggaggaattggtgctagccgaatatgaatccgacgaggagaaaaaggttgcgagcagggtggacgaggatgaggacgatcttgaggaagagcatattaccaaaatttattactgcagcagaacccattcgcagctggctcagttcgttcacgaggttaaaaaaagcccctag

SEQ ID NO: 313256 - DNA, 867 bp, Artificial Sequence
  derived and/or modified sequence
atggccaatgagacccagaaggtgggcgccatccacttccccttccccttcaccccctacagcatccaggaggacttcatggccgagctgtacagagtgctggaggccggcaagattggcatctttgagagccccaccggcaccgggaagagcctgagcctcatctgtggggccctgtcctggctgcgggactttgagcagaagaagcgggaggaggaggcccggctgctggagactggaacaggccccctgcatgatgagaaggatgagagcctgtgcctgagcagcagctgtgagggcgccgccggcacccccaggcctgctggggagcccgcctgggtgacccagtttgtgcagaagaaggaggagcgggacctggtggaccggctgaaggccgagcaggcccggaggaagcagcgggaggagcggctgcagcagctgcagcaccgggtgcagctgaagtatgctgccaagaggctgcggcaggaggaggaggagcgggagaacctgctgcggctgagccgggagatgctggagaccggccctgaggccgagcggctggagcagctggagagcggggaggaggagctggtgctggccgagtatgaaagtgatgaggagaagaaggtggccagccgggcccccagtgatgccaccagcagccgccaccccccagatgccagcttccctgctgccctgaacttcctgcagaggacccggcccagctctgtgctgtctgaggacctgctgatgcagagagctgtggccaagcacccagccctgctgccctggcagatgagcagcagccccctgcggcccggcagcgagtggatgaggatgaggatgacctggaggaagaacacctag

SEQ ID NO: 313257 - DNA, 675 bp, Artificial Sequence
  derived and/or modified sequence
atggccgagctgtacagagtgctggaggccggcaagattggcatctttgagagccccaccggcaccgggaagagcctgagcctcatctgtggggccctgtcctggctgcgggactttgagcagaagaagcgggaggaggaggcccggctgctggagactggaacaggccccctgcatgatgagaaggatgagagcctgtgcctgagcagcagctgtgagggcgccgccggcacccccaggcctgctggggagcccgcctgggtgacccagtttgtgcagaagaaggaggagcgggacctggtggaccggctgaaggccgagcaggcccggaggaagcagcgggaggagcggctgcagcagctgcagcaccgggtgcagctgaagtatgctgccaagaggctgcggcaggaggaggaggagcgggagaacctgctgcggctgagccgggagatgctggagaccggccctgaggccgagcggctggagcagctggagagcggggaggaggagctggtgctggccgagtatgaaagtgatgaggagaagaaggtggccagccgggtggatgaagatgaagatgacctggaggaggagcacatcaccaagatctactactgcagcaggacccacagccagctggcccagtttgtgcatgaggtgaagaagagcccctag

SEQ ID NO: 313258 - DNA, 867 bp, Artificial Sequence
  derived and/or modified sequence
atggccaacgagacccagaaggtgggcgccatccacttccccttccctttcaccccgtacagcattcaggaggacttcatggcggaactttacagagtcttggaggccggaaagataggtatctttgagagccccaccggcacggggaaatctttgtccctgatctgcggcgcgttgagctggctcagagattttgaacagaagaaaagagaggaagaggctcggttgctggaaacgggaactggacccctgcacgatgagaaagacgagtctctctgtttgtcgtcaagttgcgaaggggccgcaggcaccccccgtcccgccggcgagccggcctgggtgacccagttcgtgcaaaaaaaggaggagcgagatctggttgaccgtttgaaagcagagcaagcccgtcgcaagcagagagaggaaagactccaacagcttcagcatagagtgcagcttaagtacgccgccaagagactgaggcaagaggaggaagaaagagaaaatctccttcgactaagtcgagagatgctagaaactggacccgaagccgaacgcctcgaacagctcgaatcaggcgaggaggaacttgtgcttgccgagtacgaatccgacgaagaaaagaaagtggcctcacgggcgcccagcgatgcgacgtcgtctcggcaccctccggacgcgtcttttcctgctgcgcttaatttcctgcagaggaccaggccttcttcagtgctctcagaggacttactgatgcagagggcggttgccaagcaccccgctctgcttccctggcagatgagctcctcacccctgcggcctggctccgaatggatgcgtatgagaatgacctggcggaaaaacacatag

SEQ ID NO: 313259 - DNA, 675 bp, Artificial Sequence
  derived and/or modified sequence
atggccgagctgtaccgggtgctggaggccggcaagatcggcatctttgagtctcccactggaacgggcaaatccctatcacttatctgtggggctctgagttggttacgggacttcgaacagaaaaagagagaagaggaagctcgactgcttgagactggaactggccccttgcatgatgagaaggacgaaagcttatgtctttcatcctcctgtgaaggcgccgcaggcaccccacggcccgcgggcgagccagcctgggtgacccaatttgtccaaaagaaagaggagagagacctcgtggatcgactgaaggcagaacaagccagaagaaagcagcgggaagaacgactacagcaactacagcatcgcgtgcagctgaagtacgccgcgaagcgcttacggcaggaggaggaggaacgggaaaacctgttgcgtctgagcagggagatgctggagaccggacctgaggcagagagactcgagcagctggaatcaggggaagaagagctagtactggcggagtacgagagtgatgaagagaaaaaagtggcatctcgggtggatgaagacgaagatgatctggaggaagagcatatcacaaagatctattactgttccaggactcattctcagctcgcccagttcgtgcatgaggtgaagaaatctccttag

SEQ ID NO: 313260 - DNA, 867 bp, Artificial Sequence
  derived and/or modified sequence
atggcaaacgaaacccagaaggtaggagccatccacttcccttttccgttcacaccttattcaatccaggaagattttatggccgaactgtacagggtcttagaggccggtaagataggtatttttgagtcacccacaggcaccggtaaatcactctctctgatctgtggtgccctctcgtggctgagggatttcgagcagaagaaaagggaggaggaagcacgcctactggaaactggtacagggccactgcatgacgagaaagacgagtctctgtgcctgtcctcgagctgcgagggggctgcaggcactcccaggcccgctggtgaacctgcgtgggttacacaatttgtacaaaagaaggaggaacgggaccttgtggacagactgaaagccgaacaagctaggagaaaacaaagagaagaacggctccaacagctccaacaccgggtgcagttaaagtatgctgctaaacggctgagacaagaggaggaggagcgcgaaaatctgctgcgtctctcccgcgaaatgctggaaactggacccgaagctgaaagactggagcagcttgaatccggtgaggaggaactggtcctcgccgagtatgaaagcgatgaggaaaaaaaagttgcttctcgcgcaccctctgacgccacatcaagcaggcacccccctgatgcaagcttccccgcagccctgaactttttacagcggactagaccaagcagcgtgctgtcggaagatttactgatgcagcgtgctgtcgccaaacaccccgctttgttgccgtggcagatgagttcctctccactccggcctggcagcgagtggatgcgcatgcgcatgacttggcggaagaacacatag

SEQ ID NO: 313261 - DNA, 675 bp, Artificial Sequence
  derived and/or modified sequence
atggctgagttataccgtgtgctggaagctggaaagattggcatattcgaaagcccaacagggaccggcaagtcgctgagtctgatttgcggagccctatcgtggctccgtgatttcgaacaaaaaaaacgcgaggaggaagcacggcttctggagactgggactggaccgctccatgacgagaaagacgagagcctctgcctgtcatcttcgtgtgagggcgcagccggtacacctcgcccagccggagagcccgcatgggtaacccagttcgtgcagaagaaagaggaaagagatcttgttgatcggcttaaagccgagcaggctagacggaagcagagggaagagcgccttcagcaactgcagcatagggtgcagctgaaatatgcggctaagaggcttcgacaggaggaagaggaacgcgagaatctgctgcggctgtcccgcgagatgctggaaactggacctgaagccgagagactcgagcagttagaatccggcgaagaggaactagtgcttgcggaatacgaatcagatgaagagaaaaaagtggcctctcgagttgacgaagatgaggatgacctggaagaagaacatattacaaaaatctactactgttcaagaacccactcccagcttgcacagttcgtccatgaggttaaaaagtctccatag

SEQ ID NO: 313262 - protein, 610 aa, Artificial Sequence
  derived and/or modified sequence
MQGSTQKAIPPGASPVSSLSQASSQALAVAQASSGATNQSLNLSQAGGGSGNSIPGSMGPGGGGQAHGGLGQLPSSGMGGGSCPRKGTGVVQPLPAAQTVTVSQGSQTEAESAAAKKAEADGSGQQNVGMNLTRTATPAPSQTLISSATYTQIQPHSLIQQQQQIHLQQKQVVIQQQIAIHHQQQFQHRQSQLLHTATHLQLAQQQQQQQQQQQQQQQPQATTLTAPQPPQVPPTQQGKPQTLAVKRKADSEEERDDVSTLGSMLPAKASPVAESPKVMDEKSSLGEKAESVANVNANTPSSELVALTPAPSVPPPTLAMVSRQMGDSKPPQAIVKPQILTHIIEGFVIQEGAEPFPVGCSQLLKESEKPLQTGLPTGLTENQSGGPLGVDSPSAELDKKANLLKCEYCGKYAPAEQFRGSKRFCSMTCAKRYNVSCSHQFRLKRKKMKEFQEANYARVRRRGPRRSSSDIARAKIQGKCHRGQEDSSRGSDNSSYDEALSPTSPGPLSVRAGHGERDLGNPNTAPPTPELHGINPVFLSSNPSRWSVEEVYEFIASLQGCQEIAEEFRSQEIDGQALLLLKEEHLMSAMNIKLGPALKICAKINVLKET

SEQ ID NO: 313263 - DNA, 5206 bp, Artificial Sequence
  derived and/or modified sequence
cccgccgcggaggccgagcgagcccccagcccagcctggcgactggggaccccggcacatgaggtggacgcccccggggaagacttgggtgcacagccaggcgagaaggtcttgagtcagacagagcaccagccttggggaccctggaccactatcatggagactgagagcgagcagaactccaattccaccaatgggagttctagctcagggggcagctctcggccccagatagctcaaatgtcactttatgaacgacaagcagtgcaggctctgcaagcactgcagcggcagcccaatgcagctcagtatttccaccagttcatgctccagcagcagctcagtaatgcccagctgcatagcctggctgccgtccagcaggccacaattgctgccagtcggcaggccagctccccaaacaccagcactacacagcagcagactaccaccacccaggcctcgatcaatctggccaccacatcggccgcccagctcatcagccgatcccagagtgtgagctctcccagtgctaccaccttgacccaatctgtgctactggggaacaccacctccccacccctcaaccagtctcaggcccagatgtatctacggccacagctgggaaacctattgcaggtaaaccgaaccctgggtcggaatgtgcctctagcctcccaactcatcctgatgcctaatggggcggtggctgcagtccagcaggaggtgccatctgctcagtctcctggagttcatgcagatgcagatcaggttcagaacttggcagtaaggaatcaacaggcctcagctcaaggacctcagatgcaaggctccactcagaaggccattcctccaggagcctcccctgtctctagcctctcccaggcctctagccaggccctagcggtggcacaggcttcctctggggccacaaaccagtccctcaaccttagtcaagctggtggaggcagtgggaatagcatcccagggtccatgggtccaggtggaggtgggcaggcacatggtggtttgggtcagttgccttcctcaggaatgggtggtgggagctgtcccagaaagggtacaggagtggtgcagcccttgcctgcagcccaaacagtgactgtgagccagggcagccagacagaggcagaaagtgcagcagccaagaaggcagaagcagatgggagtggccagcagaatgtgggcatgaacctgacacggacagccacacctgcgcccagccagacacttattagctcagccacctacacacagatccagccccattcactgattcagcaacagcaacagatccacctccagcagaaacaggtggtgatccagcagcagattgccatccaccaccagcagcagttccagcaccggcagtcccagctccttcacacagctacacacctccagttggcgcagcagcagcagcagcaacaacagcaacagcagcaacagcagcagccgcaagccaccaccctcactgcccctcagccaccacaggtcccacctactcagcaggtcccaccttcccagtcccagcagcaagcccaaaccctggtcgttcagcccatgcttcagtcttcacccttgtctcttccacctgatgcagcccctaagccaccaattcccatccaatccaaaccacctgtagcacctatcaagccgcctcagttaggggccgctaagatgtcagctgcccagcaaccaccaccccatatccctgtgcaagttgtaggcactcgacagccaggtacagcccaggcacaggctttggggttggcacagctggcagctgctgtacctacttcccgggggatgccaggtacagtgcagtctggtcaggcccatttggcctcctcgccaccttcatcccaggctcctggtgcactgcaggagtgccctcccacattggcccctgggatgacccttgctcctgtgcaggggacagcacatgtggtaaagggtggggctaccacctcctcacctgttgtagcccaggtccctgctgccttctatatgcagtctgtgcacttgccgggtaaaccccagacattggctgtcaaacgcaaggctgactctgaggaggagagagatgatgtctccacattgggttcaatgcttcctgccaaggcatctccagtagcagaaagcccaaaagtcatggacgagaagagcagtcttggagaaaaagctgaatcagtggctaatgtgaatgctaatactccaagcagtgaactagtagccttgacccccgccccttcagtaccgcctcctacactagccatggtgtctagacaaatgggtgactcaaaacccccacaggccatcgtgaagccccagattctcacccacatcattgaaggctttgttatccaggaaggagcagaacctttcccggtgggttgttctcagttactgaaggagtctgagaagccactacagactggccttccgacagggctgactgagaatcagtcaggtggccctttgggagtggacagcccatctgctgagttagataagaaggcgaatctcctgaagtgcgagtactgtgggaagtacgcccccgcagagcagtttcgtggctctaagaggttctgctccatgacttgcgctaagaggtacaatgtgagctgtagccatcagttccggctgaagaggaaaaaaatgaaagagtttcaagaagccaactatgctcgcgttcgcaggcgtggaccccgccgcagctcctctgacattgcccgtgccaagattcagggcaagtgccaccggggtcaagaagactctagccggggttcagataattccagttatgatgaagcactctctccaacatctcctgggcctttatcagtaagagctgggcatggagaacgtgacctggggaatcccaatacagctccacctacaccggaattacatggcatcaaccctgtgttcctgtccagtaatcccagccgttggagtgtagaggaggtgtacgagtttattgcttctctccaaggctgccaagagattgcagaggaatttcgctcacaggagattgatggacaggcccttttattacttaaagaagaacatcttatgagtgccatgaacatcaagctgggccctgccctcaagatctgcgccaagataaatgtcctcaaggagacctaaggtggccctcttgcacaaaccagcctaaggcagacactctccactgtccaggttataacctggtaccagcagactttgcagggaagaaagagttgttccaatcatgtaaccttctgtaggggattactgagacagggaagagaagtgcaagaattggttgctggtgctacatggcggcagctttgacattttctctgggttctactttattttttaaaatctttacagttctcaccatttcacgtaccttaatccaatctttataaaagaggcagtctagagaactaggactgctcagccttatcctggagtggagcatttagcccaggtcttaattctccaagaggaggaatacatagtatggtaaggcaaggaactgggtggaatgtcaggttgcctgcccaatgggagaggtagggtttttctagcttgtgtgacagaagtagcaaaatctggtcctcccccctcccagtgtagctgtggctcagagttttttctttttgttgtcacttactcccttgtgattgaattttttctcctgcatccatggcaggatccccagccagtatagagacttggttggcatcttctgctgcagggactaaaagtatttgactggggcacatgtggctgttgtcattctttctgcatcccactgttcccctccaatttatgttattttctaccctgtttttcagttccatctctgctctgtcctatagctttataaaaccagagtgtgtggggctgaggtcaggagtataagtacctgccttaggcactattccttatataacaaaaatattaaatatttttttcctcagtaaaaggatgaaaattggtttcagttgtcttactctattccagtctttgcccactttcacacaaatgacaaggccaatatgttttgtttgttttttaatcattaagagtttttgtacaaaaggtgatggttttttttcttcattttaaaacaccagggtgtgggggagggatgcaaacaaataacaaaaaagatgcttttgtaacattattttccctgtttagaaagaaaaaaatcactccaatagtattgaaaagtccaaagatgaaatagtttcattttcttttcctaaggcttataaaaggccccctgcctgttgattccatccctcttttgtgtccagtggagccatgttactcttcagtggcccaggggttcactattaaagaaagatcagtccaggtttctgggcacatggcctaaacaggaagatggaagcatcagaggattaaaaacctttccccacagaaatgtgggcaagaagacacttccctgagccagcagaagggacaggtgcagcagcattccacacccagcgcagaggacagcagagccctcgatgtcccacttctgcttccgttccctttctagaagattgaaaaaaaggtcaaaaccacatgcctgtggagaaagtgcgacatgtttagaaatactggtagggaaccaggagtaagaaaagctttaccagcttttactacaaatggatgaaagacatcaggatcccaccaccgcaaggtaaagtgacttcccttttctggaacccctgtggcacaggagtaccaattttcctttccaacgaactggatttctggataggcattttggctgtatgtggacagataagaccacagtccttagcccaatcccagctatacagtcaccccaatttccacaaatgatgtgatggtaccgtataatcctgtaattgggaaatttcacatttttcctgtcctaatctcagaggtgggagaagcaagtctagaacatctccaggctcagactaaacgagagtacttggactgcaaccaagtaatcactgcaaagtagttccaagcagcaagaaataccagattctcatggaggctactatagggtacagaataacaacatgaaagcaatcaaccctgtataaataatgtttcttggcattttttttttaattaaagaaatccagtgtctcaaaaaaaaaaaaaaaaaaaaaaaaaaaaaaaa

SEQ ID NO: 313264 - DNA, 3015 bp, Artificial Sequence
  derived and/or modified sequence
atggagacagaaagcgagcagaacagcaactcaactaatggatctagtagctcaggaggatccagccgcccccagatcgcccagatgtctctctatgaacggcaagctgtgcaggccctgcaggccctccaacgccaaccaaacgcagcacagtattttcaccagtttatgctgcaacagcaactgtctaatgcccagctacattctcttgccgcagtgcaacaggcaaccattgctgccagtagacaagcctctagcccgaatacttctaccacgcagcaacagacaaccacaacacaagctagtattaatttagcgactactagtgccgcacagctcattagtcgttcacaatccgtcagcagcccttccgccactacgctcacgcagagcgttctgctcggaaataccacttccccccctctgaatcagtcacaggctcaaatgtatttaagacctcagctgggtaacctactgcaagtgaaccgtaccctgggccgtaacgtgcctttagcgtcacagcttatactgatgcctaacggcgccgtggccgcagttcaacaggaagtcccttcagcgcagtctccaggagtgcacgccgacgcagatcaagtccagaatctggcagttaggaaccagcaagcctcagcgcaaggcccccagatgcagggtagcacacagaaggcaataccacctggagccagccctgtatcaagcctgtcacaggcttcctctcaggcattagctgtggcgcaagcatcaagtggtgctacgaaccagtctcttaacctgtcgcaagcaggtggcggtagcgggaattccattcctggctccatgggcccgggaggcggtggccaggcccatggtggccttggccaactgccttcaagcggcatggggggtggctcctgtccacgaaagggcacgggcgtggtgcagccactgccagcagcccagaccgtgaccgtgtcccagggctcccagaccgaggcagaaagcgcagcagccaagaaagccgaggctgacggcagcgggcagcagaacgttggaatgaacctgacacggacggcaactcccgctccctcccaaaccctcatatctagtgctacttacacacagattcaaccccatagtctgatacagcagcaacagcaaattcatctgcagcaaaaacaggtagtcattcagcagcaaattgctatccaccatcagcagcagtttcaacatcgtcagtcccagctgctgcataccgcaacacacctgcagcttgcccagcagcagcaacagcagcagcagcagcagcagcagcagcagcagcctcaggccaccaccctgacagctccacagcctccccaagtgcctcccacgcagcaggttcccccctcccaaagtcaacagcaggcacagaccttggtggtgcaacccatgctgcaaagcagccctttgtcgctccctccagacgctgccccaaaaccccccatccccatccaatctaaacctccagtggccccgattaaacctccccagctgggggctgccaagatgagcgctgctcagcagccaccgcctcacattccggttcaggtggtgggtacccggcagccaggaacggcgcaggcccaggctctcggcttagctcagctggccgcggctgtgcccacctcaaggggaatgccagggacggtgcagtctggccaagctcacctcgcctccagccctccctcctcacaggccccaggagcattgcaggaatgcccgccgactttagcccctggtatgacgctggcccctgtccaagggaccgcccacgtagtgaagggcggggcgactactagctctccagtggtggcccaggtccctgctgccttttatatgcaatccgtccatttgccaggcaagccccagaccctggccgtcaagagaaaagccgacagtgaggaggagagagacgatgttagtaccctcggcagtatgctgccggccaaagccagccccgtggctgaatcaccaaaagtcatggatgaaaaatcatctcttggggaaaaagccgaatctgtggcaaacgtaaacgcaaacaccccctcaagtgaactggttgccctgacgcctgccccaagtgtgcctcctccaactttagccatggtgagccgtcagatgggtgacagcaagccaccccaggctatcgtgaaaccacaaattttaactcatatcatagaaggctttgtcattcaggaaggagccgagccttttcccgtgggctgttcgcagctcctcaaggagtccgagaagcccctgcaaaccggcctgccaacggggcttaccgaaaaccaatccggaggccctcttggagtcgactctccctccgctgagctggataagaaagctaatttactcaaatgcgaatattgtgggaagtatgctccggcagagcagttcagggggtctaagagattctgtagcatgacctgcgccaaacgctacaatgttagttgtagtcatcagttcaggctaaagagaaagaaaatgaaggaatttcaagaggcaaattacgcaagagtgagacgaagaggaccacgccgatcaagtagcgatattgctcgggctaaaatccagggaaagtgccatcgcggccaggaggacagctccagaggatcagacaactctagctacgatgaggcactcagccctacatctccagggccactgagcgtaagagccggtcacggagagcgggacctgggcaaccctaatactgcgccccctacaccagaattgcacggcataaacccggttttcttgagttccaaccccagccgctggtctgtggaggaggtttatgagtttatcgccagtctccagggctgccaagagatcgccgaagagttcagatcacaggaaatcgatggacaggccctgctcttgcttaaagaagagcatctcatgagcgctatgaatatcaagcttgggcccgccctgaaaatatgcgctaaaataaatgtgctgaaagaaacctag

SEQ ID NO: 313265 - DNA, 1833 bp, Artificial Sequence
  derived and/or modified sequence
atgcaggggtctactcagaaggcaataccacccggagcaagccccgtgtcctctttgtctcaagcatcctctcaggctctggccgttgctcaggcttccagcggtgcaacaaatcagagtcttaacctgtctcaggcagggggcgggtcaggaaactccatcccaggaagtatggggcccggaggtggcggtcaagcccatgggggtctgggtcagctgccttcatccggcatgggcgggggctcctgcccaagaaaaggtactggggtcgtgcagcccttgccagccgcccaaacagtaacggtgtcccaggggtctcagaccgaggctgagagtgcagccgccaagaaggctgaggccgacgggtccggccagcaaaatgttggaatgaaccttaccagaactgccactcccgcacccagccagaccctcatatcttcagcaacctatacccaaattcaaccccattcccttatacagcagcagcagcagatccacctgcaacagaagcaggtggtaattcaacaacagatcgccatccaccatcaacaacagttccagcaccgacagtcgcagcttcttcatacggcaacccatctgcagttggcccagcaacagcagcaacaacaacagcaacagcagcaacagcagcaaccccaggccactacactgacagcaccccaacctccacaggttccccccacccagcagggcaagccccaaacactggcggtgaaaaggaaggcagactctgaggaagaaagagacgacgtgtctacacttggctctatgctgcctgccaaggcttcacccgtcgcagagagtccaaaggttatggacgagaaatcatcacttggcgagaaggctgagagtgttgctaatgtgaacgctaataccccctcttcggagttagtggctctgacccctgcccctagcgtgccacctcccaccctagcaatggtgtccaggcagatgggcgattcaaagcctccacaagccatcgtgaaacctcagatcctgactcatatcatcgagggctttgtcattcaagagggcgccgaaccttttccagtggggtgttcccagttgttgaaggagtccgagaagccactccagaccgggctgccaaccgggctcacagagaatcagtcaggcggtcccctaggagttgattctccctccgccgaactggataaaaaagccaatctgttgaaatgcgagtactgcggcaaatacgcaccagcagagcagttcagggggtcgaagcgcttctgcagtatgacgtgtgcgaaacgatacaacgtgtcgtgtagtcatcagtttcgcctcaaaaggaagaaaatgaaggagttccaagaagctaactatgcgagggtgcgacgccgcggtccccgaagatcctctagcgatattgctagggcaaagatacagggcaagtgccatagaggtcaggaagattctagtagaggatccgataattcctcctacgatgaagccttatctcctaccagccccggtccgctgtcggttcgcgcggggcatggggaaagagatctggggaaccctaataccgcacccccaacgcctgaactacacgggatcaatcccgtgtttctgtcttcaaaccctagccgatggtccgttgaggaggtctacgaatttattgcgagccttcagggctgccaggagattgccgaagagttccgatctcaggagatcgacggccaggctctgctattattgaaagaagagcacctaatgagcgcgatgaacataaaattaggaccagcacttaaaatttgcgccaagattaacgtgctgaaagaaacatag

SEQ ID NO: 313266 - DNA, 3015 bp, Artificial Sequence
  derived and/or modified sequence
atggagacagagagcgagcaaaacagcaactccacaaatggctcttcttcaagcggcggtagctcacgccctcaaatcgcccagatgagcctctatgagagacaggctgtccaggcgctccaggcattgcagcggcaaccaaatgctgctcagtattttcatcagtttatgctccagcagcagctgagcaatgctcagctccattctttagcggccgtgcaacaggccacaatcgccgcctcgaggcaggcgtcatcacccaacaccagtaccacacaacagcagacgaccacaacccaggcaagtatcaatctggccacaacttccgccgcccagctcataagcaggagccaatccgtatctagtccatcagctacaacactgacccagtccgtgctgctcgggaataccacctcccccccactgaatcagagccaggcacagatgtaccttcgaccccagctgggtaacctgctccaggtgaatcgcactcttggcaggaacgtgcccttggcatcacagttgattctaatgcccaacggcgcagtcgccgcagtgcagcaggaagtgccaagtgcccagtcacctggcgtgcatgcggacgctgatcaggttcaaaatcttgctgttagaaaccagcaggcctccgcgcagggcccccagatgcagggctctacacagaaggcaattccgcctggcgctagcccagtgagcagcttgagccaagcatcctctcaggccctggcagtggcccaagcctccagcggtgccacaaaccagtctctcaacctgtcacaggccggaggaggaagcggtaactccatacctggatctatgggccctggaggcggcggccaagcccatggtggactcggccaactgccttcctccgggatggggggcggcagctgccctcggaaggggaccggtgtggtgcaacctctccctgcagctcaaaccgtaaccgtatctcagggctctcagactgaggctgagagcgccgccgctaaaaaggccgaggccgatggtagcggacagcaaaatgtgggcatgaatctgactagaacagccacacctgccccaagtcagaccttaatatcctcagcgacctacactcagattcagccgcattccctgatccagcagcaacagcaaatccatctccagcagaagcaggtcgtcattcaacaacagatagcaatacaccaccagcagcagtttcagcataggcagagccagttactgcatacagctacccacctgcaactcgcccagcagcagcagcagcagcagcagcaacagcagcagcagcaacagccccaagcaacgaccttgacagcccctcagcccccccaagtgccccctacccagcaggtgcccccctcccaatcccaacagcaggctcagaccctcgtcgttcagcctatgctgcagagtagcccgctctccctgccccccgacgcggctccgaaaccaccgattcccatccagtctaaaccccctgttgcacccatcaagccgccccaactgggcgcagcgaaaatgagcgctgctcagcagcctccaccccatataccagttcaggtggtaggcacgagacagcccggcactgcgcaggcccaggcgctgggacttgcacaactggccgcagccgtgcctacctcacgcggcatgccaggcaccgtgcagagcggacaggcacacctcgcctcgagtccaccctctagccaggcccccggagcgctgcaagaatgtcccccaacactggctcccgggatgaccctggcccctgttcaaggcaccgcacatgtggtgaagggcggagctacaacctctagtccagtggtagcccaggtgccagccgctttctacatgcagagtgtgcacctccctggaaagccacagacgctggccgttaaacggaaggcagactctgaagaagaaagagatgacgtctctacacttggaagcatgctgccagccaaagccagccctgtggcagagagccccaaggtgatggatgagaagtcatccctcggcgaaaaggcagagagtgtagctaatgtgaacgcaaatacaccgtccagcgaactcgtcgctcttacccctgcaccatccgtgccaccaccaacactcgctatggtgagcagacagatgggagattcaaaacccccccaggccatagttaaaccacaaatcctgacacacatcatcgaaggcttcgtcattcaggagggggccgagcctttcccggttggctgtagccagctacttaaagaatccgaaaagcctttgcagacaggactacctacggggctgaccgaaaaccagagtggaggccccctgggcgtcgacagcccgtccgccgagctggataagaaggccaacctcttaaaatgtgaatattgcggaaagtacgccccggccgagcagttccggggttccaagcggttctgcagcatgacctgcgcaaaacgttacaacgtatcttgttcccatcagttccgactaaaaagaaagaagatgaaggagtttcaggaggctaattatgcccgcgtacgacggagaggaccccgcaggagttcctccgacatcgccagagccaaaatacagggcaagtgccatcgcggtcaggaggactcttctcgagggagcgataattcttcatacgatgaagctctctcgcctaccagcccaggaccgctctcggtgagggcgggtcacggagagcgcgatctgggcaacccaaacactgctcctccaacacccgaactgcacgggattaatccagtatttttaagttctaaccctagccggtggtccgtggaagaggtttacgaattcatcgcatccctacagggctgccaggagatcgccgaagaattcagaagtcaggaaatcgacggacaggctctattactgcttaaggaagagcacctcatgtccgcaatgaatatcaaattgggcccagccttaaaaatctgtgccaagatcaacgtccttaaggagacctag

SEQ ID NO: 313267 - DNA, 3015 bp, Artificial Sequence
  derived and/or modified sequence
atggagaccgagtcggagcagaacagtaattccacaaatggctcttctagctcggggggaagttccagaccacaaatcgctcagatgtcgctctatgagagacaagcagttcaagcactgcaagctctgcagcgacaacccaatgcggcacagtattttcaccagtttatgcttcaacagcaactcagcaacgcccagctccactcactggccgctgtccaacaagctaccattgcagcaagcaggcaagcttcgagtcccaacaccagtactacgcagcagcaaaccactaccacccaggccagcatcaacctggcgaccacgtcggcggctcagcttatttctaggtcacagagcgtgagctctccgtctgcaacaacgctcacccagagcgtactgttggggaacaccacatcccctccactgaatcaatctcaggcacagatgtatcttagaccccagctaggcaacctgctgcaggtgaaccgtacattaggaagaaatgttccacttgcgtctcaactgatcctgatgccaaatggtgcagtagcagcggttcagcaggaagttccatctgcgcagagtcccggtgtgcacgcagatgctgatcaggtgcagaatctggcagtgcggaaccagcaggcgagcgcgcaaggcccccagatgcagggctccacccagaaggcgattccccctggcgcatctcccgtgagctctctgtcacaggccagtagtcaggcactggctgtggctcaggcatcctcgggggctactaaccagtccctgaatctgtctcaggctggcggaggttcaggaaacagcatcccgggcagcatgggccccgggggcgggggccaggcgcacgggggcttgggccagcttcctagttccgggatgggaggcggctcctgtccccggaaaggcaccggtgttgtgcaaccactgcccgccgcccagacagtcactgtgtctcagggatcacagaccgaagctgagtccgcagctgcgaagaaagcagaagctgatgggagcggacaacagaacgttgggatgaatttgacacgcacagccacccccgcccccagccaaactctgatcagctcagcaacctatacacagattcagcctcacagcctgatccagcagcagcaacaaattcatctgcagcaaaagcaagtcgtgatacagcagcagatcgctatacatcatcagcaacagtttcagcatagacaaagccagcttttgcacacagccactcacctgcaactggcgcagcagcagcagcaacagcaacagcaacaacaacaacagcagcagccccaggcgaccaccctgaccgcccctcaacctccccaggtccctcccactcaacaagttcctccttcacagtcccaacagcaggcccaaacactagttgtacagcctatgctacagtccagcccgctgagcctgcctcccgatgcggctcccaagcccccgattcctattcaaagcaaaccccccgtagccccgatcaagccaccacagcttggagctgccaagatgagtgcagcgcagcagccccccccacacattcctgtgcaggtagttggtacgcgacagccaggtacagcccaggctcaagcgctcggtctggctcagctagctgcagctgtcccgacctcacgcggcatgccaggtaccgtgcaatctggccaagcccacttagccagttcccctcccagcagtcaggcccctggagctctgcaggagtgccctccaactctcgcgccaggcatgaccttagcaccagtccaggggaccgcacacgtcgtgaagggtggagccacgacaagcagcccggtcgtcgcccaagtgccagctgccttctacatgcaatccgtacacctgcccgggaaacctcagactctggccgtcaagcgtaaggccgattccgaagaagagagggatgatgtgtcgaccctgggctctatgctgccggccaaggctagccccgtggctgagtctcctaaggtaatggacgaaaaaagcagcctgggcgagaaggccgaatcagtggcgaatgtgaatgctaataccccctcaagcgaactcgtggccctcacacctgccccgtcagtgccacctccaaccctagccatggttagtaggcagatgggtgactcaaagcctccacaggccattgttaagccgcaaatcctcacccacatcattgaaggttttgttatccaggaaggcgccgagccatttcctgtgggatgtagccagcttctgaaggaatctgagaagccattgcagactggactgcccacaggtctgaccgagaaccaatccggaggtcctctgggcgtcgattcacctagtgccgaactcgacaagaaggcgaacctcctgaaatgcgaatattgcggcaaatacgcccccgcagagcaatttagaggatccaagcggttttgttccatgacatgtgcaaagaggtacaatgtgtcctgttcccatcagtttagactgaagcggaaaaagatgaaggagtttcaggaggctaactatgcccgcgttcggcgaaggggtccccggcgttcctcctcagacatcgcacgtgctaaaatccaggggaagtgccacaggggtcaggaggattctagccgggggagtgataattcatcatatgacgaagccttaagccctacttccccgggcccattgtctgtgagggcggggcacggcgagagggatctaggtaatcccaatactgcccctccaacgccagagcttcacggtattaatcctgtgttcctgtcgtccaacccgtctcgatggtctgtcgaagaggtatacgagttcatcgcctctttgcaggggtgtcaagaaatagccgaagaatttcggagccaagagatagatggacaggccctactgctgttaaaagaagaacacctgatgtctgctatgaatatcaagctcggccccgctctgaaaatatgcgctaaaatcaacgtgctgaaagagacatag

SEQ ID NO: 313268 - DNA, 5174 bp, Artificial Sequence
  derived and/or modified sequence
cccgccgcggaggccgagcgagcccccagcccagcctggcgactggggaccccggcacatgaggtggacgcccccggggaagacttgggtgcacagccaggcgagaaggtcttgagtcagacagagcaccagccttggggaccctggaccactatcatggagactgagagcgagcagaactccaattccaccaatgggagttctagctcagggggcagctctcggccccagatagctcaaatgtcactttatgaacgacaagcagtgcaggctctgcaagcactgcagcggcagcccaatgcagctcagtatttccaccagttcatgctccagcagcagctcagtaatgcccagctgcatagcctggctgccgtccagcaggccacaattgctgccagtcggcaggccagctccccaaacaccagcactacacagcagcagactaccaccacccaggcctcgatcaatctggccaccacatcggccgcccagctcatcagccgatcccagagtgtgagctctcccagtgctaccaccttgacccaatctgtgctactggggaacaccacctccccacccctcaaccagtctcaggcccagatgtatctacggccacagctgggaaacctattgcaggtaaaccgaaccctgggtcggaatgtgcctctagcctcccaactcatcctgatgcctaatggggcggtggctgcagtccagcaggaggtgccatctgctcagtctcctggagttcatgcagatgcagatcaggttcagaacttggcagtaaggaatcaacaggcctcagctcaaggacctcagatgcaaggctccactcagaaggccattcctccaggagcctcccctgtctctagcctctcccaggcctctagccaggccctagcggtggcacaggcttcctctggggccacaaaccagtccctcaaccttagtcaagctggtggaggcagtgggaatagcatcccagggtccatgggtccaggtggaggtgggcaggcacatggtggtttgggtcagttgccttcctcaggaatgggtggtgggagctgtcccagaaagggtacaggagtggtgcagcccttgcctgcagcccaaacagtgactgtgagccagggcagccagacagaggcagaaagtgcagcagccaagaaggcagaagcagatgggagtggccagcagaatgtgggcatgaacctgacacggacagccacacctgcgcccagccagacacttattagctcagccacctacacacagatccagccccattcactgattcagcaacagcaacagatccacctccagcagaaacaggtggtgatccagcagcagattgccatccaccaccagcagcagttccagcaccggcagtcccagctccttcacacagctacacacctccagttggcgcagcagcagcagcagcaacaacagcaacagcagcaacagcagcagccgcaagccaccaccctcactgcccctcagccaccacaggtcccacctactcagcaggtcccaccttcccagtcccagcagcaagcccaaaccctggtcgttcagcccatgcttcagtcttcacccttgtctcttccacctgatgcagcccctaagccaccaattcccatccaatccaaaccacctgtagcacctatcaagccgcctcagttaggggccgctaagatgtcagctgcccagcaaccaccaccccatatccctgtgcaagttgtaggcactcgacagccaggtacagcccaggcacaggctttggggttggcacagctggcagctgctgtacctacttcccgggggatgccaggtacagtgcagtctggtcaggcccatttggcctcctcgccaccttcatcccaggctcctggtgcactgcaggagtgccctcccacattggcccctgggatgacccttgctcctgtgcaggggacagcacatgtggtaaagggtggggctaccacctcctcacctgttgtagcccaggtccctgctgccttctatatgcagtctgtgcacttgccgggtaaaccccagacattggctgtcaaacgcaaggctgactctgaggaggagagagatgatgtctccacattgggttcaatgcttcctgccaaggcatctccagtagcagaaagcccaaaagtcatggacgagaagagcagtcttggagaaaaagctgaatcagtggctaatgtgaatgctaatactccaagcagtgaactagtagccttgacccccgccccttcagtaccgcctcctacactagccatggtgtctagacaaatgggtgactcaaaacccccacaggccatcgtgaagccccagattctcacccacatcattgaaggctttgttatccaggaaggagcagaacctttcccggtgggttgttctcagttactgaaggagtctgagaagccactacagactggccttccgacagggctgactgagaatcagtcaggtggccctttgggagtggacagcccatctgctgagttagataagaaggcgaatctcctgaagtgcgagtactgtgggaagtacgcccccgcagagcagtttcgtggctctaagaggttctgctccatgacttgcgctaagaggtacaatgtgagctgtagccatcagttccggctgaagaggaaaaaaatgaaagagtttcaagaagccaactatgctcgcgttcgcaggcgtggaccccgccgcagctcctctgacattgcccgtgccaagattcagggcaagtgccaccggggtcaagaagactctagccggggttcagataattccagttatgatgaagcactctctccaacatctcctgggcctttatcagtaagagctgggcatggagaacgtgacctggggaatcccaatacagctccacctacaccggaattacatggcatcaaccctgtgttcctgtccagtaatcccagccgttggagtgtagaggaggtgtacgagtttattgcttctctccaaggctgccaagagattgcagaggaatttcgctcacaggagattgatggacaggcccttttattacttaaagaagaacatcttatgagtgccatgaacatcaagctgggccctgccctcaagatctgcgccaagataaatgtcctcaaggagacctaaggtggccctcttgcacaaaccagcctaaggcagacactctccactgtccaggttataacctggtaccagcagactttgcagggaagaaagagttgttccaatcatgtaaccttctgtaggggattactgagacagggaagagaagtgcaagaattggttgctggtgctacatggcggcagctttgacattttctctgggttctactttattttttaaaatctttacagttctcaccatttcacgtaccttaatccaatctttataaaagaggcagtctagagaactaggactgctcagccttatcctggagtggagcatttagcccaggtcttaattctccaagaggaggaatacatagtatggtaaggcaaggaactgggtggaatgtcaggttgcctgcccaatgggagaggtagggtttttctagcttgtgtgacagaagtagcaaaatctggtcctcccccctcccagtgtagctgtggctcagagttttttctttttgttgtcacttactcccttgtgattgaattttttctcctgcatccatggcaggatccccagccagtatagagacttggttggcatcttctgctgcagggactaaaagtatttgactggggcacatgtggctgttgtcattctttctgcatcccactgttcccctccaatttatgttattttctaccctgtttttcagttccatctctgctctgtcctatagctttataaaaccagagtgtgtggggctgaggtcaggagtataagtacctgccttaggcactattccttatataacaaaaatattaaatatttttttcctcagtaaaaggatgaaaattggtttcagttgtcttactctattccagtctttgcccactttcacacaaatgacaaggccaatatgttttgtttgttttttaatcattaagagtttttgtacaaaaggtgatggttttttttcttcattttaaaacaccagggtgtgggggagggatgcaaacaaataacaaaaaagatgcttttgtaacattattttccctgtttagaaagaaaaaaatcactccaatagtattgaaaagtccaaagatgaaatagtttcattttcttttcctaaggcttataaaaggccccctgcctgttgattccatccctcttttgtgtccagtggagccatgttactcttcagtggcccaggggttcactattaaagaaagatcagtccaggtttctgggcacatggcctaaacaggaagatggaagcatcagaggattaaaaacctttccccacagaaatgtgggcaagaagacacttccctgagccagcagaagggacaggtgcagcagcattccacacccagcgcagaggacagcagagccctcgatgtcccacttctgcttccgttccctttctagaagattgaaaaaaaggtcaaaaccacatgcctgtggagaaagtgcgacatgtttagaaatactggtagggaaccaggagtaagaaaagctttaccagcttttactacaaatggatgaaagacatcaggatcccaccaccgcaaggtaaagtgacttcccttttctggaacccctgtggcacaggagtaccaattttcctttccaacgaactggatttctggataggcattttggctgtatgtggacagataagaccacagtccttagcccaatcccagctatacagtcaccccaatttccacaaatgatgtgatggtaccgtataatcctgtaattgggaaatttcacatttttcctgtcctaatctcagaggtgggagaagcaagtctagaacatctccaggctcagactaaacgagagtacttggactgcaaccaagtaatcactgcaaagtagttccaagcagcaagaaataccagattctcatggaggctactatagggtacagaataacaacatgaaagcaatcaaccctgtataaataatgtttcttggcattttttttttaattaaagaaatccagtgtctc

SEQ ID NO: 313269 - DNA, 3864 bp, Artificial Sequence
  derived and/or modified sequence
caggaatcctggttttggtggcagtttcccttgattttattgagacttttaagttggtccctttacatttttatttctagttcacaatccaaaaaaaattattaatcagaattcaggtttgggaagacgaggggtcatacggtttgtattttcacatgtgaatgtaggaattatgttctctatacctagcaaaggggtctcgtgtctctgagtccagtgaactaaatccagtaatctataaaactgtgccgtgctgcctctaatccttacccactttttttcttcacatgctgataatgaggattcatgggtcttgagtcagacagagcaccagccttggggaccctggaccactatcatggagactgagagcgagcagaactccaattccaccaatgggagttctagctcagggggcagctctcggccccagatagctcaaatgtcactttatgaacgacaagcagtgcaggctctgcaagcactgcagcggcagcccaatgcagctcagtatttccaccagttcatgctccagcagcagctcagtaatgcccagctgcatagcctggctgccgtccagcaggccacaattgctgccagtcggcaggccagctccccaaacaccagcactacacagcagcagactaccaccacccaggcctcgatcaatctggccaccacatcggccgcccagctcatcagccgatcccagagtgtgagctctcccagtgctaccaccttgacccaatctgtgctactggggaacaccacctccccacccctcaaccagtctcaggcccagatgtatctacggccacagctgggaaacctattgcagtccagcaggaggtgccatctgctcagtctcctggagttcatgcagatgcagatcaggttcagaacttggcagtaaggaatcaacaggcctcagctcaaggacctcagatgcaaggctccactcagaaggccattcctccaggagcctcccctgtctctagcctctcccaggcctctagccaggccctagcggtggcacaggcttcctctggggccacaaaccagtccctcaaccttagtcaagctggtggaggcagtgggaatagcatcccagggtccatgggtccaggtggaggtgggcaggcacatggtggtttgggtcagttgccttcctcaggaatgggtggtgggagctgtcccagaaagggtacaggagtggtgcagcccttgcctgcagcccaaacagtgactgtgagccagggcagccagacagaggcagaaagtgcagcagccaagaaggcagaagcagatgggagtggccagcagaatgtgggcatgaacctgacacggacagccacacctgcgcccagccagacacttattagctcagccacctacacacagatccagccccattcactgattcagcaacagcaacagatccacctccagcagaaacaggtggtgatccagcagcagattgccatccaccaccagcagcagttccagcaccggcagtcccagctccttcacacagctacacacctccagttggcgcagcagcagcagcagcaacaacagcaacagcagcaacagcagcagccgcaagccaccaccctcactgcccctcagccaccacaggtcccacctactcagcagggtaaaccccagacattggctgtcaaacgcaaggctgactctgaggaggagagagatgatgtctccacattgggttcaatgcttcctgccaaggcatctccagtagcagaaagcccaaaagtcatggacgagaagagcagtcttggagaaaaagctgaatcagtggctaatgtgaatgctaatactccaagcagtgaactagtagccttgacccccgccccttcagtaccgcctcctacactagccatggtgtctagacaaatgggtgactcaaaacccccacaggccatcgtgaagccccagattctcacccacatcattgaaggctttgttatccaggaaggagcagaacctttcccggtgggttgttctcagttactgaaggagtctgagaagccactacagactggccttccgacagggctgactgagaatcagtcaggtggccctttgggagtggacagcccatctgctgagttagataagaaggcgaatctcctgaagtgcgagtactgtgggaagtacgcccccgcagagcagtttcgtggctctaagaggttctgctccatgacttgcgctaagaggtacaatgtgagctgtagccatcagttccggctgaagaggaaaaaaatgaaagagtttcaagaagccaactatgctcgcgttcgcaggcgtggaccccgccgcagctcctctgacattgcccgtgccaagattcagggcaagtgccaccggggtcaagaagactctagccggggttcagataattccagttatgatgaagcactctctccaacatctcctgggcctttatcagtaagagctgggcatggagaacgtgacctggggaatcccaatacagctccacctacaccggaattacatggcatcaaccctgtgttcctgtccagtaatcccagccgttggagtgtagaggaggtgtacgagtttattgcttctctccaaggctgccaagagattgcagaggaatttcgctcacaggagattgatggacaggcccttttattacttaaagaagaacatcttatgagtgccatgaacatcaagctgggccctgccctcaagatctgcgccaagataaatgtcctcaaggagacctaaggtggccctcttgcacaaaccagcctaaggcagacactctccactgtccaggttataacctggtaccagcagactttgcagggaagaaagagttgttccaatcataggcagtctagagaactaggactgctcagccttatcctggagtggagcatttagcccaggtcttaattctccaagaggaggaatacatagtatggcttataaaaggccccctgcctgttgattccatccctcttttgtgtccagtggagccatgttactcttcagtggcccaggggttcactattaaagaaagatcagtccaggtttctgggcacatggcctaaacaggaagatggaagcatcagaggattaaaaacctttccccacagaaatgtgggcaagaagacacttccctgagccagcagaagggacaggtgcagcagcattccacacccagcgcagaggacagcagagccctcgatgtcccacttctgcttccgttccctttctagaagattgaaaaaaaggtcaaaaccacatgcctgtggagaaagtgcgacatgtttagaaatactggtagggaaccaggagtaagaaaagctttaccagcttttactacaaatggatgaaagacatcaggatcccaccaccgcaaggtaaagtgacttcccttttctggaacccctgtggcacaggagtaccaattttcctttccaacgaactggatttctggataggcattttggctgtatgtggacagataagaccacagtccttagcccaatcccagctatacagtcaccccaatttccacaaatgatgtgatggtaccgtataatcctgtaattgggaaatttcacatttttcctgtcctaatctcagaggtgggagaagcaagtctagaacatctccaggctcagactaaacgagagtacttggactgcaaccaagtaatcactgcaaagtagttccaagcagcaagaaataccagattctcatggaggctactatagggtacagaataacaacatgaaagcaatcaaccctgtataaataatgtttcttggcattttttttttaattaaagaaatccagtgtctc

SEQ ID NO: 313270 - DNA, 3015 bp, Artificial Sequence
  derived and/or modified sequence
atggagacagaaagtgagcagaacagcaacagcaccaacggcagcagcagcagcggcggcagcagccggccccagatcgcccagatgagcctgtatgaaaggcaggccgtgcaggccctgcaggccctgcagaggcagcccaatgctgcccagtacttccaccagttcatgctgcagcagcagctgagcaatgcccagctgcacagcctggccgctgtgcagcaggccaccatcgccgccagccggcaggccagcagccccaacaccagcaccacccagcagcagaccaccaccacccaggccagcatcaacctggccaccaccagcgctgcccagctgatcagccgcagccagagcgtgagcagccccagcgccaccaccctgacccagagcgtgctgctgggcaacaccaccagcccccccctgaaccagagccaggcccagatgtacctgcggccccagctgggcaacctgctgcaggtgaacagaaccctgggcagaaatgtgcccctggccagccagctgatcctgatgcccaacggggctgtggccgctgtgcagcaggaggtgcccagcgcccagagccctggggtgcatgctgatgctgaccaggtgcagaacctggccgtgaggaaccagcaggccagcgcccagggcccccagatgcagggcagcacccagaaggccatccccccaggggccagccctgtgagcagcctgagccaggccagcagccaggccctggccgtggcccaggccagcagcggggccaccaaccagagcctgaacctgagccaggccggcggcggcagcggcaacagcatccctggctccatgggccctgggggcggcggccaggcccacggcggcctgggccagctgcccagcagcggcatgggcggcggcagctgccccaggaaaggaactggagtggtgcagcccctgcctgctgcccagacagtgacagtgtcccagggcagccagacagaagctgagagcgctgctgccaagaaggccgaggctgatggcagcggccagcagaatgtgggcatgaacctgaccaggacagccaccccagcccccagccagaccctcatcagcagcgccacctacacccagatccagccccacagcctcatccagcagcagcagcagatccacctgcagcagaagcaggtggtgatccagcagcagatcgccatccaccaccagcagcagttccagcaccggcagagccagctgctgcacacagccacccacctgcagctggcccagcagcagcagcagcagcagcagcagcagcagcagcagcagcagccccaggccaccaccctgacagccccccagcccccccaggtgccccccacccagcaggtgccccccagccagagccagcagcaggcccagaccctggtggtgcagcccatgctgcagagcagccccctgagcctgcccccagatgctgcccccaagccacccatccccatccagagcaagccccctgtggcccccatcaagccaccccagctgggcgccgccaagatgtctgctgcccagcagcccccaccccacatccctgtgcaggtggtgggcacccggcagcctggaacagcccaggcccaggccctgggcctggcccagctggccgctgctgtgcccaccagccggggcatgcctggcaccgtgcagagcggccaggcccacctggccagcagcccccccagcagccaggcccctggggccctgcaggagtgcccccccaccctggcccctggcatgaccctggcccctgtgcagggcacagcccacgtggtgaagggcggggccaccaccagcagccctgtggtggcccaggtgcctgctgccttctacatgcagagcgtgcacctgcccgggaagccccagaccctggccgtgaagaggaaggctgacagcgaggaggagagagatgatgtgtccaccctgggctccatgctgcctgccaaggccagccctgtggccgagagccccaaggtgatggatgagaagagcagcctgggggagaaggccgagagcgtggccaacgtgaatgccaacacccccagcagcgagctggtggccctgaccccagcccccagcgtgcccccacccaccctggccatggtgtcccggcagatgggagacagcaagccaccccaggccatcgtgaagccccagatcctgacccacatcatcgagggctttgtgatccaggagggcgctgagcccttccctgtgggctgcagccagctgctgaaggagagcgagaagcccctgcagacaggcctgcccaccggcctgacagagaaccagagcggcggccccctgggcgtggacagccccagcgctgagctggacaagaaggccaacctgctgaagtgtgagtactgcggcaagtatgccccagctgagcagttccggggcagcaagcgcttctgcagcatgacctgtgccaagcgctacaacgtgtcctgcagccaccagttccggctgaagaggaagaagatgaaggagttccaggaggccaactatgcccgggtgagaagaagaggccccaggaggagcagcagtgacatcgcccgggccaagatccagggcaagtgccaccggggccaggaggacagcagccggggcagtgacaacagcagctatgatgaggccctgagccccaccagccctggccccctgtctgtgcgggccggccacggggagcgggacctgggcaaccccaacacagccccacccaccccagagctgcacggcatcaaccctgtgttcctgagcagcaaccccagccgctggagcgtggaggaggtgtatgagttcatcgccagcctgcagggctgccaggagattgctgaggagttccgcagccaggagattgatggccaggccctgctgctgctgaaggaggagcacctgatgtctgccatgaacatcaagctgggccctgccctgaagatctgtgccaagatcaacgtgctgaaggagacctag

SEQ ID NO: 313271 - DNA, 1833 bp, Artificial Sequence
  derived and/or modified sequence
atgcagggcagcacccagaaggccatccccccaggggccagccctgtgagcagcctgagccaggccagcagccaggccctggccgtggcccaggccagcagcggggccaccaaccagagcctgaacctgagccaggccggcggcggcagcggcaacagcatccctggctccatgggccctgggggcggcggccaggcccatggaggcctgggccagctgcccagcagcggcatgggcggcggcagctgccccaggaagggcaccggggtggtgcagcccctgcctgctgcccagacagtgacagtgtcccagggcagccagacagaggccgagagcgctgctgccaagaaggccgaggctgatggcagcggccagcagaatgtgggcatgaacctgaccaggacagccaccccagcccccagccagaccctcatcagcagcgccacctacacccagatccagccccacagcctcatccagcagcagcagcagatccacctgcagcagaagcaggtggtgatccagcagcagatcgccatccaccaccagcagcagttccagcaccggcagagccagctgctgcacacagccacccacctgcagctggcccagcagcagcagcagcagcagcagcagcagcagcagcagcagcagccccaggccaccaccctgacagccccccagcccccccaggtgccccccacccagcagggcaagccccagaccctggccgtgaagaggaaggctgacagcgaggaggagagagatgatgtgtccaccctgggctccatgctgcctgccaaggccagccctgtggccgagagccccaaggtgatggatgagaagagcagcctgggggagaaggccgagagcgtggccaacgtgaatgccaacacccccagcagcgagctggtggccctgaccccagcccccagcgtgcccccacccaccctggccatggtgtcccggcagatgggagacagcaagccaccccaggccatcgtgaagccccagatcctgacccacatcatcgagggctttgtgatccaggagggcgctgagcccttccctgtgggctgcagccagctgctgaaggagagcgagaagcccctgcagacaggcctgcccaccggcctgacagagaaccagagcggcggccccctgggcgtggacagccccagcgctgagctggacaagaaggccaacctgctgaagtgtgagtactgcggcaagtatgccccagctgagcagttccggggcagcaagcgcttctgcagcatgacctgtgccaagcgctacaacgtgtcctgcagccaccagttccggctgaagaggaagaagatgaaggagttccaggaggccaactatgcccgggtgagaagaagaggccccaggaggagcagcagtgacatcgcccgggccaagatccagggcaagtgccaccggggccaggaggacagcagccggggcagtgacaacagcagctatgatgaggccctgagccccaccagccctggccccctgtctgtgcgggccggccacggggagcgggacctgggcaaccccaacacagccccacccaccccagagctgcacggcatcaaccctgtgttcctgagcagcaaccccagccgctggagcgtggaggaggtgtatgagttcatcgccagcctgcagggctgccaggagattgctgaggagttccgcagccaggagattgatggccaggccctgctgctgctgaaggaggagcacctgatgtctgccatgaacatcaagctgggccctgccctgaagatctgtgccaagatcaacgtgctgaaggagacctag

SEQ ID NO: 313272 - DNA, 4292 bp, Artificial Sequence
  derived and/or modified sequence
cgggcaggaagtgacaggcccggagcgagccccggaggcctggctgagccgcggccgggcccgcacccggagcggcgggaggggcggggagccgcggtcgcgccgggcgcctcccaccccgccctcggcgcccccgcccctccaggaaggggaggaggcgaggggagcccgccgcggaggccgagcgagcccccagcccagcctggcgactggggaccccggcacatgaggtggacgcccccggggaagacttgggtgcacagccaggcgagaaggattcatgggtcttgagtcagacagagcaccagccttggggaccctggaccactatcatggagactgagagcgagcagaactccaattccaccaatgggagttctagctcagggggcagctctcggccccagatagctcaaatgtcactttatgaacgacaagcagtgcaggctctgcaagcactgcagcggcagcccaatgcagctcagtatttccaccagttcatgctccagcagcagctcagtaatgcccagctgcatagcctggctgccgtccagcaggccacaattgctgccagtcggcaggccagctccccaaacaccagcactacacagcagcagactaccaccacccaggcctcgatcaatctggccaccacatcggccgcccagctcatcagccgatcccagagtgtgagctctcccagtgctaccaccttgacccaatctgtgctactggggaacaccacctccccacccctcaaccagtctcaggcccagatgtatctacggccacagctgggaaacctattgcaggtaaaccgaaccctgggtcggaatgtgcctctagcctcccaactcatcctgatgcctaatggggcggtggctgcagtccagcaggaggtgccatctgctcagtctcctggagttcatgcagatgcagatcaggttcagaacttggcagtaaggaatcaacaggcctcagctcaaggacctcagatgcaaggctccactcagaaggccattcctccaggagcctcccctgtctctagcctctcccaggcctctagccaggccctagcggtggcacaggcttcctctggggccacaaaccagtccctcaaccttagtcaagctggtggaggcagtgggaatagcatcccagggtccatgggtccaggtggaggtgggcaggcacatggtggtttgggtcagttgccttcctcaggaatgggtggtgggagctgtcccagaaagggtacaggagtggtgcagcccttgcctgcagcccaaacagtgactgtgagccagggcagccagacagaggcagaaagtgcagcagccaagaaggcagaagcagatgggagtggccagcagaatgtgggcatgaacctgacacggacagccacacctgcgcccagccagacacttattagctcagccacctacacacagatccagccccattcactgattcagcaacagcaacagatccacctccagcagaaacaggtggtgatccagcagcagattgccatccaccaccagcagcagttccagcaccggcagtcccagctccttcacacagctacacacctccagttggcgcagcagcagcagcagcaacaacagcaacagcagcaacagcagcagccgcaagccaccaccctcactgcccctcagccaccacaggtcccacctactcagcaggtcccaccttcccagtcccagcagcaagcccaaaccctggtcgttcagcccatgcttcagtcttcacccttgtctcttccacctgatgcagcccctaagccaccaattcccatccaatccaaaccacctgtagcacctatcaagccgcctcagttaggggccgctaagatgtcagctgcccagcaaccaccaccccatatccctgtgcaagttgtaggcactcgacagccaggtacagcccaggcacaggctttggggttggcacagctggcagctgctgtacctacttcccgggggatgccaggtacagtgcagtctggtcaggcccatttggcctcctcgccaccttcatcccaggctcctggtgcactgcaggagtgccctcccacattggcccctgggatgacccttgctcctgtgcaggggacagcacatgtggtaaagggtggggctaccacctcctcacctgttgtagcccaggtccctgctgccttctatatgcagtctgtgcacttgccgggtaaaccccagacattggctgtcaaacgcaaggctgactctgaggaggagagagatgatgtctccacattgggttcaatgcttcctgccaaggcatctccagtagcagaaagcccaaaagtcatggacgagaagagcagtcttggagaaaaagctgaatcagtggctaatgtgaatgctaatactccaagcagtgaactagtagccttgacccccgccccttcagtaccgcctcctacactagccatggtgtctagacaaatgggtgactcaaaacccccacaggccatcgtgaagccccagattctcacccacatcattgaaggctttgttatccaggaaggagcagaacctttcccggtgggttgttctcagttactgaaggagtctgagaagccactacagactggccttccgacagggctgactgagaatcagtcaggtggccctttgggagtggacagcccatctgctgagttagataagaaggcgaatctcctgaagtgcgagtactgtgggaagtacgcccccgcagagcagtttcgtggctctaagaggttctgctccatgacttgcgctaagaggtacaatgtgagctgtagccatcagttccggctgaagaggaaaaaaatgaaagagtttcaagaagccaactatgctcgcgttcgcaggcgtggaccccgccgcagctcctctgacattgcccgtgccaagattcagggcaagtgccaccggggtcaagaagactctagccggggttcagataattccagttatgatgaagcactctctccaacatctcctgggcctttatcagtaagagctgggcatggagaacgtgacctggggaatcccaatacagctccacctacaccggaattacatggcatcaaccctgtgttcctgtccagtaatcccagccgttggagtgtagaggaggtgtacgagtttattgcttctctccaaggctgccaagagattgcagaggaatttcgctcacaggagattgatggacaggcccttttattacttaaagaagaacatcttatgagtgccatgaacatcaagctgggccctgccctcaagatctgcgccaagataaatgtcctcaaggagacctaaggtggccctcttgcacaaaccagcctaaggcagacactctccactgtccaggttataacctggtaccagcagactttgcagggaagaaagagttgttccaatcatgtaaccttctgtaggggattactgagacagggaagagaagtgcaagaattggttgctggtgctacatggcggcagctttgacattttctctgggttctactttattttttaaaatctttacagttctcaccatttcacgtaccttaatccaatctttataaaagaggcagtctagagaactaggactgctcagccttatcctggagtggagcatttagcccaggtcttaattctccaagaggaggaatacatagtatggtaaggcaaggaactgggtggaatgtcaggttgcctgcccaatgggagaggtagggtttttctagcttgtgtgacagaagtagcaaaatctggtcctcccccctcccagtgtagctgtggctcagagttttttctttttgttgtcacttactcccttgtgattgaattttttctcctgcatccatggcaggatccccagccagtatagagacttggttggcatcttctgctgcagggactaaaagtatttgactggggcacatgtggctgttgtcattctttctgcatcccactgttcccctccaatttatgttattttctaccctgtttttcagttccatctctgctctgtcctatagctttataaaaccagagtgtgtggggctgaggtcaggagtataagtacctgccttaggcactattccttatataacaaaaatattaaatatttttttcctcagtaaaaggatgaaaattggtttcagttgtcttactctattccagtctttgcccactttcacacaaatgacaaggccaatatgttttgtttgttttttaatcattaagagtttttgtacaaaa

SEQ ID NO: 313273 - DNA, 3626 bp, Artificial Sequence
  derived and/or modified sequence
gcccccagcccagcctggcgactggggaccccggcacatgaggtggacgcccccggggaagacttgggtgcacagccaggcgagaaggtcttgagtcagacagagcaccagccttggggaccctggaccactatcatggagactgagagcgagcagaactccaattccaccaatgggagttctagctcagggggcagctctcggccccagatagctcaaatgtcactttatgaacgacaagcagtgcaggctctgcaagcactgcagcggcagcccaatgcagctcagtatttccaccagttcatgctccagcagcagctcagtaatgcccagctgcatagcctggctgccgtccagcaggccacaattgctgccagtcggcaggccagctccccaaacaccagcactacacagcagcagactaccaccacccaggcctcgatcaatctggccaccacatcggccgcccagctcatcagccgatcccagagtgtgagctctcccagtgctaccaccttgacccaatctgtgctactggggaacaccacctccccacccctcaaccagtctcaggcccagatgtatctacggccacagctgggaaacctattgcaggtaaaccgaaccctgggtcggaatgtgcctctagcctcccaactcatcctgatgcctaatggggcggtggctgcagtccagcaggaggtgccatctgctcagtctcctggagttcatgcagatgcagatcaggttcagaacttggcagtaaggaatcaacaggcctcagctcaaggacctcagatgcaaggctccactcagaaggccattcctccaggagcctcccctgtctctagcctctcccaggcctctagccaggccctagcggtggcacaggcttcctctggggccacaaaccagtccctcaaccttagtcaagctggtggaggcagtgggaatagcatcccagggtccatgggtccaggtggaggtgggcaggcacatggtggtttgggtcagttgccttcctcaggaatgggtggtgggagctgtcccagaaagggtacaggagtggtgcagcccttgcctgcagcccaaacagtgactgtgagccagggcagccagacagaggcagaaagtgcagcagccaagaaggcagaagcagatgggagtggccagcagaatgtgggcatgaacctgacacggacagccacacctgcgcccagccagacacttattagctcagccacctacacacagatccagccccattcactgattcagcaacagcaacagatccacctccagcagaaacaggtggtgatccagcagcagattgccatccaccaccagcagcagttccagcaccggcagtcccagctccttcacacagctacacacctccagttggcgcagcagcagcagcagcaacaacagcaacagcagcaacagcagcagccgcaagccaccaccctcactgcccctcagccaccacaggtcccacctactcagcaggtcccaccttcccagtcccagcagcaagcccaaaccctggtcgttcagcccatgcttcagtcttcacccttgtctcttccacctgatgcagcccctaagccaccaattcccatccaatccaaaccacctgtagcacctatcaagccgcctcagttaggggccgctaagatgtcagctgcccagcaaccaccaccccatatccctgtgcaagttgtaggcactcgacagccaggtacagcccaggcacaggctttggggttggcacagctggcagctgctgtacctacttcccgggggatgccaggtacagtgcagtctggtcaggcccatttggcctcctcgccaccttcatcccaggctcctggtgcactgcaggagtgccctcccacattggcccctgggatgacccttgctcctgtgcaggggacagcacatgtggtaaagggtggggctaccacctcctcacctgttgtagcccaggtccctgctgccttctatatgcagtctgtgcacttgccgggtaaaccccagacattggctgtcaaacgcaaggctgactctgaggaggagagagatgatgtctccacattgggttcaatgcttcctgccaaggcatctccagtagcagaaagcccaaaagtcatggacgagaagagcagtcttggagaaaaagctgaatcagtggctaatgtgaatgctaatactccaagcagtgaactagtagccttgacccccgccccttcagtaccgcctcctacactagccatggtgtctagacaaatgggtgactcaaaacccccacaggccatcgtgaagccccagattctcacccacatcattgaaggctttgttatccaggaaggagcagaacctttcccggtgggttgttctcagttactgaaggagtctgagaagccactacagactggccttccgacagggctgactgagaatcagtcaggtggccctttgggagtggacagcccatctgctgagttagataagaaggcgaatctcctgaagtgcgagtactgtgggaagtacgcccccgcagagcagtttcgtggctctaagaggttctgctccatgacttgcgctaagaggtacaatgtgagctgtagccatcagttccggctgaagaggaaaaaaatgaaagagtttcaagaagccaactatgctcgcgttcgcaggcgtggaccccgccgcagctcctctgacattgcccgtgccaagattcagggcaagtgccaccggggtcaagaagactctagccggggttcagataattccagttatgatgaagcactctctccaacatctcctgggcctttatcagtaagagctgggcatggagaacgtgacctggggaatcccaatacagctccacctacaccggaattacatggcatcaaccctgtgttcctgtccagtaatcccagccgttggagtgtagaggaggtgtacgagtttattgcttctctccaaggctgccaagagattgcagaggaatttcgctcacaggagattgatggacaggcccttttattacttaaagaagaacatcttatgagtgccatgaacatcaagctgggccctgccctcaagatctgcgccaagataaatgtcctcaaggagacctaaggtggccctcttgcacaaaccagcctaaggcagacactctccactgtccaggttataacctggtaccagcagactttgcagggaagaaagagttgttccaatcatgtaaccttctgtaggggattactgagacagggaagagaagtgcaagaattggttgctggtgctacatggcggcagctttgacattttctctgggttctactttattttttaaaatctttacagttctcaccatttcacgtaccttaatccaatctttataaaagaggcagtctagagaactaggactgctcagccttatcctggagtggagcatttagcccaggtcttaattctccaagaggaggaatacatagtatggtaaggcaaggaactgggtggaatgtcaggttgcctgcccaatgggagaggtagggtttttctagcttgtgtgacagaagtagcaaaatctggtcctcccccctcccagtgta

SEQ ID NO: 313274 - DNA, 3015 bp, Artificial Sequence
  derived and/or modified sequence
atggagaccgagagcgagcagaacagcaacagcaccaacggcagctcttcatctggaggaagcagccgcccccagatcgcgcagatgtcgctctacgagcgccaggctgttcaggcgcttcaagctttgcagcgacaacctaacgctgcccagtatttccaccaatttatgctgcagcagcagcttagcaacgcccagctacacagcctggccgcggtgcagcaggcaactattgcggcaagcaggcaggcttccagccccaataccagtacgacccagcagcagacaacgacaacccaggcatccattaacctggccacaacctctgccgcgcagctgatatctagatctcagtctgtcagcagtccaagcgcaaccaccctcacccagtcagtacttctgggaaatacaacctccccacctctgaaccagagccaggcccaaatgtacctgaggcctcagcttggtaatctgcttcaggttaacagaactctcggtcgcaatgtcccgcttgcttctcagctaatactgatgcctaacggggccgtagccgctgtgcaacaggaagttccctcggctcagagcccaggcgtgcacgccgatgccgaccaggtgcagaacctcgccgttagaaatcagcaggcctcagcccagggtccgcagatgcaggggtccacccagaaggcaatcccgccaggagcctcaccagtttctagtctttctcaggcgtctagccaagccctggccgttgctcaggcctccagcggcgcaacaaatcagagcttgaacctgtcgcaggcaggaggcggatccggcaattccattcccgggtccatggggccagggggcggcggccaagcccacggcgggctgggccagctccctagctcaggaatgggcggggggtcatgcccaagaaaagggaccggtgtcgttcagccgctacccgccgcgcaaacggttaccgttagccaaggctctcagacagaagctgagtcagctgccgctaaaaaagcagaagctgatggcagcggccagcaaaacgtgggtatgaaccttacaagaacagcaactccagctcccagccagaccctgatctcaagcgccacttacacccagatccaaccccattcgttgatacagcagcagcaacagattcatctgcaacagaaacaggtcgtcatacagcagcagatcgctatacaccatcagcagcagtttcaacatagacagtcccagttactgcacactgcaacgcacctgcaattagcccaacagcagcagcaacagcaacagcaacagcaacagcagcagcagcctcaggccaccactctaactgccccccaacctcctcaggttcctcccacccagcaggttccacccagccagagccaacaacaggcccagacactggtggttcagcctatgctccaaagctctcctctgtccctgcctccagacgccgctccaaaacctcctatccctatacagtccaagcccccggtggcgccgatcaagccaccgcagctaggtgccgctaagatgagcgccgcacagcagccccccccccacatccctgtgcaggtcgtggggaccagacagccagggacagcacaggcacaggccctggggctagctcagctagccgccgcggtgcctacctcacggggaatgcctggaactgtgcagagtgggcaggcacacctcgcgagctctcctccatctagccaagctccaggagctcttcaggaatgtccacctacattagcccctggcatgactttggcccccgtacagggtaccgcacacgttgtaaaaggcggagctaccactagctctccagtagtggcccaagtacctgcggctttctacatgcaaagcgttcaccttcctggcaagcctcaaactctggcagttaaacgaaaagcagacagcgaggaggagcgtgacgacgtttcgactttaggatctatgctacctgcgaaagcttcaccagtcgcagagtctccaaaagtcatggatgagaaaagctctctgggagagaaggcagaatccgttgccaatgtcaatgccaataccccctcaagcgagctggtggcacttacacctgccccgagcgtacccccacccaccttagccatggtctctaggcagatgggcgactccaaaccgccacaggccattgttaagcctcagatcctgacccacatcatcgaaggatttgtgattcaagaaggcgcggagccttttcctgtcggttgctctcaactcctaaaggagtccgaaaaaccccttcaaaccgggctcccgactggcctcacagaaaatcagagcggaggcccgttgggtgtggactcgccgagcgccgagcttgacaagaaggcaaacctcctgaagtgcgagtattgtggcaagtatgcaccagccgagcagttccgcggatctaaacgtttctgttctatgacctgtgctaagcgctacaacgtttcttgctcacaccagttcagactcaaacggaaaaaaatgaaagagttccaggaggctaattatgccagagtcaggcggcgcggaccccggcgcagttcttccgacatcgcaagggccaaaatccaaggcaaatgtcaccggggccaggaagattcctctcgaggctccgataatagttcctatgacgaggcactcagtccaactagccccggcccattatcagtgcgggccggacatggcgagagagatctgggaaatcccaacactgctccgcccacgccagagctgcacggtataaatcctgtctttctgagctccaatccttcaagatggtctgtcgaagaagtttacgagtttatcgcctcgctgcaagggtgtcaagagatcgctgaggagtttagaagccaagagatcgatggccaggctttgctgctgctaaaggaggagcacctgatgagcgcgatgaacataaaacttgggcccgctctcaagatttgcgctaagataaatgtcttaaaagaaacatag

SEQ ID NO: 313275 - DNA, 1833 bp, Artificial Sequence
  derived and/or modified sequence
atgcagggcagcacccagaaggccatcccccccggcgccagccccgtgtcaagtctatctcaggctagcagccaagctctggcggtggcacaggcttcgagtggggctacaaaccagtcactgaatctgtcacaggctggcggaggcagtggcaactccattccaggatctatgggcccaggcgggggtgggcaggcccatggcggattggggcagctgcccagtagcgggatgggtggaggtagctgcccgaggaaagggacaggggtcgtccagccactccccgctgcccagaccgtgaccgtgagtcagggctcacagacagaggccgagagtgccgccgctaaaaaagctgaggctgatggcagcggccaacagaacgttgggatgaacctgactaggacggccacacctgcaccgtcccaaaccctgatcagcagcgctacgtacactcagatccagcctcacagtttgatacaacagcagcagcagattcacctgcaacagaaacaggtcgttatccagcagcagatcgctattcatcaccagcagcagtttcaacacaggcagtcacagctattgcacacggctactcatctccagctggctcagcaacagcagcaacagcagcagcagcagcagcaacagcagcagcctcaggccaccaccctcactgctccacaacctccccaggtcccgcctactcagcagggaaagcctcagactttggccgtcaagcgaaaagctgatagcgaggaggagcgcgacgacgtgtctacactagggtctatgctgccggccaaagcttctcccgtcgcggaatctccaaaggtgatggacgagaagtccagcctcggcgagaaggccgaatctgtggcaaatgtaaacgcaaataccccaagcagtgagctcgttgccctcacacctgcaccttcagtcccaccacctactctagcaatggtgtctaggcagatgggtgactccaagcccccccaagctatcgtcaaaccgcagatattgacacacatcatcgagggcttcgtgatccaagaaggggcagagccgttccccgtcggatgctcccagttgctgaaagaaagcgagaaaccactacagacaggcctgcctacaggcctgacggaaaatcagtcagggggacccctgggggtagacagcccttcggctgaactggataaaaaggctaacctgctcaagtgtgaatactgcggcaagtatgcccccgccgagcagttcagaggaagcaagaggttctgctccatgacctgtgctaaacgctataacgtgtcttgtagtcaccagttcaggctcaagcgtaagaagatgaaggagtttcaggaagctaactacgcgagggttagacggagaggaccacgacgtagctcctccgatatagctcgtgccaagatccaggggaagtgccacagaggacaggaggattcttcacgaggctctgataacagtagctacgatgaggctttgtctcctacatctcctggtcccctaagtgtcagagctgggcatggcgagagagacctaggaaatccaaacaccgcccctcccacccccgagctccatgggatcaatccagtgttcctctccagcaatccctctagatggagcgtggaggaggtgtatgaattcattgctagtctacagggatgtcaggagatcgccgaagagttccggtcacaagagattgacggccaggcactgctcctgctcaaggaagaacacctgatgtcagcgatgaatatcaaactgggtccggctcttaagatctgcgctaagatcaacgtcttaaaggaaacctag

SEQ ID NO: 313276 - DNA, 3015 bp, Artificial Sequence
  derived and/or modified sequence
atggagaccgagagcgagcagaacagcaacagcaccaacggcagctcttcctcagggggatcaagccgcccccagattgctcagatgagcctgtatgaaaggcaagcagtgcaggctcttcaagccctgcagcggcaaccaaatgccgcacaatatttccatcagtttatgctgcagcagcagctctcaaacgcccagcttcattccctcgccgctgtgcagcaggccaccattgcggcaagcaggcaagctagctcacccaacacctcaacgacccagcaacagaccacaaccacccaggcctccataaatctggcaacgacttcagcagcacagctcattagcaggagccagtcagtgtcaagccctagcgccactaccctcacccagtctgtactacttggtaatactacctcaccccctctcaatcagagccaggcgcagatgtacctgagaccacagctaggaaacctgctccaggtcaaccgaactctgggccggaatgtgcctcttgcgagccagctgatcttaatgcccaacggggcggtcgccgctgtacagcaggaggtcccatcggctcagtcgcccggtgttcacgcagacgccgaccaagtgcaaaatctggcagtgcgcaatcagcaggctagcgcccagggaccccagatgcagggtagcacacagaaggcaatacctcctggcgctagtccggtatctagtctgtcacaggctagcagtcaggcactcgccgtggcccaagcctcatctggcgccacaaaccagtccctcaacctgtcccaggccggcgggggcagtggcaattcaatccccggaagcatgggccccggcggcggcggccaggcccacggagggcttggacagctgcccagtagcgggatgggtggcggatcatgcccccgcaagggaacgggtgtcgtgcaacccttgcctgccgcacaaaccgtaacagtgtcacaggggagtcagaccgaggcagagtctgccgctgccaagaaagccgaggccgatggctcaggccagcagaatgttggaatgaatctaacccgaacagcgaccccagcacccagccagaccctgatcagtagcgccacctatacccagatccagcctcacagcctcattcaacagcagcagcagatacaccttcagcagaagcaggtagtcatccaacagcagatcgccatccatcaccaacagcagttccagcaccgccagagccaattgttacacaccgccacccatttgcagttagcccagcagcagcagcagcagcagcagcagcagcaacagcaacagcagcctcaggctaccaccttgacagccccccagccacctcaggtgcctcctactcagcaggtgccccccagccagagtcagcagcaggcgcaaaccttagtggtccaacccatgctgcagtcttccccgttgagtctgccccccgatgctgcacccaaaccccccatccctattcagtcaaaacctccagtggcccccatcaaaccgccacagctgggggccgccaaaatgtccgctgctcagcagcccccccctcatattcccgtccaggtcgtggggacaagacagcctgggacagcacaggcacaggcgttaggattggctcaactggctgcagccgtaccaacatcaagaggcatgcctggaactgtgcaatctgggcaagcccacctagcttcaagccctcccagttcgcaggcaccaggtgccctccaagagtgcccccctactctagcgcctgggatgaccttggctccggtccaaggtacggcccacgtggttaaaggcggcgccacaacgtcttcacccgttgtggcccaggtccctgcagctttttatatgcagtccgtacatctccccggcaagccccaaacactggcggtgaaacggaaagccgactctgaagaagaacgggatgacgtgtccactctcgggtctatgctgcctgcgaaggctagtcccgtagcagagagcccaaaggtgatggacgagaagtcaagcctaggcgaaaaagccgaaagcgtcgcaaacgtgaatgccaatacaccgtctagcgagctggtcgccctgacacccgcgcccagcgtgcctcctcccaccctagctatggtttcccggcagatgggcgactccaaacctccccaggcgattgtaaagccccagatcctgactcacatcattgaggggtttgtgattcaagagggcgcagagcccttcccagtgggctgctcacaactgctcaaagaatcagaaaaaccacttcagacaggtctgcctacgggcctcacagaaaaccagagcggcgggcccctgggggttgatagcccctccgcggagctggataagaaagccaacctgctgaaatgtgagtattgtggaaagtatgctcctgctgagcagtttagggggtctaagagattctgttccatgacctgtgccaaaaggtacaacgttagttgctctcaccagtttcggctaaaacgcaagaagatgaaggagttccaagaagcaaattacgctagagtgaggcgtagaggtccgagacggtcctcctctgacattgcacgggcaaaaatccagggtaagtgtcatagaggtcaggaggattcctcaagaggcagtgataactctagctacgatgaggctctgagccctaccagtcccggccctttgtcggtacgcgccggacatggggaaagagatctcgggaaccccaacaccgcccctccaacaccagagctgcatgggataaatcccgtgttcctgagcagcaatcctagccgctggtccgtggaggaggtatatgagtttatagccagcctgcaaggctgccaggaaattgcggaagaatttagaagccaagagattgacggacaggcgcttctactgctgaaggaggaacacctgatgagtgccatgaacataaaactggggcccgccttgaagatctgtgcaaaaataaacgtgcttaaggagacatag

SEQ ID NO: 313277 - DNA, 3015 bp, Artificial Sequence
  derived and/or modified sequence
atggagaccgagagcgagcagaacagcaacagcaccaacggcagcagttccagtggcggtagcagtaggccgcagattgctcagatgtcactctatgagaggcaagccgtccaagctttgcaggctcttcagagacagcctaatgcggcccagtatttccaccagtttatgctgcagcagcagctgagcaacgctcagcttcattccctggccgcagtccagcaagctacaattgctgcttcccggcaggcctcgtcacctaacacatcaactactcagcagcagacaaccactacacaagcgagcatcaatttagccactacctctgcagcccagttaataagcaggtctcagtcggtctcctcaccctcagcaaccaccttgacacagagcgtgttattaggaaatacgactagcccacccttgaatcagtctcaggcgcagatgtatttgcgcccccaacttggtaatctgctccaggttaataggaccctgggccggaacgtccccctggcttctcagctgatattaatgccaaatggggctgtggcagccgtgcaacaagaagttcctagtgcccagtcccccggcgtccatgcagacgccgatcaagttcagaacctggctgtgcgcaatcagcaggccagtgctcagggaccccagatgcaaggctcgacccagaaagccatcccgccgggcgccagccccgtctcctctctgtcacaggcatcgtctcaggcattagctgtggcacaggcttccagcggggccacaaatcagtcccttaatctgtcacaggccgggggtggttccggcaattcaatacctggctctatgggccctggaggtggcggtcaggcacacggcggtctgggccagctgccctcctctggaatgggcggtgggtcctgtccccggaagggaactggcgtggtgcaacctctgcctgctgcacagaccgtcactgtcagtcaaggctcccagacagaggccgaaagcgctgcggctaagaaggcggaggccgatgggagtgggcagcagaatgttggcatgaacttaacccggaccgccactccggcgcccagtcaaacgctcatatccagcgctacttatactcaaatacagccgcattctctgatacaacagcagcagcaaattcatttgcagcagaaacaagtggtgatacaacagcagattgcgatccaccatcagcaacagttccaacataggcagagccagttgctgcatacggcgacccaccttcagctggcgcagcagcagcaacagcaacagcagcagcagcaacaacagcagcagcctcaggctacaaccctaaccgcaccccagccgccgcaggttccccctacccagcaagtgcccccaagccagtcccaacagcaggcccaaaccctcgtagtccagccaatgctgcagagttctccactgtcattacctccagacgcagcacccaagcccccaattcctatccagagcaaacctccggtcgctccaattaagcccccccaactgggggcggccaaaatgtctgccgcccaacagccaccccctcacattcccgtgcaggtggtgggaacgaggcagccagggaccgcacaagctcaggctcttgggctggcccaactggccgctgctgtcccaaccagcaggggtatgccggggacagttcagtccgggcaggcacacctggcatcctccccgccatcttcacaggccccaggagcactgcaagaatgccccccgactctcgctcctgggatgactctggcacctgttcagggcacggctcatgtggtcaaagggggcgcgaccacctccagccctgtggtcgcccaggtgcccgcggccttctacatgcagtccgtacacctgcccgggaagccccagacactggcggttaaacgcaaggcagattccgaagaagagagggatgacgtgagtaccctgggctccatgttgcccgctaaggcctcccccgtggccgaatccccgaaagtaatggatgaaaaatcttccctgggcgaaaaggccgagtcagttgccaatgttaacgccaataccccttccagcgaattggtggcactaactcctgctccaagcgtgccaccacctacattagcaatggtgagccggcagatgggagactccaaaccccctcaggccatcgttaaacctcagatcctgactcatatcatcgaagggtttgtcatacaggagggtgccgagccttttcccgtcggctgcagccagctcctaaaagagtctgaaaagccccttcaaactggactgcccaccggccttaccgaaaatcagtctggcggtcctctcggagtggactctcctagcgcagagctggacaaaaaggctaatctgctcaaatgcgaatactgcggcaaatatgcacctgccgagcagttccgcggctccaaaagattttgttccatgacatgcgccaagagatacaatgtcagctgtagccatcagtttcgtctcaagcgtaaaaagatgaaagaatttcaagaagcaaattacgccagagttaggcggcggggccctcgcagatcttccagcgacatcgcaagagcaaagatccaagggaaatgccacagaggccaagaggattccagtcgggggtctgacaactcgagctatgacgaggccctcagccctacatcccccggtcctctctccgttagggcgggccacggagaaagggacttggggaaccccaacaccgcaccacccaccccagagctccatgggataaaccctgtttttttgtccagcaaccctagcagatggagtgtcgaggaagtttacgagtttatcgccagcctgcagggctgccaagagatcgcagaagaattcaggtctcaggagatcgatggccaggcgttgctactgttaaaagaagagcatcttatgagcgctatgaacattaagctcgggcccgcacttaaaatctgcgcaaaaataaacgtgcttaaggagacttag

SEQ ID NO: 313278 - DNA, 3015 bp, Artificial Sequence
  derived and/or modified sequence
atggagacggagtcagaacagaattctaatagcacaaatggaagctcctcctccgggggaagcagtagaccacagatcgctcagatgtctctgtacgagcgccaggcagtacaggcactccaggcactccagcgccagcccaacgccgctcaatactttcaccagtttatgctccagcaacagctgtccaatgcgcaactgcactctctggcagctgtccagcaggctactattgcagcgtcacggcaggctagctcaccgaacaccagtactactcagcagcaaaccacaaccactcaggcctccataaatttagcgaccacgagtgccgcacagttgatttcaaggagccagtccgtcagcagtccaagcgctactacattgacccaatctgtgctgttaggtaatactacctcgccaccccttaatcagtcccaggcccagatgtacctgagaccgcagctggggaacctcctccaggtgaacagaaccctggggcgaaacgttccccttgcctcccagctcatcctgatgcccaacggagctgtggccgctgtccagcaggaggttcccagtgcccaatctcctggtgtgcacgctgatgccgaccaggtgcagaacctcgctgtgcgcaatcagcaggccagtgcccagggccctcagatgcaaggatccacgcagaaagcaatcccccctggggcatcgccggttagctccctgagccaggcgtctagccaggctctcgctgtggctcaggcctcttccggggctaccaaccagtctctgaacctgagccaggcagggggaggttccggcaattccatccccggaagtatggggccagggggagggggacaggcacacggcggactgggccagctccccagttcggggatggggggtggcagttgccccaggaaagggaccggtgttgtacagcccttgcctgccgcacaaaccgtcacagttagtcagggcagccagacggaggcggagagcgctgcggctaagaaggctgaagcagatggatccggccaacaaaacgttggaatgaatctaacccgcaccgccacccctgcccctagccaaacgctcatcagttctgctacctatacccagattcagcctcactctctgatccagcagcaacaacaaatccatctccagcagaagcaggttgtgattcagcaacagatcgctattcaccaccagcaacagttccagcacaggcagtcccagctgcttcacaccgctacccatctccaattggcccagcagcaacaacaacagcagcagcagcaacaacagcaacagcagcctcaggcaacaacgctgactgctccgcagccccctcaggtgcctccgactcagcaagtcccaccaagtcagtcacagcaacaagcccagacactggtggtgcaaccgatgctccagtcctcacctctctctctcccccctgatgcagcacctaagcccccaattcctattcagtcaaagcctcccgtggcaccaattaagccccctcagctgggtgctgcaaagatgtccgcagcccaacaaccacctccacacattcctgtccaggtggtgggaacaagacagcctgggaccgcccaagctcaggctcttgggctggcgcagttggctgccgctgtgcctacctcaagaggaatgcccggaacagtgcagtctggccaagcccatctcgcttcctccccaccttcttctcaggccccaggcgctcttcaggagtgtccacccacacttgcccctgggatgactttagcgcctgtccaaggcactgcccacgtggtcaagggcggagccactacatccagccctgtggtggcgcaagtgccagcagccttttacatgcagtccgtacaccttcctggcaaaccccagaccctcgccgtgaaacgaaaggccgactccgaagaggagcgagacgacgtgtccaccctcggatccatgctgcctgccaaggcctctcccgttgctgaatctccgaaggtgatggacgagaaatcttccctcggcgagaaagcagagtctgtggctaatgtgaacgctaatacaccgagttccgagctcgtcgctctcacccctgcaccctccgtcccccctcctacacttgccatggtctcgaggcaaatgggcgattccaagcctccgcaagctatcgtcaagccccaaattctcacccacattatcgaaggcttcgtgatccaagagggcgcagagccattccctgtcgggtgcagtcagcttctgaaggaatccgaaaagccactgcaaactggattgcccacaggcctgaccgagaaccagagtggcggtcccctgggagtggactccccatccgctgaactcgacaagaaagcgaacctcctaaagtgcgagtattgtggtaagtacgcacccgctgaacagttcaggggtagtaaaaggttttgtagtatgacctgtgctaaaagatataacgtctcatgtagtcatcagttccggcttaagcgcaagaagatgaaggagtttcaggaggccaactacgccagggtgcggaggagagggccaaggcgaagctctagtgacattgcccgagctaaaattcagggtaaatgccacagagggcaagaagatagctctagggggagtgataactcatcctatgacgaggcccttagccccacatcaccaggcccactttccgtgagggccggtcatggcgaacgggatttaggtaaccccaacactgcaccccctacccctgagcttcatggaataaatccagtcttcctgtctagcaacccgtctagatggagcgtggaagaggtatacgagttcattgcttctcttcagggttgtcaggaaatcgcagaggagtttaggtctcaagaaattgacggccaggcccttctgctattgaaggaagagcacctgatgtctgcgatgaatatcaaactaggccctgcccttaagatttgtgccaagattaatgtgctgaaagaaacctag

SEQ ID NO: 313279 - DNA, 1833 bp, Artificial Sequence
  derived and/or modified sequence
atgcagggctccacgcagaaagctatccctcctggggcttcccctgtctccagcctgtcacaggcgtcctcccaggcactagcagttgcccaggcctcttccggggctaccaaccaatcacttaacctgagccaggctgggggaggcagcggcaattcgattcctggaagcatgggaccaggaggaggcggacaggcccatggaggactgggacagctacctagctcaggcatgggaggaggttcttgtccacgtaagggtacaggtgtcgtgcaacccctgcccgcagcgcaaaccgtgaccgtctcccagggctcccagacagaagcggagagcgcagccgcaaaaaaggctgaagcagatgggtctgggcagcagaacgtcggcatgaacctcacacgcaccgccactcccgctccttctcagactctgatttcatctgccacctacacacagattcagccacattctcttattcagcaacagcagcagatacacctgcaacaaaagcaggtggtgattcagcagcaaatcgcgatccatcatcaacagcaatttcagcatcgacagagtcaactgctccacactgccacccatctgcaacttgcccagcagcagcagcagcagcagcaacagcaacaacaacagcaacagccacaagccactactctgaccgcccctcagcctccccaggttcctcccacacagcaggggaagccccagaccctggcggtgaagagaaaggccgatagcgaagaggaacgagatgatgtcagtactctgggttctatgctcccggctaaggcttccccagtggccgagtcacccaaagtgatggacgaaaagtcatcactgggcgagaaagccgaaagcgtcgcaaatgtgaatgcaaacacccctagtagcgaattggtggccctgactccagcccctagcgtgcctccaccaaccttagcgatggtgtcaagacagatgggcgattccaaacctcctcaagccatcgtgaagccccagatcctgacgcatattatcgagggtttcgttattcaagagggggctgaaccattccctgtgggttgttctcaactgctgaaggagtcagagaagcccttgcagacaggtctgccaaccggattaacagaaaatcaaagcggagggcctcttggtgtggactccccgtccgcagagttggacaaaaaagcgaacctgcttaaatgcgaatactgtggaaagtacgcccctgcagaacagttcagaggaagcaagcggttttgctcaatgacctgcgccaagcgatataacgtgtcatgtagccatcagttcaggctgaaacgcaagaagatgaaggagttccaggaggccaattatgctcgtgtcagacggaggggaccgagaaggtcatccagcgatatcgcacgggcaaaaatccaagggaagtgccacaggggtcaggaagactcatcccgcggatcggacaattccagctatgatgaagctctgagcccaacatctcccggtccattatctgtcagagccggtcatggggagcgagacttgggtaacccgaataccgcgcctccaactcccgaattgcacggcatcaaccctgtctttttgtcctctaatccctcccgctggtctgtggaggaggtctacgagtttatcgctagcctccaggggtgccaggaaatcgcagaagaattccggtcacaagagatcgatgggcaggcactactgctacttaaggaggagcacctgatgtcggccatgaacatcaaactggggcctgctctaaagatatgtgcaaagatcaacgttctcaaagaaacctag

SEQ ID NO: 313280 - DNA, 3015 bp, Artificial Sequence
  derived and/or modified sequence
atggaaaccgagtctgaacagaacagtaatagcaccaacggaagctcttctagcggcggttcctcaagacctcagatcgcccaaatgagcctttatgagaggcaggccgtacaggcactgcaggcccttcagagacagccaaacgctgcacagtacttccaccagttcatgctgcagcagcaattgagtaacgctcagttgcactcactagcagctgtccagcaggccactatagctgctagtagacaggcctctagccctaacacttctacgacccagcaacagacaactacaacccaggcctctattaaccttgccaccaccagcgcagctcagcttataagcaggtcccaatcggtcagctcaccatcagccacaaccctgacacagtctgtcctgctaggaaacacaacatcccccccactgaatcagagccaagcacagatgtacctacggccacagctagggaaccttttgcaggtgaacaggacactcggcagaaatgttccgctagcctcgcagctaattctgatgcccaatggggctgtggccgctgttcagcaagaagtgcctagcgctcaatccccaggtgtgcatgcagatgccgatcaagtgcagaacctggccgttagaaatcagcaggcctccgcccagggccctcagatgcagggatcaacgcaaaaagccatccccccaggcgcatcccccgtgagctcgctctctcaggctagcagccaagccctggccgttgctcaagccagtagcggcgctacgaaccaaagcctcaatctgtcacaggccggtgggggtagcggcaactcaatcccagggtctatgggccctggcggaggcggacaagcccatggtggacttggccagctgccgtcttcaggaatgggcggaggctcatgcccaagaaaggggaccggagtcgtgcagcccctgcccgctgcccagactgtaacggtgtcacaggggtcccagacagaagctgaatctgctgctgcgaaaaaggcggaagctgatgggtccgggcaacagaatgttggtatgaatctgacacgaacagctacacccgctccctctcaaaccttgatttcttcggctacttatacccagatccagccacactccctgatccagcagcaacagcagattcacctgcagcagaaacaagttgttatccagcagcaaatcgcaatccatcaccagcagcaatttcagcatcgacagagtcaactcctgcacacagccactcaccttcagttggcccagcagcaacagcagcaacagcagcaacagcaacagcagcaacagccccaagctactaccctcaccgcccctcagcccccacaggtcccacctacacaacaggtgcccccatctcagagtcagcaacaagcacagactctggtggttcaacctatgcttcagagctcacccctgagcttaccgcctgatgcggctcccaaaccccctatccctatccagagtaaaccacccgtggcccctatcaagccccctcagctgggagcggcaaagatgtctgcagcacagcagccaccaccccatatccctgtgcaggttgtcgggacccgacagcccggaaccgcacaggctcaggctctagggttggcccagttagctgccgctgtgcccacctcccgcggaatgcctggtaccgtgcagagcggacaggcccacctagccagctctcccccttcgagccaggcaccgggtgcactacaagagtgtcctcccacacttgctcccggaatgactctggcacctgttcaaggcactgctcacgtagttaagggcggagcaacgacttccagcccagttgtggcccaggtcccagccgctttttacatgcaatccgttcatttacctgggaaaccccaaacgttggccgtgaaacgaaaagctgattctgaggaggaaagagatgatgtgtcgactttggggagcatgcttcctgccaaagcttccccagtagctgagagtcccaaagtaatggacgaaaagtctagtctgggagagaaagcggaaagcgtcgccaatgtgaatgcgaacactccatctagcgaacttgtggctctcacacctgccccaagcgtccctccgccaacgttagcgatggtttcaagacagatgggtgattccaaaccacctcaggctatcgtaaaaccccagattcttacccacatcatcgaaggctttgtaatccaggaaggcgcagagcccttcccggtcggctgtagtcagcttttgaaagagtccgagaagcccttgcagactggtcttcccactggtctgactgagaaccagtcggggggaccactcggcgtggactcaccgagtgctgagctggataagaaagctaacttgctgaagtgcgaatactgcgggaagtacgcacccgcagagcagttcagggggtcaaaaagattttgctccatgacttgtgcaaagcgctataatgtgtcctgctctcaccagtttcgtttaaaacgcaagaagatgaaagagtttcaggaagctaactacgccagagttagaagacgagggccaaggaggtcaagtagtgatattgcaagagcgaagatccaggggaaatgtcatcgcggacaggaggacagtagtagaggatcagataactctagctacgacgaggcacttagtcccaccagccctggcccactttctgtaagggctggtcacggggaaagggatcttggcaaccctaacaccgcccctcccacacctgagctgcacggaatcaaccctgtttttctttctagtaaccctagtcgttggtccgtggaagaggtgtacgaattcatcgcttctctgcaaggatgccaggagattgccgaggagttcaggtctcaggaaattgatggtcaggctcttttgctcctgaaggaggagcacctgatgtcggcaatgaacatcaagctcggcccagcacttaaaatctgcgcgaagatcaatgtccttaaggagacctag

SEQ ID NO: 313281 - DNA, 3015 bp, Artificial Sequence
  derived and/or modified sequence
atggaaacagagtctgaacagaactcaaactctacaaacggttccagctcctccggtgggtcctcaagaccacagattgcgcaaatgtccctgtatgaaagacaggctgtgcaggcactgcaagcacttcagcgacagccaaacgctgcccaatattttcaccagttcatgttacaacagcaactttcaaacgctcagctacatagcctagccgcagtgcagcaggccacgatcgcagctagtagacaggcctcctctcctaacacctctacgacccaacagcagaccacaaccacacaggcatccatcaaccttgccactacttccgctgcccagctaatctcacgctcgcaatccgttagttccccctcggccacaaccctgacacagtcggtgctcctgggtaacactacaagccctccactcaaccagtcgcaagctcagatgtacctgcgccctcagctagggaacctgctgcaggtgaaccggacactcggaaggaatgtgcctctagcatcacaactgattctgatgcccaacggcgctgtggccgcagtgcagcaggaagtgccctccgcgcagagccctggagtacacgcagacgccgatcaggtccagaatttggctgtgcgtaatcagcaggccagcgcgcagggccctcagatgcagggttcaacacagaaggctatcccacccggtgcttccccggtgagcagcctgagtcaggcttcttctcaggcactggcagtggcccaagcatcttccggcgcaactaaccaatccctgaacctatcccaggctgggggtggaagcggcaatagtattccgggaagcatgggacccggaggtgggggtcaggcacacggcggtctgggacagctccctagcagcggcatgggcggtggcagttgccctcgcaagggcactggtgtagtgcagcccctgcccgcagcccagaccgttaccgtctctcagggcagtcagaccgaggccgagagtgccgctgccaagaaggccgaggccgacggcagtggccaacagaacgtagggatgaatttgactcgtaccgcaacaccggcaccttctcaaactctgatctccagtgccacttacacgcagatccagccacatagtttgatccagcaacagcaacagatccacctccagcagaagcaagttgtgatccagcagcagattgccatccaccaccaacaacagttccagcaccgccaaagccagttgctgcacacggccacacacctgcagctggcccagcagcagcaacagcagcagcagcagcagcagcagcagcagcagccccaggcaaccaccctcacggcaccccagccaccgcaagtaccaccaacacaacaggtcccgccttcacagtctcagcaacaagcacagaccctcgtcgttcaacccatgctccagtcatcccccctgtcccttccacctgacgctgctccgaagccacccatccctatacaatctaagccccctgtggctcccatcaagcctccccagttgggggctgccaagatgagcgccgctcagcagcccccaccacacattcctgtgcaggtcgtcggtacaagacagcctggtactgcccaagcccaggccttaggacttgcgcagttggccgcagccgtgcccacatctcgcggaatgcctggaactgtccagagcggacaggcccatctcgccagctcccctcccagcagccaagctcccggtgcactccaggagtgccctcccacactcgcccctgggatgaccctggccccagtccagggcaccgcacacgttgtaaagggaggagccacaacgagcagcccagttgtggcccaggtgcccgctgctttctacatgcagtccgttcatctaccaggaaagccccagactttggctgttaaacgtaaggcagactccgaagaagagcgggatgatgtctccaccttgggcagcatgctgcccgcaaaagccagccctgttgccgagagtcccaaggtcatggatgaaaagtccagtcttggggaaaaggccgagagcgtggcaaatgtgaacgccaacacccccagctctgaattagtcgcactaaccccagccccatccgttccgcctcccaccctcgccatggtatcccgacagatgggagacagcaaaccaccacaagctatcgtgaaaccacagattcttacgcatatcatcgaggggttcgttatacaagaaggcgcagaacccttccccgtcgggtgttcccaattgcttaaggaaagtgagaagcccttgcagacaggattacctacaggcttaactgagaatcaaagtggagggccactgggcgtcgattctccatcagccgagctggacaaaaaggcaaacctcctgaagtgcgagtactgcggaaagtacgcccctgctgaacagtttaggggaagcaagaggttttgtagtatgacttgcgcgaagcggtataatgtaagctgttcccaccagttcaggctaaagcgtaaaaagatgaaggagtttcaagaggctaactacgctcgtgtgagacgtaggggcccacgcaggtcaagctcagatattgctcgcgctaaaatccagggaaagtgccataggggccaggaagattcctcccggggttcagacaatagttcctacgatgaagccctcagccccacatctccagggcctctctccgtgagggccggtcacggcgagagagaccttggtaatcctaacaccgcccctccaacccccgaattacacggaatcaatcctgtatttctctcttccaatccaagccggtggagcgtcgaagaggtgtacgagttcatcgcttccctgcaaggctgccaggagatagctgaagaatttcgtagtcaggaaatcgacggacaggccctcctcctgctcaaggaagaacatctgatgagcgctatgaatatcaagctcggaccagccttgaagatctgtgccaaaattaacgtccttaaagaaacatag

SEQ ID NO: 313282 - DNA, 3015 bp, Artificial Sequence
  derived and/or modified sequence
atggagaccgagagcgagcagaacagcaacagcaccaacggcagcagcagcagcggcggcagcagcagaccccagatcgcccagatgagcctgtacgagagacaggccgtgcaggccctgcaggccctgcagagacagcccaacgccgcccagtacttccaccagttcatgctgcagcagcagctgagcaacgcccagctgcacagcctggccgccgtgcagcaggccaccatcgccgccagcagacaggccagcagccccaacaccagcaccacccagcagcagaccaccaccacccaggccagcatcaacctggccaccaccagcgccgcccagctgatcagcagaagccagagcgtgagcagccccagcgccaccaccctgacccagagcgtgctgctgggcaacaccaccagcccccccctgaaccagagccaggcccagatgtacctgagaccccagctgggcaacctgctgcaggtgaacagaaccctgggcagaaacgtgcccctggccagccagctgatcctgatgcccaacggcgccgtggccgccgtgcagcaggaggtgcccagcgcccagagccccggcgtgcacgccgacgccgaccaggtgcagaacctggccgtgagaaaccagcaggccagcgcccagggcccccagatgcagggcagcacccagaaggccatcccccccggcgccagccccgtgagcagcctgagccaggccagcagccaggccctggccgtggcccaggccagcagcggcgccaccaaccagagcctgaacctgagccaggccggcggcggcagcggcaacagcatccccggcagcatgggccccggcggcggcggccaggcccacggcggcctgggccagctgcccagcagcggcatgggcggcggcagctgccccagaaagggcaccggcgtggtgcagcccctgcccgccgcccagaccgtgaccgtgagccagggcagccagaccgaggccgagagcgccgccgccaagaaggccgaggccgacggcagcggccagcagaacgtgggcatgaacctgaccagaaccgccacccccgcccccagccagaccctgatcagcagcgccacctacacccagatccagccccacagcctgatccagcagcagcagcagatccacctgcagcagaagcaggtggtgatccagcagcagatcgccatccaccaccagcagcagttccagcacagacagagccagctgctgcacaccgccacccacctgcagctggcccagcagcagcagcagcagcagcagcagcagcagcagcagcagcagccccaggccaccaccctgaccgccccccagcccccccaggtgccccccacccagcaggtgccccccagccagagccagcagcaggcccagaccctggtggtgcagcccatgctgcagagcagccccctgagcctgccccccgacgccgcccccaagccccccatccccatccagagcaagccccccgtggcccccatcaagcccccccagctgggcgccgccaagatgagcgccgcccagcagccccccccccacatccccgtgcaggtggtgggcaccagacagcccggcaccgcccaggcccaggccctgggcctggcccagctggccgccgccgtgcccaccagcagaggcatgcccggcaccgtgcagagcggccaggcccacctggccagcagcccccccagcagccaggcccccggcgccctgcaggagtgcccccccaccctggcccccggcatgaccctggcccccgtgcagggcaccgcccacgtggtgaagggcggcgccaccaccagcagccccgtggtggcccaggtgcccgccgccttctacatgcagagcgtgcacctgcccggcaagccccagaccctggccgtgaagagaaaggccgacagcgaggaggagagagacgacgtgagcaccctgggcagcatgctgcccgccaaggccagccccgtggccgagagccccaaggtgatggacgagaagagcagcctgggcgagaaggccgagagcgtggccaacgtgaacgccaacacccccagcagcgagctggtggccctgacccccgcccccagcgtgcccccccccaccctggccatggtgagcagacagatgggcgacagcaagcccccccaggccatcgtgaagccccagatcctgacccacatcatcgagggcttcgtgatccaggagggcgccgagcccttccccgtgggctgcagccagctgctgaaggagagcgagaagcccctgcagaccggcctgcccaccggcctgaccgagaaccagagcggcggccccctgggcgtggacagccccagcgccgagctggacaagaaggccaacctgctgaagtgcgagtactgcggcaagtacgcccccgccgagcagttcagaggcagcaagagattctgcagcatgacctgcgccaagagatacaacgtgagctgcagccaccagttcagactgaagagaaagaagatgaaggagttccaggaggccaactacgccagagtgagaagaagaggccccagaagaagcagcagcgacatcgccagagccaagatccagggcaagtgccacagaggccaggaggacagcagcagaggcagcgacaacagcagctacgacgaggccctgagccccaccagccccggccccctgagcgtgagagccggccacggcgagagagacctgggcaaccccaacaccgccccccccacccccgagctgcacggcatcaaccccgtgttcctgagcagcaaccccagcagatggagcgtggaggaggtgtacgagttcatcgccagcctgcagggctgccaggagatcgccgaggagttcagaagccaggagatcgacggccaggccctgctgctgctgaaggaggagcacctgatgagcgccatgaacatcaagctgggccccgccctgaagatctgcgccaagatcaacgtgctgaaggagacctag

SEQ ID NO: 313283 - DNA, 1833 bp, Artificial Sequence
  derived and/or modified sequence
atgcagggcagcacccagaaggccatcccccccggcgccagccccgtgagcagcctgagccaggccagcagccaggccctggccgtggcccaggccagcagcggcgccaccaaccagagcctgaacctgagccaggccggcggcggcagcggcaacagcatccccggcagcatgggccccggcggcggcggccaggcccacggcggcctgggccagctgcccagcagcggcatgggcggcggcagctgccccagaaagggcaccggcgtggtgcagcccctgcccgccgcccagaccgtgaccgtgagccagggcagccagaccgaggccgagagcgccgccgccaagaaggccgaggccgacggcagcggccagcagaacgtgggcatgaacctgaccagaaccgccacccccgcccccagccagaccctgatcagcagcgccacctacacccagatccagccccacagcctgatccagcagcagcagcagatccacctgcagcagaagcaggtggtgatccagcagcagatcgccatccaccaccagcagcagttccagcacagacagagccagctgctgcacaccgccacccacctgcagctggcccagcagcagcagcagcagcagcagcagcagcagcagcagcagcagccccaggccaccaccctgaccgccccccagcccccccaggtgccccccacccagcagggcaagccccagaccctggccgtgaagagaaaggccgacagcgaggaggagagagacgacgtgagcaccctgggcagcatgctgcccgccaaggccagccccgtggccgagagccccaaggtgatggacgagaagagcagcctgggcgagaaggccgagagcgtggccaacgtgaacgccaacacccccagcagcgagctggtggccctgacccccgcccccagcgtgcccccccccaccctggccatggtgagcagacagatgggcgacagcaagcccccccaggccatcgtgaagccccagatcctgacccacatcatcgagggcttcgtgatccaggagggcgccgagcccttccccgtgggctgcagccagctgctgaaggagagcgagaagcccctgcagaccggcctgcccaccggcctgaccgagaaccagagcggcggccccctgggcgtggacagccccagcgccgagctggacaagaaggccaacctgctgaagtgcgagtactgcggcaagtacgcccccgccgagcagttcagaggcagcaagagattctgcagcatgacctgcgccaagagatacaacgtgagctgcagccaccagttcagactgaagagaaagaagatgaaggagttccaggaggccaactacgccagagtgagaagaagaggccccagaagaagcagcagcgacatcgccagagccaagatccagggcaagtgccacagaggccaggaggacagcagcagaggcagcgacaacagcagctacgacgaggccctgagccccaccagccccggccccctgagcgtgagagccggccacggcgagagagacctgggcaaccccaacaccgccccccccacccccgagctgcacggcatcaaccccgtgttcctgagcagcaaccccagcagatggagcgtggaggaggtgtacgagttcatcgccagcctgcagggctgccaggagatcgccgaggagttcagaagccaggagatcgacggccaggccctgctgctgctgaaggaggagcacctgatgagcgccatgaacatcaagctgggccccgccctgaagatctgcgccaagatcaacgtgctgaaggagacctag

SEQ ID NO: 313284 - protein, 67 aa, Artificial Sequence
  derived and/or modified sequence
MNGHISNHPSSFGMYPSQMNGYGSSPTFSQTDREHGSKTSAKALYEQRKNYARDSVSSVSDISQYRV

SEQ ID NO: 313285 - DNA, 543 bp, Artificial Sequence
  derived and/or modified sequence
gtagaagtgacttgaagaaagagcgagaagtatagaagggcgcaggcgctagttcagtgctcgtgagcaaacaccgtctacaagattcgagtcaaacaacgtgagaacttgaaatacgtctccattctttttccttagtactctcgttcattcacttacgaacacacaagtgaaagacacaatgaatggtcatatttctaatcatcccagtagttttggaatgtacccatctcagatgaatggctacggatcatcacctaccttttcccagacggacagagaacatggttcaaaaacaagtgcaaaggccctttatgaacaaaggaagaattatgcacgggacagtgtcagcagtgtgtcagatatatctcaataccgtgttgaacacttgactacctttgtcctggatcggaaagatgctatgatcactgttgatgatggaataaggaaattgaaattgcttgatgccaagggcaaagtgtggactcaagatatgattcttcaagtggatgacagagctgtgagcctgattgatttagaatc

SEQ ID NO: 313286 - DNA, 577 bp, Artificial Sequence
  derived and/or modified sequence
acaggcagcagctagcgaggcggtctcgcccggcgcgaggccggcgctgtgctcgcctcggagatcgctgctctttagctgggtgcagaaggcggctccgcggctcgcggacgactggctgggcgcgaatcagattggggggctttctcccggtcccctcccacctcgtctgggctcgcggcgtctccggggaaagccgtggccccgagggcggatccgaggacggtcagtaaaatcttcccctgaggacattgtgattgaactgagatctgaagaatgagacagaattaactcgaagtgaccagatcttgaatattatttctttatgtaggctttctgtgctcttccaatcagaaacacacaagtgaaagacacaatgaatggtcatatttctaatcatcccagtagttttggaatgtacccatctcagatgaatggctacggatcatcacctaccttttcccagacggacagagaacatggttcaaaaacaagtgcaaaggccctttatgaacaaaggaagaattatgcacgggacagtgtcagcagtgtgtcagatatatctcaataccgtgtt

SEQ ID NO: 313287 - protein, 68 aa, Artificial Sequence
  derived and/or modified sequence
MNGHISNHPSSFGMYPSQMNGYGSSPTFSQTDREHGSKTSAKALYEQRKNYARDSVSSVSDISQYRVE

SEQ ID NO: 313288 - protein, 691 aa, Artificial Sequence
  derived and/or modified sequence
MNGHISNHPSSFGMYPSQMNGYGSSPTFSQTDREHGSKTSAKALYEQRKNYARDSVSSVSDISQYRVEHLTTFVLDRKDAMITVDDGIRKLKLLDAKGKVWTQDMILQVDDRAVSLIDLESKNELENFPLNTIQHCQAVMHSCSYDSVLALVCKEPTQNKPDLHLFQCDEVKANLISEDIESAISDSKGGKQKRRPDALRMISNADPSIPPPPRAPAPAPPGTVTQVDVRSRVAAWSAWAADQGDFEKPRQYHEQEETPEMMAARIDRDVQILNHILDDIEFFITKLQKAAEAFSELSKRKKNKKGKRKGPGEGVLTLRAKPPPPDEFLDCFQKFKHGFNLLAKLKSHIQNPSAADLVHFLFTPLNMVVQATGGPELASSVLSPLLNKDTIDFLNYTVNGDERQLWMSLGGTWMKARAEWPKEQFIPPYVPRFRNGWEPPMLNFMGATMEQDLYQLAESVANVAEHQRKQEIKRLSTEHSSVSEYHPADGYAFSSNIYTRGSHLDQGEAAVAFKPTSNRHIDRNYEPLKTQPKKYAKSKYDFVARNNSELSVLKDDILEILDDRKQWWKVRNASGDSGFVPNNILDIVRPPESGLGRADPPYTHTIQKQRMEYGPRPADTPPAPSPPPTPAPVPVPLPPSTPAPVPVSKVPANITRQNSSSSDSGGSIVRDSQRHKTSGGPKEISDGGSAR

SEQ ID NO: 313289 - protein, 128 aa, Artificial Sequence
  derived and/or modified sequence
MNGHISNHPSSFGMYPSQMNGYGSSPTFSQTDREHGSKTSAKALYEQRKNYARDSVSSVSDISQYRVEHLTTFVLDRKDAMITVDDGIRKLKLLDAKGKVWTQDMILQVDDRAVSLIDLESKNELENF

SEQ ID NO: 313290 - DNA, 2469 bp, Artificial Sequence
  derived and/or modified sequence
atgaatggtcatatctcgaatcacccaagctcctttggcatgtaccccagtcagatgaacggctatggcagcagccccacattctcccaaacggaccgagagcatggctcaaaaacctctgccaaggccttatatgagcagaggaagaactacgcacgagacagcgtgtcctccgtgtctgacatctcacagtacagggtggagcacctcacaacgttcgttttggacagaaaggatgctatgatcacggtggacgacggaattaggaagttgaaactgttggatgccaaaggcaaggtgtggactcaagacatgatcctgcaggtggacgatcgggcagtttccctcattgacttggagtctaagaacgaactggaaaatttcccgctcaatacaattcagcactgccaggccgtgatgcacagctgctcctacgactccgtactggctttagtttgtaaagagccaacacagaacaaacccgatctgcatctgttccagtgtgacgaggtcaaggccaatctgatttcggaggatatcgagtctgccatctcggattccaagggaggcaaacagaagagacggccagacgcactgagaatgatcagtaatgcagacccttcaatcccacctccaccaagggcaccagctccagctccacccgggaccgtaacacaggtggacgtaaggtcccgagtcgccgcctggagcgcctgggccgctgatcagggcgatttcgaaaagcctcgacagtaccatgagcaggaagaaaccccagaaatgatggcggctcggatagatcgggatgtgcagatactgaatcacatcctcgatgacatcgaatttttcatcacaaaacttcaaaaggcagccgaggcattctcggaattgagcaagcgcaaaaaaaacaaaaagggaaagcgaaaggggcctggggagggggtgctgacactgcgcgccaagcctcctccccctgacgagttccttgactgtttccaaaagtttaagcacggctttaatctgctggctaagctcaaatctcatatccaaaatccctctgctgccgatctggtccactttctgttcacccccctgaacatggtcgtgcaggccactggaggaccagaactggcctcttccgtgctgtccccactgctgaataaggatactatcgactttctcaactataccgtcaacggggatgagcgccagctttggatgtctttgggaggaacctggatgaaggcacgcgcagagtggccaaaggagcagttcatcccaccttacgtgcctcggttcagaaatggatgggagcccccgatgttgaatttcatgggcgcaaccatggagcaggacctctatcagttggcagaaagtgtcgcgaatgtggccgagcaccagagaaaacaggagatcaaaaggttgtcaactgaacatagctccgtgtctgagtaccatccggccgacggctatgcctttagctccaacatctacacaagagggagccacctggaccaaggcgaggccgctgtggcattcaagcccacgtcgaataggcacatcgaccgcaactacgaaccactgaagacacagccgaaaaagtacgctaagtcaaagtacgatttcgtggctcgtaataattctgagctcagcgtgctgaaggacgacatccttgagattttggacgacagaaagcagtggtggaaagttcggaatgccagcggcgatagtggttttgtgccaaacaatatactggacatcgttcggcctccagaaagtggccttggccgggcggatcccccatacactcatacaatccaaaagcagaggatggagtacggaccacggcccgcagataccccaccggccccatccccacctcccacacctgcacccgtgccagttcccctgcccccttccacccccgcgcccgttcccgtgtcaaaagtgcccgccaatataacccgtcaaaactcatcaagttcagactctggaggtagcattgtacgagactcacagaggcacaaacaattgccagttgacaggaggaaatcccagatggaggaggtgcaggatgaattgatacaccggcttacaatcgggaggtccgcggcacagaagaaatttcacgtgcctaggcagaatgtgcccgttattaatataacatatgactcaactcctgaggacgtcaagacctggttacagtccaaagggttcaaccctgttaccgtgaacagcctgggcgtccttaacggcgctcagcttttctccctgaacaaagacgaattgcgcacggtgtgccctgagggcgcccgagtttactcacagatcacagttcagaaagctgctctggaggactctagcggttcgtccgaactgcaggagataatgcggagacgtcaagagaaaatatccgcagccgcatctgacagcggagtggagtcattcgatgagggctcatctcactag

SEQ ID NO: 313291 - DNA, 366 bp, Artificial Sequence
  derived and/or modified sequence
atgaatggccatattagcaatcacccatccagttttggcatgtatccatcccagatgaacggatacgggtcttctcctacatttagtcagactgatcgagagcatgggagtaaaacatccgccaaggccttgtacgaacagaggaagaattatgccagagatagtgttagctccgtgtcagatattagccagtatagagtcgagcacctgacgacatttgtgctggatcgtaaggacgccatgattacagtggatgacggtatacggaaactgaaactcctggatgccaagggaaaggtgtggacgcaggatatgatcctccaggtggacgatcgggcagtgagcctgatcgatcttgagagctag

SEQ ID NO: 313292 - DNA, 207 bp, Artificial Sequence
  derived and/or modified sequence
atgaacggacacatttctaaccatccctccagctttggcatgtatccatctcagatgaacggctatgggtcttcaccaactttctcccaaaccgaccgggaacacgggagcaaaaccagcgccaaggcgctttatgagcagcggaaaaattacgcacgcgactccgtgagttcggtatctgacatcagccagtacagagtggagtag

SEQ ID NO: 313293 - DNA, 1689 bp, Artificial Sequence
  derived and/or modified sequence
atgatggcagcgcgaattgaccgcgacgtgcagatcctcaatcatattctggatgacatcgaattcttcattaccaagctgcagaaggcagcagaggctttcagtgaattgtctaagcgcaagaagaacaagaaaggcaaaaggaaaggcccaggtgaaggcgttctgactctgcgggcaaagcctcctccccctgatgaatttctggactgcttccagaaattcaagcacggcttcaacctgttagccaagctgaaaagccacattcagaacccctccgccgcggatctcgtgcacttcctgttcacgccactaaatatggtggtccaggccactggaggtccagagctggcctcatctgtcttatccccactgctcaataaggacacgatagattttttaaactatactgtgaatggtgacgaaaggcagctgtggatgagcctggggggtacatggatgaaagctcgggcagagtggccgaaagagcagttcattcccccgtacgtgcccaggtttagaaacggctgggaaccaccaatgttaaattttatgggagcaaccatggaacaggatttatatcaactggctgagtcagtggccaatgtggccgaacatcagagaaaacaggagataaaacgcctgtcaaccgaacattcgtctgttagcgagtatcatccagctgatggctatgccttctcttcaaatatttacacaagggggtctcacctggatcagggggaggcagccgtcgcgttcaaacccaccagtaaccgccacattgaccgcaactacgagcctctgaagacacaacctaagaagtacgctaaatccaagtatgattttgtagctcgcaacaattccgagctctccgtcctcaaagacgacatccttgaaatactggatgatagaaaacaatggtggaaggtgcgaaacgcatcgggcgatagtggattcgtgcctaacaacattctggacatcgtcaggccccctgaatccggtttgggccgcgccgatcctccctacacccataccatccagaaacagcgaatggagtatggcccccgccccgccgacactccacccgcaccttcaccgccgccaacccctgctcccgtgcctgtcccactgcccccatctaccccagccccggttcctgtttcaaaagtgccagccaacatcacccgccaaaattcctcctcctcagacagcggaggctccatcgtccgcgattcacagaggcataaacagttgcctgtcgatcgacgaaaatctcagatggaggaagttcaggatgagcttattcataggctgacgatcggacgcagcgctgcacagaaaaagtttcacgtgcccagacagaacgtgccagtgatcaacatcacttacgattctacccctgaagacgtcaagacctggctgcagtctaaggggtttaaccctgtcacagtcaattcccttggcgtcctgaatggtgcccagctgttcagtcttaataaagatgagttaagaaccgtgtgtcctgaaggggctagggtgtacagccagatcacagttcagaaggccgcgctcgaggattcatcaggatcatcagagcttcaggagattatgcggcgtcgccaagagaaaatctctgctgctgcaagcgactccggcgtggaatcttttgatgagggcagttcccattag

SEQ ID NO: 313294 - DNA, 1689 bp, Artificial Sequence
  derived and/or modified sequence
atgatggctgcccggattgaccgtgacgtgcagattttgaatcacattttggacgacatcgagttctttattacaaagctccaaaaagcagccgaggcattttcagaattgagcaaacgcaaaaaaaataaaaaaggcaaaaggaaaggccctggggagggcgttttgactctgagggctaagcctcccccccccgatgagtttctggactgctttcaaaagtttaaacatggatttaatctgctggccaaactgaaatcacacatacagaacccctcagccgccgatctggtgcactttctatttacccctctgaatatggtcgtccaagccacgggtggaccagagcttgcttctagtgtgctatcaccactgctgaataaggataccattgatttcctgaactacaccgtcaacggcgacgagcgccaactctggatgagcctggggggtacctggatgaaggcaagggccgagtggcctaaagagcaattcataccaccatacgtgccccgcttcagaaatggctgggaaccacccatgctgaactttatgggcgcgaccatggagcaagatctgtatcagctggcagagagcgttgccaacgtagccgagcatcagcgcaagcaggagataaagcggctatcaactgagcattctagcgtatccgagtatcatcccgctgacggctacgcttttagcagcaacatctacacccgcggttcgcatttagaccaaggcgaggcggccgtggcattcaagcctaccagcaatcgacacattgacaggaattacgagccgctcaagacgcagcctaaaaaatatgcaaagagtaagtatgattttgtcgcgcgtaacaattctgaacttagcgttctgaaggacgatatactggagatcctggatgatcgaaaacagtggtggaaggtcaggaatgccagcggggattcaggattcgttccaaataacatattagatattgtaaggcctcccgagtctggactcggacgtgccgacccgccctacacacataccattcagaaacagcgaatggaatatgggcctcgcccagccgatacacccccagcacctagccctccgccaaccccagcccccgtccccgtacctctcccgccctccaccccagcacccgtacctgtgagcaaagtgcccgccaatattaccagacagaactcatcgagctcagactcaggaggctctattgttcgggatagccaaaggcacaaacaattgcctgtggaccgccgcaagtcccagatggaggaagttcaggacgaactgatccacaggttgaccattggaagatccgcagctcagaagaaattccatgtgccaaggcagaatgttcccgtcattaatataacatatgattctactcctgaagatgttaagacatggctgcagtcaaagggcttcaacccagtaacagtgaactccctgggcgtgctgaatggggcccagctcttctctttgaataaggatgagctgaggactgtttgtcctgagggagcacgggtatactctcagataactgttcagaaggcagcccttgaggactcctccggaagctctgaactccaagaaatcatgagacgccggcaggagaaaatatcagccgccgcatcagatagcggagtggaatcatttgatgaggggagtagtcattag

SEQ ID NO: 313295 - DNA, 2076 bp, Artificial Sequence
  derived and/or modified sequence
atgaatgggcacatctccaaccacccaagcagctttggcatgtatccatcacagatgaatgggtacggctccagcccaactttttcccagaccgacagagagcacggttcaaagactagcgctaaggcactgtacgagcagcgcaagaactatgcccgcgatagcgtgagctccgtttccgacatctctcagtacagagtcgagcacctaaccaccttcgtccttgacagaaaagacgccatgatcacagtagacgacggtatccggaagctgaagctgctggacgctaagggaaaggtgtggacacaggacatgatccttcaggtggatgaccgcgccgtatctcttattgacctcgaaagcaaaaatgagctggagaacttccctctcaatacaatccagcactgtcaggctgtaatgcatagctgcagttacgactccgtgctggccctggtgtgcaaagagcccacccagaacaagcccgacctccaccttttccaatgcgatgaagtcaaggcaaatctgatcagcgaagacattgagtcggcaatctccgatagtaaaggtgggaaacaaaagaggcgaccagatgcactccggatgattagcaacgctgatccctcaataccacctcccccccgcgcaccagccccggctccaccagggacggttactcaggtagacgtgagatctcgcgtcgccgcctggtcagcatgggcggcggaccagggcgatttcgaaaagccaaggcagtatcacgagcaggaggaaactccagagatgatggcggccagaattgacagggacgtgcaaattctcaatcacatcctggatgacattgaatttttcatcacaaagctgcagaaggccgcagaggcattttccgagctctcaaaaaggaaaaaaaacaagaagggcaagcgaaaagggcccggagagggtgtgttaactctgagggctaaacctccaccccccgacgaattcctggattgcttccagaaattcaaacacgggtttaacctgctagccaagcttaagtctcacatacaaaatccgtcagcagctgaccttgtacactttttgttcactcctctgaacatggtggtgcaggctaccggcgggcctgagctagcgagcagcgtactgtcaccactgctgaacaaggatacaattgacttcttgaattacactgtgaacggagacgagagacagctttggatgagccttggcggcacctggatgaaggcacgcgcagagtggcctaaggagcagttcattccaccatatgtcccccgctttcggaacggctgggagccccccatgcttaactttatgggagccacaatggagcaagacttataccagctggctgagtccgtggccaatgttgccgagcaccaaagaaagcaggagatcaagagactgtctactgaacacagctcagtgagtgaatatcaccctgcagatggttacgccttttctagtaacatttacactcgcggcagccacctcgatcaaggtgaagccgctgttgcctttaagccaacgtctaacagacacatcgatcgcaactacgagcctctgaagacccagccgaagaaatatgcaaagagcaaatatgacttcgttgcccgcaacaacagcgaactcagtgtattgaaggacgacatattggaaatcttagatgaccggaaacaatggtggaaggtccgtaatgctagcggcgactcaggtttcgttcctaataacatcttggacatagtgcgaccccccgaaagcggactgggccgcgccgatcccccatatactcacacaattcagaagcagcgtatggagtatgggccccgccccgccgacactcctccagcccctagccctcctcccacacccgcccccgtgcctgtgccgctccctcccagcacacctgccccagtcccagtctcaaaggtccctgcgaatataacccgacagaattccagcagcagtgactccggaggatctattgtacgagattcgcagcgtcataagaccagcggagggccgaaggaaatctcagacggtggttccgctagatag

SEQ ID NO: 313296 - DNA, 207 bp, Artificial Sequence
  derived and/or modified sequence
atgaacggccatatcagtaaccatccttcctcattcggcatgtacccttcccagatgaatggatacgggagcagccctaccttctcacagaccgatagagaacacggctcaaaaacttcagccaaggctctgtacgaacaacgcaaaaattatgctagagattccgtctccagcgtcagtgacattagtcaatatcgcgtggagtag

SEQ ID NO: 313297 - DNA, 2469 bp, Artificial Sequence
  derived and/or modified sequence
atgaatggccacattagtaaccatccctccagcttcgggatgtacccctctcagatgaatggatatggttcctctccaactttttcccagacagaccgcgaacacgggtccaagaccagcgccaaagcactgtacgagcagcgcaagaattacgctagagattccgtgagctctgtgtccgatatcagccaataccgcgtcgaacaccttacaaccttcgtgctagacaggaaggacgccatgatcacagtggatgacggaatcaggaagcttaagctgttagatgctaaaggcaaggtgtggacacaggacatgattttgcaggtagacgaccgagcagtgtcactgattgatctggagtcaaagaatgaactcgagaacttcccccttaacaccatacagcattgtcaggcagttatgcactcatgctcttatgatagcgtgctggccctcgtgtgtaaggagcccactcaaaacaagccagatttgcacctttttcagtgtgatgaagtgaaggcaaacttgatctcggaagatatcgagtccgccatcagcgattctaagggcgggaagcaaaaaagacgccccgatgccctcaggatgatttccaacgccgacccttccattcccccacctcctagggctccagcccccgcccctcccgggactgtgactcaagtggatgtccggtcccgtgtagcagcatggagcgcatgggctgccgaccagggagattttgagaagccccgccaatatcatgagcaagaggagactccagagatgatggccgctcggattgaccgggacgtgcagatactgaaccacatactggatgacattgagttcttcattactaaactacagaaggctgccgaggctttcagtgagctctccaagcgcaagaaaaacaaaaagggcaaacgcaaggggccgggggagggagtgctcaccttgcgggccaagcccccacctccggatgagttcctggattgcttccaaaaattcaagcatgggttcaatcttttggccaagctgaagtctcacatccagaatccctcggccgccgatttggttcattttttgtttaccccactaaacatggtcgttcaggccacagggggtcctgaactggcctcatcagttctatctcctcttcttaataaggacaccatcgattttctgaactacaccgttaacggagacgagcggcagttgtggatgtcactaggcggcacctggatgaaggcccgggctgaatggcctaaagaacaatttattcctccctacgtaccccgcttcagaaacggctgggaaccaccaatgttgaattttatgggggcaaccatggaacaggatttgtaccagctcgccgagagcgtagccaatgttgcggaacaccaacgcaaacaagaaatcaagagattaagtacagagcattcatctgtctccgaataccaccccgccgacggctatgccttctcttctaatatttatacccggggctcccacctggatcagggcgaggccgcagttgcttttaaacccacttccaacagacacatcgatagaaactacgaaccattgaagacacagccaaagaagtatgctaaatcgaaatatgacttcgtcgctaggaataactccgaactttcagttctaaaagacgacatccttgaaattctcgatgatcgcaagcaatggtggaaagtgcggaacgccagcggggactctggattcgtacccaataacattctcgacatcgtcaggccccccgagagtggcctggggcgagcagatcctccttatacccacaccatccaaaaacaaagaatggaatatggcccccggcccgccgacacaccacccgcccctagtcctccccccacacccgccccagtgccggttcccctacccccctcaaccccagccccggtacctgtgtcaaaagtcccggcgaacattactcggcagaattctagtagctccgatagcggcgggagcatagtcagagattcacagaggcacaaacaactgccggtggaccggcgcaagagccagatggaagaggttcaagatgagctcattcacaggctcactatcggacgctctgcggctcagaagaaatttcacgtcccccgacaaaatgtccccgtcatcaacatcacttatgattctacaccagaggacgtgaagacatggttgcaaagcaagggctttaatcccgtaacagtaaactccctgggagtgcttaacggcgcccaactattttcgctgaacaaggatgagctgagaaccgtctgtccagagggcgccagggtctactcccagattacagttcaaaaggccgcacttgaagattccagtggcagcagcgaattacaggaaattatgcgtaggcggcaagaaaagatctctgctgccgcaagcgatagcggagtggagtcctttgatgagggctcttcacactag

SEQ ID NO: 313298 - DNA, 2469 bp, Artificial Sequence
  derived and/or modified sequence
atgaacgggcacatcagtaaccatccctcttcattcgggatgtaccccagccagatgaacggatacggaagtagccccactttcagccaaactgaccgggaacacggatcaaagacctcagccaaggcgctgtatgagcagaggaaaaattatgcccgtgactccgtgagtagcgtcagcgacatctcccagtatagagtggagcatctgactacttttgtgctagacaggaaagacgctatgataactgtggacgatggaattagaaagctaaagctgctagacgccaaaggcaaggtgtggactcaggacatgatccttcaggtggacgaccgagcagtgagcttgattgacttagagtcgaagaacgagttggagaatttcccactgaacaccattcagcattgccaggctgttatgcattcctgtagctatgatagcgtactagctctggtgtgtaaagaacctactcaaaataaacccgatcttcacttgtttcagtgtgatgaggtgaaggccaatctgatcagtgaggatatcgaatcagctatttccgactccaagggcgggaagcagaagcgccgccctgacgctctgagaatgatttccaatgccgatccctccatccctccacctcctcgggcccctgcccccgccccacccgggaccgtgacccaggtcgatgtgcggagtagagtggctgcatggagcgcctgggcggccgatcagggcgattttgagaaaccacgtcaataccacgaacaggaggagacaccagagatgatggcggccaggattgaccgggacgtgcaaatcttaaaccacattctcgacgatatagaattcttcatcaccaaactgcagaaagctgcagaggcattttccgaactgagcaaaagaaagaaaaataaaaagggcaagcggaaggggccaggggaaggcgttctcactctccgcgccaaacctccccccccggacgaatttctggactgcttccaaaagtttaaacacggctttaacctgctggcaaagcttaaaagccacattcagaatccatctgctgcagatctggtccactttctgtttactcccctgaacatggtggtgcaagcgaccggtggtccagagctagcaagcagcgtgctgtctcccttgctgaataaggatacgattgacttcttgaattacactgtgaacggcgatgaacgtcagctgtggatgtccctgggcgggacgtggatgaaggccagggcagaatggcccaaagagcagtttattcctccttatgtacctcgcttcagaaatggttgggagccccctatgctgaattttatgggcgccacaatggaacaggatttgtaccagctcgcagagtccgtcgctaatgttgcagagcaccagaggaagcaggagataaagcgcttgagtactgagcatagctccgtgtctgaatatcacccggcggatgggtacgccttcagctcgaacatttacacccgcgggagccacttggatcagggcgaggcggccgttgcttttaagcctacaagcaatcgccacatagatcggaattatgaaccactgaagacccaacctaaaaagtacgccaagtcgaaatatgatttcgtggccaggaacaactcggaacttagcgtccttaaggacgatattcttgagattctcgatgatcgaaagcagtggtggaaagtcaggaacgcttccggagacagcgggtttgtgcccaacaatattctggatattgtgcgccccccagaatcaggactggggcgcgccgacccgccgtacacgcatactattcagaaacagagaatggaatacgggccaaggcccgccgacacccccccagccccctccccgcccccaacaccggcccctgttcccgtccctctgccacctagcaccccagcaccagtcccagtcagcaaggtcccagcgaacatcacacgccaaaattcgtccagtagcgatagcggcggatcaatcgttcgtgacagtcaacgtcataagcagctccccgtggaccgcaggaaatcgcagatggaggaagtgcaggacgaactcatacaccgtctgactattggccgcagtgcagcccagaaaaagtttcacgtgccaagacagaatgtccccgtcattaacattacttatgattctacaccggaggacgtcaagacctggctccagtccaagggattcaatccggtgaccgtgaattccctgggagtgttaaacggcgcccagctcttttccttaaacaaagacgagctgcgaactgtgtgccccgagggcgctcgggtttatagtcagatcactgtccagaaagcagcactggaagacagttctggttcaagtgagttgcaggaaattatgagacggaggcaggaaaagatcagcgccgccgcgtctgactctggggtggaaagttttgatgaaggatcctcacattag

SEQ ID NO: 313299 - DNA, 204 bp, Artificial Sequence
  derived and/or modified sequence
atgaacggtcacatcagcaatcacccctcatccttcggcatgtacccgagccagatgaacgggtatgggtcatctccaacgttctcgcagacagatagagagcatggctcaaaaactagcgctaaagctctgtatgaacagagaaaaaattatgctcgggactccgtgtccagtgtgtccgacataagccagtatcgtgtatag

SEQ ID NO: 313300 - DNA, 387 bp, Artificial Sequence
  derived and/or modified sequence
atgaacgggcatatcagcaatcacccatcaagtttcgggatgtatccgtctcaaatgaacggctatggtagctcccccacattctcacagaccgatagggagcacggttctaagaccagtgccaaagccctgtacgaacagcgaaagaactacgctcgggatagcgtgagcagcgtaagcgatatttcacaatatcgagttgagcacttgaccacttttgttctggaccgaaaagacgccatgattacagtggacgacgggattaggaaactgaagctcctagacgccaaaggcaaagtgtggacgcaagatatgatcctccaagtagacgaccgggccgtgagcttgatcgacctagagtcaaagaatgagctggagaatttctag

SEQ ID NO: 313301 - DNA, 2469 bp, Artificial Sequence
  derived and/or modified sequence
atgaatggccacatcagcaaccaccccagcagctttggcatgtaccccagccagatgaatggctacggcagcagccccaccttcagccagacagaccgggagcacggcagcaagaccagcgccaaggccctgtatgagcagaggaagaactatgcccgggacagcgtgtcctctgtgtctgacatcagccagtacagagtggagcacctgaccacctttgtgctggacaggaaggatgccatgatcaccgtggatgatggcatcaggaagctgaagctgctggatgccaagggcaaggtgtggacccaggacatgatcctgcaggtggatgacagagctgtgtccctgattgacctggagagcaagaatgagctggagaacttccccctgaacaccatccagcactgccaggccgtgatgcacagctgcagctatgattctgtgctggccctggtgtgcaaggagcccacccagaacaagccagacctgcacctgttccagtgtgatgaggtgaaggccaacctgatcagcgaggacatcgagagcgccatcagtgacagcaagggcggcaagcagaagaggaggccagatgccctgaggatgatcagcaatgctgaccccagcatccccccaccaccccgggccccagccccagcccctcctggcaccgtgacccaggtggatgtgcgcagccgggtggccgcctggagcgcctgggccgctgaccagggcgactttgagaagccccggcagtaccacgagcaggaggagaccccagagatgatggccgccagaattgacagagatgtgcagatcctgaaccacatcctggatgacatcgagttcttcatcaccaagctgcagaaggctgctgaggccttcagcgagctgagcaagaggaagaagaacaagaagggcaagaggaaaggacctggagagggcgtgctgaccctgcgggccaagcccccacctccagatgagttcctggactgcttccagaagttcaagcacggcttcaacctgctggccaagctgaagagccacatccagaaccccagcgctgctgacctggtgcacttcctgttcacccccctgaacatggtggtgcaggccaccggcggccctgagctggccagctctgtgctgagccccctgctgaacaaggacaccatcgacttcctgaactacacagtgaatggagatgagcggcagctgtggatgagcctgggcggcacctggatgaaggcccgggcagagtggcccaaggagcagttcatccccccctacgtgccccgcttcagaaatggctgggagccccccatgctgaacttcatgggcgccaccatggagcaggacctgtaccagctggccgagagcgtggccaacgtggccgagcaccagaggaagcaggagatcaagaggctgagcacagagcacagctctgtgtctgagtaccacccagcagatggctacgccttcagcagcaacatctacacccggggcagccacctggaccagggcgaggccgctgtggccttcaagcccaccagcaacagacacatcgacagaaattatgagcccctgaagacccagcccaagaagtatgccaagagcaaatatgactttgtggccaggaacaacagcgagctgtctgtgctgaaggatgacatcctggagatcctggatgacaggaagcagtggtggaaggtgagaaatgccagcggggacagcggctttgtgcccaacaacatcctggacatcgtgcggcccccagagagcggcctgggccgggctgaccccccctacacccacaccatccagaagcagaggatggagtatggccccaggcctgctgacaccccaccagcccccagccccccacccaccccagcccctgtgcctgtgcccctgccccccagcaccccagcccctgtgcctgtgtccaaggtgcctgccaacatcacccggcagaacagcagcagcagtgacagcggcggcagcatcgtgcgggacagccagaggcacaagcagctgcctgtggacaggaggaagagccagatggaggaggtgcaggatgagctgatccaccggctgaccatcggccgctctgctgcccagaagaagttccacgtgccccggcagaatgtgcctgtgatcaacatcacctatgacagcaccccagaagatgtgaagacctggctgcagagcaagggcttcaaccctgtgacagtgaacagcctgggcgtgctgaatggagcccagctgttcagcctgaacaaggatgagctgaggacagtgtgcccagagggcgcccgggtgtacagccagatcaccgtgcagaaggccgccctggaggacagcagcggcagcagcgagctgcaggagatcatgagaagacggcaggagaagatctctgctgctgccagtgacagcggcgtggagagctttgatgagggcagcagccactag

SEQ ID NO: 313302 - DNA, 366 bp, Artificial Sequence
  derived and/or modified sequence
atgaatggccacatcagcaaccaccccagcagctttggcatgtaccccagccagatgaatggctacggcagcagccccaccttcagccagacagaccgggagcacggcagcaagaccagcgccaaggccctgtatgagcagaggaagaactatgcccgggacagcgtgtcctctgtgtctgacatcagccagtacagagtggagcacctgaccacctttgtgctggacaggaaggatgccatgatcaccgtggatgatggcatcaggaagctgaagctgctggatgccaagggcaaggtgtggacccaggacatgatcctgcaggtggatgacagagctgtgtccctgattgacctggagagctag

SEQ ID NO: 313303 - DNA, 207 bp, Artificial Sequence
  derived and/or modified sequence
atgaatggccacatcagcaaccaccccagcagctttggcatgtaccccagccagatgaatggctacggcagcagccccaccttcagccagacagaccgggagcacggcagcaagaccagcgccaaggccctgtatgagcagaggaagaactatgcccgggacagcgtgtcctctgtgtctgacatcagccagtacagagtggagtag

SEQ ID NO: 313304 - DNA, 1689 bp, Artificial Sequence
  derived and/or modified sequence
atgatggccgccagaattgacagagatgtgcagatcctgaaccacatcctggatgacatcgagttcttcatcaccaagctgcagaaggctgctgaggccttcagcgagctgagcaagaggaagaagaacaagaagggcaagaggaaaggacctggagagggcgtgctgaccctgcgggccaagcccccacctccagatgagttcctggactgcttccagaagttcaagcacggcttcaacctgctggccaagctgaagagccacatccagaaccccagcgctgctgacctggtgcacttcctgttcacccccctgaacatggtggtgcaggccaccggcggccctgagctggccagctctgtgctgagccccctgctgaacaaggacaccatcgacttcctgaactacacagtgaatggagatgagcggcagctgtggatgagcctgggcggcacctggatgaaggcccgggcagagtggcccaaggagcagttcatccccccctacgtgccccgcttcagaaatggctgggagccccccatgctgaacttcatgggcgccaccatggagcaggacctgtaccagctggccgagagcgtggccaacgtggccgagcaccagaggaagcaggagatcaagaggctgagcacagagcacagctctgtgtctgagtaccacccagcagatggctacgccttcagcagcaacatctacacccggggcagccacctggaccagggcgaggccgctgtggccttcaagcccaccagcaacagacacatcgacagaaattatgagcccctgaagacccagcccaagaagtatgccaagagcaaatatgactttgtggccaggaacaacagcgagctgtctgtgctgaaggatgacatcctggagatcctggatgacaggaagcagtggtggaaggtgagaaatgccagcggggacagcggctttgtgcccaacaacatcctggacatcgtgcggcccccagagagcggcctgggccgggctgaccccccctacacccacaccatccagaagcagaggatggagtatggccccaggcctgctgacaccccaccagcccccagccccccacccaccccagcccctgtgcctgtgcccctgccccccagcaccccagcccctgtgcctgtgtccaaggtgcctgccaacatcacccggcagaacagcagcagcagtgacagcggcggcagcatcgtgcgggacagccagaggcacaagcagctgcctgtggacaggaggaagagccagatggaggaggtgcaggatgagctgatccaccggctgaccatcggccgctctgctgcccagaagaagttccacgtgccccggcagaatgtgcctgtgatcaacatcacctatgacagcaccccagaagatgtgaagacctggctgcagagcaagggcttcaaccctgtgacagtgaacagcctgggcgtgctgaatggagcccagctgttcagcctgaacaaggatgagctgaggacagtgtgcccagagggcgcccgggtgtacagccagatcaccgtgcagaaggccgccctggaggacagcagcggcagcagcgagctgcaggagatcatgagaagacggcaggagaagatctctgctgctgccagtgacagcggcgtggagagctttgatgagggcagcagccactag

SEQ ID NO: 313305 - DNA, 2076 bp, Artificial Sequence
  derived and/or modified sequence
atgaatggccacatcagcaaccaccccagcagctttggcatgtaccccagccagatgaatggctacggcagcagccccaccttcagccagacagaccgggagcacggcagcaagaccagcgccaaggccctgtatgagcagaggaagaactatgcccgggacagcgtgtcctctgtgtctgacatcagccagtacagagtggagcacctgaccacctttgtgctggacaggaaggatgccatgatcaccgtggatgatggcatcaggaagctgaagctgctggatgccaagggcaaggtgtggacccaggacatgatcctgcaggtggatgacagagctgtgtccctgattgacctggagagcaagaatgagctggagaacttccccctgaacaccatccagcactgccaggccgtgatgcacagctgcagctatgattctgtgctggccctggtgtgcaaggagcccacccagaacaagccagacctgcacctgttccagtgtgatgaggtgaaggccaacctgatcagcgaggacatcgagagcgccatcagtgacagcaagggcggcaagcagaagaggaggccagatgccctgaggatgatcagcaatgctgaccccagcatccccccaccaccccgggccccagccccagcccctcctggcaccgtgacccaggtggatgtgcgcagccgggtggccgcctggagcgcctgggccgctgaccagggcgactttgagaagccccggcagtaccacgagcaggaggagaccccagagatgatggccgccagaattgacagagatgtgcagatcctgaaccacatcctggatgacatcgagttcttcatcaccaagctgcagaaggctgctgaggccttcagcgagctgagcaagaggaagaagaacaagaagggcaagaggaaaggacctggagagggcgtgctgaccctgcgggccaagcccccacctccagatgagttcctggactgcttccagaagttcaagcacggcttcaacctgctggccaagctgaagagccacatccagaaccccagcgctgctgacctggtgcacttcctgttcacccccctgaacatggtggtgcaggccaccggcggccctgagctggccagctctgtgctgagccccctgctgaacaaggacaccatcgacttcctgaactacacagtgaatggagatgagcggcagctgtggatgagcctgggcggcacctggatgaaggcccgggcagagtggcccaaggagcagttcatccccccctacgtgccccgcttcagaaatggctgggagccccccatgctgaacttcatgggcgccaccatggagcaggacctgtaccagctggccgagagcgtggccaacgtggccgagcaccagaggaagcaggagatcaagaggctgagcacagagcacagctctgtgtctgagtaccacccagcagatggctacgccttcagcagcaacatctacacccggggcagccacctggaccagggcgaggccgctgtggccttcaagcccaccagcaacagacacatcgacagaaattatgagcccctgaagacccagcccaagaagtatgccaagagcaaatatgactttgtggccaggaacaacagcgagctgtctgtgctgaaggatgacatcctggagatcctggatgacaggaagcagtggtggaaggtgagaaatgccagcggggacagcggctttgtgcccaacaacatcctggacatcgtgcggcccccagagagcggcctgggccgggctgaccccccctacacccacaccatccagaagcagaggatggagtatggccccaggcctgctgacaccccaccagcccccagccccccacccaccccagcccctgtgcctgtgcccctgccccccagcaccccagcccctgtgcctgtgtccaaggtgcctgccaacatcacccggcagaacagcagcagcagtgacagcggcggcagcatcgtgcgggacagccagaggcacaagaccagcggcggccccaaggagatcagtgatggcggcagcgccaggtag

SEQ ID NO: 313306 - DNA, 204 bp, Artificial Sequence
  derived and/or modified sequence
atgaatggccacatcagcaaccaccccagcagctttggcatgtaccccagccagatgaatggctacggcagcagccccaccttcagccagacagaccgggagcacggcagcaagaccagcgccaaggccctgtatgagcagaggaagaactatgcccgggacagcgtgtcctctgtgtctgacatcagccagtacagagtgtag

SEQ ID NO: 313307 - DNA, 387 bp, Artificial Sequence
  derived and/or modified sequence
atgaatggccacatcagcaaccaccccagcagctttggcatgtaccccagccagatgaatggctacggcagcagccccaccttcagccagacagaccgggagcacggcagcaagaccagcgccaaggccctgtatgagcagaggaagaactatgcccgggacagcgtgtcctctgtgtctgacatcagccagtacagagtggagcacctgaccacctttgtgctggacaggaaggatgccatgatcaccgtggatgatggcatcaggaagctgaagctgctggatgccaagggcaaggtgtggacccaggacatgatcctgcaggtggatgacagagctgtgtccctgattgacctggagagcaagaatgagctggagaacttctag

SEQ ID NO: 313308 - DNA, 2469 bp, Artificial Sequence
  derived and/or modified sequence
atgaacggccacatcagcaaccaccccagcagcttcggcatgtacccgtcccagatgaatggatacggatcatcccccaccttcagccagacagaccgagaacacggatctaagacttcagcaaaggcactctatgagcaaagaaagaattacgcccgggactccgtgagttccgtgtcagatatctcacagtatagggttgagcatctgaccacctttgttctggatcggaaggacgctatgattacagttgatgatggcatccgaaaactgaagctcttagacgcaaaaggcaaagtttggactcaggacatgatcttacaggtggacgaccgtgccgtctctctaatcgatctggagagcaaaaatgaactggaaaatttccctctgaacacaatacagcactgccaagcagtgatgcactcctgtagttatgactccgtactggcgctggtctgcaaggagcccacccagaacaaacctgacctacatctgtttcaatgtgatgaggtgaaagcaaacctgattagtgaagatatagagtcggccatttctgacagcaaaggcggcaagcagaagcgccgacctgacgccctcaggatgatctccaatgctgatccctcaattccgccaccgccaagagctcccgcacccgcacctccagggaccgtcacacaggttgatgttagaagccgcgtcgctgcatggtccgcctgggccgcagaccaaggcgacttcgagaagccacggcagtatcacgagcaggaagagactccagagatgatggctgctagaatcgacagagacgtgcagatcctgaatcatatcctagacgacatcgagttttttatcacaaagctccagaaggccgctgaggctttttccgagctgtccaaacggaaaaagaacaagaaaggcaaacgcaaaggaccaggggaaggagtgctcacactacgagcgaaaccccctccccctgatgaattcctcgattgcttccaaaagtttaaacacgggttcaatctgctcgccaagttaaagagtcacatccagaacccaagcgccgctgacctcgtccattttctcttcacgcccctgaacatggtggtgcaggcgacaggtggtccggaactcgctagtagtgtgctgagccctctgctgaataaggatactatcgattttctcaattacaccgtgaacggggacgagcggcagctgtggatgagtctgggggggacctggatgaaagctcgcgccgagtggccgaaggaacaatttatacccccttacgtaccccggttcagaaacgggtgggagcctcccatgctcaattttatgggcgctactatggagcaggatctttatcagcttgccgagtccgtggccaatgtcgccgagcatcagcgcaaacaggagatcaagcgcctctcaacggagcacagctcagtctccgagtatcatcctgccgatggttatgcattcagttccaacatttatactcggggatcccacctagatcagggggaggctgcagtggccttcaagcctacttcaaaccgtcatatcgatcgaaattatgagccactcaagacacaacccaaaaaatatgctaaatccaagtatgatttcgtcgccaggaacaatagcgagctgagcgtactgaaggacgacatcctggagattctggatgatcgcaaacagtggtggaaggtccgtaacgccagcggtgactcagggtttgtgcctaataatatcctcgatatagtgaggcctcctgagagtggactaggcagggccgaccccccctacacgcacacaatccaaaagcagaggatggagtacgggcccaggccagctgataccccaccagctccatccccacctcctaccccggcgcctgtgcccgtgcctctacctcccagcacacccgctccagttcccgtttccaaggtcccagcaaatattacgcggcagaactcctcaagctctgactctggaggtagcatcgttcgggactcccagaggcacaaacagctgcccgtagatagaaggaagtcacaaatggaggaggtccaagacgagctgatccacagactgacaatcgggcggagtgcagcccagaaaaaatttcacgtgccaagacagaatgtgcctgtcataaatattacgtacgactcgaccccggaggacgtaaaaacctggcttcagtccaaggggttcaacccggtcactgtgaactccctcggtgtgctgaatggcgcacaactattcagcctgaataaggatgagctcagaacagtctgtccagaaggagctagagtgtattctcaaataacagtgcagaaggccgctcttgaagactcttctggatcctcagagctccaggagatcatgaggagaaggcaggagaagattagcgctgcagcttctgactctggagtggagtctttcgacgagggctccagccattag

SEQ ID NO: 313309 - DNA, 366 bp, Artificial Sequence
  derived and/or modified sequence
atgaacggccacatcagcaaccaccccagcagcttcggcatgtaccccagtcagatgaatggctatggtagctcccccactttttctcagactgatcgagaacatgggtcaaaaactagcgcaaaggccctgtatgagcagagaaagaactacgcccgggattccgtgagcagtgtttctgatatttcacagtatagagtggagcacctcacgacgttcgtgctcgatcggaaagacgcaatgatcacagtggacgacggaatccgcaaactaaagctgctcgacgctaagggcaaagtgtggacacaagacatgattctccaagtcgacgaccgagccgtgtccttgattgacctggaatcatag

SEQ ID NO: 313310 - DNA, 207 bp, Artificial Sequence
  derived and/or modified sequence
atgaacggccacatcagcaaccaccccagcagcttcggcatgtacccttcccagatgaacggatacggtagttccccaaccttttcccagactgaccgcgagcatggaagcaaaacaagcgctaaagccttgtatgagcaaaggaaaaactacgcccgggattctgtgagctctgtgagcgatatctctcagtacagggtggagtag

SEQ ID NO: 313311 - DNA, 1689 bp, Artificial Sequence
  derived and/or modified sequence
atgatggccgcccggatcgaccgggacgtgcagatcctgaaccacatcctcgatgatattgagttctttatcacaaagctacagaaagctgctgaagctttcagtgagctttctaagaggaaaaaaaataagaagggcaagcggaagggccccggcgagggagttctcacccttagagccaagccccccccacccgacgagtttctggattgcttccaaaagtttaagcacggtttcaatcttttagcgaagttaaagtctcatattcaaaaccctagtgccgccgatctcgtgcactttctgttcactccactcaacatggtagttcaagcaaccgggggtcccgagttggcttctagcgtgctgtctcccctcctgaataaagataccatcgacttcctgaattacactgtcaatggagacgagcgccaactttggatgtctttaggcggaacatggatgaaggcccgcgccgagtggccaaaggaacaattcataccgccctatgtcccacgatttagaaatgggtgggaacctcccatgctaaatttcatgggtgccaccatggagcaagatctgtaccaactcgcagaaagtgttgccaacgttgctgaacatcagagaaaacaggagattaaacgcttatcaaccgagcactcctctgtctcagagtatcatccagcagacggatacgctttttctagcaacatatatactagaggttctcacctcgaccagggtgaagccgccgtcgcttttaagccgacgagtaatcgccatatcgaccgaaactacgaaccattgaagactcagccaaaaaagtacgctaagtcaaaatacgactttgttgctcgtaataactctgagctatccgtactcaaggacgatattctggaaatattggacgataggaagcaatggtggaaggtaagaaacgcctccggggacagtggttttgttcccaataatattttagacattgtgcgccctccagagtcaggacttggacgagctgatcccccttacacacatactatccagaaacagagaatggagtacgggccgagaccagctgatacaccacccgctcctagcccacctcccacaccagccccggtcccagtccccctgcccccctccacccccgctccggtcccagtaagcaaggtgcccgccaacataactcgacagaactccagctcatcagactcaggcggctcaatcgtgcgagactctcagcggcataaacagctgcccgtggacaggaggaagagccaaatggaagaagtccaagatgagttaatccaccgtctcacgatcggcagatctgctgctcaaaaaaaatttcatgtgccaagacagaacgtccccgtgatcaacattacatacgacagcacccccgaggatgtgaaaacgtggctccagtccaagggcttcaacccggtgacggtgaatagcctcggagtgctcaacggggcacaactttttagtctaaataaagatgagctgaggaccgtttgccctgaaggagccagagtctattctcagataacagtccagaaggccgctcttgaggacagttcaggatcctctgagctgcaggagatcatgcgaagacggcaagaaaaaatatcagcagccgcatccgacagcggagtagagtcattcgatgaaggcagcagccattag

SEQ ID NO: 313312 - DNA, 1689 bp, Artificial Sequence
  derived and/or modified sequence
atgatggccgcccggatcgaccgggacgtgcagatcctgaaccacatcttggatgacattgaattctttatcaccaaacttcaaaaggcagccgaggcattttcggagctgtcaaagcgaaaaaagaataaaaagggtaaaagaaagggaccaggagagggcgtcctaaccctgagagccaaaccacctcctcccgatgagttcctcgattgcttccagaaattcaaacatggattcaacctgcttgcaaagctgaagtctcatattcagaacccgtctgccgcagatctagtgcatttcctgttcacacctctgaacatggtggtgcaggctactggtggccctgaattggcctccagcgtgttatcaccactactgaataaagatactatcgactttctcaactacaccgtaaatggagacgagcggcagctgtggatgagtctcggagggacttggatgaaagcccgagctgagtggcccaaggagcagttcattccaccatacgtccctaggttcagaaatggctgggaaccaccaatgctgaacttcatgggagctaccatggagcaagatctataccagctggcagagagtgtcgcgaacgtcgccgagcaccagagaaaacaggagatcaagaggcttagcactgaacactcaagcgtgagtgagtatcatccagcagacggctacgcatttagcagcaatatttatacgcgcgggagccatctcgaccaaggtgaagcagcggtcgcattcaaaccgacgtctaaccgccacatcgatagaaactacgagcctctgaagacacagcccaagaaatatgccaaaagtaaatacgactttgtagctcggaacaatagcgagttgtctgtcctcaaggatgatattctggagattctggatgaccggaagcagtggtggaaagtgcgcaacgccagcggtgacagcggctttgttcccaacaacattctggatattgttcgtccgcctgagtctggtctaggtagggccgaccccccttacactcacaccatccagaagcagagaatggagtacggcccaaggcctgccgatacaccaccggcgccctctcctcctccaactccagcgcccgttcccgtccccctgcccccatccacacctgccccagttcctgtgagcaaggtcccagcgaatattacccggcagaatagttctagctctgacagcgggggctccattgtacgagacagccagcggcataagcagcttcccgtcgataggcgaaagagccagatggaggaggttcaagatgagttgatccatcgattgactattggaagaagtgccgctcagaaaaaattccatgtcccacggcagaatgtgccggtgatcaatattacttatgacagtacaccggaagatgtgaagacttggctccagagtaagggattcaatccagttacagtgaattccttgggcgtgctgaatggggcccagttgttttctctgaacaaagatgagctgcggaccgtatgccctgagggggcccgtgtctatagtcaaataacggtgcagaaggctgctttagaagacagttctgggagctccgagcttcaggagatcatgcgcaggagacaggagaaaatttccgcagccgcatctgacagtggagtggagtcatttgatgagggaagtagccactag

SEQ ID NO: 313313 - DNA, 2076 bp, Artificial Sequence
  derived and/or modified sequence
atgaacggccacatcagcaaccaccccagcagcttcggcatgtacccatcacaaatgaacggttatggctcaagccccaccttctcacagaccgacagagaacacggctcgaaaacctccgccaaagctctgtacgagcaacggaaaaactacgcacgagactcggttagcagtgtatcagatatctctcagtatagggtggaacacttgaccactttcgttctggataggaaggatgcgatgatcacagtagatgatggcatacgcaagctcaaacttctagatgctaagggcaaagtttggacacaggatatgatcctgcaggttgatgaccgtgccgtatctcttatcgaccttgagtccaaaaacgaactcgagaatttccctctgaacacaatccagcactgtcaggcagtgatgcattcttgttcatatgacagtgtgcttgctctcgtttgcaaagagcctactcagaataaaccagatctgcacctgtttcagtgtgatgaggtcaaagctaacctcatatctgaagatatcgaaagcgcaatcagcgacagcaaaggcggcaaacaaaagaggaggccagacgccctaagaatgataagcaacgcggaccccagtatccccccaccccctcgcgcgcccgccccggccccccctggcacggtcacccaggttgacgtcagaagccgcgttgcagcatggagcgcttgggctgcggaccagggggacttcgagaaacccagacaatatcacgaacaggaagagacgcccgaaatgatggctgctcgaattgacagggacgtgcaaatactaaatcacatcctcgatgacatcgagttctttatcacaaagctgcagaaagccgcagaagccttcagcgaactcagtaagagaaaaaaaaacaaaaagggaaagcgcaagggtcctggcgagggggttctgacattgcgggctaagccacctcctccagatgagtttctggattgttttcagaagttcaaacacgggtttaatctgctggccaaactgaaatcccacattcagaatccctctgccgccgacttggttcattttctgtttaccccactaaatatggtcgtccaggccacaggtggacctgagctggcaagctctgtgctgagcccactgcttaacaaggataccattgactttctcaattatacagtcaacggggatgagaggcagctttggatgagcctcggtggaacgtggatgaaagctcgtgccgagtggcctaaggagcagttcatccccccgtacgtccctcgctttcgtaatggatgggaaccaccaatgctcaacttcatgggggcaactatggaacaagatctgtatcagctggccgagtcggtggctaatgtggctgaacaccagagaaagcaggaaattaaaaggttgtcaactgagcactccagtgttagcgagtaccacccagccgatgggtacgccttcagctctaatatttatactagggggtctcacttagaccagggtgaggcagccgtggcattcaaacccacctctaaccggcacattgatagaaattatgaaccactaaaaacccaacctaagaagtacgcaaagtccaaatatgactttgttgcccgcaataattccgaactttcagtgttaaaggacgatattctcgagatcctggacgatcggaagcagtggtggaaagtaaggaacgcaagtggcgatagcggatttgtcccgaacaacattttggatatagtcagacccccagagagcggtctgggcagagctgatcctccctatacccataccattcaaaagcagagaatggaatatggacctcgtcccgccgacacaccccccgcacccagtcccccaccaaccccagcccccgttcctgtcccgctacctccctccacacctgccccagtacccgtctccaaagtgccagctaacattactagacagaattcctcttctagcgactccgggggaagcatcgtccgagattctcagcgacacaagacctccgggggccctaaagaaattagtgacggagggtcagccaggtag

SEQ ID NO: 313314 - DNA, 207 bp, Artificial Sequence
  derived and/or modified sequence
atgaacggccacatcagcaaccaccccagcagcttcggcatgtacccaagccagatgaatggctacggaagctctcccacttttagtcagacagatcgggagcacggcagcaaaacgtccgcaaaggctctgtatgagcagcgcaagaattacgcacgggactcagtgagtagcgtcagcgacatctcccagtatcgggtggagtag

SEQ ID NO: 313315 - DNA, 2469 bp, Artificial Sequence
  derived and/or modified sequence
atgaacggccacatcagcaaccaccccagcagcttcggcatgtaccccagccagatgaatggttacggcagctctccgacttttagccaaacagaccgcgaacacgggtcaaaaacgtccgcaaaggccttgtacgagcagaggaaaaattacgcacgggattcagtctcttctgttagtgacatcagtcagtatagagtggagcacttgacaacttttgtcctggatagaaaagacgcaatgatcaccgtcgatgatggtattaggaaattaaagctactagacgcgaagggtaaagtgtggactcaggatatgatcctgcaggtggacgaccgagccgtgtccttgatcgatctagagtcaaagaacgagctcgaaaatttccccctcaataccatccagcactgccaagctgtcatgcattcttgcagttacgattctgtcctggccctggtttgcaaggagcccacgcaaaacaagcctgatctgcacctgttccagtgcgacgaggtcaaagccaacctgatttcagaggacattgagagcgcaatctctgactcaaagggcggaaagcagaagcgcaggccggatgctttgcgaatgatctccaatgctgatccttcaattcctccccccccacgggccccagccccagccccacctggaacagtgacccaggttgatgtcaggagccgcgtcgccgcttggtctgcatgggctgccgaccaaggggatttcgagaagccaagacagtaccacgagcaagaggaaacgcccgagatgatggctgcacggatcgaccgagacgttcagatccttaatcatatccttgatgacatcgagtttttcatcaccaaactccagaaggcagcagaggctttctccgagctgtctaagcggaaaaagaacaagaaaggcaaacgcaagggacctggcgagggcgtgttgactttacgcgcaaaacctcctcctccagatgaatttctagactgcttccagaaattcaagcatgggttcaacctgctggccaaattaaagagtcacattcaaaacccctccgcagctgatctggtgcatttcctttttactccccttaacatggttgttcaggccaccggcggccctgagcttgcctcctctgtgttatcccccttattaaacaaagacactattgattttctgaattacactgtgaatggcgatgagagacagctctggatgtctctgggaggaacctggatgaaggcccgtgccgaatggccgaaggaacaattcatccccccctacgtcccacggtttcgcaatgggtgggaacctcctatgttgaactttatgggagctacaatggaacaggacttataccagttagctgagtccgttgccaatgtcgccgaacaccagcgaaagcaagagatcaaacgactgagcaccgagcactctagtgtgagtgagtatcaccccgccgacggttacgctttcagctctaatatttacactcggggatcacacctagatcagggcgaggcggcggtggccttcaaacctacatcaaaccggcatattgatcgtaattacgaacctctcaagacacagcctaaaaagtacgctaaaagcaaatacgactttgtggcaagaaataactctgagctgagcgtgttgaaggacgacatcctggaaatccttgacgatcgcaagcagtggtggaaggtgcgaaacgcttcaggcgattctggctttgtgcccaacaatattctcgatatcgtgcggcccccagaatctggcctcggacgcgcagatcctccatatactcataccattcaaaagcagcgcatggagtacgggcctcgacctgcggacactccgccggctccatccccccctcccacacctgcccctgtccctgtgccactgccaccatcgactcctgcccctgttcccgtcagtaaggtgccagctaatataactcggcagaacagctcgtcgtctgactctggcgggtccatagtccgagacagtcagcgccacaaacagttgcccgtggaccggaggaagtcacaaatggaggaggttcaagatgagctgattcacagactcactattggcaggtcggccgcccaaaagaaatttcacgttccccgtcaaaatgtccctgtaataaacatcacttatgactctactccagaagacgtgaaaacgtggctgcaaagcaagggcttcaacccggtgaccgtcaatagcttaggtgtcctaaacggagctcaattattctccctgaacaaagatgaattgagaaccgtctgcccggaaggcgcaagggtatacagccagatcaccgtccagaaagctgctttagaagattcctcaggtagcagcgagctccaggagatcatgcgtagaaggcaggagaagatctccgccgccgccagcgacagcggagtcgagagctttgacgaaggatccagccattag

SEQ ID NO: 313316 - DNA, 2469 bp, Artificial Sequence
  derived and/or modified sequence
atgaacggccacatcagcaaccaccccagcagcttcggcatgtacccctcccagatgaatggttacggcagcagccccacattcagtcaaacagatcgtgaacacggctcaaagacctccgccaaggccctctacgaacagagaaagaactacgcccgggattcagtttcctccgtgtccgacatcagtcaataccgggtcgaacacctgactacattcgtgctcgatagaaaggacgctatgattaccgtggacgacggcatccgaaagctgaaactgctggacgcaaagggaaaagtctggacccaggatatgatcctgcaagtcgatgaccgcgcggtcagtctcattgacttggagtcaaaaaatgaactagaaaattttccactcaacacgatccaacactgtcaggctgtgatgcattcttgtagctatgattcggtccttgccctggtctgcaaggagcccacgcaaaacaaacctgacctccatctgttccagtgtgacgaggtcaaggccaacctgatatccgaggatatcgagtcggccatcagcgactctaagggcggcaagcaaaagaggcgtcctgatgcactgagaatgatctccaacgccgacccctcaattccaccgccacctcgcgccccagcgcctgccccacctggcactgtgactcaggtggacgtgcggtctagagtggctgcctggagtgcctgggccgccgaccaaggtgacttcgaaaagccaagacagtaccacgagcaggaagagactccagagatgatggccgctcgaatcgacagggatgtgcagatcttgaatcacatcctagatgacatcgagttcttcattactaagttgcagaaagccgctgaagcttttagtgagcttagcaagcggaagaaaaataagaagggcaagcgcaaggggccaggagaaggcgtgctcaccctgcgtgctaaaccgccaccacctgacgagtttcttgactgttttcagaaattcaagcatggatttaatctgttagccaaacttaagagccacatccaaaatccatccgcagcggatctggtccactttttgttcacgcctctgaacatggtggtccaggctaccggaggcccagaacttgctagctcggtgttgagcccattgctgaacaaggataccattgactttttgaattataccgttaatggggatgagcggcagttgtggatgagtctgggaggcacatggatgaaggcccgggctgaatggcccaaggaacagtttattcccccttacgtccctcgcttccgtaacggctgggagcctcccatgcttaactttatgggtgcgactatggagcaggatttatatcagttggcggagtccgtggctaatgtggcagaacaccagagaaagcaggaaattaaacggctttctaccgaacactcctccgtatctgaatatcacccagccgacgggtatgccttttcatcaaacatttatacacgcggaagtcacctggaccagggagaagccgctgtggccttcaagccaacgtccaatcggcatatcgatcgaaactacgaacctctgaagacacaacctaagaagtatgccaaatccaaatacgattttgtggcgcggaacaactctgaactgtctgttctgaaggacgatattctggagatcttggacgatagaaagcagtggtggaaggtcaggaatgcctctggcgactctggtttcgtgccaaacaatatactggacattgtacgtcctccagaaagcggtttgggaagagctgacccaccatacacacataccatccaaaagcagcgcatggagtacgggccacggccagctgatactccacccgccccgagtccgcctcctacacctgcccctgtacccgtgccgctacctccctccaccccagccccagttccagtgtcaaaggtgcctgcgaatataacgcggcagaatagttcttctagcgactctggcggctctatcgttagagatagtcagagacataagcagctgcctgtggacagacggaaaagccaaatggaggaggtacaagatgagctgatccataggcttactatcggcagaagcgccgctcagaaaaaattccatgtgccccgtcagaacgtgccagtgatcaatattacttacgattcaacacccgaggacgtgaagacgtggctgcagagcaagggtttcaatccagtgactgttaattcactgggggtcctcaacggagcgcaactgttctcgttaaacaaagacgagctccggaccgtgtgcccagagggtgcaagagtctatagccagatcaccgtgcagaaagctgcccttgaggatagctcgggaagctcagaattgcaagaaatcatgaggcgtcggcaggagaaaatctccgcagcggcatctgacagtggcgtggaatcctttgatgaaggtagctcccattag

SEQ ID NO: 313317 - DNA, 204 bp, Artificial Sequence
  derived and/or modified sequence
atgaacggccacatcagcaaccaccccagcagcttcggcatgtacccttcccaaatgaacgggtacggcagctctcccaccttcagtcagactgaccgggagcacggatcgaagaccagcgccaaggccctttacgagcaacgcaagaattatgcgagagactccgtttccagcgtgagcgatataagtcagtatagagtttag

SEQ ID NO: 313318 - DNA, 387 bp, Artificial Sequence
  derived and/or modified sequence
atgaacggccacatcagcaaccaccccagcagcttcggcatgtacccctctcagatgaacggttatggcagtagccccactttctcccaaacagacagagaacatggcagcaagacttcagcaaaagctctgtatgagcagcggaaaaactacgcgagagacagcgtatctagtgtttctgacattagccagtaccgtgtcgagcacctgaccaccttcgtgctggaccggaaggacgctatgataaccgtggatgacggcatccggaagctgaaacttctggacgccaagggcaaggtgtggacacaggacatgatccttcaggtggatgatcgggcagtgtctctcattgatctggagtccaaaaatgagctcgagaatttttag

SEQ ID NO: 313319 - DNA, 2469 bp, Artificial Sequence
  derived and/or modified sequence
atgaatgggcacattagcaatcacccctcttccttcggaatgtaccctagccagatgaacgggtacggaagcagccctacattttcacagaccgatagggaacacggctctaagacatctgccaaagcactctatgagcagcgcaaaaattatgccagggattcagtttctagcgtatccgacatctctcagtaccgtgtcgaacacttaacaacctttgttctggatcggaaggacgctatgataaccgttgatgatgggatccggaagctcaaacttctggatgcaaagggaaaggtgtggacacaggatatgatcctgcaggttgatgacagggcagtttcgctgatcgacctggagtcaaagaacgagctcgaaaactttcccctgaatactatacagcactgtcaagccgtcatgcattcttgttcttatgattccgtcctcgcgctggtttgtaaggagcccacgcagaataagccagatctgcacctcttccagtgtgacgaggttaaggccaatttgatcagtgaagacatcgagagcgcaatatcggactccaaagggggaaaacaaaaaagacgcccagacgccctgaggatgatttcaaatgcggatccttcaataccacccccaccgagggccccagccccagctccacccggaacagtgacacaggtcgatgtgcgatctcgggtcgccgcttggtccgcctgggcagcagaccaaggcgactttgagaaacccaggcagtaccatgaacaagaggaaactccagagatgatggcagcacgaatcgaccgcgatgtccaaatactcaatcacatcctggatgatatcgagttcttcattactaaactacaaaaggccgctgaagcattcagcgagctgagcaagcggaagaagaataagaaggggaagcggaaagggcctggagaaggcgtcttaacactgcgggctaagccacctcctcccgacgaattcttagattgtttccagaaatttaagcacgggttcaatctcctcgctaagttgaaatcacatatccaaaatccaagtgccgctgaccttgtccatttcctctttacccccctgaatatggtggttcaggccacaggaggcccagaacttgccagcagcgtactatcgcccctgctgaacaaggacacgattgattttctgaattacaccgtaaatggagatgagcgacagctgtggatgtccctggggggtacttggatgaaagctagagcggagtggcctaaggagcaattcatccctccctacgtccctagatttcgcaatggatgggagcctccaatgctgaactttatgggggcaaccatggaacaagacttataccagctggctgagagcgtcgctaatgtcgccgagcaccagaggaagcaggagattaaacgcctgagcactgagcacagcagcgtgagtgagtaccaccctgccgatggatatgctttctcttctaacatttacacacggggtagtcacctcgaccagggcgaggctgcagttgctttcaaacctacctcaaatcgccacatcgaccgcaattacgagccactcaaaactcagcccaaaaagtacgcaaaatctaaatacgacttcgtggctaggaataattctgagctttccgtgctgaaggacgacattctcgaaattttagatgataggaagcagtggtggaaggtgcgtaatgccagcggggattcaggatttgtccccaacaacatcttggatatcgtccggccacccgaatccggtttgggacgggctgatccaccttatactcacactatccagaagcagagaatggaatacgggccacgaccggcagacaccccccctgcaccaagcccaccacctactcccgcacccgtgcccgtgccactgcctcccagcacgccagcaccagtacctgtctccaaagtgcctgcgaatataacacgccaaaactcgagctcttctgatagcggaggaagcattgtgagagattcccagcgtcataaacagttaccagtggatcggcgtaaatcacaaatggaggaggtacaggatgaattaatacataggctgaccataggcaggagcgccgctcagaagaagttccacgtgccaaggcagaacgtccccgttatcaatattacttacgacagcacaccagaggatgtgaagacctggctccaaagtaaaggatttaacccagttactgtgaacagtttaggcgtgctaaacggggctcagttgttttctctgaataaggatgagttgcgaaccgtatgtccagaaggggcaagagtgtacagccaaatcacggttcaaaaagcagcgttggaggactcctccgggtcatcggagttgcaagagatcatgcggaggcgccaggaaaagatatcagcagctgcttccgatagtggagttgaatccttcgacgaaggttcgtctcactag

SEQ ID NO: 313320 - DNA, 366 bp, Artificial Sequence
  derived and/or modified sequence
atgaacgggcacattagtaaccatcctagctcctttggtatgtacccatcccaaatgaatggctatggtagttcacccactttctcccagacagatcgggaacacggtagtaaaacaagcgctaaggcactgtacgagcaacggaagaactacgcaagagacagtgtttcatctgtctcggatatctcacagtacagagtggaacatctgaccactttcgtgttagacaggaaggatgccatgatcacagtcgatgatggcattcgaaagttaaagttactggacgccaagggaaaagtctggactcaggatatgatcctgcaagtggatgaccgcgcagtgtctctcatcgatctggagtcctag

SEQ ID NO: 313321 - DNA, 207 bp, Artificial Sequence
  derived and/or modified sequence
atgaacggccatataagcaatcacccatcttccttcggcatgtatccgagccagatgaacggctatggcagcagtccgacctttagtcagacagaccgagagcatggcagtaaaacatccgctaaggcactctatgagcaaagaaagaattacgcccgagattctgtgtcttctgtctctgacatctctcagtaccgggtggagtag

SEQ ID NO: 313322 - DNA, 1689 bp, Artificial Sequence
  derived and/or modified sequence
atgatggcggctaggatcgaccgggacgtacagatcctcaatcatatattagatgacattgaattttttatcacaaagctgcagaaggccgcagaagccttttcggaactctctaaacgaaagaaaaacaagaagggcaagcggaaaggccctggcgagggcgtgctgaccttgagagcgaagcctcctcctcccgatgaattcctggactgctttcagaagtttaagcatggtttcaatctccttgctaagttgaagagccatattcagaatccatcagccgcagacctcgtgcacttcctgtttaccccacttaatatggtggtccaagcaacagggggacccgagctcgcttcttctgtgctgtcacctcttctcaacaaagataccattgactttctcaactacactgtgaacggtgacgaaagacagctctggatgtctctcggagggacatggatgaaagcaagagccgaatggccaaaggagcagtttatcccaccttacgtgccgaggttcaggaatggctgggaaccccctatgctgaattttatgggtgccacaatggagcaggacctctaccagttagccgaaagcgtcgctaacgtagctgagcatcagagaaagcaagaaatcaaacgactatctactgagcactcctccgtgtctgaataccatcctgctgacgggtacgccttttcaagtaatatatataccaggggttcacacctggaccagggtgaagctgcggtcgcctttaagccgacttctaacagacacatagatcgcaattacgaacctcttaaaactcagcccaagaagtacgctaaatcgaagtacgactttgtggcccgaaacaattctgaactgtccgtactgaaggacgacatactggagattttggacgacaggaaacagtggtggaaggtcaggaacgctagcggggattcaggatttgtgcctaataacattctggatatagtgaggcctcccgagtcaggactcggacgcgcagacccaccttatacccacaccatccagaaacaacgcatggagtatgggccacgccctgctgatacaccaccggcaccttcacctccaccaaccccggctccggtccctgttcccctgcctccgtcaacacctgcccctgtccctgtttcaaaagttcccgctaacataaccaggcagaatagttcctccagcgattcggggggatctattgtgagagacagccagaggcataaacagctgccagtggatcgccgaaagagtcaaatggaagaagtccaagatgaattgatccatcgtctcacaatcgggaggtccgccgcacagaagaagttccatgtgccaagacagaacgtccccgtcatcaacatcacctatgactccacacccgaagatgtgaaaacatggctccagagcaagggcttcaacccggtgacggtgaacagtttaggggtcctcaacggcgcacaacttttctccctgaacaaagacgagcttaggacagtctgtcctgagggtgccagggtctattcacagattacggtgcagaaagctgctctcgaggatagctccggttcttccgaactgcaggagatcatgcgtcggagacaggagaagatcagtgcggctgctagtgactcaggagtggagagcttcgatgaggggagcagccactag

SEQ ID NO: 313323 - DNA, 1689 bp, Artificial Sequence
  derived and/or modified sequence
atgatggccgctagaattgatagagacgtgcagattctcaatcatattttggacgacatcgagttcttcatcactaaactgcagaaggctgccgaggctttcagtgaactctccaagaggaaaaaaaataaaaagggtaagcgtaagggcccaggggaaggagttctcacccttagagccaagccgccacctcccgacgaattcctggactgtttccaaaagtttaagcatggctttaatctgctcgctaagctgaagtcgcacatccagaacccctcagcggcagacctggtccactttctgttcacccccctcaatatggtagtgcaagccacaggaggcccagaacttgcttcttctgtgttgagtccacttctgaataaagacacaatagactttttgaactacacagtcaacggagatgagagacaactgtggatgtctctggggggaacatggatgaaggctcgggctgaatggcccaaagagcagttcattcccccatacgtccccaggtttcggaatgggtgggaaccccctatgctcaacttcatgggtgccacgatggagcaggatctgtatcagctggccgaatctgtggccaatgtggcggaacaccaacggaagcaggagatcaaaaggctgagcacagagcattcttccgtgtctgagtatcacccagccgatggatatgctttctcatctaatatctatacacgtggctcccatttggaccagggagaagccgctgtggcctttaagcccacttccaaccggcatatcgatcgcaattatgaaccactaaaaacacagcctaaaaagtacgccaagtccaagtacgactttgtggcacgcaataacagtgagctaagtgtactcaaagacgatatactagagatacttgacgacagaaagcagtggtggaaggttagaaatgcgagcggagattcaggcttcgtgccgaacaatatactcgacatcgtaagaccccctgagagcggccttggcagggctgatccaccctacacacatactattcagaagcaaagaatggagtatgggccaagacccgctgatacgccccctgctcctagtccacccccaactcctgccccagtaccagtccctttgcccccaagcaccccagctcccgtgccagtgtccaaggtgcctgctaatatcaccaggcaaaatagcagctccagcgactctgggggaagcatagttagggactcccagcgtcataagcagctcccagtggaccggaggaaaagccaaatggaggaagtgcaagacgagttgatacacaggttgactatcgggagatctgccgctcagaaaaagtttcatgtgcctaggcaaaacgtccccgtaatcaatattacttatgattctacacctgaggatgtaaagacatggttacagagtaaaggtttcaaccctgtgaccgtgaacagcctcggcgttttgaacggagcacagttgttcagccttaacaaggacgaactcagaaccgtgtgtccagagggcgctagggtgtatagccaaataacagtccagaaggccgcactcgaagattcgagcgggagcagcgaactacaggagatcatgagacgcagacaggagaagatttctgcagccgctagcgacagcggagtggaaagctttgacgagggctcctcccactag

SEQ ID NO: 313324 - DNA, 2076 bp, Artificial Sequence
  derived and/or modified sequence
atgaacgggcatatctcaaatcaccctagcagcttcggcatgtatccaagtcagatgaatggctatggctcttccccaaccttctctcagactgaccgggagcatggcagcaagacttctgctaaggcactgtacgaacagcgcaagaactacgctagggattctgtcagctctgtcagtgatatctcgcagtaccgcgttgaacatctaaccacgttcgttctggataggaaggacgccatgataaccgtggatgacggcattcggaaactgaagctgctagatgctaagggaaaggtttggacacaagacatgatcctgcaggtggacgatagggcagtgagcctgatcgatctcgaatcaaaaaacgagctggaaaactttccactcaacaccatccaacactgccaagctgtcatgcactcctgctcctatgacagtgtactggctctggtctgcaaggagcccacacagaacaagccagacctccatctgtttcagtgcgatgaagtgaaagccaatctgataagcgaggatattgaatctgccataagcgacagtaaggggggaaaacaaaaacggagacccgacgccttgaggatgatctcaaacgccgaccccagtataccccctccaccacgcgctccagcccctgcgccacccggaaccgtaacgcaggtggacgtgagatcgcgcgtggcagcttggtcagcctgggcagcggatcagggcgacttcgagaaacccaggcaatatcacgaacaggaggaaactcccgagatgatggccgctaggatagatcgagacgtccagatcttgaatcatattctggatgatatcgagtttttcatcacgaagcttcagaaagccgcagaggccttttcggagcttagtaagcgcaaaaaaaacaaaaaaggcaagcggaaggggcctggtgagggagtcctcactctcagggccaagcccccacccccagatgagtttcttgattgctttcaaaagtttaagcacgggttcaacctgcttgcaaaactgaagagtcatattcagaacccctctgccgctgacctcgtgcactttctgtttaccccgctgaacatggttgtccaggctacggggggtcccgaactcgcgagcagtgtcctgtcccccctccttaataaggatacaatcgactttctcaactacacggtgaatggggatgaacgccagctctggatgtcgttaggaggaacttggatgaaagcccgtgccgagtggccaaaggaacagttcatccccccttacgtacccagattccggaatgggtgggaaccaccaatgctcaactttatgggggcaacaatggaacaggatctctaccagcttgccgagagtgtggctaatgtggcagagcaccagaggaagcaagaaatcaagcgactctccaccgaacatagttccgtgtcagagtatcatccagcagatgggtacgctttctcaagtaacatttatacacgcggaagtcacctagatcagggggaagccgctgtcgcctttaaacccacgtctaatcgccatatcgaccgaaattatgagccccttaaaacccagcctaagaagtatgcaaaaagcaaatacgacttcgtcgccaggaacaattccgagctgagtgtactgaaagatgacattctggaaattttggacgatcgcaagcagtggtggaaagtgcgcaatgcttctggcgacagcggattcgtcccaaacaatattttggacattgtgagacctcctgagagtggactaggaagggcagatcctccgtacacacatacaatccaaaaacaaagaatggaatacggtccacgcccagcagataccccccctgcccctagccccccacccaccccagccccagtgcctgtcccactgccaccttcaacaccagctccagtccccgtctcaaaggtgcctgccaacattacccgtcagaattccagctcatccgatagtgggggatcaatcgtgcgcgactcacagaggcataagacatctggcggtcctaaagaaatctcagatgggggaagcgcaaggtag

SEQ ID NO: 313325 - DNA, 207 bp, Artificial Sequence
  derived and/or modified sequence
atgaacgggcacatctctaaccacccatcctccttcgggatgtatccatcacagatgaatggatacgggtccagccccacttttagtcaaactgacagggaacacgggagcaagacatccgctaaggccctgtacgagcagcgaaaaaattacgctcgggactccgtttccagcgttagcgacattagccagtatcgtgtggagtag

SEQ ID NO: 313326 - DNA, 2469 bp, Artificial Sequence
  derived and/or modified sequence
atgaatgggcacatctccaaccacccctcgtctttcggcatgtaccccagccagatgaacggttacggcagctcgcctaccttcagtcagaccgatcgcgaacacgggtccaaaactagtgctaaggccttatatgagcagaggaagaattacgctagggatagtgtttcttccgtgtcagacataagccagtacagggtggaacaccttacaacatttgtcctcgaccgaaaggacgccatgatcaccgtggatgatggaatccgcaagctgaagctcctggacgctaagggcaaggtctggactcaagatatgatattgcaggtagacgacagggccgtatcccttattgacttggagtcaaagaacgaactcgaaaacttccccctcaataccatccagcactgccaagccgtgatgcattcttgctcatacgatagcgtcctcgcgctcgtgtgtaaagaacctacacaaaataagcccgatctgcatctgtttcaatgcgatgaggtaaaggccaacttgatatccgaggacatagagtcagcaatctctgacagcaaaggcggaaagcagaaacgacgtcccgatgctttgcgaatgatttccaacgcggatccgtcaatccccccaccacctcgggcacccgcacccgcacctcccggtaccgtcactcaagtagacgtcagatcacgggtggccgcatggtctgcctgggccgcagatcagggcgacttcgagaaaccccgacagtaccatgagcaggaggaaacaccagagatgatggcagccaggatagacagagacgtgcagatcctgaaccatatcctcgatgatattgagttctttataacaaaattgcagaaggctgctgaagccttctctgaactctcgaagagaaagaagaataagaaaggaaaacggaaaggtcctggggagggagtactcaccctgcgtgcgaagccacccccacctgacgagttcctggattgcttccagaagtttaagcatggctttaatctgttggccaaactaaagagtcatattcagaatcctagcgcagctgacttagtgcacttcctgttcacacccctgaatatggtggttcaggctacagggggtcctgagcttgcctctagcgttctgtcccctctgctcaataaagacacaattgacttcctaaattacactgtgaacggcgacgagagacagctctggatgtcactgggaggcacttggatgaaggccagagcggagtggcctaaagagcagtttatccccccttacgttccccgattcaggaatggctgggagcctccaatgctgaatttcatgggggctacaatggaacaggacttgtaccagctggcggaaagcgttgcaaatgttgccgagcatcagaggaaacaagagataaagagactgtcaaccgaacactctagcgtttctgaatatcacccggcagacggctacgcgtttagctctaatatatacacccgcggttcccacctggatcaaggcgaagcagcagtcgcattcaaacccacaagcaacaggcacatcgaccgcaattacgagccacttaaaacccagccaaagaaatatgcgaagtccaaatatgattttgtggcaaggaacaacagtgaactcagcgtgctcaaagacgacatactggaaattctagatgaccggaaacagtggtggaaagtccgcaatgctagcggcgatagcggctttgtgcctaataacatcctggacatagtgcgtcctcccgaaagcgggctgggaagagccgatccaccttacacccataccatccagaagcaaaggatggaatatggtccccgacccgcagacacacccccagccccatcacccccacctactccagctccggtgcccgttcctttgcctccgagcacgcccgctccagtgcccgtgagcaaggtaccggctaatattacaagacagaactcttctagcagcgattctggcggatctattgtgagggatagtcagaggcataaacagctgcccgttgacagacggaagagccagatggaggaggtgcaggatgaactcatacatcgactcacaattggaagaagcgccgctcagaaaaagttccacgttccacgccagaacgtgcctgtgatcaatatcacttacgactcaacgcccgaggacgtcaagacttggttacagtctaaaggctttaatcccgtgacggtgaatagtctaggcgtgctgaacggcgcacagttattttctctgaataaggatgagctgcgcactgtgtgcccagagggcgcacgagtctatagccagattaccgtgcaaaaggccgcactcgaggacagctccggctccagcgagctccaggagatcatgaggaggcgccaagagaaaatcagcgccgctgcatcagacagcggggtggaatcatttgacgaaggctcttctcattag

SEQ ID NO: 313327 - DNA, 2469 bp, Artificial Sequence
  derived and/or modified sequence
atgaacgggcacataagtaatcatccaagttctttcggcatgtatcctagccagatgaatggttatggtagttcccctactttttctcagacagacagagagcatggaagtaaaacaagcgcgaaagctctgtatgagcagcgaaaaaactatgccagggatagtgtttcctcggtgagtgacatctctcagtacagggtggaacaccttactactttcgtgctggatagaaaagacgccatgataacagtggatgacggaatacgtaagctgaagttgctcgatgcaaaaggcaaggtctggacccaggatatgatccttcaggtggatgacagagcagtgagccttatcgatctggagtccaagaacgagctggagaactttccacttaatacaatacagcactgccaggcagttatgcacagttgcagctatgattccgtactcgcgctagtgtgtaaggaacctacacagaataaacctgacctgcacctcttccagtgtgatgaagttaaagccaacctgataagtgaagacatcgagagcgccatttccgattcaaagggagggaagcagaaaagaagacctgacgccctgcggatgataagcaacgccgatccctctattccgcctcctcccagagcaccagctcctgccccaccaggcaccgttactcaggtcgatgtacggtcgcgggtcgctgcctggagcgcttgggccgctgaccagggggatttcgaaaagcccaggcaatatcacgaacaggaggaaacgcccgagatgatggcagcgaggatagaccgtgacgttcagattctgaaccatatactggacgatatagagttcttcattaccaaactgcagaaggctgccgaggcgttctctgagctaagcaagagaaaaaaaaacaaaaagggcaagagaaagggaccgggagagggggtgctgacactccgtgctaaacctccaccccctgatgagtttctggactgcttccagaagttcaagcacggcttcaatcttctggcgaagttaaaatctcatatccaaaatcccagtgcagcagatctggtccatttcttgttcactcccctgaacatggttgtgcaagccactggaggtccagaactcgcatcgagcgtgttaagccctttgctgaacaaagacacgatcgattttctgaattatactgtaaatggcgacgagcggcaactatggatgtccctggggggaacctggatgaaggctagagctgagtggcctaaagagcagtttattccaccttatgtaccacgctttagaaatgggtgggagccaccaatgctgaacttcatgggagctacaatggagcaggatctttatcagctggcagagagcgtcgccaatgtggcagaacatcagcgcaaacaggagattaaacggctcagtacggagcacagctcagtgtcagagtatcatccagccgatgggtacgccttcagctcaaacatttacacgagaggatctcaccttgatcagggggaggccgcagttgcttttaagccaactagcaacagacatattgatcgtaattacgaacccttaaagactcagccgaagaaatatgccaagtctaaatatgacttcgtggcgagaaacaatagtgaattgtccgttctcaaggatgatatccttgagatactggacgatagaaaacaatggtggaaagtgcggaacgcatcaggggattccggtttcgtgcccaataacatactcgatattgtcagacccccagaaagtggactgggcagagctgacccaccctacacccacactatccaaaagcagcggatggagtatggcccacgaccggctgacactccccctgccccatcaccccctccaacaccagccccagtgccagtcccattacctccctcgacccctgcacccgtgcccgtgagcaaagtgcctgccaacattacgcgacaaaattctagctcctccgactccggtgggagcattgtgcgggacagtcagagacacaagcagctgcccgtggaccgtaggaaatctcagatggaagaagtgcaggatgaacttatacatcggctgacaatcgggcgatctgccgcacaaaagaaattccacgttcctagacaaaatgtccccgtgattaatatcacctacgattcaacgccagaggacgtaaaaacatggttacagtcaaaagggttcaatccagttactgtgaacagcttgggggtcttgaatggggcacagctattttcactcaataaagacgaactgaggactgtatgtcctgagggcgcaagggtctactctcagatcaccgtgcagaaggctgcactggaggattcttccggatcgtccgagctgcaggaaatcatgcgaagaaggcaagaaaagatctcagccgctgcctctgactcaggcgtcgagtccttcgacgagggcagcagccactag

SEQ ID NO: 313328 - DNA, 204 bp, Artificial Sequence
  derived and/or modified sequence
atgaacggccatatttccaaccacccatccagctttggtatgtacccatcccagatgaacggatatggtagctccccgacattctctcaaacagatcgggagcacggaagtaagaccagcgcaaaagctttgtatgagcagcgaaaaaactacgctcgggacagcgtgtctagcgttagcgacattagccagtaccgagtgtag

SEQ ID NO: 313329 - DNA, 387 bp, Artificial Sequence
  derived and/or modified sequence
atgaacggccatattagcaaccatccttctagcttcggaatgtacccatcccaaatgaatggatatggctctagtcctacatttagccaaacggacagggaacacggttccaagacatctgccaaggcactgtatgagcagcgaaaaaattatgcgcgtgacagcgtgtcttccgtgagcgacatttcccaatatcgcgtcgagcacctaactacctttgtccttgatagaaaagatgcaatgataactgtggatgacggcattcggaaactcaagcttttggatgccaagggcaaggtatggactcaggatatgatcctccaggtggatgaccgggctgtgtccctgattgacctggaatctaagaacgagctggaaaatttctag

SEQ ID NO: 313330 - DNA, 2469 bp, Artificial Sequence
  derived and/or modified sequence
atgaacggccacatcagcaaccaccccagcagcttcggcatgtaccccagccagatgaacggctacggcagcagccccaccttcagccagaccgacagagagcacggcagcaagaccagcgccaaggccctgtacgagcagagaaagaactacgccagagacagcgtgagcagcgtgagcgacatcagccagtacagagtggagcacctgaccaccttcgtgctggacagaaaggacgccatgatcaccgtggacgacggcatcagaaagctgaagctgctggacgccaagggcaaggtgtggacccaggacatgatcctgcaggtggacgacagagccgtgagcctgatcgacctggagagcaagaacgagctggagaacttccccctgaacaccatccagcactgccaggccgtgatgcacagctgcagctacgacagcgtgctggccctggtgtgcaaggagcccacccagaacaagcccgacctgcacctgttccagtgcgacgaggtgaaggccaacctgatcagcgaggacatcgagagcgccatcagcgacagcaagggcggcaagcagaagagaagacccgacgccctgagaatgatcagcaacgccgaccccagcatcccccccccccccagagcccccgcccccgccccccccggcaccgtgacccaggtggacgtgagaagcagagtggccgcctggagcgcctgggccgccgaccagggcgacttcgagaagcccagacagtaccacgagcaggaggagacccccgagatgatggccgccagaatcgacagagacgtgcagatcctgaaccacatcctggacgacatcgagttcttcatcaccaagctgcagaaggccgccgaggccttcagcgagctgagcaagagaaagaagaacaagaagggcaagagaaagggccccggcgagggcgtgctgaccctgagagccaagccccccccccccgacgagttcctggactgcttccagaagttcaagcacggcttcaacctgctggccaagctgaagagccacatccagaaccccagcgccgccgacctggtgcacttcctgttcacccccctgaacatggtggtgcaggccaccggcggccccgagctggccagcagcgtgctgagccccctgctgaacaaggacaccatcgacttcctgaactacaccgtgaacggcgacgagagacagctgtggatgagcctgggcggcacctggatgaaggccagagccgagtggcccaaggagcagttcatccccccctacgtgcccagattcagaaacggctgggagccccccatgctgaacttcatgggcgccaccatggagcaggacctgtaccagctggccgagagcgtggccaacgtggccgagcaccagagaaagcaggagatcaagagactgagcaccgagcacagcagcgtgagcgagtaccaccccgccgacggctacgccttcagcagcaacatctacaccagaggcagccacctggaccagggcgaggccgccgtggccttcaagcccaccagcaacagacacatcgacagaaactacgagcccctgaagacccagcccaagaagtacgccaagagcaagtacgacttcgtggccagaaacaacagcgagctgagcgtgctgaaggacgacatcctggagatcctggacgacagaaagcagtggtggaaggtgagaaacgccagcggcgacagcggcttcgtgcccaacaacatcctggacatcgtgagaccccccgagagcggcctgggcagagccgaccccccctacacccacaccatccagaagcagagaatggagtacggccccagacccgccgacaccccccccgcccccagccccccccccacccccgcccccgtgcccgtgcccctgccccccagcacccccgcccccgtgcccgtgagcaaggtgcccgccaacatcaccagacagaacagcagcagcagcgacagcggcggcagcatcgtgagagacagccagagacacaagcagctgcccgtggacagaagaaagagccagatggaggaggtgcaggacgagctgatccacagactgaccatcggcagaagcgccgcccagaagaagttccacgtgcccagacagaacgtgcccgtgatcaacatcacctacgacagcacccccgaggacgtgaagacctggctgcagagcaagggcttcaaccccgtgaccgtgaacagcctgggcgtgctgaacggcgcccagctgttcagcctgaacaaggacgagctgagaaccgtgtgccccgagggcgccagagtgtacagccagatcaccgtgcagaaggccgccctggaggacagcagcggcagcagcgagctgcaggagatcatgagaagaagacaggagaagatcagcgccgccgccagcgacagcggcgtggagagcttcgacgagggcagcagccactag

SEQ ID NO: 313331 - DNA, 366 bp, Artificial Sequence
  derived and/or modified sequence
atgaacggccacatcagcaaccaccccagcagcttcggcatgtaccccagccagatgaacggctacggcagcagccccaccttcagccagaccgacagagagcacggcagcaagaccagcgccaaggccctgtacgagcagagaaagaactacgccagagacagcgtgagcagcgtgagcgacatcagccagtacagagtggagcacctgaccaccttcgtgctggacagaaaggacgccatgatcaccgtggacgacggcatcagaaagctgaagctgctggacgccaagggcaaggtgtggacccaggacatgatcctgcaggtggacgacagagccgtgagcctgatcgacctggagagctag

SEQ ID NO: 313332 - DNA, 207 bp, Artificial Sequence
  derived and/or modified sequence
atgaacggccacatcagcaaccaccccagcagcttcggcatgtaccccagccagatgaacggctacggcagcagccccaccttcagccagaccgacagagagcacggcagcaagaccagcgccaaggccctgtacgagcagagaaagaactacgccagagacagcgtgagcagcgtgagcgacatcagccagtacagagtggagtag

SEQ ID NO: 313333 - DNA, 1689 bp, Artificial Sequence
  derived and/or modified sequence
atgatggccgccagaatcgacagagacgtgcagatcctgaaccacatcctggacgacatcgagttcttcatcaccaagctgcagaaggccgccgaggccttcagcgagctgagcaagagaaagaagaacaagaagggcaagagaaagggccccggcgagggcgtgctgaccctgagagccaagccccccccccccgacgagttcctggactgcttccagaagttcaagcacggcttcaacctgctggccaagctgaagagccacatccagaaccccagcgccgccgacctggtgcacttcctgttcacccccctgaacatggtggtgcaggccaccggcggccccgagctggccagcagcgtgctgagccccctgctgaacaaggacaccatcgacttcctgaactacaccgtgaacggcgacgagagacagctgtggatgagcctgggcggcacctggatgaaggccagagccgagtggcccaaggagcagttcatccccccctacgtgcccagattcagaaacggctgggagccccccatgctgaacttcatgggcgccaccatggagcaggacctgtaccagctggccgagagcgtggccaacgtggccgagcaccagagaaagcaggagatcaagagactgagcaccgagcacagcagcgtgagcgagtaccaccccgccgacggctacgccttcagcagcaacatctacaccagaggcagccacctggaccagggcgaggccgccgtggccttcaagcccaccagcaacagacacatcgacagaaactacgagcccctgaagacccagcccaagaagtacgccaagagcaagtacgacttcgtggccagaaacaacagcgagctgagcgtgctgaaggacgacatcctggagatcctggacgacagaaagcagtggtggaaggtgagaaacgccagcggcgacagcggcttcgtgcccaacaacatcctggacatcgtgagaccccccgagagcggcctgggcagagccgaccccccctacacccacaccatccagaagcagagaatggagtacggccccagacccgccgacaccccccccgcccccagccccccccccacccccgcccccgtgcccgtgcccctgccccccagcacccccgcccccgtgcccgtgagcaaggtgcccgccaacatcaccagacagaacagcagcagcagcgacagcggcggcagcatcgtgagagacagccagagacacaagcagctgcccgtggacagaagaaagagccagatggaggaggtgcaggacgagctgatccacagactgaccatcggcagaagcgccgcccagaagaagttccacgtgcccagacagaacgtgcccgtgatcaacatcacctacgacagcacccccgaggacgtgaagacctggctgcagagcaagggcttcaaccccgtgaccgtgaacagcctgggcgtgctgaacggcgcccagctgttcagcctgaacaaggacgagctgagaaccgtgtgccccgagggcgccagagtgtacagccagatcaccgtgcagaaggccgccctggaggacagcagcggcagcagcgagctgcaggagatcatgagaagaagacaggagaagatcagcgccgccgccagcgacagcggcgtggagagcttcgacgagggcagcagccactag

SEQ ID NO: 313334 - DNA, 2076 bp, Artificial Sequence
  derived and/or modified sequence
atgaacggccacatcagcaaccaccccagcagcttcggcatgtaccccagccagatgaacggctacggcagcagccccaccttcagccagaccgacagagagcacggcagcaagaccagcgccaaggccctgtacgagcagagaaagaactacgccagagacagcgtgagcagcgtgagcgacatcagccagtacagagtggagcacctgaccaccttcgtgctggacagaaaggacgccatgatcaccgtggacgacggcatcagaaagctgaagctgctggacgccaagggcaaggtgtggacccaggacatgatcctgcaggtggacgacagagccgtgagcctgatcgacctggagagcaagaacgagctggagaacttccccctgaacaccatccagcactgccaggccgtgatgcacagctgcagctacgacagcgtgctggccctggtgtgcaaggagcccacccagaacaagcccgacctgcacctgttccagtgcgacgaggtgaaggccaacctgatcagcgaggacatcgagagcgccatcagcgacagcaagggcggcaagcagaagagaagacccgacgccctgagaatgatcagcaacgccgaccccagcatcccccccccccccagagcccccgcccccgccccccccggcaccgtgacccaggtggacgtgagaagcagagtggccgcctggagcgcctgggccgccgaccagggcgacttcgagaagcccagacagtaccacgagcaggaggagacccccgagatgatggccgccagaatcgacagagacgtgcagatcctgaaccacatcctggacgacatcgagttcttcatcaccaagctgcagaaggccgccgaggccttcagcgagctgagcaagagaaagaagaacaagaagggcaagagaaagggccccggcgagggcgtgctgaccctgagagccaagccccccccccccgacgagttcctggactgcttccagaagttcaagcacggcttcaacctgctggccaagctgaagagccacatccagaaccccagcgccgccgacctggtgcacttcctgttcacccccctgaacatggtggtgcaggccaccggcggccccgagctggccagcagcgtgctgagccccctgctgaacaaggacaccatcgacttcctgaactacaccgtgaacggcgacgagagacagctgtggatgagcctgggcggcacctggatgaaggccagagccgagtggcccaaggagcagttcatccccccctacgtgcccagattcagaaacggctgggagccccccatgctgaacttcatgggcgccaccatggagcaggacctgtaccagctggccgagagcgtggccaacgtggccgagcaccagagaaagcaggagatcaagagactgagcaccgagcacagcagcgtgagcgagtaccaccccgccgacggctacgccttcagcagcaacatctacaccagaggcagccacctggaccagggcgaggccgccgtggccttcaagcccaccagcaacagacacatcgacagaaactacgagcccctgaagacccagcccaagaagtacgccaagagcaagtacgacttcgtggccagaaacaacagcgagctgagcgtgctgaaggacgacatcctggagatcctggacgacagaaagcagtggtggaaggtgagaaacgccagcggcgacagcggcttcgtgcccaacaacatcctggacatcgtgagaccccccgagagcggcctgggcagagccgaccccccctacacccacaccatccagaagcagagaatggagtacggccccagacccgccgacaccccccccgcccccagccccccccccacccccgcccccgtgcccgtgcccctgccccccagcacccccgcccccgtgcccgtgagcaaggtgcccgccaacatcaccagacagaacagcagcagcagcgacagcggcggcagcatcgtgagagacagccagagacacaagaccagcggcggccccaaggagatcagcgacggcggcagcgccagatag

SEQ ID NO: 313335 - DNA, 204 bp, Artificial Sequence
  derived and/or modified sequence
atgaacggccacatcagcaaccaccccagcagcttcggcatgtaccccagccagatgaacggctacggcagcagccccaccttcagccagaccgacagagagcacggcagcaagaccagcgccaaggccctgtacgagcagagaaagaactacgccagagacagcgtgagcagcgtgagcgacatcagccagtacagagtgtag

SEQ ID NO: 313336 - DNA, 387 bp, Artificial Sequence
  derived and/or modified sequence
atgaacggccacatcagcaaccaccccagcagcttcggcatgtaccccagccagatgaacggctacggcagcagccccaccttcagccagaccgacagagagcacggcagcaagaccagcgccaaggccctgtacgagcagagaaagaactacgccagagacagcgtgagcagcgtgagcgacatcagccagtacagagtggagcacctgaccaccttcgtgctggacagaaaggacgccatgatcaccgtggacgacggcatcagaaagctgaagctgctggacgccaagggcaaggtgtggacccaggacatgatcctgcaggtggacgacagagccgtgagcctgatcgacctggagagcaagaacgagctggagaacttctag

SEQ ID NO: 313337 - DNA, 2204 bp, Artificial Sequence
  derived and/or modified sequence
aataccctgaatggtcttaagacatttattttttaatgtgaaaatttctgtctgcttttaaagcatgtagcttaaaattaatgagcccaacattgtgggttttaagcttaattacactagaattttaagaagcactctgctgtcagaactccgaaagctttattgtagtcacagtgttggaatgtataaaaattatagctctgttgcattagaacttagttgaccagcttttgagaagtaaaagcttgactgctggtttatatttctggcttgtgtaggaattaaagggtgctaagttaaggttggttctacaggtagctgactcagggaagagagagaatggggtgatattacaagttgagaaaccaaggcagtatcatgagcaggaagaaacacctgagatgatggcagcccgcattgacagagatgtgcaaatcttaaaccacattttggatgacattgaattttttatcacaaaactccaaaaagcagcagaagcattttctgagctttctaaaaggaagaaaaacaagaaaggtaaaaggaaaggaccaggagagggtgttttaacgctgcgggcaaaacctccacctcctgatgaatttcttgactgtttccaaaagtttaaacacggatttaaccttctggccaaactgaagtctcatattcagaatcctagtgctgcagatttggttcactttttgtttactccattaaatatggtggtgcaggcaacaggaggtcctgaactagccagttcagtacttagtcccctattgaataaggacacaattgatttcttaaattatactgtcaatggtgatgaacggcagctgtggatgtcattgggaggaacttggatgaaagccagagcagagtggccaaaagaacagtttattccaccatatgttccacgattccgcaatggctgggagcccccaatgctgaactttatgggagccacaatggaacaagatctttatcaactggcagaatctgtggcaaatgtagcagaacatcagcgcaaacaggaaataaaaagattatccacagagcattccagtgtatcagagtatcatccagccgatggctatgcgttcagtagcaacatttacacaagaggatcccacctggaccaaggggaagctgctgttgcttttaagccaacttctaatcgccatatagatagaaattatgaaccactcaaaacacaacccaagaaatatgccaaatccaagtatgactttgtagcaaggaacaacagtgagctctcggttctaaaggatgatattttagagatacttgatgatcggaagcaatggtggaaagttcgaaatgcaagtggagactctggatttgtgccaaataacattttggatattgtgagacctccagaatctggattggggcgtgctgatccaccttatactcatactatacagaaacaaaggatggagtatggcccaagaccagctgatactccccctgctccatcacctcctccaacaccagctcctgttcctgttccccttcccccttccactccagcacctgttcctgtgtcaaaggtcccagcaaatataacacgtcaaaacagcagctccagtgacagtggtggcagtatcgtgcgagacagccagagacacaaacaacttccggtggaccgaaggaaatctcagatggaggaagtgcaagatgaactcatccacagactgaccattggtcggagtgccgctcagaagaaattccatgtgccacggcagaacgtgccagttatcaatatcacttacgactccacaccagaggatgtgaagacgtggttacagtcaaagggattcaaccctgtgactgtcaatagtcttggagtattaaatggtgcacaacttttctctctcaataaggatgaactgaggacagtctgccctgaaggggcgagagtctatagccaaatcactgtacaaaaagctgcattggaggatagcagtggcagctccgagttacaagaaattatgagaagacgacaggaaaaaatcagtgctgccgctagtgattcaggagtggaatcttttgatgaaggaagcagtcactaatttgtttgtttgtatttaaactccattgtttttggcattattccaacatgctttgttttaagaagccttgaagggaatgtcagattcatttttcttgatgtaatttatcaccat

SEQ ID NO: 313338 - DNA, 1858 bp, Artificial Sequence
  derived and/or modified sequence
agtattgacaaggatgcatttcatggctgatgagcacagttttgacttgtgtatccagtggaggtgttccctttggcaaatgttgagaaaccaaggcagtatcatgagcaggaagaaacacctgagatgatggcagcccgcattgacagagatgtgcaaatcttaaaccacattttggatgacattgaattttttatcacaaaactccaaaaagcagcagaagcattttctgagctttctaaaaggaagaaaaacaagaaaggtaaaaggaaaggaccaggagagggtgttttaacgctgcgggcaaaacctccacctcctgatgaatttcttgactgtttccaaaagtttaaacacggatttaaccttctggccaaactgaagtctcatattcagaatcctagtgctgcagatttggttcactttttgtttactccattaaatatggtggtgcaggcaacaggaggtcctgaactagccagttcagtacttagtcccctattgaataaggacacaattgatttcttaaattatactgtcaatggtgatgaacggcagctgtggatgtcattgggaggaacttggatgaaagccagagcagagtggccaaaagaacagtttattccaccatatgttccacgattccgcaatggctgggagcccccaatgctgaactttatgggagccacaatggaacaagatctttatcaactggcagaatctgtggcaaatgtagcagaacatcagcgcaaacaggaaataaaaagattatccacagagcattccagtgtatcagagtatcatccagccgatggctatgcgttcagtagcaacatttacacaagaggatcccacctggaccaaggggaagctgctgttgcttttaagccaacttctaatcgccatatagatagaaattatgaaccactcaaaacacaacccaagaaatatgccaaatccaagtatgactttgtagcaaggaacaacagtgagctctcggttctaaaggatgatattttagagatacttgatgatcggaagcaatggtggaaagttcgaaatgcaagtggagactctggatttgtgccaaataacattttggatattgtgagacctccagaatctggattggggcgtgctgatccaccttatactcatactatacagaaacaaaggatggagtatggcccaagaccagctgatactccccctgctccatcacctcctccaacaccagctcctgttcctgttccccttcccccttccactccagcacctgttcctgtgtcaaaggtcccagcaaatataacacgtcaaaacagcagctccagtgacagtggtggcagtatcgtgcgagacagccagagacacaaacaacttccggtggaccgaaggaaatctcagatggaggaagtgcaagatgaactcatccacagactgaccattggtcggagtgccgctcagaagaaattccatgtgccacggcagaacgtgccagttatcaatatcacttacgactccacaccagaggatgtgaagacgtggttacagtcaaagggattcaaccctgtgactgtcaatagtcttggagtattaaatggtgcacaacttttctctctcaataaggatgaactgaggacagtctgccctgaaggggcgagagtctatagccaaatcactgtacaaaaagctgcattggaggatagcagtggcagctccgagttacaagaaattatgagaagacgacaggaaaaaatcagtgctgccgctagtgattcaggagtggaatcttttgatgaaggaagcagtcactaatttgtttgtttgtatttaaactccattgtttttggcattattc

SEQ ID NO: 313339 - DNA, 1116 bp, Artificial Sequence
  derived and/or modified sequence
atggaggaggagggcctggccgacgaggaggtgagactggtgcagaagaaggacaccggccacatctacgccatgaagatcctgagaaagagcgacatgctggagaaggagcaggtggcccacatcagagccgagagagacatcctggtggaggccgacggcgcctgggtggtgaagatgttctacagcttccaggacaagagaaacctgtacctgatcatggagttcctgcccggcggcgacatgatgaccctgctgatgaagaaggacaccctgaccgaggaggagacccagttctacatcagcgagaccgtgctggccatcgacgccatccaccagctgggcttcatccacagagacatcaagcccgacaacctgctgctggacgccaagggccacgtgaagctgagcgacttcggcctgtgcaccggcctgaagaaggcccacagaaccgagttctacagaaacctgacccacaacccccccagcgacttcagcttccagaacatgaacagcaagagaaaggccgagacctggaagaagaacagaagacagctggcctacagcaccgtgggcacccccgactacatcgcccccgaggtgttcatgcagaccggctacaacaagctgtgcgactggtggagcctgggcgtgatcatgtacgagatgctgatcggctacccccccttctgcagcgagaccccccaggagacctacagaaaggtgatgaactggaaggagaccctggtgttcccccccgaggtgcccatcagcgagaaggccaaggacctgatcctgagattctgcatcgacagcgagaacagaatcggcaacagcggcgtggaggagatcaagggccaccccttcttcgagggcgtggactgggagcacatcagagagagacccgccgccatccccatcgagatcaagagcatcgacgacaccagcaacttcgacgacttccccgagagcgacatcctgcagcccgtgcccaacaccaccgagcccgactacaagagcaaggactgggtgttcctgaactacacctacaagagattcgagggcctgacccagagaggcagcatccccacctacatgaaggccggcaagctgtag

SEQ ID NO: 313340 - DNA, 1116 bp, Artificial Sequence
  derived and/or modified sequence
atggaagaagagggactagccgacgaagaggtgcggttggttcaaaaaaaggacactggacacatttacgccatgaaaatcttgaggaaatccgacatgctcgagaaggaacaggtggcccacatccgagcagaaagagatattttggtagaagccgatggtgcttgggtggtgaagatgttctactcttttcaggacaagagaaatttatacctcattatggagttcctgccgggcggagacatgatgacactgttaatgaagaaggacacactgactgaagaagagacccaattctacatcagtgagaccgtgctcgctattgacgcgattcaccagctcggctttattcatcgcgatataaagcccgataacctgctcttagacgccaaagggcatgtaaagctctctgacttcggcttgtgtactgggctcaaaaaagcgcataggactgagttctacaggaatctgacccacaacccacctagtgatttctcctttcagaacatgaactccaaacgcaaagccgagacctggaaaaagaaccggaggcagttggcctattcgactgttggcaccccagattatatagcccccgaggttttcatgcagactggctacaataagttatgcgattggtggtcactgggcgttatcatgtatgagatgctcatcgggtacccacctttctgctcggagacccctcaggaaacctatcggaaggtcatgaattggaaagaaacacttgtgttccctcctgaagtccccatttccgagaaagctaaagacctaatcctgaggttctgtattgatagtgagaataggattgggaattcgggcgttgaagaaattaagggccatcccttttttgaaggtgttgactgggaacatatcagagaacgcccggctgccattcccattgagattaagtctattgatgatacatccaatttcgatgatttccccgaatcagatatcctacagccagttcctaatactacagaaccagattacaagtccaaagattgggttttcttgaattacacgtacaagcgatttgaaggcctgacccagagaggaagcatccctacatatatgaaggccggaaagttgtag

SEQ ID NO: 313341 - DNA, 1116 bp, Artificial Sequence
  derived and/or modified sequence
atggaggaggagggcctggctgatgaggaggtgcggctggtgcagaagaaggacaccggccacatctatgccatgaagatcctgaggaagagtgacatgctggagaaggagcaggtggcccacatccgggcagagcgggacatcctggtggaggctgatggagcctgggtggtgaagatgttctacagcttccaggacaagaggaacctgtacctgatcatggagttcctgcccggcggggacatgatgaccctgctgatgaagaaggacaccctgacagaggaggagacccagttctacatcagcgagaccgtgctggccattgatgccatccaccagctgggcttcatccaccgggacatcaagccagacaacctgctgctggatgccaagggccacgtgaagctgagtgactttggcctgtgcaccggcctgaagaaggcccacaggacagagttctacagaaacctgacccacaaccccccaagtgacttctccttccagaacatgaacagcaagaggaaggccgagacctggaagaagaacagacggcagctggcctacagcacagtgggcaccccagactacatcgcccctgaggtgttcatgcagacaggctacaacaagctgtgtgactggtggagcctgggcgtcatcatgtatgagatgctgattggctacccacccttctgcagcgagaccccccaggagacctacaggaaggtgatgaactggaaggagaccctggtgttccccccagaggtgcccatcagcgagaaggccaaggacctgatcctgcgcttctgcatcgacagtgaaaatcgcatcggcaacagcggcgtggaggagatcaagggccaccccttctttgagggcgtggactgggagcacatccgggagaggcctgctgccatccccatcgagatcaagagcattgatgacaccagcaactttgatgacttccctgagagtgacatcctgcagcctgtgcccaacaccacagagccagactacaagagcaaggactgggtgttcctgaactacacctacaagagatttgagggcctgacccagaggggcagcatccccacctacatgaaggccggcaagctgtag

SEQ ID NO: 313342 - DNA, 1116 bp, Artificial Sequence
  derived and/or modified sequence
atggaggaggagggcctggccgacgaggaggtgcggctggtgcagaaaaaagatacagggcacatttacgccatgaaaatcctgagaaaatccgacatgctggagaaagagcaggttgcccacatccgcgctgaacgagatattctggtggaagcagatggagcatgggtggtgaaaatgttctactcatttcaggacaagaggaatctctacctgataatggagtttctgccagggggcgacatgatgaccctcctcatgaagaaggacactctgaccgaagaggagactcagttttatattagtgagaccgtgctcgccattgatgcaatacatcaactaggcttcatacaccgtgacatcaagcccgacaatcttctcctcgatgcaaaggggcacgttaagttgtcagacttcgggctctgtaccggtttgaagaaggcacatcgcactgagttctatagaaacctgacacataatccgccctccgatttcagttttcaaaatatgaattcaaaacgaaaagcggagacatggaaaaagaataggcgacaacttgcatactccaccgtcggaaccccagattacatagctccagaggttttcatgcagactggatataacaagctgtgtgattggtggtccctgggagtgattatgtacgagatgctcatcgggtaccctcccttctgttctgaaaccccccaggaaacctatagaaaggttatgaactggaaggagaccctcgtgttccctcccgaggtaccaatatcagaaaaagccaaggacctgattcttagattttgcatcgactccgaaaatcgaattggaaattccggagttgaagaaattaagggacatcccttcttcgagggagttgattgggagcacatccgcgagcgacccgccgccatcccaattgagatcaagtcaatcgatgacacatcaaactttgacgactttcctgagagcgatatactgcagcccgtccctaacacaacagaacccgactacaagagcaaggactgggtgttcctcaactacacttataaacgcttcgagggactgacgcagagggggtccatccccacatacatgaaggcagggaagttgtag

SEQ ID NO: 313343 - DNA, 1116 bp, Artificial Sequence
  derived and/or modified sequence
atggaagaggagggcttggccgacgaggaggtgagactggtgcagaagaaggacacaggtcatatctatgcaatgaagattctgcggaagtctgacatgttggaaaaggagcaagtcgcacatatcagggcggagcgcgatatcttagtggaggccgatggcgcttgggtcgttaaaatgttttactctttccaggataaaaggaatctctacttaattatggagttcctgcccggaggcgacatgatgaccctgcttatgaaaaaggatactctgacagaagaggagacccagttctatatctctgaaacagtccttgctatcgatgctatccatcagctggggttcatccatcgtgacatcaaacccgataatctgttattggatgccaaaggccatgttaaactgagcgacttcgggctctgcacgggccttaaaaaagcccaccggaccgaattttatagaaacttgacacacaaccccccttcggatttttcattccagaacatgaacagtaagaggaaagccgaaacatggaagaaaaacaggcggcagttggcttacagcacggtgggaacgcctgactatattgcacccgaagtcttcatgcaaactgggtataacaagctgtgtgactggtggtccctcggagtgatcatgtatgaaatgctgatagggtatccacctttttgtagcgagactcctcaggagacttatcgcaaagttatgaattggaaagagacactggtctttcctccagaagtgccgatctctgagaaagcaaaggaccttatcctgcgcttctgcatcgactcagagaatagaatcggaaattccggcgttgaagaaattaaaggccaccctttttttgagggcgtagattgggaacacatccgggagcggcctgccgcaatccctattgaaataaagtccatcgacgatacgagtaattttgacgactttcctgagagtgatattctccagccggtacctaatacaactgagcctgattacaaatcaaaggactgggtgttcttgaattacacgtacaaaaggtttgaagggcttactcaaagaggctcaatccccacatacatgaaggcgggaaagctgtag

SEQ ID NO: 313344 - protein, 1421 aa, Artificial Sequence
  derived and/or modified sequence
MMLPQNSWHIDFGRCCCHQNLFSAVVTCILLLNSCFLISSFNGTDLELRLVNGDGPCSGTVEVKFQGQWGTVCDDGWNTTASTVVCKQLGCPFSFAMFRFGQAVTRHGKIWLDDVSCYGNESALWECQHREWGSHNCYHGEDVGVNCYGEANLGLRLVDGNNSCSGRVEVKFQERWGTICDDGWNLNTAAVVCRQLGCPSSFISSGVVNSPAVLRPIWLDDILCQGNELALWNCRHRGWGNHDCSHNEDVTLTCYDSSDLELRLVGGTNRCMGRVELKIQGRWGTVCHHKWNNAAADVVCKQLGCGTALHFAGLPHLQSGSDVVWLDGVSCSGNESFLWDCRHSGTVNFDCLHQNDVSVICSDGADLELRLADGSNNCSGRVEVRIHEQWWTICDQNWKNEQALVVCKQLGCPFSVFGSRRAKPSNEARDIWINSISCTGNESALWDCTYDGKAKRTCFRRSDAGVICSDKADLDLRLVGAHSPCYGRLEVKYQGEWGTVCHDRWSTRNAAVVCKQLGCGKPLHVFGMTYFKEASGPIWLDDVSCIGNESNIWDCEHSGWGKHNCVHREDVIVTCSGDATWGLRLVGGSNRCSGRLEVYFQGRWGTVCDDGWNSKAAAVVCSQLDCPSSIIGMGLGNASTGYGKIWLDDVSCDGDESDLWSCRNSGWGNNDCSHSEDVGVICSDASDMELRLVGGSSRCAGKVEVNVQGAVGILCANGWGMNIAEVVCRQLECGSAIRVSREPHFTERTLHILMSNSGCTGGEASLWDCIRWEWKQTACHLNMEASLICSAHRQPRLVGADMPCSGRVEVKHADTWRSVCDSDFSLHAANVLCRELNCGDAISLSVGDHFGKGNGLTWAEKFQCEGSETHLALCPIVQHPEDTCIHSREVGVVCSRYTDVRLVNGKSQCDGQVEINVLGHWGSLCDTHWDPEDARVLCRQLSCGTALSTTGGKYIGERSVRVWGHRFHCLGNESLLDNCQMTVLGAPPCIHGNTVSVICTGSLTQPLFPCLANVSDPYLSAVPEGSALICLEDKRLRLVDGDSRCAGRVEIYHDGFWGTICDDGWDLSDAHVVCQKLGCGVAFNATVSAHFGEGSGPIWLDDLNCTGMESHLWQCPSRGWGQHDCRHKEDAGVICSEFTALRLYSETETESCAGRLEVFYNGTWGSVGRRNITTAIAGIVCRQLGCGENGVVSLAPLSKTGSGFMWVDDIQCPKTHISIWQCLSAPWERRISSPAEETWITCEDRIRVRGGDTECSGRVEIWHAGSWGTVCDDSWDLAEAEVVCQQLGCGSALAALRDASFGQGTGTIWLDDMRCKGNESFLWDCHAKPWGQSDCGHKEDAGVRCSGQSLKSLNASSGHLALILSSIFGLLLLVLFILFLTWCRVQKQKHLPLRDDTPNHGCEDASDTSLLGVLPASEATK

SEQ ID NO: 313345 - DNA, 4484 bp, Artificial Sequence
  derived and/or modified sequence
aggactcaggaagagatagacccataatgatgctgcctcaaaactcgtggcatattgattttggaagatgctgctgtcatcagaaccttttctctgctgtggtaacttgcatcctgctcctgaattcctgctttctcatcagcagttttaatggaacagatttggagttgaggctggtcaatggagacggtccctgctctgggacagtggaggtgaaattccagggacagtgggggactgtgtgtgatgatgggtggaacactactgcctcaactgtcgtgtgcaaacagcttggatgtccattttctttcgccatgtttcgttttggacaagccgtgactagacatggaaaaatttggcttgatgatgtttcctgttatggaaatgagtcagctctctgggaatgtcaacaccgggaatggggaagccataactgttatcatggagaagatgttggtgtgaactgttatggtgaagccaatctgggtttgaggctagtggatggaaacaactcctgttcagggagagtggaggtgaaattccaagaaaggtggggaactatatgtgatgatgggtggaacttgaatactgctgccgtggtgtgcaggcaactaggatgtccatcttcttttatttcttctggagttgttaatagccctgctgtattgcgccccatttggctggatgacattttatgccaggggaatgagttggcactctggaattgcagacatcgtggatggggaaatcatgactgcagtcacaatgaggatgtcacattaacttgttatgatagtagtgatcttgaactaaggcttgtaggtggaactaaccgctgtatggggagagtagagctgaaaatccaaggaaggtgggggaccgtatgccaccataagtggaacaatgctgcagctgatgtcgtatgcaagcagttgggatgtggaaccgcacttcacttcgctggcttgcctcatttgcagtcagggtctgatgttgtatggcttgatggtgtctcctgctccggtaatgaatcttttctttgggactgcagacattccggaaccgtcaattttgactgtcttcatcaaaacgatgtgtctgtgatctgctcagatggagcagatttggaactgcgactagcagatggaagtaacaattgttcagggagagtagaggtgagaattcatgaacagtggtggacaatatgtgaccagaactggaagaatgaacaagcccttgtggtttgtaagcagctaggatgtccgttcagcgtctttggcagtcgtcgtgctaaacctagtaatgaagctagagacatttggataaacagcatatcttgcactgggaatgagtcagctctctgggactgcacatatgatggaaaagcaaagcgaacatgcttccgaagatcagatgctggagtaatttgttctgataaggcagatctggacctaaggcttgtcggggctcatagcccctgttatgggagattggaggtgaaataccaaggagagtgggggactgtgtgtcatgacagatggagcacaaggaatgcagctgttgtttgtaaacaattgggatgtggaaagcctttgcatgtgtttggtatgacctattttaaagaagcatcaggacctatttggctggatgacgtttcttgcattggaaatgagtcaaatatctgggactgtgaacacagtggatggggaaagcataattgtgtacacagagaggatgtgattgtaacctgctcaggtgatgcaacatggggcctgaggctggtgggcggcagcaaccgctgctcgggaagactggaggtgtactttcaaggacggtggggcacagtgtgtgatgacggctggaacagtaaagctgcagctgtggtgtgtagccagctggactgcccatcttctatcattggcatgggtctgggaaacgcttctacaggatatggaaaaatttggctcgatgatgtttcctgtgatggagatgagtcagatctctggtcatgcaggaacagtgggtggggaaataatgactgcagtcacagtgaagatgttggagtgatctgttctgatgcatcggatatggagctgaggcttgtgggtggaagcagcaggtgtgctggaaaagttgaggtgaatgtccagggtgccgtgggaattctgtgtgctaatggctggggaatgaacattgctgaagttgtttgcaggcaacttgaatgtgggtctgcaatcagggtctccagagagcctcatttcacagaaagaacattacacatcttaatgtcgaattctggctgcactggaggggaagcctctctctgggattgtatacgatgggagtggaaacagactgcgtgtcatttaaatatggaagcaagtttgatctgctcagcccacaggcagcccaggctggttggagctgatatgccctgctctggacgtgttgaagtgaaacatgcagacacatggcgctctgtctgtgattctgatttctctcttcatgctgccaatgtgctgtgcagagaattaaactgtggagatgccatatctctttctgtgggagatcactttggaaaagggaatggtctaacttgggccgaaaagttccagtgtgaagggagtgaaactcaccttgcattatgccccattgttcaacatccggaagacacttgtatccacagcagagaagttggagttgtctgttcccgatatacagatgtccgacttgtgaatggcaaatcccagtgtgacgggcaagtggagatcaacgtgcttggacactggggctcactgtgtgacacccactgggacccagaagatgcccgtgttctatgcagacagctcagctgtgggactgctctctcaaccacaggaggaaaatatattggagaaagaagtgttcgtgtgtggggacacaggtttcattgcttagggaatgagtcacttctggataactgtcaaatgacagttcttggagcacctccctgtatccatggaaatactgtctctgtgatctgcacaggaagcctgacccagccactgtttccatgcctcgcaaatgtatctgacccatatttgtctgcagttccagagggcagtgctttgatctgcttagaggacaaacggctccgcctagtggatggggacagccgctgtgccgggagagtagagatctatcacgacggcttctggggcaccatctgtgatgacggctgggacctgagcgatgcccacgtggtgtgtcaaaagctgggctgtggagtggccttcaatgccacggtctctgctcactttggggaggggtcagggcccatctggctggatgacctgaactgcacaggaatggagtcccacttgtggcagtgcccttcccgcggctgggggcagcacgactgcaggcacaaggaggacgcaggggtcatctgctcagaattcacagccttgaggctctacagtgaaactgaaacagagagctgtgctgggagattggaagtcttctataacgggacctggggcagcgtcggcaggaggaacatcaccacagccatagcaggcattgtgtgcaggcagctgggctgtggggagaatggagttgtcagcctcgcccctttatctaagacaggctctggtttcatgtgggtggatgacattcagtgtcctaaaacgcatatctccatatggcagtgcctgtctgccccatgggagcgaagaatctccagcccagcagaagagacctggatcacatgtgaagatagaataagagtgcgtggaggagacaccgagtgctctgggagagtggagatctggcacgcaggctcctggggcacagtgtgtgatgactcctgggacctggccgaggcggaagtggtgtgtcagcagctgggctgtggctctgctctggctgccctgagggacgcttcgtttggccagggaactggaaccatctggttggatgacatgcggtgcaaaggaaatgagtcatttctatgggactgtcacgccaaaccctggggacagagtgactgtggacacaaggaagatgctggcgtgaggtgctctggacagtcgctgaaatcactgaatgcctcctcaggtcatttagcacttattttatccagtatctttgggctccttctcctggttctgtttattctatttctcacgtggtgccgagttcagaaacaaaaacatctgcccctcagagatgacacccccaaccatggttgtgaagatgctagcgacacatcgctgttgggagttcttcctgcctctgaagccacaaaatgactttagacttccagggctcaccagatcaacctctaaatatctttgaaggagacaacaacttttaaatgaataaagaggaagtcaagttgccctatggaaaacttgtccaaataacatttcttgaacaataggagaacagctaaattgataaagactggtgataataaaaattgaattatgtatatcactgtt

SEQ ID NO: 313346 - DNA, 4266 bp, Artificial Sequence
  derived and/or modified sequence
atgatgctcccacagaattcgtggcacatcgacttcgggaggtgttgttgccaccaaaatctctttagcgccgtggttacttgcatcctgctactaaattcttgtttccttatatccagctttaacggcacagacctggagttgcggctcgtgaatggcgatggcccttgcagcggcacggtcgaggttaagtttcagggtcagtgggggaccgtctgtgacgatggttggaacacaaccgccagtacagtggtctgtaagcagctcggatgccctttttcgttcgccatgttccggttcggccaggctgtgactcgacacggaaagatttggcttgatgatgtctcctgttatggaaatgagtctgctctgtgggagtgtcagcaccgagagtggggctcacacaattgctaccacggagaagacgtgggcgtgaactgttacggcgaggcaaatctcgggctcagactagtggacgggaacaattcatgttctggaagagtggaggtaaaattccaagaacgttggggtaccatatgcgacgatggctggaacttaaacaccgctgcggttgtttgcaggcaacttggatgtccatcttcttttatcagtagtggggtcgtgaactcccctgcagtccttcgaccgatctggctagacgacattctttgccaggggaatgaactggcactgtggaactgcaggcaccggggatggggaaatcacgattgtagtcataacgaagacgtaacactgacatgttatgattcctccgacctagaactacgactggtaggtggaacgaacaggtgcatgggccgagttgaactgaagatacaaggcagatgggggactgtgtgccaccacaaatggaataacgctgctgccgatgttgtgtgtaagcagcttggctgtggcacggctttacattttgctggcttgccccatctgcagtccggctcagatgttgtgtggctggacggggtgtcatgtagcggcaacgagagctttctctgggattgcaggcattctggaactgttaattttgactgtctccaccagaacgacgtgagtgtgatctgctccgatggagccgacctcgagctgcgccttgctgatggctcaaacaactgctctggaagagtggaagttagaatccacgagcagtggtggacaatttgtgatcaaaattggaagaacgagcaagccctggtggtctgcaagcagctcggatgcccattttccgtgttcgggtcaaggcgggctaaaccgtccaatgaggctagagacatctggatcaactcaatctcttgcactgggaatgaatccgccttatgggactgcacttacgacgggaaggcgaagcgaacttgctttcggaggtcagacgctggtgtgatctgttccgacaaggcggatcttgatcttagactggttggcgctcattccccatgctacggacgcttggaagtgaaatatcagggagaatggggcactgtctgtcacgacagatggagcacccgaaacgccgctgtggtgtgtaaacagctggggtgcggcaaaccgctgcatgtgttcgggatgacctactttaaggaggctagtggccctatttggctggatgatgtttcttgcattggcaacgaaagtaatatctgggattgtgagcattctgggtggggcaagcacaattgtgtccaccgagaggacgtcattgtcacatgctccggcgacgccacatggggcctgcggctcgtgggcggatctaaccgctgctccggacgactcgaagtctactttcagggtaggtggggtactgtgtgcgacgacggctggaactccaaagctgccgctgtggtttgcagtcagctggactgtccttctagcatcatcggtatgggactgggcaacgcttccaccgggtacgggaaaatttggctcgacgacgtcagctgtgatggtgacgaaagcgacctgtggtcttgccggaactccggatggggcaacaacgattgttcccatagtgaggatgtcggcgtgatatgctccgatgccagcgacatggagctgaggctcgttggcggttcttccagatgtgccggaaaggtggaagtcaatgtgcagggagccgtggggattttatgtgccaatggatgggggatgaatatcgccgaggtggtgtgcagacagctggagtgcggtagcgcaatccgggttagccgggagccccacttcaccgaaaggacactacatattttaatgtctaattccggatgtaccgggggtgaagcctctttgtgggattgcatcagatgggagtggaaacaaaccgcctgtcacttaaacatggaggcctctcttatctgctccgcacaccggcaacctcggctggttggagcggatatgccgtgctccggacgagtagaggtcaaacatgcagacacctggaggagtgtctgtgactccgattttagcctgcacgccgctaatgtgctttgtcgtgaattaaactgtggcgacgcgatcagtctaagtgtcggagaccattttgggaagggtaatggtctgacctgggccgagaaatttcagtgtgagggctcagaaacccacctggctctgtgtcccattgtgcagcatcccgaggatacctgcatccactccagagaggttggtgtggtctgctcaaggtatacagatgtgagactagtcaatggcaagtcccaatgtgacggccaggtcgaaattaacgtcttaggccactggggctccctctgtgacacgcattgggatccagaggacgctcgcgtcttgtgcaggcagctgtcttgcggtacagccctttcaaccactggagggaagtacattggggagaggagtgtaagggtctggggccaccgcttccactgtctcggtaatgaatcgctgctggacaactgccagatgacagtgctgggcgcacctccgtgtatacacgggaatacagtttctgtcatctgtactggctcactcacccagcccctgttcccatgtctggccaacgtttcagatccttacttatcagccgtacccgaggggagtgcactgatctgccttgaggataagagattgagacttgtcgacggagactctcgctgtgcaggcagagttgaaatataccatgacggcttttggggaacaatttgtgacgatggctgggacctctcggacgcccatgtggtttgtcagaagttggggtgcggagtcgcattcaacgcaactgtgtcggctcacttcggcgagggaagcggcccaatctggctggatgatctgaattgtactgggatggaatcccatttgtggcagtgtccatcccgaggttggggccagcacgattgccggcacaaggaggacgcaggtgtcatctgctctgagtttacagccctgcgcctttatagcgagaccgagacagagagctgcgctggcaggcttgaggtgttctataacggcacttggggtagtgtagggaggagaaacatcactactgcaatcgctggaattgtctgtcgccagctaggctgcggagaaaacggagtcgtgtctctggccccattatcgaaaacgggatccggctttatgtgggtcgatgacatccagtgtcccaagacacatatctcaatatggcagtgcctcagcgcaccttgggagcggcgtattagctctcctgctgaggagacctggataacctgcgaggaccggatcagagtgcgtggaggggatacagaatgctcaggtagagtcgagatctggcatgctggctcttggggaacagtgtgcgacgatagctgggatcttgcggaagccgaagtggtgtgtcagcagctcgggtgcggctccgccctagcagccttacgggatgcctcttttggtcaggggacaggcactatctggctggatgatatgcgctgcaaaggcaacgaatcgttcctgtgggattgtcacgccaaaccgtgggggcagtccgactgcggccataaggaggatgctggcgtgcggtgtagcggacaaagcctgaaatccttgaatgcaagttccggacatcttgccctaattctgtcctcaatcttcggtctcttactgctggttctgtttatcctgttcttgacctggtgtcgggtgcagaagcaaaaacatctacccctgcgggacgatactcccaaccacggatgtgaagacgcatcagacacctccctcctgggagtcctcccagcctctgaggcaacaaagtag

SEQ ID NO: 313347 - DNA, 4266 bp, Artificial Sequence
  derived and/or modified sequence
atgatgctccctcagaattcttggcacattgatttcggccgctgttgttgccatcagaacctgttcagtgctgttgtcacttgcatcctactcttgaatagctgcttccttatcagctcttttaacggaacagacctggaactgagactcgttaatggcgatgggccatgttcgggaacagtggaagtgaaatttcaagggcagtggggcacagtttgcgatgacggatggaacaccactgctagtactgtggtttgtaagcaattggggtgtccattttcttttgcgatgttcaggtttggacaggcagtcacaagacacgggaaaatctggcttgatgatgtctcatgctatggcaatgagtcagccctgtgggagtgccagcaccgggagtggggaagccacaattgttatcatggcgaggatgtgggagtgaactgctatggcgaagcaaacctgggactgaggcttgtggacggtaacaactcttgttcaggaagagttgaagtgaaatttcaagaaaggtggggcaccatttgcgatgatggttggaatctgaacactgctgccgttgtttgccgccagctgggctgccctagttcctttatcagcagcggagtagtgaatagtccggccgtacttcgccccatttggttggacgacatcttgtgccaggggaatgagttggctttgtggaattgtaggcaccgcggctggggcaaccacgactgtagccataatgaagacgtgaccctcacatgctatgatagctccgacctcgaactaaggcttgtcggcggcacgaataggtgcatgggaagagtggaactcaagatacagggacgatggggtaccgtctgtcaccataaatggaacaacgccgctgccgatgtcgtttgcaaacagctgggttgcggcaccgcgctgcacttcgccggactcccacacctccagagtggctccgatgtcgtgtggcttgatggagtgtcttgctcgggtaatgaaagttttctgtgggactgtcgccattctgggacagtgaattttgattgtctccatcaaaacgatgtgagcgtcatctgcagcgacggggcagaccttgagctgaggcttgctgatggctccaataactgtagtggaagagtggaggttcggattcacgaacagtggtggactatatgcgaccaaaattggaagaacgagcaggcgctggtggtatgcaaacaactggggtgtccattcagcgtgtttgggtctcgaagggctaaaccaagcaatgaggcccgcgacatctggattaatagcatatcctgcaccggtaatgagtctgctctatgggactgtacgtatgatggcaaagcaaagagaacgtgctttcgcagaagtgatgccggagtaatatgttccgacaaagcggacttggacttgcggttagtcggcgcacactctccatgctatggaagactggaagtaaaatatcagggtgaatggggtacagtttgccacgaccggtggtcaacacgcaatgctgccgtagtgtgtaagcagttaggatgcggcaagccacttcacgtgtttgggatgacctactttaaggaggcatccgggcctatctggctggatgacgtcagctgtatcgggaacgagtccaatatttgggactgcgagcactcagggtggggcaagcataactgtgtccatcgcgaggacgtgatagttacttgtagtggcgacgctacgtggggcctccgcctcgtcggtggcagcaatcggtgttccggacgcctggaggtgtactttcagggacgatggggaactgtatgtgatgacgggtggaacagtaaggccgccgcagtcgtctgcagtcagctggactgtcccagctctattatcggcatgggtttgggaaatgcctctactgggtacgggaaaatttggttggatgacgtcagctgcgatggtgacgagagtgacctctggtcgtgcagaaactccggttgggggaacaatgactgtagccactccgaggatgtgggtgtgatttgttcggacgcctcggatatggaattgcgacttgtgggtggttcaagcagatgcgccgggaaagttgaggtcaacgtacagggggctgtcggcatcctctgtgctaacggttggggcatgaatatcgctgaggtcgtttgtagacagctggaatgcggaagtgcaatcagagtgtctagggagccccatttcacagagaggacgctgcacatattgatgtctaattctggctgtaccggaggcgaagcatccctgtgggactgcatcagatgggaatggaaacagactgcctgccacctgaatatggaggctagcctgatctgttcagcccatcgtcaaccgcgactcgtgggagccgatatgccctgttccggacgcgtcgaagtaaaacacgcggatacatggcggtcggtgtgtgattctgacttctccctgcatgccgcaaatgtgctttgccgcgagctaaactgtggcgacgctattagcttaagcgtgggcgatcacttcggcaagggaaacggcttaacctgggccgagaaattccagtgcgaaggcagcgaaacccacctagccctgtgccctattgtgcagcaccccgaggacacatgcattcattccagggaggtgggcgttgtatgcagccgctacacggatgtgcgattagttaacggtaagtctcaatgcgacggacaggttgagatcaatgttctgggacattggggcagcctatgtgatactcactgggaccctgaggacgctagggtgctctgcagacaactttcatgtgggaccgccttatctacaactggagggaaatacatcggcgaaaggtccgtacgcgtttggggtcaccggtttcactgtctgggaaacgagagtttgctggacaattgtcaaatgaccgtcctgggagcacctccctgcatccatggcaacacagttagtgtgatatgcactggctcccttacccagcccctgtttccgtgcttggcaaatgttagtgatccatatttatccgctgtgccagagggctccgctctgatttgtctggaggacaaacgcttgcgcctcgttgacggggacagtcgatgcgcaggtagggtcgaaatttaccacgatgggttctggggaaccatctgcgatgacggatgggatctcagcgatgcccacgtcgtgtgtcaaaaattgggatgcggggtggcctttaacgcaacagtttctgcacacttcggcgagggaagtgggccaatttggcttgacgatctaaactgtactgggatggaaagccacctgtggcagtgtccgtctagaggttgggggcaacatgactgcaggcataaagaggatgccggggtgatctgttctgagttcaccgccctgcggctatatagcgagacagagacagaaagctgtgccggccggctagaggttttttacaatgggacatggggctctgtgggcagaaggaatatcaccacagccattgctgggattgtttgccgacagctgggctgtggagaaaacggggtcgtcagcctagcccccctctccaaaaccggatccggcttcatgtgggttgatgatatccaatgcccaaagactcatatttcgatctggcagtgcttgagcgctccttgggagcgtaggatctcgtctcctgcagaagagacgtggattacctgcgaagaccgcatacgagtacgcgggggagacaccgagtgtagcggaagggtcgagatctggcacgccggttcatggggtaccgtctgtgacgatagctgggacctcgccgaggctgaagtcgtatgccaacagctgggctgtggcagtgccctcgcggcattgcgagatgcctctttcggacagggaacagggacaatctggttagacgacatgaggtgtaagggcaatgaatcgttcctgtgggattgtcatgcgaaaccttggggccagagcgactgcggacacaaggaggacgctggcgtgaggtgttctggccagtccttgaagtcacttaatgccagctcaggtcatctcgctttgatactcagctccatttttgggttactgctcttggtgctgtttatcctgttcctcacctggtgccgcgtgcaaaagcagaaacacctgccactgcgggatgacactcctaaccacgggtgtgaggatgccagcgatacgtctctgctcggcgtgctgccagccagtgaggcaactaaatag

SEQ ID NO: 313348 - DNA, 4266 bp, Artificial Sequence
  derived and/or modified sequence
atgatgctcccccagaactcctggcatatcgattttggaagatgttgctgccaccagaacctgttttctgccgtggtgacttgcatcctgcttctgaactcatgtttcttaatatcttcttttaacggaactgaccttgagttacgcctcgtcaacggagatggcccttgtagtgggactgttgaagtgaagttccagggacagtggggaactgtgtgcgatgatgggtggaacaccacagctagtaccgtggtctgtaaacaactcggttgccccttttctttcgcaatgttcagattcggccaagctgtaacccggcatggcaaaatatggttggatgacgtgtcatgttacggcaatgaaagtgcactgtgggagtgccaacatagggaatgggggtcccataattgctaccacggagaagatgttggggtgaactgctatggagaggccaatctgggcttgagactggtggatggaaataacagctgtagcggaagggtggaggtcaagtttcaagaacgttggggtactatttgtgatgacgggtggaacctgaatacagctgctgtggtatgtagacagctgggttgcccgagtagctttattagttcaggagtcgtcaactcccctgccgtattaaggccaatttggctcgacgacatcctatgtcaaggaaacgagttagcactctggaactgcagacataggggttgggggaatcacgattgctctcataatgaagacgtgacactcacttgctacgattcctccgacctggagttacgcttagtgggcggcacaaatcggtgcatggggcgggtagagttaaaaatacagggaagatggggaactgtgtgtcatcacaagtggaataatgccgctgccgacgtggtttgcaagcagctaggctgtgggaccgcacttcactttgctggcttaccccatctccagtccggttccgacgtcgtttggctggacggggtgtcctgtagtggaaacgagagctttctgtgggactgtcggcactcagggacagtgaattttgactgcttgcaccagaatgacgtgagcgtgatttgcagcgacggcgcagacttagagctccgcctcgccgatggatctaataactgttcaggacgagtggaagtgagaatccatgaacaatggtggactatatgtgatcagaactggaaaaacgaacaggcactagtcgtttgcaagcagcttggatgtcccttttcggttttcggctctcgacgagccaaaccctcaaacgaagcacgagatatctggatcaatagcatttcatgtacgggaaacgaatcagctctgtgggattgcacctacgacggtaaggctaagagaacttgttttagacgatctgacgcaggtgttatttgctccgataaagccgacttggatttgaggcttgtaggcgcacactcaccctgctatggtcggctggaggtgaagtaccagggcgaatggggcacagtctgtcatgataggtggagcactaggaatgccgcagtggtgtgcaagcagctgggttgtgggaagccgttacacgtctttggaatgacttactttaaggaagccagcgggcccatctggctagatgacgttagctgtattgggaatgagtcaaatatctgggactgcgagcacagtgggtggggcaagcacaactgtgttcatagggaagatgtgatcgtcacatgctcaggcgatgcaacgtggggcttaaggttggtgggcgggtctaatagatgctctggtcgacttgaggtgtatttccaaggtaggtggggaacagtgtgcgacgacggttggaactcaaaggcagcagctgtggtatgctcacaactggattgtcctagttcaattatcgggatgggtctggggaacgcaagcactggttatggcaagatatggctggatgatgtgtcttgcgacggcgacgagtcagatctttggagctgcaggaactctggctgggggaacaacgattgcagccacagtgaggatgtcggcgtcatctgttccgacgcttctgacatggaactaaggctggtgggcgggtcgtctcgttgtgcaggtaaggtggaagtcaatgtgcagggcgcggtggggatcctgtgcgccaacggttgggggatgaacatcgctgaggtcgtgtgccggcaactcgaatgtggatcggctattagggtgtctagagaaccacacttcaccgaacggacattacatatcctgatgtctaatagtgggtgtaccggaggagaagcatcgttgtgggactgtatccgatgggagtggaagcaaacagcgtgtcatctgaatatggaagcatccctaatctgctcggcacatcggcagccaagattggttggagctgatatgccttgttcaggtcgcgtggaagtcaagcacgccgatacgtggaggtcggtatgcgactctgatttctcccttcacgcagcaaatgttttgtgccgcgaactcaactgcggtgacgctatctctctttcagtcggcgatcattttggcaagggaaatggactcacttgggctgagaagttccaatgcgagggtagcgagacgcacctggccttgtgcccaattgtacagcacccagaagatacctgcatacattcacgcgaggttggagttgtttgctctcgttacacggacgtgcgcctagttaatgggaaaagccagtgcgacggtcaggtcgaaattaatgtgctgggacattggggttctctgtgcgatacacattgggaccctgaagatgcaagagttctgtgtagacagctctcatgtggaactgcactttccaccaccggggggaaatatatcggggaaagatcagtcagggtttggggtcaccgcttccactgcctcggcaacgaaagcctcttggacaattgccagatgaccgtcctcggggcacccccctgtatacatgggaacactgtgtcagtgatttgcacgggaagtctaacccagcccctattcccttgcttagctaacgtcagcgatccgtacctgtcagccgtgccagaagggtcggcacttatatgtctcgaagacaagaggcttcgtttagtggatggagatagcaggtgtgccggtcgagtcgaaatctaccatgacggtttctgggggaccatctgcgatgacggatgggatctctctgacgctcatgtggtgtgccagaaactcgggtgtggcgtcgccttcaacgcaacagtgtcagcccactttggggagggatccggccccatttggcttgatgatctaaactgcacaggaatggaaagccacctatggcagtgcccctcacgaggttgggggcagcatgactgcaggcacaaagaagatgcaggcgtcatttgctctgaatttactgccttaaggctctattctgagaccgaaaccgaatcgtgcgctggaagattggaagtgttctataatggaacctggggatcagtagggagaaggaatattacaaccgcaatagcaggaatagtctgtagacaactggggtgcggggaaaatggcgtggtatccctggcaccactgtcgaaaactggaagcgggttcatgtgggttgatgacatccaatgccccaagactcacatttctatctggcaatgcctgagcgcaccttgggaaagaaggattagttccccagcagaggagacctggataacttgcgaagacaggatccgcgtaagagggggtgataccgaatgctctggaagagtcgagatatggcacgcaggctcctggggaaccgtatgtgacgattcatgggatctagccgaagccgaagtggtgtgtcagcagctgggatgtggtagcgccctcgccgcgctgcgagacgccagtttcggtcaaggcacaggcaccatttggctggatgatatgagatgtaaaggcaacgaaagctttttgtgggattgccacgcaaaaccatggggacagtccgattgtggacacaaagaagatgctggcgttaggtgcagtggacagagtctcaagagtcttaatgcatcttctggacatcttgctctcatcctctctagcatttttggtttactcctcctcgtactgtttatactatttctaacctggtgcagagttcaaaagcagaaacacctccctttaagggatgacacacccaatcacggatgcgaagacgcctcggatacatctttgctgggagtattgcccgcctcagaagctacaaaatag

SEQ ID NO: 313349 - DNA, 4266 bp, Artificial Sequence
  derived and/or modified sequence
atgatgctgccccagaacagctggcacatcgacttcggcagatgctgctgccaccagaacctgttcagcgccgtggtgacctgcatcctgctgctgaacagctgcttcctgatcagcagcttcaacggcaccgacctggagctgagactggtgaacggcgacggcccctgcagcggcaccgtggaggtgaagttccagggccagtggggcaccgtgtgcgacgacggctggaacaccaccgccagcaccgtggtgtgcaagcagctgggctgccccttcagcttcgccatgttcagattcggccaggccgtgaccagacacggcaagatctggctggacgacgtgagctgctacggcaacgagagcgccctgtgggagtgccagcacagagagtggggcagccacaactgctaccacggcgaggacgtgggcgtgaactgctacggcgaggccaacctgggcctgagactggtggacggcaacaacagctgcagcggcagagtggaggtgaagttccaggagagatggggcaccatctgcgacgacggctggaacctgaacaccgccgccgtggtgtgcagacagctgggctgccccagcagcttcatcagcagcggcgtggtgaacagccccgccgtgctgagacccatctggctggacgacatcctgtgccagggcaacgagctggccctgtggaactgcagacacagaggctggggcaaccacgactgcagccacaacgaggacgtgaccctgacctgctacgacagcagcgacctggagctgagactggtgggcggcaccaacagatgcatgggcagagtggagctgaagatccagggcagatggggcaccgtgtgccaccacaagtggaacaacgccgccgccgacgtggtgtgcaagcagctgggctgcggcaccgccctgcacttcgccggcctgccccacctgcagagcggcagcgacgtggtgtggctggacggcgtgagctgcagcggcaacgagagcttcctgtgggactgcagacacagcggcaccgtgaacttcgactgcctgcaccagaacgacgtgagcgtgatctgcagcgacggcgccgacctggagctgagactggccgacggcagcaacaactgcagcggcagagtggaggtgagaatccacgagcagtggtggaccatctgcgaccagaactggaagaacgagcaggccctggtggtgtgcaagcagctgggctgccccttcagcgtgttcggcagcagaagagccaagcccagcaacgaggccagagacatctggatcaacagcatcagctgcaccggcaacgagagcgccctgtgggactgcacctacgacggcaaggccaagagaacctgcttcagaagaagcgacgccggcgtgatctgcagcgacaaggccgacctggacctgagactggtgggcgcccacagcccctgctacggcagactggaggtgaagtaccagggcgagtggggcaccgtgtgccacgacagatggagcaccagaaacgccgccgtggtgtgcaagcagctgggctgcggcaagcccctgcacgtgttcggcatgacctacttcaaggaggccagcggccccatctggctggacgacgtgagctgcatcggcaacgagagcaacatctgggactgcgagcacagcggctggggcaagcacaactgcgtgcacagagaggacgtgatcgtgacctgcagcggcgacgccacctggggcctgagactggtgggcggcagcaacagatgcagcggcagactggaggtgtacttccagggcagatggggcaccgtgtgcgacgacggctggaacagcaaggccgccgccgtggtgtgcagccagctggactgccccagcagcatcatcggcatgggcctgggcaacgccagcaccggctacggcaagatctggctggacgacgtgagctgcgacggcgacgagagcgacctgtggagctgcagaaacagcggctggggcaacaacgactgcagccacagcgaggacgtgggcgtgatctgcagcgacgccagcgacatggagctgagactggtgggcggcagcagcagatgcgccggcaaggtggaggtgaacgtgcagggcgccgtgggcatcctgtgcgccaacggctggggcatgaacatcgccgaggtggtgtgcagacagctggagtgcggcagcgccatcagagtgagcagagagccccacttcaccgagagaaccctgcacatcctgatgagcaacagcggctgcaccggcggcgaggccagcctgtgggactgcatcagatgggagtggaagcagaccgcctgccacctgaacatggaggccagcctgatctgcagcgcccacagacagcccagactggtgggcgccgacatgccctgcagcggcagagtggaggtgaagcacgccgacacctggagaagcgtgtgcgacagcgacttcagcctgcacgccgccaacgtgctgtgcagagagctgaactgcggcgacgccatcagcctgagcgtgggcgaccacttcggcaagggcaacggcctgacctgggccgagaagttccagtgcgagggcagcgagacccacctggccctgtgccccatcgtgcagcaccccgaggacacctgcatccacagcagagaggtgggcgtggtgtgcagcagatacaccgacgtgagactggtgaacggcaagagccagtgcgacggccaggtggagatcaacgtgctgggccactggggcagcctgtgcgacacccactgggaccccgaggacgccagagtgctgtgcagacagctgagctgcggcaccgccctgagcaccaccggcggcaagtacatcggcgagagaagcgtgagagtgtggggccacagattccactgcctgggcaacgagagcctgctggacaactgccagatgaccgtgctgggcgcccccccctgcatccacggcaacaccgtgagcgtgatctgcaccggcagcctgacccagcccctgttcccctgcctggccaacgtgagcgacccctacctgagcgccgtgcccgagggcagcgccctgatctgcctggaggacaagagactgagactggtggacggcgacagcagatgcgccggcagagtggagatctaccacgacggcttctggggcaccatctgcgacgacggctgggacctgagcgacgcccacgtggtgtgccagaagctgggctgcggcgtggccttcaacgccaccgtgagcgcccacttcggcgagggcagcggccccatctggctggacgacctgaactgcaccggcatggagagccacctgtggcagtgccccagcagaggctggggccagcacgactgcagacacaaggaggacgccggcgtgatctgcagcgagttcaccgccctgagactgtacagcgagaccgagaccgagagctgcgccggcagactggaggtgttctacaacggcacctggggcagcgtgggcagaagaaacatcaccaccgccatcgccggcatcgtgtgcagacagctgggctgcggcgagaacggcgtggtgagcctggcccccctgagcaagaccggcagcggcttcatgtgggtggacgacatccagtgccccaagacccacatcagcatctggcagtgcctgagcgccccctgggagagaagaatcagcagccccgccgaggagacctggatcacctgcgaggacagaatcagagtgagaggcggcgacaccgagtgcagcggcagagtggagatctggcacgccggcagctggggcaccgtgtgcgacgacagctgggacctggccgaggccgaggtggtgtgccagcagctgggctgcggcagcgccctggccgccctgagagacgccagcttcggccagggcaccggcaccatctggctggacgacatgagatgcaagggcaacgagagcttcctgtgggactgccacgccaagccctggggccagagcgactgcggccacaaggaggacgccggcgtgagatgcagcggccagagcctgaagagcctgaacgccagcagcggccacctggccctgatcctgagcagcatcttcggcctgctgctgctggtgctgttcatcctgttcctgacctggtgcagagtgcagaagcagaagcacctgcccctgagagacgacacccccaaccacggctgcgaggacgccagcgacaccagcctgctgggcgtgctgcccgccagcgaggccaccaagtag

SEQ ID NO: 313350 - DNA, 4266 bp, Artificial Sequence
  derived and/or modified sequence
atgatgctgccccaaaacagctggcatatcgatttcggacggtgttgttgtcatcagaatctgttttccgcagtggtgacttgtatcctgctgttaaactcctgcttcctaatcagttcctttaacggaacagaccttgagctcaggcttgttaacggagacgggccgtgtagtggtacagtagaagtgaagttccagggacagtggggtactgtgtgcgacgacggatggaatacaaccgcctctacagttgtgtgcaaacagttgggatgtcctttttcgttcgcgatgttcaggttcggacaggcggtaacacggcacggtaagatctggctcgatgatgtgagctgctatggcaacgagtctgcgctgtgggaatgccagcaccgagagtggggttcacataattgctaccacggtgaagacgtcggggtgaactgctacggcgaggccaatctggggctgaggctggttgacggaaacaactcctgttccgggagggttgaagtcaagttccaggaacggtggggaacgatctgtgatgatgggtggaatcttaatactgctgctgtagtatgtcgccagctgggctgtcctagttcctttatttctagcggagtagttaactcacctgccgtcctgagacctatctggctagacgacattctttgccagggcaatgagctggctctctggaactgccggcaccgaggctggggtaatcatgactgctcccataacgaggatgtgacgctaacctgctacgactcgtccgatcttgagttgagactagttggaggtacaaacaggtgcatgggaagagtcgagctcaagatccagggcagatggggtaccgtctgtcaccataagtggaataacgctgctgccgacgtcgtgtgtaagcagcttggctgcggcacggccctccacttcgccggtctgccacatttgcagagtggctctgacgtagtgtggttggacggtgtcagctgcagcgggaatgagtcgtttctttgggactgtaggcactcaggcacggtgaatttcgattgcttgcatcagaacgacgtgagtgtcatctgcagcgatggggctgatctagaactacgcctcgccgacgggagcaacaattgctctggacgagttgaggtgcgaattcatgagcagtggtggacaatctgtgaccagaattggaagaatgagcaggcattagtcgtttgcaaacagcttggctgtccattctccgtgtttggaagtaggcgggcaaaaccttccaatgaggcccgcgatatatggattaatagtataagttgtactggcaacgagtccgcattatgggactgtacctacgatggcaaggcaaagcgcacgtgcttcagaaggtccgatgccggcgttatttgcagcgataaagctgacctcgaccttcgcttggtcggcgcacactcaccatgctacggtcggctcgaagtgaagtatcagggggaatggggcactgtgtgtcatgatcgttggagcactaggaacgcagctgtcgtctgtaagcaactggggtgtggcaaaccactacacgtattcggtatgacctatttcaaggaagctagcggacctatttggctggacgacgtctcatgtattggaaacgagtccaacatctgggactgcgagcacagcggttggggaaagcacaactgcgtgcatagagaagatgtgatcgtaacctgcagcggcgatgctacgtggggattgcgtttagtcgggggctccaacagatgcagcggaaggctggaagtgtattttcagggacgttgggggaccgtgtgtgacgatggatggaattccaaagccgcagctgtggtttgttcacagctggattgcccaagctctataatcggaatgggtttggggaacgcttcaacggggtatggcaagatttggttggacgatgtttcatgtgatggtgacgagtcagatctgtggagctgtagaaattccggatggggtaataatgactgtagccactctgaagacgtcggggtgatatgttctgatgctagcgatatggaactccgactcgtgggtggaagttcccggtgcgccggcaaagtagaggtcaacgtccagggtgccgttgggatcctctgcgcgaatggatggggcatgaatatcgcagaagtggtctgcagacagttggagtgtgggtccgctatccgggtgagtagagaacctcacttcacagaaagaactctccacattctgatgtctaattctggctgcactggcggcgaagcatccctgtgggactgtattcgttgggaatggaaacagacagcttgtcatctaaatatggaagcgtccctgatttgctccgcccatagacagcctcgcttggtcggagcagatatgccctgcagcgggcgtgtcgaggtgaaacatgctgacacatggaggtccgtatgtgacagtgatttcagccttcacgcagcaaatgtcctgtgccgggagttaaactgtggagatgcaatctccttgagcgttggggaccactttggaaaaggcaacgggctaacatgggccgaaaaatttcagtgcgagggatcggagacacacctggccctgtgtccaatagtgcagcatcccgaagacacctgtattcacagcagggaagtgggcgtggtgtgttcaaggtacactgatgtaaggttagttaatggaaagtcccagtgtgatggacaggtggaaatcaacgtgctgggacattgggggagcctctgtgacacacactgggatcctgaagatgcccgagtcctgtgtcggcagctgagctgcggaaccgccctgagtaccactggtggaaaatacatcggtgagagatctgtgcgcgtctggggccacagatttcactgccttggcaacgaatcactgctggacaattgccaaatgacagtccttggtgccccgccctgtatacacgggaacaccgtctctgtgatttgtacaggatctctcacccagcccctgtttccctgcctggctaatgtttccgacccttatctcagtgctgtgcccgaaggctcagcgctgatctgtctagaggacaaaagactgaggctggtcgatggagacagccggtgtgcaggccgagtggagatctaccacgacgggttctgggggaccatctgcgatgatggctgggacctgtcagatgctcacgtggtgtgccaaaaactcggatgcggggtggcttttaatgctactgtgtctgcccattttggcgaagggagtgggcccatttggttagacgatcttaattgcactggcatggagtcccatttgtggcagtgtccttcccgcggatggggccagcacgactgtcgacacaaggaggacgcaggagtcatctgctcagaatttacagccctccgcttatacagcgagaccgagactgagtcttgcgccgggcggctggaggtgttttacaacgggacatggggctctgtgggtcgacggaatattactaccgcaatcgcggggattgtatgccggcaattagggtgcggcgaaaacggcgtcgtaagtctggcccctctgagcaagacaggatctggattcatgtgggtggatgatattcagtgccccaaaacccatatttctatttggcagtgcctttcagccccctgggagaggagaatctccagccccgctgaggagacctggattacctgtgaagacaggatccgggttaggggcggagacaccgagtgttcggggcgcgtggagatctggcacgcgggatcttggggtacagtgtgcgatgattcctgggacctagccgaagccgaagtggtgtgccagcagctgggttgcggcagtgctctcgcagccctgcgggatgcttctttcggacagggcaccggcacaatttggctggacgatatgagatgtaaaggcaatgaaagtttcctctgggattgtcatgccaaaccctgggggcagagcgattgcgggcataaggaggacgctggagtgcggtgtagcggacagtccctaaagagccttaacgctagtagcggacacctcgctctgatactgtcttcaatttttggcctgctgttactggttctgtttattcttttcctaacttggtgcagggtgcagaagcagaaacacctgccactgcgggacgatactccaaaccacggatgcgaggatgccagtgacacgtctcttttgggcgtgttgccagctagcgaagccactaaatag

SEQ ID NO: 313351 - DNA, 4266 bp, Artificial Sequence
  derived and/or modified sequence
atgatgctgccccagaacagctggcacatcgactttggccgctgctgctgccaccagaacctcttctctgctgtggtgacctgcatcctgctgctgaacagctgcttcctgatcagcagcttcaacggcacagacctggagctgcggctggtgaatggagatggcccctgcagcggcaccgtggaggtgaagttccagggccagtggggcaccgtgtgtgatgatggctggaacaccacagccagcacagtggtgtgcaagcagctgggctgccccttctcctttgccatgttccgcttcggccaggccgtgaccaggcatggcaagatctggctggatgatgtgtcctgctatggaaatgaaagtgccctgtgggagtgccagcaccgggagtggggcagccacaactgctaccatggagaagatgtgggcgtgaactgctacggggaggccaacctgggcctgcggctggtggatggcaacaacagctgcagcggccgggtggaggtgaagttccaggagcgctggggcaccatctgtgatgatggctggaacctgaacacagctgctgtggtgtgccggcagctgggctgccccagcagcttcatcagcagtggagtggtgaacagccctgctgtgctgcggcccatctggctggatgacatcctgtgccagggcaatgagctggccctgtggaactgccgccaccggggctggggcaaccacgactgcagccacaatgaagatgtgaccctgacctgctatgacagcagtgacctggagctgcggctggtgggcggcaccaaccgctgcatgggccgggtggagctgaagatccagggccgctggggcaccgtgtgccaccacaagtggaacaatgctgctgctgatgtggtgtgcaagcagctgggctgcggcacagccctgcactttgctggcctgccccacctgcagagcggcagtgatgtggtgtggctggatggagtgtcctgcagcggaaatgaaagcttcctgtgggactgccgccacagcggcaccgtgaactttgactgcctgcaccagaatgatgtgtctgtcatctgcagtgatggagctgacctggagctgcggctggctgatggcagcaacaactgcagcggccgggtggaggtgcgcatccacgagcagtggtggaccatctgtgaccagaactggaagaatgagcaggccctggtggtgtgcaagcagctgggctgccccttctctgtgtttggcagccggcgggccaagcccagcaatgaggcccgggacatctggatcaacagcatcagctgcacaggaaatgaaagtgccctgtgggactgcacctatgatggcaaggccaagaggacctgcttccgccgcagtgatgctggggtcatctgcagcgacaaggctgacctggacctgcggctggtgggcgcccacagcccctgctacggccgcctggaggtgaagtaccagggcgagtggggcaccgtgtgccacgaccgctggagcaccagaaatgctgctgtggtgtgcaagcagctgggctgcggcaagcccctgcacgtgtttggcatgacctacttcaaggaggccagcggccccatctggctggatgatgtgtcctgcattggaaatgaaagcaacatctgggactgtgagcacagcggctggggcaagcacaactgtgtgcacagagaagatgtgattgtgacctgcagcggagatgccacctggggcctgcggctggtgggcggcagcaaccgctgcagcggccgcctggaggtgtacttccagggccgctggggcaccgtgtgtgatgatggctggaacagcaaggctgctgctgtggtgtgcagccagctggactgccccagcagcatcatcggcatgggcctgggcaatgccagcacaggctacggcaagatctggctggatgatgtgtcctgtgatggagatgaaagtgacctgtggagctgcagaaattctggctggggcaacaatgactgcagccacagtgaagatgtgggcgtcatctgcagtgatgccagtgacatggagctgcggctggtgggcggcagcagccgctgtgccggcaaggtggaggtgaatgtgcagggcgctgtgggcatcctgtgtgccaacggctggggcatgaacattgctgaggtggtgtgccggcagctggagtgtggcagcgccatccgggtgtcccgggagccccacttcacagagaggaccctgcacatcctgatgagcaacagcggctgcaccggcggggaggccagcctgtgggactgcatccgctgggagtggaagcagacagcctgccacctgaacatggaggccagcctcatctgcagcgcccaccggcagccccggctggtgggcgctgacatgccctgcagcggccgggtggaggtgaagcatgctgacacctggaggtctgtgtgtgacagcgacttcagcctgcacgccgccaacgtgctgtgccgggagctgaactgtggagatgccatcagcctgtctgtgggggaccactttggaaaaggaaatggcctgacctgggccgagaagttccagtgtgagggcagcgagacccacctggccctgtgccccatcgtgcagcaccctgaggacacctgcatccacagccgggaggtgggcgtggtgtgcagccgctacacagatgtgcggctggtgaatggcaagagccagtgtgatggccaggtggagatcaacgtgctgggccactggggcagcctgtgtgacacccactgggaccctgaagatgcccgggtgctgtgccggcagctgagctgtggcacagccctgagcaccaccggcggcaagtacatcggggagaggtctgtgcgggtgtggggccaccgcttccactgcctgggcaatgaaagcctgctggacaactgccagatgacagtgctgggcgccccaccctgcatccacggcaacacagtgtctgtcatctgcaccggcagcctgacccagcccctcttcccctgcctggccaacgtgtctgacccctacctgtctgctgtgcctgagggcagcgccctgatctgcctggaggacaagaggctgcggctggtggatggagacagccgctgtgccggccgggtggagatctaccatgatggcttctggggcaccatctgtgatgatggctgggacctgagtgatgcccacgtggtgtgccagaagctgggctgcggcgtggccttcaatgccaccgtgtctgcccactttggagagggcagcggccccatctggctggatgacctgaactgcaccggcatggagagccacctgtggcagtgccccagccggggctggggccagcacgactgccgccacaaggaggatgctggggtcatctgcagcgagttcaccgccctgcggctgtacagcgagacagaaacagagagctgtgccggccgcctggaggtgttctacaacggcacctggggctctgtgggcagaagaaacatcaccacagccatcgccggcatcgtgtgccggcagctgggctgtggggagaatggagtggtgtccctggcccccctgagcaagacaggcagcggcttcatgtgggtggatgacatccagtgccccaagacccacatcagcatctggcagtgcctgagcgccccctgggagcggcgcatcagcagccctgctgaggagacctggatcacctgtgaagatcgcatccgggtgcggggcggggacacagagtgcagcggccgggtggagatctggcacgccggctcctggggcaccgtgtgtgatgacagctgggacctggccgaggccgaggtggtgtgccagcagctgggctgcggcagcgccctggccgccctgagagatgccagctttggccagggcaccggcaccatctggctggatgacatgcgctgcaagggaaatgaaagcttcctgtgggactgccacgccaagccctggggccagagcgactgtggccacaaggaggatgctggggtgcgctgcagcggccagagcctgaagagcctgaatgccagcagcggccacctggccctgatcctgagcagcatcttcggcctgctgctgctggtgctcttcatcctcttcctgacctggtgccgggtgcagaagcagaagcacctgcccctgagagatgacacccccaaccacggctgtgaagatgccagtgacaccagcctgctgggcgtgctgcctgccagcgaggccaccaagtag

SEQ ID NO: 313352 - DNA, 4266 bp, Artificial Sequence
  derived and/or modified sequence
atgatgctgccccagaacagctggcacatcgacttcggccggtgctgttgtcatcagaatttgttcagtgccgtggtcacttgtatattgctgcttaacagctgctttctcatctctagctttaatgggaccgacctcgagctgaggctggtgaatggcgacgggccttgttcagggacggtggaagtcaaatttcagggccagtggggaaccgtgtgcgacgacgggtggaacacaacagcttctactgtcgtctgcaagcaactgggatgtcccttcagcttcgctatgtttcgctttgggcaagccgtaacccgtcacgggaaaatctggctcgacgatgtgtcttgttacggaaatgaaagtgctttgtgggaatgtcagcacagggagtggggtagtcacaattgctatcatggtgaggacgtaggtgtgaactgctacggcgaggccaatctcggtctgcggcttgtggacggcaataattcgtgctccggccgagtggaagtgaaattccaggaacggtggggaactatctgcgacgacggctggaacctaaataccgccgccgtggtgtgtaggcagctgggctgtccctcgagctttatcagcagcggggttgtgaattcaccagccgtgctgaggcctatatggctcgacgacattctgtgccaaggcaatgagctggcactgtggaattgccgccatcgcgggtggggcaaccacgactgtagccacaacgaagatgtaactctgacttgctacgactcgagcgatttggagttgaggctggtggggggcaccaataggtgtatgggccgtgtggaactgaagatccagggtagatgggggaccgtctgtcaccacaaatggaacaatgcagctgccgacgtagtgtgtaagcagctgggatgtggaaccgcactgcacttcgcagggctgccgcacctgcagtctggttctgatgtggtttggctggacggagtgagctgcagcggcaatgaaagctttctgtgggattgcagacactcaggcactgtgaatttcgattgtctgcatcagaacgacgtgagcgtgatttgttcagacggggcggacctggagctaaggttggccgatggaagcaacaactgcagtgggcgtgtcgaggttcgtatccatgagcagtggtggactatttgtgaccagaactggaagaatgaacaggctctggtcgtgtgcaagcagctggggtgcccattttcagttttcgggtctcgccgcgctaagccaagtaacgaggccagagatatttggattaattcaatctcctgcacaggtaacgaatcagccctgtgggattgtacttacgatggcaaggcaaagagaacgtgttttcgacggtcagatgccggagtaatttgttcagacaaggccgacctagatttacggttggtcggagcccattcgccatgctacgggaggctggaggtgaagtaccagggtgagtggggaactgtctgtcacgatcgctggtccactagaaatgcggctgtggtgtgtaagcagcttggctgcggaaaacccctgcatgttttcggcatgacctacttcaaagaggcttctgggccaatatggctggacgacgtcagttgcatcgggaacgagagtaatatatgggattgtgagcacagcggatggggaaaacacaactgtgtgcaccgcgaagacgtaatcgttacctgcagcggagatgctacctggggtctgcggctggtgggggggagtaaccggtgtagtggtaggcttgaagtgtacttccaaggacgatggggtaccgtttgcgatgacggctggaacagtaaggccgctgcagtcgtctgtagtcagctcgattgcccgtccagtatcatcggaatggggctcgggaacgcaagtacagggtatggaaagatatggttagacgatgtctcttgtgacggcgacgagtccgatctgtggtcctgccgaaacagcggctggggcaataatgattgctcacactcagaagacgtgggcgtgatttgttcggacgcttccgatatggaacttcgcctggtgggtggctcttctaggtgcgcagggaaggtggaagtcaacgttcagggcgctgtggggattttgtgtgcaaacggatggggaatgaatattgccgaggtcgtatgtaggcagctggagtgtggttcggcaattcgcgtttctcgcgaaccccactttacagaaaggaccctccatatactaatgtccaacagcggctgcacggggggagaagccagtttgtgggattgtattcggtgggaatggaagcagacagcctgccatctcaacatggaggcatctttgatctgtagcgctcatagacagccccgactggtgggggccgatatgccgtgtagcgggagggtggaagtgaagcacgccgacacctggcgttcggtgtgtgatagcgacttttccttgcacgccgcaaatgtgttgtgccgggagcttaactgtggcgatgcaatttccctgagcgtgggtgaccacttcggaaaggggaacggactgacctgggcagagaagttccagtgcgaggggtctgagacacatctggccctctgtccaatcgtgcagcatcccgaagacacgtgtatccacagccgggaggtgggagttgtttgtagccggtacactgatgtccggctcgtaaatggaaaatctcagtgcgatggccaggtggagatcaacgttctcggccactgggggagcctgtgcgacacacactgggatccggaggacgcccgggtcctatgtagacaattatcttgtgggacagcgctgagtactacaggcggcaagtatataggagagagatccgttcgggtgtgggggcacaggttccattgtctcgggaacgagagcttgcttgacaattgtcagatgaccgtgctcggggcacctccctgcatccatggaaacactgtcagcgtgatatgtacaggttctctgacccagcccctgttcccatgcctggctaacgtgtctgacccgtacctttctgcagtgcccgaaggctcagccctcatatgcttggaagataaaaggctgagactggtcgacggagactcgcgatgtgccgggcgtgtggagatctaccacgatgggttctggggcaccatttgtgatgacggatgggatctgtccgatgcccacgtggtgtgtcaaaaattgggatgtggcgttgcgttcaatgccactgtgtccgctcattttggcgagggttctggcccaatatggctggacgacctgaactgtacgggtatggagagccacctgtggcagtgccccagccgaggttggggtcaacacgattgcaggcacaaagaggacgccggagttatctgttccgaatttacagccctgaggttatacagtgagactgagacagagagctgcgctgggcgcttagaggttttctataatgggacatggggctccgtgggaaggagaaatattaccactgccattgctgggatcgtgtgccggcagctggggtgtggcgagaacggtgtggtgtccctcgctcctctgtcaaaaaccggctcagggttcatgtgggtggacgatatacagtgccccaaaactcatattagtatctggcagtgcctgtccgccccgtgggagcggcgtatctcttccccggccgaggaaacttggatcacgtgtgaggatagaatcagggtccgcgggggagacacagaatgtagtgggagagttgaaatttggcatgctggatcatgggggactgtttgcgatgacagctgggacctcgctgaagcggaagtggtgtgccagcagctgggatgcgggagcgccctggccgccctgcgggatgcctccttcggacaaggaaccgggaccatttggttagacgatatgaggtgcaaagggaacgagagcttcctgtgggactgccatgcgaaaccttggggccaaagcgattgtggtcacaaggaggatgctggcgtacggtgttctggccagtcactgaaatccctgaacgcaagtagcggccaccttgccctgattctctcttcaatttttggcttactactgctggtgctcttcatactgttcctcacctggtgtcgggtgcagaagcagaagcacctgcccctgagggacgatacaccaaaccacggttgcgaggatgcaagcgatacgtccttgttgggcgtcctcccggctagcgaggctaccaaatag

SEQ ID NO: 313353 - RNA, 4266 nt, Artificial Sequence
  derived and/or modified sequence
augaugcucccucagaauucuuggcacauugauuucggccgcuguuguugccaucagaaccuguucagugcuguugucacuugcauccuacucuugaauagcugcuuccuuaucagcucuuuuaacggaacagaccuggaacugagacucguuaauggcgaugggccauguucgggaacaguggaagugaaauuucaagggcaguggggcacaguuugcgaugacggauggaacaccacugcuaguacugugguuuguaagcaauugggguguccauuuucuuuugcgauguucagguuuggacaggcagucacaagacacgggaaaaucuggcuugaugaugucucaugcuauggcaaugagucagcccugugggagugccagcaccgggaguggggaagccacaauuguuaucauggcgaggaugugggagugaacugcuauggcgaagcaaaccugggacugaggcuuguggacgguaacaacucuuguucaggaagaguugaagugaaauuucaagaaagguggggcaccauuugcgaugaugguuggaaucugaacacugcugccguuguuugccgccagcugggcugcccuaguuccuuuaucagcagcggaguagugaauaguccggccguacuucgccccauuugguuggacgacaucuugugccaggggaaugaguuggcuuuguggaauuguaggcaccgcggcuggggcaaccacgacuguagccauaaugaagacgugacccucacaugcuaugauagcuccgaccucgaacuaaggcuugucggcggcacgaauaggugcaugggaagaguggaacucaagauacagggacgaugggguaccgucugucaccauaaauggaacaacgccgcugccgaugucguuugcaaacagcuggguugcggcaccgcgcugcacuucgccggacucccacaccuccagaguggcuccgaugucguguggcuugauggagugucuugcucggguaaugaaaguuuucugugggacugucgccauucugggacagugaauuuugauugucuccaucaaaacgaugugagcgucaucugcagcgacggggcagaccuugagcugaggcuugcugauggcuccaauaacuguaguggaagaguggagguucggauucacgaacagugguggacuauaugcgaccaaaauuggaagaacgagcaggcgcuggugguaugcaaacaacugggguguccauucagcguguuugggucucgaagggcuaaaccaagcaaugaggcccgcgacaucuggauuaauagcauauccugcaccgguaaugagucugcucuaugggacuguacguaugauggcaaagcaaagagaacgugcuuucgcagaagugaugccggaguaauauguuccgacaaagcggacuuggacuugcgguuagucggcgcacacucuccaugcuauggaagacuggaaguaaaauaucagggugaaugggguacaguuugccacgaccgguggucaacacgcaaugcugccguaguguguaagcaguuaggaugcggcaagccacuucacguguuugggaugaccuacuuuaaggaggcauccgggccuaucuggcuggaugacgucagcuguaucgggaacgaguccaauauuugggacugcgagcacucaggguggggcaagcauaacuguguccaucgcgaggacgugauaguuacuuguaguggcgacgcuacguggggccuccgccucgucgguggcagcaaucgguguuccggacgccuggagguguacuuucagggacgauggggaacuguaugugaugacggguggaacaguaaggccgccgcagucgucugcagucagcuggacugucccagcucuauuaucggcauggguuugggaaaugccucuacuggguacgggaaaauuugguuggaugacgucagcugcgauggugacgagagugaccucuggucgugcagaaacuccgguugggggaacaaugacuguagccacuccgaggaugugggugugauuuguucggacgccucggauauggaauugcgacuugugggugguucaagcagaugcgccgggaaaguugaggucaacguacagggggcugucggcauccucugugcuaacgguuggggcaugaauaucgcugaggucguuuguagacagcuggaaugcggaagugcaaucagagugucuagggagccccauuucacagagaggacgcugcacauauugaugucuaauucuggcuguaccggaggcgaagcaucccugugggacugcaucagaugggaauggaaacagacugccugccaccugaauauggaggcuagccugaucuguucagcccaucgucaaccgcgacucgugggagccgauaugcccuguuccggacgcgucgaaguaaaacacgcggauacauggcggucggugugugauucugacuucucccugcaugccgcaaaugugcuuugccgcgagcuaaacuguggcgacgcuauuagcuuaagcgugggcgaucacuucggcaagggaaacggcuuaaccugggccgagaaauuccagugcgaaggcagcgaaacccaccuagcccugugcccuauugugcagcaccccgaggacacaugcauucauuccagggaggugggcguuguaugcagccgcuacacggaugugcgauuaguuaacgguaagucucaaugcgacggacagguugagaucaauguucugggacauuggggcagccuaugugauacucacugggacccugaggacgcuagggugcucugcagacaacuuucaugugggaccgccuuaucuacaacuggagggaaauacaucggcgaaagguccguacgcguuuggggucaccgguuucacugucugggaaacgagaguuugcuggacaauugucaaaugaccguccugggagcaccucccugcauccauggcaacacaguuagugugauaugcacuggcucccuuacccagccccuguuuccgugcuuggcaaauguuagugauccauauuuauccgcugugccagagggcuccgcucugauuugucuggaggacaaacgcuugcgccucguugacggggacagucgaugcgcagguagggucgaaauuuaccacgauggguucuggggaaccaucugcgaugacggaugggaucucagcgaugcccacgucgugugucaaaaauugggaugcgggguggccuuuaacgcaacaguuucugcacacuucggcgagggaagugggccaauuuggcuugacgaucuaaacuguacugggauggaaagccaccuguggcaguguccgucuagagguugggggcaacaugacugcaggcauaaagaggaugccggggugaucuguucugaguucaccgcccugcggcuauauagcgagacagagacagaaagcugugccggccggcuagagguuuuuuacaaugggacauggggcucugugggcagaaggaauaucaccacagccauugcugggauuguuugccgacagcugggcuguggagaaaacggggucgucagccuagccccccucuccaaaaccggauccggcuucauguggguugaugauauccaaugcccaaagacucauauuucgaucuggcagugcuugagcgcuccuugggagcguaggaucucgucuccugcagaagagacguggauuaccugcgaagaccgcauacgaguacgcgggggagacaccgaguguagcggaagggucgagaucuggcacgccgguucaugggguaccgucugugacgauagcugggaccucgccgaggcugaagucguaugccaacagcugggcuguggcagugcccucgcggcauugcgagaugccucuuucggacagggaacagggacaaucugguuagacgacaugagguguaagggcaaugaaucguuccugugggauugucaugcgaaaccuuggggccagagcgacugcggacacaaggaggacgcuggcgugagguguucuggccaguccuugaagucacuuaaugccagcucaggucaucucgcuuugauacucagcuccauuuuuggguuacugcucuuggugcuguuuauccuguuccucaccuggugccgcgugcaaaagcagaaacaccugccacugcgggaugacacuccuaaccacgggugugaggaugccagcgauacgucucugcucggcgugcugccagccagugaggcaacuaaauag

SEQ ID NO: 313354 - RNA, 4266 nt, Artificial Sequence
  derived and/or modified sequence
augaugcucccccagaacuccuggcauaucgauuuuggaagauguugcugccaccagaaccuguuuucugccguggugacuugcauccugcuucugaacucauguuucuuaauaucuucuuuuaacggaacugaccuugaguuacgccucgucaacggagauggcccuuguagugggacuguugaagugaaguuccagggacaguggggaacugugugcgaugauggguggaacaccacagcuaguaccguggucuguaaacaacucgguugccccuuuucuuucgcaauguucagauucggccaagcuguaacccggcauggcaaaauaugguuggaugacgugucauguuacggcaaugaaagugcacugugggagugccaacauagggaaugggggucccauaauugcuaccacggagaagauguuggggugaacugcuauggagaggccaaucugggcuugagacugguggauggaaauaacagcuguagcggaaggguggaggucaaguuucaagaacguugggguacuauuugugaugacggguggaaccugaauacagcugcugugguauguagacagcuggguugcccgaguagcuuuauuaguucaggagucgucaacuccccugccguauuaaggccaauuuggcucgacgacauccuaugucaaggaaacgaguuagcacucuggaacugcagacauagggguugggggaaucacgauugcucucauaaugaagacgugacacucacuugcuacgauuccuccgaccuggaguuacgcuuagugggcggcacaaaucggugcauggggcggguagaguuaaaaauacagggaagauggggaacugugugucaucacaaguggaauaaugccgcugccgacgugguuugcaagcagcuaggcugugggaccgcacuucacuuugcuggcuuaccccaucuccaguccgguuccgacgucguuuggcuggacgggguguccuguaguggaaacgagagcuuucugugggacugucggcacucagggacagugaauuuugacugcuugcaccagaaugacgugagcgugauuugcagcgacggcgcagacuuagagcuccgccucgccgauggaucuaauaacuguucaggacgaguggaagugagaauccaugaacaaugguggacuauaugugaucagaacuggaaaaacgaacaggcacuagucguuugcaagcagcuuggaugucccuuuucgguuuucggcucucgacgagccaaacccucaaacgaagcacgagauaucuggaucaauagcauuucauguacgggaaacgaaucagcucugugggauugcaccuacgacgguaaggcuaagagaacuuguuuuagacgaucugacgcagguguuauuugcuccgauaaagccgacuuggauuugaggcuuguaggcgcacacucacccugcuauggucggcuggaggugaaguaccagggcgaauggggcacagucugucaugauagguggagcacuaggaaugccgcaguggugugcaagcagcuggguugugggaagccguuacacgucuuuggaaugacuuacuuuaaggaagccagcgggcccaucuggcuagaugacguuagcuguauugggaaugagucaaauaucugggacugcgagcacaguggguggggcaagcacaacuguguucauagggaagaugugaucgucacaugcucaggcgaugcaacguggggcuuaagguuggugggcgggucuaauagaugcucuggucgacuugagguguauuuccaagguagguggggaacagugugcgacgacgguuggaacucaaaggcagcagcugugguaugcucacaacuggauuguccuaguucaauuaucgggaugggucuggggaacgcaagcacugguuauggcaagauauggcuggaugaugugucuugcgacggcgacgagucagaucuuuggagcugcaggaacucuggcugggggaacaacgauugcagccacagugaggaugucggcgucaucuguuccgacgcuucugacauggaacuaaggcuggugggcgggucgucucguugugcagguaagguggaagucaaugugcagggcgcgguggggauccugugcgccaacgguugggggaugaacaucgcugaggucgugugccggcaacucgaauguggaucggcuauuagggugucuagagaaccacacuucaccgaacggacauuacauauccugaugucuaauaguggguguaccggaggagaagcaucguugugggacuguauccgaugggaguggaagcaaacagcgugucaucugaauauggaagcaucccuaaucugcucggcacaucggcagccaagauugguuggagcugauaugccuuguucaggucgcguggaagucaagcacgccgauacguggaggucgguaugcgacucugauuucucccuucacgcagcaaauguuuugugccgcgaacucaacugcggugacgcuaucucucuuucagucggcgaucauuuuggcaagggaaauggacucacuugggcugagaaguuccaaugcgaggguagcgagacgcaccuggccuugugcccaauuguacagcacccagaagauaccugcauacauucacgcgagguuggaguuguuugcucucguuacacggacgugcgccuaguuaaugggaaaagccagugcgacggucaggucgaaauuaaugugcugggacauugggguucucugugcgauacacauugggacccugaagaugcaagaguucuguguagacagcucucauguggaacugcacuuuccaccaccggggggaaauauaucggggaaagaucagucaggguuuggggucaccgcuuccacugccucggcaacgaaagccucuuggacaauugccagaugaccguccucggggcaccccccuguauacaugggaacacugugucagugauuugcacgggaagucuaacccagccccuauucccuugcuuagcuaacgucagcgauccguaccugucagccgugccagaagggucggcacuuauaugucucgaagacaagaggcuucguuuaguggauggagauagcaggugugccggucgagucgaaaucuaccaugacgguuucugggggaccaucugcgaugacggaugggaucucucugacgcucauguggugugccagaaacucggguguggcgucgccuucaacgcaacagugucagcccacuuuggggagggauccggccccauuuggcuugaugaucuaaacugcacaggaauggaaagccaccuauggcagugccccucacgagguugggggcagcaugacugcaggcacaaagaagaugcaggcgucauuugcucugaauuuacugccuuaaggcucuauucugagaccgaaaccgaaucgugcgcuggaagauuggaaguguucuauaauggaaccuggggaucaguagggagaaggaauauuacaaccgcaauagcaggaauagucuguagacaacuggggugcggggaaaauggcgugguaucccuggcaccacugucgaaaacuggaagcggguucauguggguugaugacauccaaugccccaagacucacauuucuaucuggcaaugccugagcgcaccuugggaaagaaggauuaguuccccagcagaggagaccuggauaacuugcgaagacaggauccgcguaagagggggugauaccgaaugcucuggaagagucgagauauggcacgcaggcuccuggggaaccguaugugacgauucaugggaucuagccgaagccgaaguggugugucagcagcugggaugugguagcgcccucgccgcgcugcgagacgccaguuucggucaaggcacaggcaccauuuggcuggaugauaugagauguaaaggcaacgaaagcuuuuugugggauugccacgcaaaaccauggggacaguccgauuguggacacaaagaagaugcuggcguuaggugcaguggacagagucucaagagucuuaaugcaucuucuggacaucuugcucucauccucucuagcauuuuugguuuacuccuccucguacuguuuauacuauuucuaaccuggugcagaguucaaaagcagaaacaccucccuuuaagggaugacacacccaaucacggaugcgaagacgccucggauacaucuuugcugggaguauugcccgccucagaagcuacaaaauag

SEQ ID NO: 313355 - protein, 109 aa, Artificial Sequence
  derived and/or modified sequence
  misc_feature (1)..(1): Xaa can be any naturally occurring amino acid
XSGQSLKSLNASSGHLALILSSIFGLLLLVLFILFLTWCRVQKQKHLPLRVSTRRRGSLEENLFHEMETCLKREDPHGTRTSDDTPNHGCEDASDTSLLGVLPASEATK

SEQ ID NO: 313356 - DNA, 330 bp, Artificial Sequence
  derived and/or modified sequence
tgaagcggccagagcctgaagagcctgaacgccagcagcggccacttggcccttattctctctagcatcttcggactactcctgctggtgctgtttatactgtttctcacttggtgcagggtgcagaaacagaagcacctcccactgagagtgtctacacgaagaaggggatctctcgaggaaaacttgttccacgaaatggagacatgcctcaaaagggaagatccccatggcaccagaaccagcgatgatacgcctaatcacgggtgcgaggatgccagcgatacaagcctgcttggcgtgctcccagcctccgaagctacgaaatag

SEQ ID NO: 313357 - DNA, 330 bp, Artificial Sequence
  derived and/or modified sequence
tgatcggggcagagtctcaagagcctgaacgcaagcagcggacatctcgcattgatcctatcttcgatcttcggattactgttgcttgtgttgttcatccttttcttgacatggtgcagagtccagaagcagaagcatctcccgctgcgggtgagcactcggcgacggggatcccttgaggagaatttatttcacgagatggaaacgtgtttaaagcgcgaagacccacatggcacccggacctctgacgacactcccaatcatgggtgtgaggatgcttcagacactagcctgctgggcgtacttcccgcttcagaggccaccaagtag

SEQ ID NO: 313358 - DNA, 330 bp, Artificial Sequence
  derived and/or modified sequence
tgaagtggacagtctctcaaatctctgaatgcttccagtgggcacctggctctgattttatcatctattttcggactgctcctgctcgtgttgtttatcctgttccttacttggtgtcgtgtacagaaacagaagcatctgcccctccgcgtcagtacacggagacggggaagcttggaggagaacctgtttcatgagatggagacatgccttaaacgcgaggatccccatggcacccggacatctgacgatacccctaatcacggttgcgaagacgcttctgacactagcctacttggagtgctccctgcttctgaggcaacaaagtag

SEQ ID NO: 313359 - DNA, 330 bp, Artificial Sequence
  derived and/or modified sequence
tagtcaggacagtctctgaaaagcctcaatgcctccagtggtcacctcgcactgatcctatccagtatatttggcctgttacttctagtccttttcatcttatttttgacctggtgtagggtccagaagcagaaacacctccccctgagggtgtccactagaagacgtggcagtctggaagagaacctctttcacgagatggagacctgcctaaaacgagaggacccacacggaacgagaacaagcgatgacacccccaatcacggctgtgaagatgcctcagatacatcccttctgggggtattacccgcctccgaagccactaagtag

SEQ ID NO: 313360 - DNA, 815 bp, Artificial Sequence
  derived and/or modified sequence
ctcaggacagtcgctgaaatcactgaatgcctcctcaggtcatttagcacttattttatccagtatctttgggctccttctcctggttctgtttattctatttctcacgtggtgccgagttcagaaacaaaaacatctgcccctcagagtttcaaccagaaggaggggttctctcgaggagaatttattccatgagatggagacctgcctcaagagagaggacccacatgggacaagaacctcagatgacacccccaaccatggttgtgaagatgctagcgacacatcgctgttgggagttcttcctgcctctgaagccacaaaatgactttagacttccagggctcaccagaatcttgatatgtgggtgatgttaagccctcctgacccagcaagttgaaaactcaccatgaagagcagcggtcaaaggaactagggaaatcctacagtgtgatcagtttttctgctgcaggtaagcagagagcatccctttgcactgaataggccactgagccgcattactgcttattaattcctcatcattcctgcctccttttatgttctccctaaatgactaggtttgcggggccaggaactttatttcccacaatccctaacaggaagaatctgggctcgcttccaccagagagacttgttcatggaagatacggtttcgcaaggatctttgtacttgtcctgaaaactgctagcctagatattacagcatggtgccctttagcagtggtttcctgggggttttaaaacttcctgatgagggttttgtaagcataattattccctgtagtaaaccactt

SEQ ID NO: 313361 - DNA, 330 bp, Artificial Sequence
  derived and/or modified sequence
tgaagcggccagagcctgaagagcctgaacgccagcagcggccacctggccctgatcctgagcagcatcttcggcctgctgctgctggtgctgttcatcctgttcctgacctggtgcagagtgcagaagcagaagcacctgcccctgagagtgagcaccagaagaagaggcagcctggaggagaacctgttccacgagatggagacctgcctgaagagagaggacccccacggcaccagaaccagcgacgacacccccaaccacggctgcgaggacgccagcgacaccagcctgctgggcgtgctgcccgccagcgaggccaccaagtag

SEQ ID NO: 313362 - DNA, 330 bp, Artificial Sequence
  derived and/or modified sequence
tagagtgggcagtccctcaaaagcctgaacgcgagtagtggccatctggcactcattctttcttctattttcgggctgctcctcttagtactcttcattctttttttgacatggtgcagggttcagaagcagaaacatctgcctctgagagtgtccacacgaaggcgtggatccttagaggaaaacttattccatgagatggagacatgtctcaaacgggaggacccacatggaacccggacctccgacgatacacccaaccacgggtgtgaagacgcaagcgacacctccctgttgggcgtcttgcctgccagtgaggcgacaaagtag

SEQ ID NO: 313363 - DNA, 330 bp, Artificial Sequence
  derived and/or modified sequence
tgaagcggccagagcctgaagagcctgaatgccagcagcggccacctggccctgatcctgagcagcatcttcggcctgctgctgctggtgctcttcatcctcttcctgacctggtgccgggtgcagaagcagaagcacctgcccctgcgggtgtccaccaggagaagaggcagcctggaggagaacctcttccacgagatggagacctgcctgaagcgggaggacccccacggcaccaggaccagtgatgacacccccaaccacggctgtgaagatgccagtgacaccagcctgctgggcgtgctgcctgccagcgaggccaccaagtag

SEQ ID NO: 313364 - RNA, 330 nt, Artificial Sequence
  derived and/or modified sequence
ugaaguggacagucucucaaaucucugaaugcuuccagugggcaccuggcucugauuuuaucaucuauuuucggacugcuccugcucguguuguuuauccuguuccuuacuuggugucguguacagaaacagaagcaucugccccuccgcgucaguacacggagacggggaagcuuggaggagaaccuguuucaugagauggagacaugccuuaaacgcgaggauccccauggcacccggacaucugacgauaccccuaaucacgguugcgaagacgcuucugacacuagccuacuuggagugcucccugcuucugaggcaacaaaguag

SEQ ID NO: 313365 - RNA, 330 nt, Artificial Sequence
  derived and/or modified sequence
uagucaggacagucucugaaaagccucaaugccuccaguggucaccucgcacugauccuauccaguauauuuggccuguuacuucuaguccuuuucaucuuauuuuugaccugguguaggguccagaagcagaaacaccucccccugaggguguccacuagaagacguggcagucuggaagagaaccucuuucacgagauggagaccugccuaaaacgagaggacccacacggaacgagaacaagcgaugacacccccaaucacggcugugaagaugccucagauacaucccuucuggggguauuacccgccuccgaagccacuaaguag

SEQ ID NO: 313366 - protein, 415 aa, Artificial Sequence
  derived and/or modified sequence
MVFAHRMDNSKPHLIIPTLLVPLQNRSCTETATPLPSQYLMELSEEHSWMSNQTDLHYVLKPGEVATASIFFGILWLFSIFGNSLVCLVIHRSRRTQSTTNYFVVSMACADLLISVASTPFVLLQFTTGRWTLGSATCKVVRYFQYLTPGVQIYVLLSICIDRFYTIVYPLSFKVSREKAKKMIAASWVFDAGFVTPVLFFYGSNWDSHCNYFLPSSWEGTAYTVIHFLVGFVIPSVLIILFYQKVIKYIWRIGTDGRTVRRTMNIVPRTKVKTIKMFLILNLLFLLSWLPFHVAQLWHPHEQDYKKSSLVFTAITWISFSSSASKPTLYSIYNANFRRGMKETFCMSSMKCYRSNAYTITTSSRMAKKNYVGISEIPSMAKTITKDSIYDSFDREAKEKKLAWPINSNPPNTFV

SEQ ID NO: 313367 - protein, 59 aa, Artificial Sequence
  derived and/or modified sequence
MVFAHRMDNSKPHLIIPTLLVPLQNRSCTETATPLPSQYLMELSEEHSWMSNQTDLHYV

SEQ ID NO: 313368 - DNA, 1743 bp, Artificial Sequence
  derived and/or modified sequence
ctttccgcctagtgagaggcggtccgatttggcccttggggagtgtccgtcgcgttgatctgatggattcacgtacacaacaccacattctatgagattttgcaggcaaaagtccacaagctcgatatatgggacacctgcaccggcattggatttggccccgcaacatcttaaaggaagcaggctgtgagccaaggggaaggcagaggacagaaatgaatgtgtttccaggctttcctggtggtttatggcattctccaaactcctatgcaagggctattcctgaccaagaagatctaaagagaacgtctctgaaatcaagtccggatgaagaattaagagaaaaaaagtgaatatggtttttgctcacagaatggataacagcaagccacatttgattattcctacacttctggtgcccctccaaaaccgcagctgcactgaaacagccacacctctgccaagccaatacctgatggaattaagtgaggagcacagttggatgagcaaccaaacagaccttcactatgtgctgaaacccggggaagtggccacagccagcatcttctttgggattctgtggttgttttctatcttcggcaattccctggtttgtttggtcatccataggagtaggaggactcagtctaccaccaactactttgtggtctccatggcatgtgctgaccttctcatcagcgttgccagcacgcctttcgtcctgctccagttcaccactggaaggtggacgctgggtagtgcaacgtgcaaggttgtgcgatattttcaatatctcactccaggtgtccagatctacgttctcctctccatctgcatagaccggttctacaccatcgtctatcctctgagcttcaaggtgtccagagaaaaagccaagaaaatgattgcggcatcgtgggtctttgatgcaggctttgtgacccctgtgctctttttctatggctccaactgggacagtcattgtaactatttcctcccctcctcttgggaaggcactgcctacactgtcatccacttcttggtgggctttgtgattccatctgtcctcataattttattttaccaaaaggtcataaaatatatttggagaataggcacagatggccgaacggtgaggaggacaatgaacattgtccctcggacaaaagtgaaaactatcaagatgttcctcattttaaatctgttgtttttgctctcctggctgccttttcatgtagctcagctatggcacccccatgaacaagactataagaaaagttcccttgttttcacagctatcacatggatatcctttagttcttcagcctctaaacctactctgtattcaatttataatgccaattttcggagagggatgaaagagactttttgcatgtcctctatgaaatgttaccgaagcaatgcctatactatcacaacaagttcaaggatggccaaaaaaaactacgttggcatttcagaaatcccttccatggccaaaactattaccaaagactcgatctatgactcatttgacagagaagccaaggaaaaaaagcttgcttggcccattaactcaaatccaccaaatacttttgtctaagttctcattctttcaattgttatgcaccagagattaaaaagctttaactataaaaacagaagctatttacatatttgttttcactcaactttccaagggaaatgttttattttgtaaaatgcattcatttgtttactgta

SEQ ID NO: 313369 - DNA, 1751 bp, Artificial Sequence
  derived and/or modified sequence
tgtctccctaacaggaagcaggctgtgagccaaggggaaggcagaggacagaaatgaatgtgtttccaggctttcctggtggtttatggcattctccaaactcctatgcaagggctattcctgaccaagaagatctaaagagaacgtctctgaaatcaagtccggatgaagaattaagagaaaaaaagtgaatatggtttttgctcacagaatggataacagcaagccacatttgattattcctacacttctggtgcccctccaaaaccgcagctgcactgaaacagccacacctctgccaagccaatacctgatggaattaagtgaggagcacagttggatgagcaaccaaacagaccttcactatgtgctgaaacccggggaagtggccacagccagcatcttctttgggattctgtggttgttttctatcttcggcaattccctggtttgtttggtcatccataggagtaggaggactcagtctaccaccaactactttgtggtctccatggcatgtgctgaccttctcatcagcgttgccagcacgcctttcgtcctgctccagttcaccactggaaggtggacgctgggtagtgcaacgtgcaaggttgtgcgatattttcaatatctcactccaggtgtccagatctacgttctcctctccatctgcatagaccggttctacaccatcgtctatcctctgagcttcaaggtgtccagagaaaaagccaagaaaatgattgcggcatcgtgggtctttgatgcaggctttgtgacccctgtgctctttttctatggctccaactgggacagtcattgtaactatttcctcccctcctcttgggaaggcactgcctacactgtcatccacttcttggtgggctttgtgattccatctgtcctcataattttattttaccaaaaggtcataaaatatatttggagaataggcacagatggccgaacggtgaggaggacaatgaacattgtccctcggacaaaagtgaaaactatcaagatgttcctcattttaaatctgttgtttttgctctcctggctgccttttcatgtagctcagctatggcacccccatgaacaagactataagaaaagttcccttgttttcacagctatcacatggatatcctttagttcttcagcctctaaacctactctgtattcaatttataatgccaattttcggagagggatgaaagagactttttgcatgtcctctatgaaatgttaccgaagcaatgcctatactatcacaacaagttcaaggatggccaaaaaaaactacgttggcatttcagaaatcccttccatggccaaaactattaccaaagactcgatctatgactcatttgacagagaagccaaggaaaaaaagcttgcttggcccattaactcaaatccaccaaatacttttgtctaagttctcattctttcaattgttatgcaccagagattaaaaagctttaactataaaaacagaagctatttacatatttgttttcactcaactttccaagggaaatgttttattttgtaaaatgcattcatttgtttactgtagtttttgtgggttttattttacttgctttttatgttttaggaaaagcgttcactttgaactttagccaacagtccttttactattaatatattagttacatgcataaaaaagaaaatgctttcttactatttactgttggttcaaaaacataaacctaagccatacacac

SEQ ID NO: 313370 - DNA, 553 bp, Artificial Sequence
  derived and/or modified sequence
agcgcgcaaaagtttcaaaactttccgcctagtgagaggcggtccgatttggcccttggggagtgtccgtcgcgttgatctgatggattcacgtacacaacaccacattctatgagattttgcaggcaaaagtccacaagctcgatatatgggacacctgcaccggcattggatttggccccgcaacatcttaaaggaagcaggctgtgagccaaggggaaggcagaggacagaaatgaatgtgtttccaggctttcctggtggtttatggcattctccaaactcctatgcaagggctattcctgaccaagaagatctaaagagaacgtctctgaaatcaagtccggatgaagaattaagagaaaaaaagtgaatatggtttttgctcacagaatggataacagcaagccacatttgattattcctacacttctggtgcccctccaaaaccgcagctgcactgaaacagccacacctctgccaagccaatacctgatggaattaagtgaggagcacagttggatgagcaaccaaacagaccttcactatgtgc

SEQ ID NO: 313371 - DNA, 1248 bp, Artificial Sequence
  derived and/or modified sequence
atggttttcgctcacaggatggataattcaaaacctcaccttatcatcccgacccttcttgtccccctacaaaatcgctcctgcacagagactgcgacacccttgccttcccagtacttgatggagctgagcgaagaacactcctggatgagtaaccagaccgatctgcactacgtcctaaaaccaggagaagtcgccacagcttcaatcttcttcggtatcctgtggcttttttccatattcggaaattctctagtctgtttggtgatccaccgatcccggaggactcagagcaccacaaattacttcgttgtaagtatggcctgcgccgacctgctgattagtgtggcatcgactcccttcgtgctgttgcaatttacgacaggtaggtggacacttgggtcagcaacgtgtaaggtggtaagatacttccagtacctgactcccggtgtccagatctacgtcctcctgtccatatgcatcgatcggttctatacaatcgtttacccgctgagcttcaaggtgtctagggaaaaggcgaaaaagatgattgctgcttcctgggtatttgacgcaggctttgtgacacccgtgctgttcttttacggcagcaactgggattcccattgcaactactttcttccctcgtcatgggagggcactgcatatactgtgattcacttcctggtcgggtttgtgatcccatcagtgttgattatactgttctatcaaaaagtaatcaagtatatttggcggattgggactgatgggaggactgtgcgacgtactatgaatatcgtgcctagaaccaaagtgaaaactattaaaatgttcctgattctcaacctgctcttcttactgagttggcttccctttcacgtggcccagctctggcacccgcatgagcaagactacaaaaagtcatccctggtgttcacggccatcacatggatctccttctcatcctctgcaagtaagcccaccctttattccatctacaacgccaatttccggaggggcatgaaggaaactttttgcatgtcctcaatgaagtgctatagatccaatgcatacaccatcactacatcttccagaatggcaaagaagaattacgtcgggatcagcgaaatcccaagcatggccaaaacgatcactaaggattctatttacgatagctttgatagggaagcaaaggagaaaaagctggcctggcctatcaattccaacccccctaatacgtttgtctag

SEQ ID NO: 313372 - DNA, 1248 bp, Artificial Sequence
  derived and/or modified sequence
atggtgtttgctcacagaatggataactcaaaaccccatctgatcattccaaccctcctagtgcctctacagaataggagctgtacagaaacagccacacccttacccagtcagtacctgatggagctatcagaggaacactcctggatgtctaaccagacagacctccattacgtgctcaagccaggtgaagttgccaccgcctctatcttttttggcattctgtggctattcagcatcttcggaaacagtttggtctgcctggtcatccaccgatcgcgacggacacagtccacaaccaactacttcgtcgtgtccatggcttgtgcagatctattaatcagcgtcgccagcacgccctttgtgctgctccaattcaccacaggaaggtggacactcggctctgccacttgtaaagtggttcgatactttcaatatctaacacccggggtgcaaatctacgtcctgttaagcatctgcatcgatcggttttataccatcgtttatccactgagttttaaagtgagcagggagaaagctaagaaaatgattgcagcttcatgggtatttgatgcaggctttgtcactcctgttctctttttctacgggtcaaactgggattctcactgcaattactttctgcccagtagctgggagggcactgcttatactgtcattcattttctggtaggattcgtgataccctctgtactgattatcctcttttatcagaaagtgattaaatacatctggcggattggcactgacggacggaccgtacgcaggacaatgaatattgttccacgcactaaggttaagactattaaaatgttcctgatcctgaacttgctgttcctgctgagctggctgcctttccacgtcgctcagctttggcaccctcatgaacaggattacaaaaaatcctccctggtattcaccgcaattacctggatcagcttctcttcctccgctagcaagcccaccctgtattccatatacaatgcaaatttccggcgcggaatgaaggagacattctgcatgtctagcatgaaatgttatagatcaaatgcctacactatcacgacgtcgtcaaggatggccaagaaaaattacgtgggtattagtgagattccttccatggctaaaactatcactaaggacagcatttatgatagctttgaccgggaggccaaagagaagaagctcgcgtggccgattaattctaatccgccgaatacctttgtgtag

SEQ ID NO: 313373 - DNA, 180 bp, Artificial Sequence
  derived and/or modified sequence
atggtttttgcgcatcgcatggacaattctaagccacaccttataattcccacgctgcttgtgccactccagaaccggtcctgcaccgagactgccactccgctaccctcccagtatctaatggagctatctgaggaacacagctggatgagcaatcaaactgatcttcattacgtctag

SEQ ID NO: 313374 - DNA, 1248 bp, Artificial Sequence
  derived and/or modified sequence
atggtgtttgcccacaggatggacaacagcaagccccacctgatcatccccaccctgctggtgcccctgcagaacagaagctgcacagaaacagccacccccctgcccagccagtacctgatggagctgtctgaggagcacagctggatgagcaaccagacagacctgcactacgtgctgaagccaggagaggtggccacagccagcatcttcttcggcatcctgtggctgttcagcatctttggaaacagcctggtgtgcctggtgatccacaggagcaggaggacccagagcaccaccaactactttgtggtgtccatggcctgtgccgacctgctgatctctgtggccagcaccccatttgtgctgctgcagttcaccaccggccgctggaccctgggcagcgccacctgcaaggtggtgcgctacttccagtacctgaccccaggagtgcagatctacgtgctgctgagcatctgcatcgaccgcttctacaccatcgtgtaccccctgtccttcaaggtgtcccgggagaaggccaagaagatgattgctgcctcctgggtgtttgatgctggctttgtgacccctgtgctcttcttctacggcagcaactgggacagccactgcaactacttcctgcccagctcctgggagggcacagcctacaccgtcatccacttcctggtgggcttcgtcatccccagcgtgctgatcatcctcttctaccagaaggtgatcaagtacatctggagaattggaacagatggccgcacagtgcggaggaccatgaacatcgtgcccaggaccaaggtgaagaccatcaagatgttcctgatcctgaacctgctcttcctgctgtcctggctgcccttccacgtggcccagctgtggcacccccatgagcaggactacaagaagagcagcctggtgttcaccgccatcacctggatctccttcagcagcagcgccagcaagcccaccctgtacagcatctacaatgccaacttccggcggggcatgaaggagaccttctgcatgagctccatgaagtgctaccgcagcaatgcctacaccatcaccaccagcagcaggatggccaagaagaactacgtgggcatcagcgagatccccagcatggccaagaccatcaccaaggacagcatctatgacagctttgaccgggaggccaaggagaagaagctggcctggcccatcaacagcaacccccccaacacctttgtgtag

SEQ ID NO: 313375 - DNA, 180 bp, Artificial Sequence
  derived and/or modified sequence
atggtgtttgcccacaggatggacaacagcaagccccacctgatcatccccaccctgctggtgcccctgcagaacagaagctgcacagaaacagccacccccctgcccagccagtacctgatggagctgtctgaggagcacagctggatgagcaaccagacagacctgcactacgtgtag

SEQ ID NO: 313376 - DNA, 1248 bp, Artificial Sequence
  derived and/or modified sequence
atggtgttcgcccaccggatggacaacagcaagccccacctgatcatccctaccctgctggtgcctctccagaataggtcctgtaccgagaccgcaactcccctcccttcacagtatcttatggaactgagtgaagagcacagttggatgagcaatcagacagatcttcactatgtcctcaagcccggcgaagtggcaacagccagcatctttttcgggatattgtggctgttctctatttttggcaatagcctggtgtgcctggtgatccataggtcccgccgaactcagtcgacaaccaattactttgtcgtctctatggcgtgcgccgatctgctcatttccgtcgcctctaccccattcgtgctgctgcaattcacaactgggcgttggaccctcggctctgccacatgtaaagttgtgcgttatttccagtacctgacaccaggcgtgcagatttatgtcctgctgtccatttgcatcgatagattctacactattgtatatccactgtctttcaaggtctctcgggagaaagctaagaagatgatagccgcaagctgggtctttgatgccggattcgtaaccccagttctttttttttacggaagcaattgggactcccattgcaactactttttgcccagctcatgggaaggaacagcatatacggtgatccatttcctagtgggtttcgtgattcctagcgttttaatcattttgttctatcagaaggtgattaagtacatctggcgcatcggaactgacgggcgcacggtccggcgcaccatgaacatcgtaccaagaaccaaggtcaaaaccataaaaatgttcctgattctcaacctcctattcttactgtcttggttgccgttccacgtcgcacaactatggcaccctcatgagcaagactataaaaagtcatccctggttttcaccgctattacctggatatcatttagcagcagcgcctccaaacccactctgtacagtatctataatgcaaacttcagacgcggtatgaaagaaaccttctgtatgtcaagcatgaagtgctacaggtctaacgcctacaccatcaccactagcagcaggatggcaaaaaaaaactacgtgggcatttcggagataccaagtatggcaaagaccataaccaaagattcgatatacgacagcttcgatcgagaggctaaggaaaagaaactggcatggccaataaacagtaatcccccaaatacattcgtgtag

SEQ ID NO: 313377 - DNA, 1248 bp, Artificial Sequence
  derived and/or modified sequence
atggtgttcgcccaccggatggacaacagcaagccccacctgatcatccccactctactggtgcctctccagaatcggtcctgtacggagacagccacccctcttccgagccaatacctgatggaactgtcagaggagcatagttggatgtccaatcagactgacctccattacgtgctgaagcctggggaggtggccaccgcgtccattttcttcggcattttgtggctcttttccatctttggtaattccctagtgtgtcttgttatccaccgaagtaggcgaacccaaagtacaacaaactacttcgtagtctccatggcctgtgctgacctcctgattagcgtcgcttccacaccctttgtcttgcttcagtttactacaggaaggtggaccttggggtcggccacctgtaaggtggtccgttatttccagtatttaactcccggagttcagatctacgttttattaagcatttgcatcgaccggttctatacaatcgtgtatccactgtcttttaaggtgagcagggagaaggctaagaagatgattgccgcgagctgggtttttgacgccgggttcgtcacccccgtactattcttttatgggagtaactgggattctcactgcaattacttcctgccctccagctgggagggtaccgcatacacggtcattcatttcctcgttggatttgtgatccccagcgtgctgattatcctgttctatcagaaagtgatcaagtatatctggcggattgggacagacggacgcactgtcaggaggacgatgaacatcgtccccagaaccaaggtgaagactattaagatgtttttaatcctgaatcttctgttcctcctgtcctggctgcccttccacgttgctcaactgtggcatcctcatgagcaggactataaaaagtcttctttagtctttactgccatcacctggatatcctttagttcttccgcttcaaaacccacattatattcgatctacaatgcgaattttcgcagaggcatgaaagagacgttctgtatgagttctatgaaatgctaccggtcaaacgcttatactatcactacctcgagccgtatggccaagaaaaactatgtgggtatctccgaaatcccatccatggccaagaccataactaaggattccatttatgatagtttcgacagagaagcgaaagagaagaagctcgcttggcccatcaactcaaatccacccaacacctttgtctag

SEQ ID NO: 313378 - DNA, 180 bp, Artificial Sequence
  derived and/or modified sequence
atggtgttcgcccaccggatggacaacagcaagccccacctgatcatacccactctgctcgtgcctcttcaaaatagaagctgcactgagaccgcaacccctctgccttctcagtatctgatggagctctcagaggagcatagttggatgtctaaccaaaccgacctgcattacgtctag

SEQ ID NO: 313379 - DNA, 1248 bp, Artificial Sequence
  derived and/or modified sequence
atggtcttcgcacataggatggacaatagtaagcctcaccttatcatccccacgctcctggttccgttacaaaatcggtcgtgtaccgaaacagccacccctctgccttcccagtacctgatggagctttccgaagaacactcttggatgagcaaccaaacagaccttcactacgttttgaaaccaggggaggtggccacggcatctattttttttgggatcctgtggctcttctccattttcgggaattcattggtctgtctggtgattcaccggtcacgacggactcagagtacgacaaactatttcgtggtgtccatggcttgtgccgatttattaatctccgttgctagcacaccgttcgtcctactgcaattcacaacaggacggtggacactgggtagtgctacctgcaaagtggtccggtacttccagtatctaacccctggggttcagatttacgttttgctgtccatttgcatcgatcgcttttacaccatcgtgtaccccctctcattcaaggtgtctagagagaaggctaagaagatgattgcagcctcatgggtctttgacgccggtttcgtgacccctgtgctgtttttctatggctctaattgggatagccattgtaattactttttgcctagttcgtgggaagggaccgcctataccgttattcattttcttgtgggctttgtcatcccttccgttctgattattctgttttaccagaaagttatcaagtatatttggcgaattggtactgatggccgtacagtacggcgaaccatgaatattgttccgagaacaaaagtgaagacaatcaaaatgtttctgattttaaaccttctgtttctcctgtcttggttgcccttccacgtcgcacagctatggcacccccacgagcaggactacaagaagtcctccctcgtattcaccgccatcacttggataagcttctcgtcgagtgcctctaagcctacactttacagtatttataacgccaacttccgtagggggatgaaggaaactttttgcatgtcaagtatgaagtgttatcgcagcaacgcgtatacgataacaacttcctcacggatggctaagaagaattacgttggcatttctgagattccgagtatggctaaaacaatcacaaaagatagtatctacgattccttcgatagagaggcaaaagagaaaaaattagcttggccaattaatagcaatcccccaaacacattcgtatag

SEQ ID NO: 313380 - DNA, 1248 bp, Artificial Sequence
  derived and/or modified sequence
atggtgtttgcccaccgcatggacaactcaaaaccacacctgattatacctacactcttggtgcccctgcagaatagatcgtgcaccgaaaccgctactcccctgcccagccagtatctgatggagttgagcgaggaacattcctggatgtccaatcaaactgatctccactacgtgctcaagcccggtgaggtggccacagcttccatttttttcggcatcttatggctgttcagcatctttggaaatagcctggtctgccttgtcattcatagatcaagacggactcagtcgaccactaactacttcgttgtctctatggcatgcgccgacctgttgatcagtgtcgcctccacaccattcgtgctcttgcagttcacaacaggacgttggactctcggttcagccacctgtaaagttgtccggtacttccagtatttgactcctggcgttcagatatatgtgctgctaagtatttgtatcgatcggttctatactattgtctacccactgtcctttaaggtgagcagggaaaaagcgaaaaagatgattgccgcttcatgggtgtttgacgccggattcgtaacaccagtgctcttcttttacggatctaattgggactcccactgcaattacttcttgccttcaagttgggaggggaccgcttacacagttatccattttctagtgggatttgtcatcccctccgtgctgattatcctcttttaccagaaggtgattaagtacatatggagaataggcactgacgggagaactgtgaggcgaacaatgaatattgtcccccgaactaaggtcaaaaccattaaaatgttcttgattctgaatctcctgttcctgctctcatggctcccctttcacgtggcgcaactgtggcatccccacgagcaagactacaaaaaaagttcattagtgtttacagccattacatggattagcttctcaagcagcgcttcaaagccaactttgtatagcatttataatgctaatttccgtcgaggtatgaaagagactttctgtatgtcttcaatgaaatgttaccgctcgaatgcctacaccatcacaactagctctcgcatggcaaagaagaattatgtgggtattagcgaaattccttcaatggcgaagaccattactaaagactcaatatacgactcattcgacagagaggccaaagagaagaagctggcctggcctatcaactcaaatcctcctaatacatttgtgtag

SEQ ID NO: 313381 - DNA, 180 bp, Artificial Sequence
  derived and/or modified sequence
atggtatttgctcaccggatggacaattctaaacctcatctgattattcccacattgctagtcccattacagaatcgaagttgtactgagaccgcgacacccctcccatcccagtacttgatggagctgtcagaagaacactcctggatgtcgaatcagacggacttacactatgtgtag

SEQ ID NO: 313382 - DNA, 1248 bp, Artificial Sequence
  derived and/or modified sequence
atggtgttcgcccacagaatggacaacagcaagccccacctgatcatccccaccctgctggtgcccctgcagaacagaagctgcaccgagaccgccacccccctgcccagccagtacctgatggagctgagcgaggagcacagctggatgagcaaccagaccgacctgcactacgtgctgaagcccggcgaggtggccaccgccagcatcttcttcggcatcctgtggctgttcagcatcttcggcaacagcctggtgtgcctggtgatccacagaagcagaagaacccagagcaccaccaactacttcgtggtgagcatggcctgcgccgacctgctgatcagcgtggccagcacccccttcgtgctgctgcagttcaccaccggcagatggaccctgggcagcgccacctgcaaggtggtgagatacttccagtacctgacccccggcgtgcagatctacgtgctgctgagcatctgcatcgacagattctacaccatcgtgtaccccctgagcttcaaggtgagcagagagaaggccaagaagatgatcgccgccagctgggtgttcgacgccggcttcgtgacccccgtgctgttcttctacggcagcaactgggacagccactgcaactacttcctgcccagcagctgggagggcaccgcctacaccgtgatccacttcctggtgggcttcgtgatccccagcgtgctgatcatcctgttctaccagaaggtgatcaagtacatctggagaatcggcaccgacggcagaaccgtgagaagaaccatgaacatcgtgcccagaaccaaggtgaagaccatcaagatgttcctgatcctgaacctgctgttcctgctgagctggctgcccttccacgtggcccagctgtggcacccccacgagcaggactacaagaagagcagcctggtgttcaccgccatcacctggatcagcttcagcagcagcgccagcaagcccaccctgtacagcatctacaacgccaacttcagaagaggcatgaaggagaccttctgcatgagcagcatgaagtgctacagaagcaacgcctacaccatcaccaccagcagcagaatggccaagaagaactacgtgggcatcagcgagatccccagcatggccaagaccatcaccaaggacagcatctacgacagcttcgacagagaggccaaggagaagaagctggcctggcccatcaacagcaacccccccaacaccttcgtgtag

SEQ ID NO: 313383 - DNA, 180 bp, Artificial Sequence
  derived and/or modified sequence
atggtgttcgcccacagaatggacaacagcaagccccacctgatcatccccaccctgctggtgcccctgcagaacagaagctgcaccgagaccgccacccccctgcccagccagtacctgatggagctgagcgaggagcacagctggatgagcaaccagaccgacctgcactacgtgtag

SEQ ID NO: 313384 - protein, 1484 aa, Artificial Sequence [sequence omitted]

SEQ ID NO: 313385 - DNA, 4455 bp, Artificial Sequence
  derived and/or modified sequence
atgaaacctagggccgaatgttgcagcccaaagttctggctagtgcttgctgtgctggccgtaagtggttcacgagcacgttcccagaaaagccctcccagcattggcatcgcagttatcctagttggcacctctgatgaagtcgccataaaggatgctcacgagaaggacgattttcaccacttgtcggttgtcccaagagtggaactggtcgccatgaatgagactgacccaaagtcaatcatcacccgcatctgtgatctgatgagtgacagaaaaatacaaggcgttgtttttgcagacgacaccgaccaggaagctatcgcccaaatcttggattttatttccgcccaaactctcacccctattctgggcattcatgggggaagttccatgataatggccgacaaggacgagagctcaatgttctttcaattcgggcccagcatcgagcaacaggcttccgtcatgctcaatattatggaagagtacgattggtatatcttttcaatagtgacaacctattttccggggtatcaggactttgtgaacaagattcgcagcaccatcgagaattcgtttgtgggttgggagctggaagaagtcctgttgctcgatatgagcctggacgacggcgatagcaagatccagaaccaactgaagaaattgcaatcacctatcattctcctctattgcactaaagaagaggccacctacatattcgaagtggcaaactcagtggggctcaccggttacggctatacctggatcgtgccgagccttgtcgcgggggatacagacaccgtgcctgcagaatttcccacaggcttgatatctgtgtcgtacgatgagtgggactacgggctgcccgctcgggtgagggacggcatagccattataaccaccgccgcaagtgatatgctgagcgagcactctttcatcccggaacctaaatcctcttgctataacactcacgaaaagaggatctaccagagcaacatgctgaatagatacctgatcaacgtaacgttcgagggccgtaacttaagcttcagtgaggacggctatcaaatgcaccctaagctcgtgatcattctacttaacaaagaaaggaaatgggaaagggttgggaagtggaaagacaagtctcttcagatgaagtactacgtgtggcccaggatgtgtcctgaaacagaagagcaggaggacgaccacctctccatcgtgactttggaggaggcccctttcgtgatcgtggagagtgtggatccactctccgggacttgcatgcgcaacacagtgccttgtcagaagaggatagtgacagaaaataaaacagatgaggaacctggatatataaaaaaatgttgcaaagggttctgtatcgacatcctcaaaaagattagtaaaagcgtcaagttcacctatgatctgtacctggtgactaacggcaagcacggaaagaagatcaacggaacctggaatgggatgatcggggaggtcgtcatgaagcgggcttatatggctgttggctccctgaccataaatgaagaaagatcagaagtggtggactttagcgtgcccttcatcgaaaccggaattagtgtcatggtcagccggtcgaacggtactgtctcaccatccgcattcctcgagccgttctcagccgatgtctgggtcatgatgttcgtcatgctgctgattgttagcgctgtagccgtgttcgtattcgaatattttagccctgtgggatacaaccggtgcctggcagacggacgggagcctggagggccaagctttaccatcggtaaggccatatggctgctgtggggcctggtttttaataacagtgtgcccgtccagaatccaaaagggacgacctccaagatcatggtatccgtctgggcattcttcgcagtgatctttctggcatcttatacagccaacctagctgcgtttatgatacaagaggaatacgtggaccaagtatccggactttcagataagaagttccagaggcctaatgattttagcccaccttttcggttcggcactgttccaaatgggtccactgagcgcaatataagaaataactacgccgagatgcatgcctacatggggaagttcaatcagcgaggggttgacgacgcacttctgtcactcaaaactgggaagttagatgcctttatatatgacgcagctgtcctcaactatatggctggaagggacgaagggtgtaaacttgtaaccataggttcgggaaaggtcttcgcctctaccggctacgggattgcgatacagaaggattctggttggaaacgtcaggtcgatctggccatactgcagttgttcggagatggcgagatggaagaactggaggcattgtggctgacaggaatctgccataatgaaaagaatgaggtgatgagcagtcagctggatatcgataatatggctggggtgttctatatgctcggggccgctatggcccttagtctgatcactttcatctgtgaacacctcttctactggcaatttagacactgctttatgggagtgtgctctgggaaacccggcatggtgtttagcattagtcgcggcatctatagctgcattcacggcgtggccatagaggagcgccagtctgttatgaactccccaacggccaccatgaacaacactcattcgaatattctgcggcttctccgcacagcgaagaatatggcaaacctgagcggcgtaaacgggtctccacagtcagccctcgacttcatcagaagagagagcagtgtgtacgacattagtgaacataggcgctctttcacccactcagattgtaaaagttataataaccccccctgcgaagaaaacttgtttagcgactatatctcagaggtagagcggacctttggcaatctccagctgaaagattctaatgtttatcaggatcattaccatcatcaccacagaccccatagcatagggagtgcaagctctatcgacggcctgtatgactgcgacaaccctccgttcaccactcagtctcggagcatatccaagaagcctcttgacattgggctgcccagcagcaagcactcacagctctctgatttatatggcaaattctccttcaaatcagacagatacagtggccatgacgatttaatccggtccgacgtcagcgatataagcactcataccgtaacttatggcaacatcgaagggaatgctgccaaacgccggaagcagcaatataaggatagcctcaagaagaggcctgcctccgccaaatcacgacgtgaatttgatgaaattgagctcgcgtatcgtagaaggccccccaggagcccggaccacaagaggtatttccgcgataaggaggggctgcgggatttctacctcgatcaattcagaactaaagagaactctccacactgggagcacgtggatttgacagatatctataaggaacggagtgatgacttcaagagagattccgtcagcggcggcggaccgtgtaccaacagatcacacatcaaacacggaacgggggacaagcatggggttgtttcaggagtccctgcaccgtgggaaaaaaatctcaccaacgtagagtgggaagaccgctccgggggaaacttttgtcgctcctgcccatcaaagttgcataactatagtactactgtcacaggacaaaattctggaagacaggcctgtatccggtgtgaggcctgcaaaaaagcggggaatctgtacgacatctccgaggacaatagtctgcaggagctggatcagccggcagcacccgtggcggtgacatccaatgcctctaccacgaaatacccccagagcccgacaaactcaaaagcccagaagaagaatcggaacaaactccggagacagcattcatatgatacctttgtggacctgcagaaggaagaagctgcattagcacctcgatcagttagcttgaaagataagggcagattcatggacggaagcccgtatgcccacatgtttgagatgagtgcaggggaatcaacattcgctaataataagtctagcgttccaaccgccggacaccatcatcacaataatccaggcggggggtacatgctcagtaagagtctttacccagaccgagttactcagaatccctttattcctacattcggcgatgaccagtgtcttcttcacggcagcaaatcatactttttcaggcagcctaccgtagctggcgcctcgaaagctcgaccagacttccgcgcattggtcactaataagccggtggtctcagctctacatggcgctgttcccgctcgatttcaaaaagacatctgcatcggtaatcagtcaaacccttgcgtacctaataacaaaaaccctagggcttttaatggtagctccaacgggcacgtgtatgagaagctatctagcatagagtcagacgtttag

SEQ ID NO: 313386 - DNA, 6238 bp, Artificial Sequence
  derived and/or modified sequence
tttgaatttgcatctcttcaagacacaagattaaaacaaaatttacgctaaattggattttaaattatcttccgttcatttatccttcgtctttcttatgtggatatgcaagcgagaagaagggactggacattcccaacatgctcactcccttaatctgtccgtctagaggtttggcttctacaaaccaagggagtcgacgagttgaagatgaagcccagagcggagtgctgttctcccaagttctggttggtgttggccgtcctggccgtgtcaggcagcagagctcgttctcagaagagcccccccagcattggcattgctgtcatcctcgtgggcacttccgacgaggtggccatcaaggatgcccacgagaaagatgatttccaccatctctccgtggtaccccgggtggaactggtagccatgaatgagaccgacccaaagagcatcatcacccgcatctgtgatctcatgtctgaccggaagatccagggggtggtgtttgctgatgacacagaccaggaagccatcgcccagatcctcgatttcatttcagcacagactctcacccccatcctgggcatccacgggggctcctctatgataatggcagataaggatgaatcctccatgttcttccagtttggcccatcaattgaacagcaagcttccgtaatgctcaacatcatggaagaatatgactggtacatcttttctatcgtcaccacctatttccctggctaccaggactttgtaaacaagatccgcagcaccattgagaatagctttgtgggctgggagctagaggaggtcctcctactggacatgtccctggacgatggagattctaagatccagaatcagctcaagaaacttcaaagccccatcattcttctttactgtaccaaggaagaagccacctacatctttgaagtggccaactcagtagggctgactggctatggctacacgtggatcgtgcccagtctggtggcaggggatacagacacagtgcctgcggagttccccactgggctcatctctgtatcatatgatgaatgggactatggcctccccgccagagtgagagatggaattgccataatcaccactgctgcttctgacatgctgtctgagcacagcttcatccctgagcccaaaagcagttgttacaacacccacgagaagagaatctaccagtccaatatgctaaataggtatctgatcaatgtcacttttgaggggaggaatttgtccttcagtgaagatggctaccagatgcacccgaaactggtgataattcttctgaacaaggagaggaagtgggaaagggtggggaagtggaaagacaagtccctgcagatgaagtactatgtgtggccccgaatgtgtccagagactgaagagcaggaggatgaccatctgagcattgtgaccctggaggaggcaccatttgtcattgtggaaagtgtggaccctctgagtggaacctgcatgaggaacacagtcccctgccaaaaacgcatagtcactgagaataaaacagacgaggagccgggttacatcaaaaaatgctgcaaggggttctgtattgacatccttaagaaaatttctaaatctgtgaagttcacctatgacctttacctggttaccaatggcaagcatgggaagaaaatcaatggaacctggaatggtatgattggagaggtggtcatgaagagggcctacatggcagtgggctcactcaccatcaatgaggaacgatcggaggtggtcgacttctctgtgcccttcatagagacaggcatcagtgtcatggtgtcacgcagcaatgggactgtctcaccttctgccttcttagagccattcagcgctgacgtatgggtgatgatgtttgtgatgctgctcatcgtctcagccgtggctgtctttgtctttgagtacttcagccctgtgggttataacaggtgcctcgctgatggcagagagcctggtggaccctctttcaccatcggcaaagctatttggttgctctggggtctggtgtttaacaactccgtacctgtgcagaacccaaaggggaccacctccaagatcatggtgtcagtgtgggccttctttgctgtcatcttcctggccagctacactgccaacttagctgccttcatgatccaagaggaatatgtggaccaggtttctggcctgagcgacaaaaagttccagagacctaatgacttctcaccccctttccgctttgggaccgtgcccaacggcagcacagagagaaatattcgcaataactatgcagaaatgcatgcctacatgggaaagttcaaccagaggggtgtagatgatgcattgctctccctgaaaacagggaaactggatgccttcatctatgatgcagcagtgctgaactatatggcaggcagagatgaaggctgcaagctggtgaccattggcagtgggaaggtctttgcttccactggctatggcattgccatccaaaaagattctgggtggaagcgccaggtggaccttgctatcctgcagctctttggagatggggagatggaagaactggaagctctctggctcactggcatttgtcacaatgagaagaatgaggtcatgagcagccagctggacattgacaacatggcaggggtcttctacatgttgggggcggccatggctctcagcctcatcaccttcatctgcgaacaccttttctattggcagttccgacattgctttatgggtgtctgttctggcaagcctggcatggtcttctccatcagcagaggtatctacagctgcatccatggggtggcgatcgaggagcgccagtctgtaatgaactcccccaccgcaaccatgaacaacacacactccaacatcctgcgcctgctgcgcacggccaagaacatggctaacctgtctggtgtgaatggctcaccgcagagcgccctggacttcatccgacgggagtcatccgtctatgacatctcagagcaccgccgcagcttcacgcattctgactgcaaatcctacaacaacccgccctgtgaggagaacctcttcagtgactacatcagtgaggtagagagaacgttcgggaacctgcagctgaaggacagcaacgtgtaccaagatcactaccaccatcaccaccggccccatagtattggcagtgccagctccatcgatgggctctacgactgtgacaacccacccttcaccacccagtccaggtccatcagcaagaagcccctggacatcggcctcccctcctccaagcacagccagctcagtgacctgtacggcaaattctccttcaagagcgaccgctacagtggccacgacgacttgatccgctccgatgtctctgacatctcaacccacaccgtcacctatgggaacatcgagggcaatgccgccaagaggcgtaagcagcaatataaggacagcctgaagaagcggcctgcctcggccaagtcccgcagggagtttgacgagatcgagctggcctaccgtcgccgaccgccccgctcccctgaccacaagcgctacttcagggacaaggaagggctacgggacttctacctggaccagttccgaacaaaggagaactcaccccactgggagcacgtagacctgaccgacatctacaaggagcggagtgatgactttaagcgcgactccgtcagcggaggagggccctgtaccaacaggtctcacatcaagcacgggacgggcgacaaacacggcgtggtcagcggggtacctgcaccttgggagaagaacctgaccaacgtggagtgggaggaccggtccgggggcaacttctgccgcagctgtccctccaagctgcacaactactccacgacggtgacgggtcagaactcgggcaggcaggcgtgcatccggtgtgaggcttgcaagaaagcaggcaacctgtatgacatcagtgaggacaactccctgcaggaactggaccagccggctgccccagtggcggtgacgtcaaacgcctccaccactaagtaccctcagagcccgactaattccaaggcccagaagaagaaccggaacaaactgcgccggcagcactcctacgacaccttcgtggacctgcagaaggaagaagccgccctggccccgcgcagcgtaagcctgaaagacaagggccgattcatggatgggagcccctacgcccacatgtttgagatgtcagctggcgagagcacctttgccaacaacaagtcctcagtgcccactgccggacatcaccaccacaacaaccccggcggcgggtacatgctcagcaagtcgctctaccctgaccgggtcacgcaaaaccctttcatccccacttttggggacgaccagtgcttgctccatggcagcaaatcctacttcttcaggcagcccacggtggcgggggcgtcgaaagccaggccggacttccgggcccttgtcaccaacaagccggtggtctcggcccttcatggggccgtgccagcccgtttccagaaggacatctgtatagggaaccagtccaacccctgtgtgcctaacaacaaaaaccccagggctttcaatggctccagcaatgggcatgtttatgagaaactttctagtattgagtctgatgtctgagtgagggaacagagaggttaaggtgggtacgggagggtaaggctgtgggtcgcgtgatgcgcatgtcacggagggtgacgggggtgaacttggttcccatttgctcctttcttgttttaatttatttatgggatcctggagttctggttcctactgggggcaaccctggtgaccagcaccatctctcctccttttcacagttctctccttcttccccccgctgtcagccattcctgttcccatgagatgatgccatgggccctctcagcaggggagggtagagcggagaaaggaagggctgcatgcgggcttcctcctggtgtggaagagctccttgatatcctctttgagtgaagctgggagaaccaaaaagaggctatgtgagcacaaaggtagcttttcccaaactgatcttttcatttaggtgaggaagcaaaagcatctatgtgagaccatttagcacactgcttgtgaaaggaaagaggctctggctaaattcatgctgcttagatgacatctgtctaggaatcatgtgccaagcagaggttgggaggccatttgtgtttatatataagccaaaaaatgcttgcttcaaccccatgagactcgatagtggtggtgaacagaacaaaaggtcattggtggcagagtggattcttgaacaaactggaaagtacgttatgatagtgtcccacggtgccttggggacaagagcaggtggattgtgcgtgcatgtgtgttcatgcacacttgcacccatgtgtagtcaggtgcctcaagagaaggcaaccttgactctttctattgtttctttcaatatccccaagcagtgtgattgtttggcttatatacagacagagatggccatgtattacctgaattttggctgtgtctcccttcatccttctggaataaggagaatgaaaattcttgataaagaagattctgtggtctaaacaaaaaaaggcggtgagcaatcctgcaagaacaaggtacataaacaagtcctcagtggttggcaattgtttcaaccagtttgaaccaagaactttccaggaaggctaaagggaaaccgaattttcacagccatgattcttttgcccacacttgggagcaaaagattctacaaagctcttttgagcatttagactctcgactggccaaggtttggggaagaacgaagccacctttgaagaagtaaggagtcgtgtatggtagggtaagtgagagagggggatgtttccaatgctttgatcccttcttacttaacctgaagctagacgagcaggcttcttccccccaaaactgattacaactgctacagagcagacagttaagagaaatgagcttgacctttaagagaaatgagctgcactccatgagtgcagctctggaggtacgaaaagaggggaagagacttggaaatgggagacgggggcagagagggaccctccaccacctctttgggcctggctccctgggaatgtgacttgagcccagagtgaacactcttggtagaagcccttctaccttcctgcaacaccttgtttccctctcagattgtaccattgag

SEQ ID NO: 313387 - DNA, 4455 bp, Artificial Sequence
  derived and/or modified sequence
atgaagcccagggctgagtgctgcagccccaagttctggctggtgctggccgtgctggccgtgtctggcagccgggcccggagccagaagagcccccccagcattggaattgctgtgatcctggtgggcaccagtgatgaggtggccatcaaggatgcccacgagaaggatgacttccaccacctgtctgtggtgccccgggtggagctggtggccatgaatgaaacagaccccaagagcatcatcacccgcatctgtgacctgatgtctgacaggaagatccagggcgtggtgtttgctgatgacacagaccaggaggccatcgcccagatcctggacttcatcagcgcccagaccctgacccccatcctgggcatccatggaggcagctccatgatcatggctgacaaggatgagagctccatgttcttccagtttggccccagcattgagcagcaggcctctgtgatgctgaacatcatggaggagtatgactggtacatcttcagcatcgtgaccacctacttccctggctaccaggactttgtgaacaagatccgcagcaccattgaaaattcctttgtgggctgggagctggaggaggtgctgctgctggacatgagcctggatgatggagacagcaagatccagaaccagctgaagaagctgcagagccccatcatcctgctgtactgcaccaaggaggaggccacctacatctttgaggtggccaacagcgtgggcctgaccggctacggctacacctggatcgtgcccagcctggtggccggggacacagacacagtgcctgctgagttccccaccggcctcatctctgtgtcctatgatgagtgggactatggcctgcctgcccgggtgagagatggcatcgccatcatcaccacagctgccagtgacatgctgtctgagcacagcttcatccctgagcccaagagcagctgctacaacacccatgagaagaggatctaccagagcaacatgctgaaccgctacctgatcaacgtgacctttgagggcaggaacctgtccttctctgaagatggctaccagatgcaccccaagctggtgatcatcctgctgaacaaggagaggaagtgggagcgggtgggcaagtggaaggacaagagcctgcagatgaagtactacgtgtggcccaggatgtgcccagagacagaggagcaggaggatgaccacctgagcatcgtgaccctggaggaggcccccttcgtcatcgtggagagcgtggaccccctgagcggcacctgcatgaggaacacagtgccctgccagaagagaattgtgacagagaacaagacagatgaggagcccggctacatcaagaagtgctgcaagggcttctgcatcgacatcctgaagaagatcagcaagtctgtgaagttcacctatgacctgtacctggtgaccaacgggaagcacggcaagaagatcaatggcacctggaatggcatgattggagaggtggtgatgaagagggcctacatggctgtgggcagcctgaccatcaatgaggagaggtctgaggtggtggacttctctgtgcccttcatcgagaccggcatctctgtgatggtgagccgcagcaatggcaccgtgagccccagcgccttcctggagcccttcagcgcagatgtgtgggtgatgatgtttgtgatgctgctgattgtgtctgctgtggccgtgtttgtgtttgagtacttcagccctgtgggctacaaccgctgcctggctgatggccgggagcccggcggccccagcttcaccatcggcaaggccatctggctgctgtggggcctggtgttcaacaacagcgtgcctgtgcagaaccccaagggcaccaccagcaagatcatggtgtctgtgtgggccttctttgctgtgatcttcctggccagctacacagccaacctggccgccttcatgatccaggaggagtatgtggaccaggtgtctggcctgagtgacaagaagttccagaggcccaatgacttcagcccccccttccgctttggaacagtgcccaacggcagcacagaaagaaacatccggaacaactatgcagagatgcacgcctacatgggcaagttcaaccagaggggcgtggatgatgccctgctgagcctgaagacaggcaagctggatgccttcatctatgatgctgctgtgctgaactacatggccggcagagatgagggctgcaagctggtgaccatcggcagcggcaaggtgtttgccagcacaggctacggcatcgccatccagaaggacagcggctggaagaggcaggtggacctggccatcctgcagctgtttggagatggagagatggaggagctggaggccctgtggctgaccggcatctgccacaatgagaagaatgaggtgatgagcagccagctggacatcgacaacatggccggggtcttctacatgctgggcgccgccatggccctgagcctcatcaccttcatctgtgagcacctgttctactggcagttccgccactgcttcatgggcgtgtgcagcggcaagccaggcatggtgttcagcatcagccggggcatctacagctgcatccatggagtggccatcgaggagcggcagagcgtgatgaacagccccacagccaccatgaacaacacccacagcaacatcctgcggctgctgaggacagccaagaacatggccaacctgagcggcgtgaatggcagcccccagagcgccctggacttcatccggcgggagagctctgtgtatgacatcagcgagcaccggcgctccttcacccacagcgactgcaagagctacaacaaccccccctgtgaggagaacctcttcagtgactacatcagcgaggtggagaggaccttcggcaacctgcagctgaaggacagcaatgtgtaccaggaccactaccaccaccaccaccggccccacagcatcggcagcgccagcagcattgatggcctgtatgactgtgacaacccccccttcaccacccagagccgcagcatcagcaagaagcccctggacatcggcctgcccagcagcaagcacagccagctgagtgacctgtatggcaagttctccttcaagagtgaccgctacagcggccatgatgacctgatccgcagtgatgtgtctgacatcagcacccacacagtgacctacggcaacatcgagggcaatgctgccaagaggaggaagcagcagtacaaggacagcctgaagaagaggcctgccagcgccaagagcagaagagaatttgatgaaattgagctggcctacagaagaagaccacccaggagcccagaccacaagcgctacttccgggacaaggagggcctgcgggacttctacctggaccagttccgcaccaaggagaacagcccccactgggagcacgtggacctgacagacatctacaaggagaggagtgatgacttcaagagggacagcgtgtctgggggcggcccctgcaccaacagaagccacatcaagcatggaactggagacaagcatggagtggtgtctggagtgcctgccccctgggagaagaacctgaccaacgtggagtgggaggacagaagtggcggcaacttctgccgcagctgccccagcaagctgcacaactacagcaccaccgtgacaggccagaacagcggccggcaggcctgcatccgctgtgaggcctgcaagaaggccggcaacctgtatgacatcagcgaggacaacagcctgcaggagctggaccagcctgctgcccctgtggccgtgaccagcaatgccagcaccaccaagtacccccagagccccaccaacagcaaggcccagaagaagaacagaaacaagctgcggcggcagcacagctatgacacctttgtggacctgcagaaggaggaggccgccctggcccccaggtctgtgtccctgaaggacaagggccgcttcatggatggcagcccctatgcccacatgtttgagatgtctgctggggagagcacctttgccaacaacaagagctctgtgcccacagctggccaccaccaccacaacaaccctgggggcggctacatgctgagcaagagcctgtacccagacagagtgacccagaaccccttcatccccacctttggagatgaccagtgcctgctgcacggcagcaagagctacttcttccggcagcccaccgtggccggggccagcaaggcccggccagacttccgggccctggtgaccaacaagcctgtggtgtctgccctgcatggagctgtgcctgcccgcttccagaaggacatctgcatcggcaaccagagcaacccctgtgtgcccaacaacaagaacccccgggccttcaacggcagcagcaatggccacgtgtatgagaagctgagcagcattgaaagtgatgtgtag

SEQ ID NO: 313388 - DNA, 4455 bp, Artificial Sequence
  derived and/or modified sequence
atgaagccccgggccgagtgctgcagccccaagttctggctggtgctcgctgtgttggcggtttccggaagtcgggccaggtcccagaaaagtcctcccagtataggtatagccgtgattctggtcggcaccagcgatgaagtggccattaaggacgcccatgaaaaggatgattttcaccacctttcagtggtcccccgggtggaattagtggctatgaatgaaaccgacccaaagtctatcatcacccgaatttgcgatcttatgtcagaccgaaagatacagggcgtcgtgttcgccgacgatactgaccaggaggccatcgcccagattcttgactttatttctgcacagaccctgaccccaattctaggtatacacggaggaagtagcatgatcatggccgacaaagatgaaagcagcatgttcttccagttcggcccctctatcgagcagcaagcctcagtcatgctcaacatcatggaggagtacgactggtacatcttctcaattgtcacgacttatttccctggctaccaggactttgttaataaaattcggagcaccatcgaaaacagcttcgtaggctgggaactcgaggaagtcttgctcttggatatgagtttagatgacggagacagcaagatacaaaatcaactgaagaagctgcagagtccgatcatcttactttattgcaccaaagaagaggctacatacattttcgaggtcgccaactcggtggggctgaccggctatggctacacatggatcgtgccttcattggtggcaggggatacggacaccgtgcctgcagagtttcccacaggactgatcagtgtgtcctatgacgaatgggattacggtctcccggctagggtaagagacgggattgctattattactacagccgccagtgacatgttgagcgagcacagctttattcccgaacccaagtctagttgttacaatacccacgagaagcggatataccagtccaatatgctaaaccgctatctcattaatgtgacatttgagggccgcaacctttccttctccgaagacggctaccagatgcatcctaaactggtaattatcctgctgaacaaagagcggaagtgggaaagagtgggcaagtggaaggacaagagcctccaaatgaagtactacgtttggccgaggatgtgccctgaaacagaggagcaggaggacgaccacctgtcaatcgtgaccctggaggaggcacccttcgtcatcgtggaaagtgtggaccccctgtccggcacctgtatgcgaaacacagtaccttgtcagaagcggatcgtgacggaaaacaaaacagacgaagagcctggttacatcaagaaatgttgcaaaggtttttgtattgatatcctgaagaaaatttcaaaatctgtgaagttcacatacgatctttacctcgtgaccaatggaaagcatggtaagaaaatcaacgggacctggaacgggatgattggtgaagtggtgatgaaacgggcttatatggccgttggaagcctgaccatcaatgaagaacgatcagaggtggtggacttttccgtcccatttatcgaaactggtatctctgtgatggtcagccggagcaatggcaccgtgagtcccagcgctttcctggagcccttttccgcggacgtttgggtaatgatgtttgtcatgctgttaattgtgtcagccgttgcagtgttcgtgttcgagtatttttccccggttggctacaacagatgtctcgcagatggacgggaaccaggcggacccagcttcactatcggtaaggccatctggctgctttggggactggtcttcaataatagcgtacccgtgcagaatcctaaggggaccactagtaagatcatggtttcagtgtgggcattctttgctgtcatcttcctggcgtcttataccgccaatcttgcggcctttatgattcaggaggaatatgttgaccaggttagtggtctgagcgataagaaattccaacggccaaacgatttcagccctccgtttaggtttggcaccgtgcctaatgggtcaactgagcgaaacatccgcaataactatgcagagatgcacgcctacatgggtaaattcaatcagaggggggtggacgatgcactgctttccttgaaaaccgggaaactagatgcttttatctatgatgcggcagtacttaattatatggccggcagagacgagggttgcaagctcgtcaccatcggcagtgggaaggtgttcgccagtacgggatacggcattgctatccagaaggattcagggtggaagcggcaggttgatctggctattctgcaactgtttggcgatggagaaatggaagagttagaagcgctctggctcacggggatttgccacaatgaaaagaatgaggttatgtctagccagctggacatagacaacatggccggcgtgttttatatgctgggggctgcgatggcattatccctcatcactttcatctgcgagcacctcttctattggcagttcaggcactgcttcatgggagtttgctcgggcaagccaggcatggtgttctctatcagccggggtatatatagctgcattcacggggtagccattgaggaacggcagtccgtgatgaatagtcctactgcgacaatgaacaacacccattcaaacatcctacgacttctgaggactgccaagaacatggcaaatctgagcggcgtgaatggctcccctcaatcggcgctggactttatcaggcgcgagtcctcagtctatgacatctccgaacacagacgctcatttacccactcagactgtaaaagctacaacaaccccccatgcgaagaaaacctctttagcgactacatctctgaagtggaaagaacgttcgggaatctacaattaaaggatagcaacgtttaccaggaccactatcaccatcatcatcgtccccactcaattggttccgccagttccattgatggcctctacgactgcgataacccaccctttactacccaatctcgctctatcagcaaaaaacctctggacataggcctcccgtcgtctaagcacagccaattgtccgatctctacgggaaattttctttcaaaagtgatcgctactcaggccacgacgatctcatcagaagtgatgtgagcgacatctctacccacaccgtgacctatggcaatatagaagggaatgccgccaaaaggcggaagcagcaatacaaggactccctgaagaagaggcccgcttccgccaaaagcagaagggaattcgacgagatcgagctggcctatcgcaggcggcctcccagatccccagaccacaaaagatactttcgagataaagaggggctgcgcgacttctatctggatcagttcaggactaaggagaactctcctcattgggaacacgtggacctcacagatatctataaggagaggagcgatgacttcaagagggacagtgtgagtggcggcggcccctgtaccaaccgctcacacataaaacacgggactggtgacaagcatggggtagtttccggagtgcccgcaccctgggagaaaaatctgactaatgttgagtgggaggatcggagtgggggaaacttctgtcggtcctgtcccagtaaactccacaattactctacaacagtgaccgggcaaaacagtggaaggcaggcttgtattcgttgtgaggcttgcaagaaggctggtaacctgtacgatatcagcgaggataatagcctgcaggaactcgaccagcctgctgctccggtcgctgttacgtctaacgcaagcacaaccaagtatccacagagtcctactaattcgaaagcccagaagaaaaaccgcaataagttgcgaagacagcacagttacgataccttcgttgatcttcagaaggaagaggctgccctggccccacgatccgtgagtctgaaagacaaaggacgttttatggatgggtccccatacgcccacatgttcgagatgagcgcaggcgaaagtacatttgcaaacaataagtcctccgtgccaaccgcaggacaccatcaccataacaatcccgggggcggttatatgctgagtaaatctttgtatcctgatcgagtcacgcaaaacccttttatccctacctttggcgatgaccagtgcctgttgcacggcagcaagagctacttctttagacaacctactgtggctggagcctcaaaagccaggcctgattttcgggctctcgtcaccaataagccagtggtcagcgcattacatggcgccgtcccggcgcgcttccagaaagatatctgtattggaaatcagtccaatccttgcgtgccaaataacaagaaccctagggccttcaatggatcgtccaacgggcatgtatatgagaagctttcatcgatagagagtgacgtatag

SEQ ID NO: 313389 - DNA, 4455 bp, Artificial Sequence
  derived and/or modified sequence
atgaaaccaagggcagaatgttgttctcccaaattttggctggtgctggcggttctggccgtgtccggaagcagggcaaggagccagaagagtcctcccagcattggtatagcagtcatactggttggcacaagcgacgaggtggcaatcaaagacgcccatgagaaagatgacttccaccatctgagcgtggtccctagggtagagctggtggccatgaacgaaaccgaccctaagagtatcattacaagaatctgtgacttgatgtctgataggaaaatccagggagtcgtgtttgccgacgacacagaccaagaggctatcgcgcaaattcttgatttcatatccgcccagactctgacgccaatactgggaattcacggcggatcaagtatgataatggccgacaaagacgagtcttctatgttttttcagttcggcccaagcattgaacagcaggcatccgtcatgctgaatataatggaggaatatgactggtatatattctccatcgtgaccacctatttcccgggataccaagattttgtgaacaaaattcggagtaccatcgaaaattccttcgttggatgggagctcgaggaggtgctcctgttggacatgagccttgacgacggggattctaaaatacagaatcagctcaagaaacttcagtctcctatcatactcctatattgcacaaaggaggaagcaacctatatatttgaagtggctaattcagtcgggcttaccggttacggctatacatggattgtgccatcactcgtcgccggagatactgacacggttcctgctgagttccctaccggactaattagcgtcagctatgatgagtgggattatggcctgcccgctagagtcagggacggtatcgctattatcacaacagcggcttctgatatgctttccgaacacagcttcataccggagccaaagagttcgtgttacaacacacatgaaaagaggatctatcaaagcaacatgctgaaccggtatctgattaatgttaccttcgagggcaggaacctcagtttcagcgaagacggctatcaaatgcacccaaaactggtcattattctgttaaataaagaacggaagtgggaaagagttggaaagtggaaagacaagtcccttcagatgaagtactatgtttggcctcgcatgtgtccagagactgaagaacaggaagacgatcacctgagtattgtgacactcgaagaggccccattcgtcatcgtggagtccgtcgatcccctttcaggtacatgcatgcggaatactgtcccctgtcagaagcgaatcgtaacggagaataagactgacgaagagccagggtatattaaaaaatgctgcaaaggcttctgcatcgacatacttaagaaaatctctaaatctgtcaaatttacttacgacctgtacctggtgacaaacggcaagcatggcaagaagataaacggaacttggaacgggatgattggcgaagttgttatgaaacgagcgtatatggccgtgggatctctcactatcaacgaggagagaagcgaggtcgtggattttagtgtgccttttattgagacgggcatcagtgtgatggttagtcgctccaacggtacagtttcaccatccgcttttctcgagccattcagtgctgacgtctgggtgatgatgtttgtaatgctgttaattgtcagtgcagttgccgtgtttgttttcgagtacttctcacccgtgggctataatagatgtctggccgacggcagggaacccggaggtccatcattcacaattggaaaggcaatctggctcctttgggggcttgtgttcaataatagcgtaccagtgcagaatcctaaaggcactacatctaagatcatggtctcagtctgggcgttcttcgcagttattttcctggcatcctacaccgctaatctggcagcctttatgatccaggaagaatatgtagatcaggtgtctggtttgagcgataagaaattccagcgccctaacgacttcagtcccccttttagatttgggaccgtccctaatggcagtaccgagagaaacattcgaaataattacgctgaaatgcacgcgtatatgggtaagtttaatcaacgcggagtcgacgatgccttgctgtccctgaagacaggaaaactcgatgctttcatctacgacgccgctgtgctgaattacatggcaggcagggacgagggctgcaaactggtgacaattgggtcggggaaagtttttgccagcactggctacggaatcgccattcaaaaggatagcggctggaaaagacaagtggatttggcaatactgcagctcttcggcgatggtgagatggaagaactcgaggcactgtggctcacaggaatctgtcataatgaaaaaaacgaagtgatgtcaagccagctggatatcgataatatggctggcgtcttctatatgctgggagcagctatggctctgtccttgattacattcatctgcgagcatttattttattggcagtttagacactgttttatgggcgtctgctccgggaaaccagggatggtgtttagtatctcacgcggaatatattcctgcatccacggcgtagctatcgaggagaggcagtctgtcatgaattcgcctacagctactatgaacaacactcactccaacatcctgcgcctgctacggaccgctaaaaatatggctaatctatccggggtgaatggaagccctcaaagcgccttggactttatccgcagagaaagctctgtctacgacatcagcgaacacaggcgcagcttcactcattcggattgtaagagttataataaccctccatgcgaggaaaaccttttttccgattatatatctgaggtggagagaacttttggcaatcttcagctgaaagatagcaatgtgtatcaggaccattaccaccaccaccaccgtcctcattctatcggttcagcgtcctcaatcgatggattatacgactgcgacaatcctccttttacaacacagtctagatcaatatcaaagaaaccgctagatatagggctgccctcttcgaagcattcacagctctccgacctctacggcaagttctcttttaaatctgatcgatatagtggacacgacgatcttatccgcagcgacgtgtctgatatttcgacccacaccgtcacatacgggaacatcgaagggaatgctgccaagcggcgaaagcagcagtacaaggacagcctcaagaagcggccagcatctgccaagtcccgcagagaatttgatgagattgagttagcgtatagacgacgacccccaaggagcccagatcacaaaaggtatttccgagacaaggaagggctcagggacttctacttggaccagtttcggacaaaagagaactctcctcactgggagcacgtcgacttaacagatatatacaaggagcgctctgatgatttcaagcgggattcggtgagcgggggtggcccttgcaccaacagatcccacataaaacacgggacaggggataaacacggcgtagtttccggcgtacctgccccttgggaaaagaacctgacaaatgtagaatgggaagaccgctcaggcggtaatttctgcaggagttgcccatctaagttacacaattactcaacgaccgtgaccggccagaactccggcaggcaagcctgtatccgttgcgaggcctgtaaaaaggccggaaacttgtacgacatcagtgaggataactctctgcaagagcttgaccagcccgcagctcctgtggctgtcacttctaatgccagtactactaagtacccccagagcccgactaacagcaaggcccagaagaaaaatcgcaataagctgcgcagacagcatagctacgacaccttcgtcgatttgcagaaggaagaggctgctctggccccacgaagcgttagcctcaaggacaaaggacggttcatggatggcagcccttatgcgcatatgtttgaaatgagcgcaggcgagagcacgttcgcaaacaataaatctagcgtgccaacagccggacatcatcatcataacaaccctggcggaggctacatgctttctaaatctctgtaccctgaccgggtgacccagaatccgtttataccaacctttggcgatgaccagtgtctcctccatggcagcaagagttactttttcaggcagccgacggtcgccggagctagcaaggctcggccagacttcagggctctcgtgaccaacaagccggttgtctccgccctgcacggcgctgtacctgccaggtttcagaaagatatctgtataggcaaccaatcgaacccctgcgttcctaataataagaaccccagggcatttaacggctcaagcaacggccatgtctacgaaaaactgagttctattgagagcgacgtgtag

SEQ ID NO: 313390 - DNA, 4455 bp, Artificial Sequence
  derived and/or modified sequence
atgaagcccagagccgagtgctgcagccccaagttctggctggtgctggccgtgctggccgtgagcggcagcagagccagaagccagaagagcccccccagcatcggcatcgccgtgatcctggtgggcaccagcgacgaggtggccatcaaggacgcccacgagaaggacgacttccaccacctgagcgtggtgcccagagtggagctggtggccatgaacgagaccgaccccaagagcatcatcaccagaatctgcgacctgatgagcgacagaaagatccagggcgtggtgttcgccgacgacaccgaccaggaggccatcgcccagatcctggacttcatcagcgcccagaccctgacccccatcctgggcatccacggcggcagcagcatgatcatggccgacaaggacgagagcagcatgttcttccagttcggccccagcatcgagcagcaggccagcgtgatgctgaacatcatggaggagtacgactggtacatcttcagcatcgtgaccacctacttccccggctaccaggacttcgtgaacaagatcagaagcaccatcgagaacagcttcgtgggctgggagctggaggaggtgctgctgctggacatgagcctggacgacggcgacagcaagatccagaaccagctgaagaagctgcagagccccatcatcctgctgtactgcaccaaggaggaggccacctacatcttcgaggtggccaacagcgtgggcctgaccggctacggctacacctggatcgtgcccagcctggtggccggcgacaccgacaccgtgcccgccgagttccccaccggcctgatcagcgtgagctacgacgagtgggactacggcctgcccgccagagtgagagacggcatcgccatcatcaccaccgccgccagcgacatgctgagcgagcacagcttcatccccgagcccaagagcagctgctacaacacccacgagaagagaatctaccagagcaacatgctgaacagatacctgatcaacgtgaccttcgagggcagaaacctgagcttcagcgaggacggctaccagatgcaccccaagctggtgatcatcctgctgaacaaggagagaaagtgggagagagtgggcaagtggaaggacaagagcctgcagatgaagtactacgtgtggcccagaatgtgccccgagaccgaggagcaggaggacgaccacctgagcatcgtgaccctggaggaggcccccttcgtgatcgtggagagcgtggaccccctgagcggcacctgcatgagaaacaccgtgccctgccagaagagaatcgtgaccgagaacaagaccgacgaggagcccggctacatcaagaagtgctgcaagggcttctgcatcgacatcctgaagaagatcagcaagagcgtgaagttcacctacgacctgtacctggtgaccaacggcaagcacggcaagaagatcaacggcacctggaacggcatgatcggcgaggtggtgatgaagagagcctacatggccgtgggcagcctgaccatcaacgaggagagaagcgaggtggtggacttcagcgtgcccttcatcgagaccggcatcagcgtgatggtgagcagaagcaacggcaccgtgagccccagcgccttcctggagcccttcagcgccgacgtgtgggtgatgatgttcgtgatgctgctgatcgtgagcgccgtggccgtgttcgtgttcgagtacttcagccccgtgggctacaacagatgcctggccgacggcagagagcccggcggccccagcttcaccatcggcaaggccatctggctgctgtggggcctggtgttcaacaacagcgtgcccgtgcagaaccccaagggcaccaccagcaagatcatggtgagcgtgtgggccttcttcgccgtgatcttcctggccagctacaccgccaacctggccgccttcatgatccaggaggagtacgtggaccaggtgagcggcctgagcgacaagaagttccagagacccaacgacttcagcccccccttcagattcggcaccgtgcccaacggcagcaccgagagaaacatcagaaacaactacgccgagatgcacgcctacatgggcaagttcaaccagagaggcgtggacgacgccctgctgagcctgaagaccggcaagctggacgccttcatctacgacgccgccgtgctgaactacatggccggcagagacgagggctgcaagctggtgaccatcggcagcggcaaggtgttcgccagcaccggctacggcatcgccatccagaaggacagcggctggaagagacaggtggacctggccatcctgcagctgttcggcgacggcgagatggaggagctggaggccctgtggctgaccggcatctgccacaacgagaagaacgaggtgatgagcagccagctggacatcgacaacatggccggcgtgttctacatgctgggcgccgccatggccctgagcctgatcaccttcatctgcgagcacctgttctactggcagttcagacactgcttcatgggcgtgtgcagcggcaagcccggcatggtgttcagcatcagcagaggcatctacagctgcatccacggcgtggccatcgaggagagacagagcgtgatgaacagccccaccgccaccatgaacaacacccacagcaacatcctgagactgctgagaaccgccaagaacatggccaacctgagcggcgtgaacggcagcccccagagcgccctggacttcatcagaagagagagcagcgtgtacgacatcagcgagcacagaagaagcttcacccacagcgactgcaagagctacaacaaccccccctgcgaggagaacctgttcagcgactacatcagcgaggtggagagaaccttcggcaacctgcagctgaaggacagcaacgtgtaccaggaccactaccaccaccaccacagaccccacagcatcggcagcgccagcagcatcgacggcctgtacgactgcgacaacccccccttcaccacccagagcagaagcatcagcaagaagcccctggacatcggcctgcccagcagcaagcacagccagctgagcgacctgtacggcaagttcagcttcaagagcgacagatacagcggccacgacgacctgatcagaagcgacgtgagcgacatcagcacccacaccgtgacctacggcaacatcgagggcaacgccgccaagagaagaaagcagcagtacaaggacagcctgaagaagagacccgccagcgccaagagcagaagagagttcgacgagatcgagctggcctacagaagaagaccccccagaagccccgaccacaagagatacttcagagacaaggagggcctgagagacttctacctggaccagttcagaaccaaggagaacagcccccactgggagcacgtggacctgaccgacatctacaaggagagaagcgacgacttcaagagagacagcgtgagcggcggcggcccctgcaccaacagaagccacatcaagcacggcaccggcgacaagcacggcgtggtgagcggcgtgcccgccccctgggagaagaacctgaccaacgtggagtgggaggacagaagcggcggcaacttctgcagaagctgccccagcaagctgcacaactacagcaccaccgtgaccggccagaacagcggcagacaggcctgcatcagatgcgaggcctgcaagaaggccggcaacctgtacgacatcagcgaggacaacagcctgcaggagctggaccagcccgccgcccccgtggccgtgaccagcaacgccagcaccaccaagtacccccagagccccaccaacagcaaggcccagaagaagaacagaaacaagctgagaagacagcacagctacgacaccttcgtggacctgcagaaggaggaggccgccctggcccccagaagcgtgagcctgaaggacaagggcagattcatggacggcagcccctacgcccacatgttcgagatgagcgccggcgagagcaccttcgccaacaacaagagcagcgtgcccaccgccggccaccaccaccacaacaaccccggcggcggctacatgctgagcaagagcctgtaccccgacagagtgacccagaaccccttcatccccaccttcggcgacgaccagtgcctgctgcacggcagcaagagctacttcttcagacagcccaccgtggccggcgccagcaaggccagacccgacttcagagccctggtgaccaacaagcccgtggtgagcgccctgcacggcgccgtgcccgccagattccagaaggacatctgcatcggcaaccagagcaacccctgcgtgcccaacaacaagaaccccagagccttcaacggcagcagcaacggccacgtgtacgagaagctgagcagcatcgagagcgacgtgtag

SEQ ID NO: 313391 - protein, 180 aa, Artificial Sequence
  derived and/or modified sequence
MAVFKTTLWRLISGTLGIICLSLMSTLGILLKNSFTKLSIEPAFTPGPNIELQKDSDCCSCQEKWVGYRCNCYFISSEQKTWNESRHLCASQKSSLLQLQNTDELQDFMSSSQQFYWIGLSYSEEHTAWLWENGSALSQYLFPSFETFNTKNCIAYNPNGNALDESCEDKNRYICKQQLI

SEQ ID NO: 313392 - protein, 201 aa, Artificial Sequence
  derived and/or modified sequence
MTEKAPEPHVEEDDDDELDSKLNYKPPPQKSLKELQEMDKDDESLIKYKKTLLGDGPVVTDPKAPNVVVTRLTLVCESAPGPITMDLTGDLEALKKETIVLKEGSEYRVKIHFKVNRDIVSGLKYVQHTYRTGVKVDKATFMVGSYGPRPEEYEFLTPVEEAPKGMLARGTYHNKSFFTDDDKQDHLSWEWNLSIKKEWTE

SEQ ID NO: 313393 - protein, 112 aa, Artificial Sequence
  derived and/or modified sequence
MTEKAPEPHVEEDDDDELDSKLNYKPPPQKSLKELQEMDKDDESLIKYKKTLLGDGPVVTDPKAPNVVVTRLTLVCESAPGPITMDLTGDLEALKKETIVLKEGSEYRVKIH

SEQ ID NO: 313394 - protein, 88 aa, Artificial Sequence
  derived and/or modified sequence
MTEKAPEPHVEEDDDDELDSKLNYKPPPQKSLKELQEMDKDDESLIKYKKTLLGDGPVVTDPKAPNVVVTRLTLVCESAPGPITMDLT

SEQ ID NO: 313395 - protein, 159 aa, Artificial Sequence
  derived and/or modified sequence
MTEKAPEPHVEEDDDDELDSKLNYKPPPQKSLKELQEMDKDDESLIKYKKTLLGDGPVVTDPKAPNVVVTRLTLVCESAPGPITMDLTGDLEALKKETIVLKEGSEYRVKIHFKVNRDIVSGLKYVQHTYRTGVKVDKATFMVGSYGPRPEEYEFLTPV

SEQ ID NO: 313396 - DNA, 606 bp, Artificial Sequence
  derived and/or modified sequence
atgactgagaaggcccctgagccccatgtcgaggaggatgacgacgacgagctggacagcaagctgaactataagccaccacctcagaagtcattgaaagagcttcaggaaatggataaggacgacgagtctctcatcaaatataaaaaaactctgcttggcgatggaccagtggtgactgacccgaaggctcccaatgtcgtagtgacacggttaactctggtttgtgaatcagcacccggacctattactatggatctgacaggggacttggaggcgctgaagaaagagaccatcgttctgaaggaaggaagcgagtatcgcgtcaaaattcacttcaaggtgaatagggatattgtaagcggacttaagtatgtgcagcacacttatcgaaccggggtcaaggttgataaagctacttttatggttgggtcctacggacctcggcctgaggagtacgagttcctgactcccgttgaggaagccccgaaaggcatgctggcccgcgggacttaccacaacaaaagcttctttaccgatgacgataagcaagaccacctgtcgtgggagtggaacctgtctatcaagaaagagtggacagagtag

SEQ ID NO: 313397 - DNA, 606 bp, Artificial Sequence
  derived and/or modified sequence
atgacagagaaggcccctgagccccacgtggaggaggatgatgatgatgagctggacagcaagctgaactacaagcccccaccccagaagagcctgaaggagctgcaggagatggacaaggatgatgagagcctcatcaagtacaagaagaccctgctgggagatggccctgtggtgacagaccccaaggcccccaacgtggtggtgacccggctgaccctggtgtgtgagagcgcccctggccccatcaccatggacctgaccggggacctggaggccctgaagaaggagaccatcgtgctgaaggagggcagcgagtacagagtgaagatccacttcaaggtgaacagagacatcgtgtctggcctgaagtatgtgcagcacacctacagaactggagtgaaggtggacaaggccaccttcatggtgggcagctatggccccaggcctgaggagtatgagttcctgacccctgtggaggaggcccccaagggcatgctggcccggggcacctaccacaacaagagcttcttcacagatgatgacaagcaggaccacctgtcctgggagtggaacctgagcatcaagaaggagtggacagaatag

SEQ ID NO: 313398 - DNA, 606 bp, Artificial Sequence
  derived and/or modified sequence
atgaccgagaaggcccccgagccccacgtggaggaggacgacgacgatgagttagattcgaaactcaattataagcccccccctcagaaatctttgaaagagctgcaggagatggataaagatgatgagagcctgatcaaatataaaaaaacactcttaggtgatgggcccgtggttacggaccctaaggctcccaatgtggttgtgaccagattaacacttgtctgtgagagcgccccaggcccgatcacgatggatctcaccggtgatctggaggctctgaagaaggagaccatcgtcctcaaggagggtagcgagtacagagtcaaaattcatttcaaggtaaatcgcgacatcgtgtccggtctgaagtatgtgcagcacacttatcgcaccggagtgaaggttgataaggccacattcatggtcggctcttatggcccacgccctgaagagtacgaattcctaacccccgtggaggaggccccgaagggcatgcttgcaaggggaacctaccataacaaaagcttcttcaccgatgatgacaagcaagatcacctgagttgggagtggaacctgagcattaaaaaggaatggaccgagtag

SEQ ID NO: 313399 - DNA, 606 bp, Artificial Sequence
  derived and/or modified sequence
atgacagaaaaggctccagaaccccacgtggaggaagatgacgacgatgaattggactcaaagctcaactacaagcctccaccgcagaagagcttgaaggaactccaggagatggacaaggatgatgaatccctgattaaatataaaaagacgcttctgggcgacggacctgtggttaccgaccccaaggctcctaatgtggtagtcacgcgccttactttagtttgcgagagcgcaccgggacccatcaccatggacctcaccggggacctggaagccctgaagaaggaaactatagtgctgaaggagggaagcgagtaccgcgtgaagatccacttcaaagtcaatagggacattgtctccggcctcaagtatgtccaacatacatacagaacaggggtgaaagtggataaggccaccttcatggttgggtcctacgggccacgcccagaagagtacgagtttcttacgccagttgaagaggcacccaaaggaatgctggcacgcggaacctaccacaataaaagcttcttcacagatgatgataaacaagatcatctcagctgggaatggaacttaagcatcaaaaaggagtggacggagtag

SEQ ID NO: 313400 - DNA, 606 bp, Artificial Sequence
  derived and/or modified sequence
atgaccgagaaggcccccgagccccacgtggaggaggacgacgacgacgagctggacagcaagctgaactacaagccccccccccagaagagcctgaaggagctgcaggagatggacaaggacgacgagagcctgatcaagtacaagaagaccctgctgggcgacggccccgtggtgaccgaccccaaggcccccaacgtggtggtgaccagactgaccctggtgtgcgagagcgcccccggccccatcaccatggacctgaccggcgacctggaggccctgaagaaggagaccatcgtgctgaaggagggcagcgagtacagagtgaagatccacttcaaggtgaacagagacatcgtgagcggcctgaagtacgtgcagcacacctacagaaccggcgtgaaggtggacaaggccaccttcatggtgggcagctacggccccagacccgaggagtacgagttcctgacccccgtggaggaggcccccaagggcatgctggccagaggcacctaccacaacaagagcttcttcaccgacgacgacaagcaggaccacctgagctgggagtggaacctgagcatcaagaaggagtggaccgagtag

SEQ ID NO: 313401 - DNA, 339 bp, Artificial Sequence
  derived and/or modified sequence
atgacagagaaggcgcccgagcctcacgttgaagaagatgatgatgatgagctggacagcaagcttaattacaagccaccaccccaaaaaagcctgaaagaactgcaagagatggacaaggacgacgagagccttatcaagtacaaaaaaacccttctaggggacgggccagtcgtaactgacccaaaagcccccaacgtagtggtgaccagactcactctcgtttgtgaaagtgcccccggacccattacaatggatctcaccggcgatctcgaggccctgaagaaagagaccatcgtcctcaaagaaggaagcgagtaccgagtaaaaattcattag

SEQ ID NO: 313402 - DNA, 606 bp, Artificial Sequence
  derived and/or modified sequence
atgactgagaaagcacccgagccccacgtggaagaggatgacgatgacgagctggattccaaactgaactacaagccaccaccacaaaaatcgcttaaagagttacaggaaatggacaaggatgatgagtctctgattaagtacaagaagaccctcctaggcgacggccctgttgtcaccgaccctaaggccccaaacgtggtggtaacccggttgacactggtctgcgagtccgccccgggccctatcactatggaccttacaggtgacctggaggcgctcaaaaaagagacaattgtcctgaaagagggctctgaatacagagtgaagatacatttcaaagttaatagagatatcgtaagtgggctcaaatatgtccagcatacttataggacgggggtcaaggttgacaaggctacatttatggtagggtcgtacggccctaggcctgaagaatatgagtttcttacaccagtggaggaggcacctaagggaatgctcgctcggggcacgtatcataataagtcttttttcacggacgatgataagcaggaccatctctcatgggagtggaatcttagcatcaagaaagaatggacagaatag

SEQ ID NO: 313403 - DNA, 606 bp, Artificial Sequence
  derived and/or modified sequence
atgaccgaaaaggctccggagccccacgtggaggaagatgacgacgacgagctggactccaaactgaattataagccacctcctcagaaaagtctaaaagagctgcaggaaatggataaagatgacgaatctctcatcaagtacaaaaaaacactgctcggtgatgggcctgttgtcaccgatccaaaggctcccaacgtggtagtcactcgcttgacgctcgtgtgcgaatcggcccccggcccaatcactatggacctgaccggtgacctggaggctctgaaaaaggagaccattgtactgaaggagggctcagaatatagagtgaaaatccatttcaaggtcaaccgggatatcgtgagtggactcaagtatgtccaacacacttacaggacgggagtcaaagtcgacaaggctacctttatggtgggaagctacggaccacgccctgaggagtatgagttcttgaccccagtagaggaggccccgaaggggatgctagcgaggggaacttatcacaacaaaagtttcttcaccgatgatgacaagcaggatcacctctcctgggagtggaatcttagtattaaaaaagagtggaccgagtag

SEQ ID NO: 313404 - DNA, 267 bp, Artificial Sequence
  derived and/or modified sequence
atgaccgaaaaagctcctgaacctcacgtcgaggaagacgacgacgacgaactggattcgaagctaaattataaaccacctccccaaaagtccctcaaagaactgcaagaaatggataaggatgacgaaagtcttattaaatataagaaaacccttctgggggacggccccgtcgtgaccgatcctaaggctccaaacgtcgttgtaacccgactaaccctagtatgcgaatcagccccaggtccaatcacaatggacctgacatag

SEQ ID NO: 313405 - DNA, 480 bp, Artificial Sequence
  derived and/or modified sequence
atgactgaaaaggctccagagcctcatgtggaggaggatgacgacgacgaacttgatagtaaattaaattacaaaccgccccctcaaaaaagtctcaaagagctgcaggagatggacaaagacgacgagagcttgattaaatataagaaaactctactgggcgacggccccgttgtcaccgaccctaaggccccaaatgtagtggtgacacgacttactctggtgtgcgaatccgctcctggcccaattaccatggatctgaccggcgacctcgaggccctgaagaaggagacaattgttttgaaggaaggcagtgagtacagagtgaaaattcacttcaaggtgaatagggacattgtaagcgggttaaaatacgttcagcatacgtacagaaccggagttaaggtagataaggcaacttttatggtgggatcctacggacctaggccagaagagtacgagttcctcacccctgtctag

SEQ ID NO: 313406 - DNA, 339 bp, Artificial Sequence
  derived and/or modified sequence
atgacagagaaggcccctgagccccacgtggaggaggatgatgatgatgagctggacagcaagctgaactacaagcccccaccccagaagagcctgaaggagctgcaggagatggacaaggatgatgagagcctcatcaagtacaagaagaccctgctgggagatggccctgtggtgacagaccccaaggcccccaacgtggtggtgacccggctgaccctggtgtgtgagagcgcccctggccccatcaccatggacctgaccggggacctggaggccctgaagaaggagaccatcgtgctgaaggagggcagcgagtacagagtgaagatccactag

SEQ ID NO: 313407 - DNA, 267 bp, Artificial Sequence
  derived and/or modified sequence
atgacagagaaggcccctgagccccacgtggaggaggatgatgatgatgagctggacagcaagctgaactacaagcccccaccccagaagagcctgaaggagctgcaggagatggacaaggatgatgagagcctcatcaagtacaagaagaccctgctgggagatggccctgtggtgacagaccccaaggcccccaacgtggtggtgacccggctgaccctggtgtgtgagagcgcccctggccccatcaccatggacctgacctag

SEQ ID NO: 313408 - DNA, 480 bp, Artificial Sequence
  derived and/or modified sequence
atgacagagaaggcccctgagccccacgtggaggaggatgatgatgatgagctggacagcaagctgaactacaagcccccaccccagaagagcctgaaggagctgcaggagatggacaaggatgatgagagcctcatcaagtacaagaagaccctgctgggagatggccctgtggtgacagaccccaaggcccccaacgtggtggtgacccggctgaccctggtgtgtgagagcgcccctggccccatcaccatggacctgaccggggacctggaggccctgaagaaggagaccatcgtgctgaaggagggcagcgagtacagagtgaagatccacttcaaggtgaacagagacatcgtgtctggcctgaagtatgtgcagcacacctacagaactggagtgaaggtggacaaggccaccttcatggtgggcagctatggccccaggcctgaggagtatgagttcctgacccctgtgtag

SEQ ID NO: 313409 - DNA, 339 bp, Artificial Sequence
  derived and/or modified sequence
atgaccgagaaggcccccgagccccacgtggaggaggacgacgacgatgagctggattcgaagctcaattacaagccacccccccagaagtccctgaaagagctgcaggagatggataaagatgatgagagcctaataaagtacaagaagactctattaggagacggacctgtggtgaccgatccgaaagccccaaacgtggtcgttacgagacttaccttagtatgcgagagcgctcccggcccgattaccatggacctgaccggcgatctggaggctctgaaaaaggaaactattgtactcaaggaaggctccgagtatcgcgtgaagattcattag

SEQ ID NO: 313410 - DNA, 606 bp, Artificial Sequence
  derived and/or modified sequence
atgaccgagaaggcccccgagccccacgtggaggaggacgacgacgatgagttggattctaaactgaactacaagccacctccccagaaaagcctgaaggagcttcaggagatggataaggacgacgaaagtctaattaagtataagaagacattactaggggacggacccgtcgtcactgaccccaaagcgcccaacgtggttgtcacccgtttgaccctggtgtgcgaatccgcccccggccccatcacaatggacttgacgggcgatctggaggcactgaaaaaggaaacgatagttctgaaagaaggctctgaatatcgcgtgaagatccactttaaggtgaaccgggatatagtctccgggttaaagtatgtacagcacacatatcggaccggcgtgaaggtggacaaagctactttcatggtgggttcctacggaccgcggccagaagagtatgagttcctgacccccgtggaggaggcccctaagggcatgctggcccggggtacctaccataacaaatctttttttacagatgatgacaagcaagatcacctttcgtgggaatggaacctgtcgattaagaaggaatggaccgagtag

SEQ ID NO: 313411 - DNA, 606 bp, Artificial Sequence
  derived and/or modified sequence
atgaccgagaaggcccccgagccccacgtggaggaggacgacgacgatgagctagacagcaaattaaactataaacccccgccccagaagagcctgaaggagctgcaggagatggacaaggacgacgagtcccttatcaaatacaagaaaaccctgctgggggacggtcctgtcgtgactgatcccaaagcccctaacgtagttgtgacgagattgacattggtgtgcgaatctgctcccggacccatcaccatggatctgactggcgaccttgaagccctgaagaaggaaaccattgtattaaaggagggatctgagtatcgcgtcaagatacacttcaaagttaatcgcgacattgtatctggcctgaaatatgtgcagcatacataccgtactggagtgaaggtcgacaaggcaacatttatggtaggcagttacggtccaaggccagaggagtacgaatttctgaccccagtagaggaagcgccaaaaggcatgctggcgagagggacttaccacaacaagagtttttttaccgatgatgacaagcaggatcacctatcttgggagtggaacctgagcatcaagaaggagtggacagagtag

SEQ ID NO: 313412 - DNA, 267 bp, Artificial Sequence
  derived and/or modified sequence
atgaccgagaaggcccccgagccccacgtggaggaggacgacgacgatgagctcgattccaagctgaattataagccgcctccccaaaaaagtctgaaggaactgcaggaaatggataaggacgatgagtcactcatcaagtacaaaaagacacttctcggagacggaccagtcgtaaccgaccccaaggcccctaatgtggtggtgacccgcctgaccttagtttgcgagtctgcccccggcccgataacaatggacttgacgtag

SEQ ID NO: 313413 - DNA, 480 bp, Artificial Sequence
  derived and/or modified sequence
atgaccgagaaggcccccgagccccacgtggaggaggacgacgacgacgagctcgatagcaaactgaattataaacctcctcctcaaaaatcgctgaaagaattgcaggaaatggacaaggacgatgagtctcttataaaatacaaaaagaccctcctaggtgacgggcccgtcgtgacggaccctaaagctcctaacgttgtagtcacccgcttgaccctggtgtgcgagagcgcacctgggccaatcacgatggacttgacaggagatctcgaagctctgaaaaaagaaacaatcgtcctgaaagaggggtccgagtatcgcgtgaagattcactttaaggtcaatcgggatatcgtttccggactgaaatacgttcagcatacctacaggactggggtgaaggtggacaaggcgacctttatggtgggctcctacggaccccgcccagaggagtacgagtttctgacccctgtgtag

SEQ ID NO: 313414 - DNA, 339 bp, Artificial Sequence
  derived and/or modified sequence
atgaccgagaaagcccctgagccgcatgtggaagaagacgacgacgacgaactggattccaagctgaattacaagcctccacctcagaaaagcctaaaagagctgcaggaaatggacaaggacgacgagtccctcatcaagtataaaaagactcttcttggtgatggacccgtagtcacagatccaaaggctccgaacgtggtggtcaccagactgaccctggtgtgcgagagcgcccctggccctataacaatggacctcacaggagacttggaggcacttaaaaaggagacgattgtcctcaaagagggatcggaataccgagtgaaaattcactag

SEQ ID NO: 313415 - DNA, 606 bp, Artificial Sequence
  derived and/or modified sequence
atgaccgaaaaggctcccgagccccatgtcgaggaggatgacgatgatgaactggattcaaaactgaactataaaccgccaccgcagaaaagtttgaaagaactgcaagagatggacaaagatgatgagagtcttattaagtataaaaaaacgttgctcggcgatggtcctgtggtgacggaccctaaagcccctaatgtggtggttaccagactgaccttagtatgtgagagcgccccaggacctattaccatggacctgaccggagaccttgaggccctgaagaaggagactatagtgctgaaagaaggatccgaatatcgagtcaaaattcacttcaaggtaaacagagacatcgtatccggtctaaaatacgtccagcacacctatcgaacaggggtgaaggtggataaggctacgtttatggttggaagctacggccctagaccggaggagtatgaatttctgacccctgtggaggaagccccaaagggcatgctggcaaggggcacatatcacaataaatccttctttaccgatgatgacaagcaggatcacctgagttgggaatggaatcttagtattaagaaggaatggacagagtag

SEQ ID NO: 313416 - DNA, 606 bp, Artificial Sequence
  derived and/or modified sequence
atgactgaaaaagcccctgaaccgcacgtggaagaggatgatgatgatgaactagacagcaagttaaactataaacctcccccacagaagtctttgaaagagctacaagaaatggacaaggacgatgaaagtctaattaaatacaagaagaccttactgggggatggcccagtggtcactgacccgaaagctcctaacgtggtcgtcacccggctcacgctggtctgcgaatccgcacccggacctatcacaatggatctcactggagacttagaggccctgaagaaggagacgattgtgctgaaagaaggatcggagtatcgcgttaagatacactttaaggttaatagagacatagtctcagggcttaagtacgtgcagcatacctataggactggagtcaaggtcgataaagctaccttcatggtgggttcctacgggccaagaccagaggagtatgagtttcttactcccgtggaggaggccccaaaaggaatgctggcccgtgggacttaccacaataaatcattttttactgatgacgacaagcaagaccacctcagctgggaatggaatctgtcaattaagaaagagtggacggaatag

SEQ ID NO: 313417 - DNA, 267 bp, Artificial Sequence
  derived and/or modified sequence
atgactgaaaaggctccagagccacatgtggaagaagacgatgatgacgagctggactcgaagcttaattacaagcctccgcctcaaaaatcactcaaggaactccaggagatggataaggacgatgaatccctgattaaatacaagaagacattgctgggcgacggcccagtcgtgactgatcctaaagctccgaatgtggttgtgacaagacttacactcgtgtgtgaatcagccccaggcccaataacaatggacctgacctag

SEQ ID NO: 313418 - DNA, 480 bp, Artificial Sequence
  derived and/or modified sequence
atgacggagaaagccccagagccccacgtcgaggaggacgatgacgacgagcttgactcaaagctcaattacaaaccacctccccaaaagtccttgaaggagctgcaggagatggataaggacgacgagtcactgatcaagtataaaaaaaccctcctgggtgatgggcctgtggttacggaccccaaggcacccaacgtggtagtcaccaggctgaccctggtgtgtgaatcagccccaggacccatcacaatggaccttacaggggacctggaggcccttaaaaaggaaaccatcgtcctgaaggagggttctgagtaccgtgttaagatccactttaaagtcaatcgcgacatcgtgtcgggcctcaagtacgtgcaacacacttaccgaaccggcgtcaaggtcgacaaggcaactttcatggtcgggagttatggtccacggcctgaagaatatgagttcctaactccagtgtag

SEQ ID NO: 313419 - DNA, 1256 bp, Artificial Sequence
  derived and/or modified sequence
ccagggtttcctcttcaagtaggtctaaaacatttttttttctcattgacttccttcctgttctaactgccagtactcagaagtcagagttgagagacagaggcaccccggacagagacgtgaagcactgaataaatagatcagaatgactgaaaaagccccagagccacatgtggaggaggatgatgatgatgagctggacagcaagctcaattataagcctccaccacagaagtccctgaaagagctgcaggaaatggacaaagatgatgagagtctaattaagtacaagaaaacgctgctgggagatggtcctgtggtgacagatccgaaagcccccaatgtcgttgtcacccggctcaccctggtttgtgagagtgccccgggaccaatcaccatggaccttactggagatctggaagccctcaaaaaggaaaccattgtgttaaaggaaggttctgaatatagagtcaaaattcacttcaaagtgaacagggatattgtgtcaggcctgaaatacgttcagcacacctacaggactggggtgaaagtggataaagcaacatttatggttggcagctatggacctcggcctgaggagtatgagttcctcactccagttgaggaggctcccaagggcatgctggcgcgaggcacgtaccacaacaagtccttcttcaccgacgatgacaagcaagaccacctcagctgggagtggaacctgtcgattaagaaggagtggacagaatgaatgcatccacccctttccccacccttgccacctggaagaattctctcaggcgtgttcagcaccctgtccctcctccctgtccacagctgggtccctcttcaacactgccacatttccttattgatgcatcttttcccaccctgtcactcaacgtggtccctagaacaagaggcttaaaaccgggctttcacccaacctgctccctctgatcctccatcagggccagatcttccacgtctccatctcagtacacaatcatttaatatttccctgtcttacccctattcaagcaactagaggccagaaaatgggcaaattatcactaacaggtctttgactcaggttccagtagttcattctaatgcctagattcttttgtggttgttgctggcccaatgagtccctagtcacatcccctgccagagggagttcttcttttgtgagagacactgtaaacgacacaagagaacaagaataaaacaataactgtgtgtgttctggctga

SEQ ID NO: 313420 - DNA, 463 bp, Artificial Sequence
  derived and/or modified sequence
tcagaagggctctgagaacacgcaccgggagtgcctggaggggtttcctgcaaagtaggagcaggcacctggccaggcttggaagaaaaagactgtagatccaaaatgatacgaaatagatcagaatgactgaaaaagccccagagccacatgtggaggaggatgatgatgatgagctggacagcaagctcaattataagcctccaccacagaagtccctgaaagagctgcaggaaatggacaaagatgatgagagtctaattaagtacaagaaaacgctgctgggagatggtcctgtggtgacagatccgaaagcccccaatgtcgttgtcacccggctcaccctggtttgtgagagtgccccgggaccaatcaccatggaccttactggagatctggaagccctcaaaaaggaaaccattgtgttaaaggaaggttctgaatatagagtcaaaattcactt

SEQ ID NO: 313421 - DNA, 859 bp, Artificial Sequence
  derived and/or modified sequence
aactgccagtactcagaagtcagagttgagagacagaggcaccccggacagagacgtgaagcactgaataggatgaaactggggcccagtgaggttaagcaacttgcaggaggtaacgcaggaaccgagttgcgctgaaacatcgttatctgacacttccctgctttgttaaagctgtctctgcagagcttgcaaagaagcatttacctctgcttgtgcacctccagaaatagatcagaatgactgaaaaagccccagagccacatgtggaggaggatgatgatgatgagctggacagcaagctcaattataagcctccaccacagaagtccctgaaagagctgcaggaaatggacaaagatgatgagagtctaattaagtacaagaaaacgctgctgggagatggtcctgtggtgacagatccgaaagcccccaatgtcgttgtcacccggctcaccctggtttgtgagagtgccccgggaccaatcaccatggaccttactggagatctggaagccctcaaaaaggaaaccattgtgttaaaggaaggttctgaatatagagtcaaaattcacttcaaagtgaacagggatattgtgtcaggcctgaaatacgttcagcacacctacaggactggggtgaaagtggataaagcaacatttatggttggcagctatggacctcggcctgaggagtatgagttcctcactccagttgaggaggctcccaagggcatgctggcgcgaggcacgtaccacaacaagtccttcttcaccgacgatgacaagcaagaccacctcagctgggagtggaacctgtcgattaagaaggagtggacagaatgaatgcatccacccct

SEQ ID NO: 313422 - DNA, 911 bp, Artificial Sequence
  derived and/or modified sequence
ggctggctggatttggaggactgtgataactcctacagctttttgactgggcttttgcttcatttgttcaggagtctttgtgccatgttgcttcactcgtaaaatagatcagaatgactgaaaaagccccagagccacatgtggaggaggatgatgatgatgagctggacagcaagctcaattataagcctccaccacagaagtccctgaaagagctgcaggaaatggacaaagatgatgagagtctaattaagtacaagaaaacgctgctgggagatggtcctgtggtgacagatccgaaagcccccaatgtcgttgtcacccggctcaccctggtttgtgagagtgccccgggaccaatcaccatggaccttactggagatctggaagccctcaaaaaggaaaccattgtgttaaaggaaggttctgaatatagagtcaaaattcacttcaaagtgaacagggatattgtgtcaggcctgaaatacgttcagcacacctacaggactggggtgaaagtggataaagcaacatttatggttggcagctatggacctcggcctgaggagtatgagttcctcactccagttgaggaggctcccaagggcatgctggcgcgaggcacgtaccacaacaagtccttcttcaccgacgatgacaagcaagaccacctcagctgggagtggaacctgtcgattaagaaggagtggacagaatgaatgcatccacccctttccccacccttgccacctggaagaattctctcaggcgtgttcagcaccctgtccctcctccctgtccacagctgggtccctcttcaacactgccacatttccttattgatgcatcttttcccaccctgtcactcaacgtggtccctagaacaagaggcttaaaaccgggctttcacc

SEQ ID NO: 313423 - DNA, 354 bp, Artificial Sequence
  derived and/or modified sequence
gctgctcaagttggctgatcaagagataggcagtgcaaaggaacaggatttgagacagcccagggtttcctcttcaaaaatagatcagaatgactgaaaaagccccagagccacatgtggaggaggatgatgatgatgagctggacagcaagctcaattataagcctccaccacagaagtccctgaaagagctgcaggaaatggacaaagatgatgagagtctaattaagtacaagaaaacgctgctgggagatggtcctgtggtgacagatccgaaagcccccaatgtcgttgtcacccggctcaccctggtttgtgagagtgccccgggaccaatcaccatggaccttactg

SEQ ID NO: 313424 - DNA, 723 bp, Artificial Sequence
  derived and/or modified sequence
cattatcactcagactgtgcatgctgcaagctttgacgctagccaggctggctggatttggaggactgtgataactcctacagctttttgactgggcttttgcttcatttgttcaggagtctttgtgccatgttgcttcactcgtagtacgttattcacatatgagtgatttctttcttgtcagttttgttcagtgaatagaagatactacaatggtacagagaaattcaggcagaaatagatcagaatgactgaaaaagccccagagccacatgtggaggaggatgatgatgatgagctggacagcaagctcaattataagcctccaccacagaagtccctgaaagagctgcaggaaatggacaaagatgatgagagtctaattaagtacaagaaaacgctgctgggagatggtcctgtggtgacagatccgaaagcccccaatgtcgttgtcacccggctcaccctggtttgtgagagtgccccgggaccaatcaccatggaccttactggagatctggaagccctcaaaaaggaaaccattgtgttaaaggaaggttctgaatatagagtcaaaattcacttcaaagtgaacagggatattgtgtcaggcctgaaatacgttcagcacacctacaggactggggtgaaagtggataaagcaacatttatggttggcagctatggacctcggcctgaggagtatgagttcctcactccagt

SEQ ID NO: 313425 - DNA, 339 bp, Artificial Sequence
  derived and/or modified sequence
atgaccgagaaggcccccgagccccacgtggaggaggacgacgacgacgagctggacagcaagctgaactacaagccccccccccagaagagcctgaaggagctgcaggagatggacaaggacgacgagagcctgatcaagtacaagaagaccctgctgggcgacggccccgtggtgaccgaccccaaggcccccaacgtggtggtgaccagactgaccctggtgtgcgagagcgcccccggccccatcaccatggacctgaccggcgacctggaggccctgaagaaggagaccatcgtgctgaaggagggcagcgagtacagagtgaagatccactag

SEQ ID NO: 313426 - DNA, 267 bp, Artificial Sequence
  derived and/or modified sequence
atgaccgagaaggcccccgagccccacgtggaggaggacgacgacgacgagctggacagcaagctgaactacaagccccccccccagaagagcctgaaggagctgcaggagatggacaaggacgacgagagcctgatcaagtacaagaagaccctgctgggcgacggccccgtggtgaccgaccccaaggcccccaacgtggtggtgaccagactgaccctggtgtgcgagagcgcccccggccccatcaccatggacctgacctag

SEQ ID NO: 313427 - DNA, 480 bp, Artificial Sequence
  derived and/or modified sequence
atgaccgagaaggcccccgagccccacgtggaggaggacgacgacgacgagctggacagcaagctgaactacaagccccccccccagaagagcctgaaggagctgcaggagatggacaaggacgacgagagcctgatcaagtacaagaagaccctgctgggcgacggccccgtggtgaccgaccccaaggcccccaacgtggtggtgaccagactgaccctggtgtgcgagagcgcccccggccccatcaccatggacctgaccggcgacctggaggccctgaagaaggagaccatcgtgctgaaggagggcagcgagtacagagtgaagatccacttcaaggtgaacagagacatcgtgagcggcctgaagtacgtgcagcacacctacagaaccggcgtgaaggtggacaaggccaccttcatggtgggcagctacggccccagacccgaggagtacgagttcctgacccccgtgtag

SEQ ID NO: 313428 - protein, 277 aa, Artificial Sequence
  derived and/or modified sequence
MFPFYSCWRTGLLLLLLAVAVRESWQTEEKTCDLVGEKGKESEKELALVKRLKPLFNKSFESTVGQGSDTYIYIFRVCREAGNHTSGAGLVQINKSNGKETVVGRLNETHIFNGSNWIMLIYKGGDEYDNHCGKEQRRAVVMISCNRHTLADNFNPVSEERGKVQDCFYLFEMDSSLACSPEISHLSVGSILLVTFASLVAVYVVGGFLYQRLVVGAKGMEQFPHLAFWQDLGNLVADGCDFVCRSKPRNVPAAYRGVGDDQLGEESEERDDHLLPM

SEQ ID NO: 313429 - protein, 92 aa, Artificial Sequence
  derived and/or modified sequence
MFPFYSCWRTGLLLLLLAVAVRESWQTEEKTCDLVGEKGKESEKELALVKRLKPLFNKSFESTVGQGSDTYIYIFRVCREAGNHTSGAGLVQ

SEQ ID NO: 313430 - protein, 109 aa, Artificial Sequence
  derived and/or modified sequence
MFPFYSCWRTGLLLLLLAVAVRESWQTEEKTCDLVGEKGKESEKELALVKRLKPLFNKSFESTVGQGSDTYIYIFRVCREAGNHTSGAGLVQINKSNGKETVVGRLNET

SEQ ID NO: 313431 - DNA, 834 bp, Artificial Sequence
  derived and/or modified sequence
atgttcccgttttactcatgttggcgcactggtttactgttacttctgctggcggtcgcagtgagagagagctggcagacagaggaaaaaacatgcgacctggtaggagagaaagggaaggaaagtgaaaaggagttagcccttgtaaagcgcttaaagccattgtttaacaagtccttcgaatccacggttggccagggctctgacacatatatttacatttttagagtctgcagggaagccggaaatcataccagtggagctggcctggttcagatcaacaagtccaatggaaaagaaacagttgtggggcgcttgaatgagacccacatctttaatggctctaactggatcatgttgatttataagggaggcgacgagtacgacaatcactgcggaaaagagcagcgccgagcagtggtcatgatctcgtgcaaccgccataccctggcagataattttaaccctgtgtcagaagagagaggaaaggtacaggactgcttttacctattcgaaatggatagttccctagcatgtagccctgagatcagccacttgtctgtcggcagtatcctgcttgtgactttcgccagcttagtagcagtatacgtggtcggtggctttttgtaccagcgcctggtggtcggtgcgaagggcatggaacagttcccacacttggcattttggcaggacctgggaaatctggtggcggatggatgtgactttgtctgccgaagcaagcctaggaatgtgcctgctgcttaccgaggtgtgggggatgaccagctcggggaggagtccgaagagagagacgatcacctcctgcccatgtag

SEQ ID NO: 313432 - DNA, 834 bp, Artificial Sequence
  derived and/or modified sequence
atgttccccttctacagctgctggaggacaggcctgctgctgctgctgctggccgtggccgtgcgggagagctggcagacagaggagaagacctgtgacctggtgggggagaagggcaaggagagcgagaaggagctggccctggtgaagaggctgaagcccctcttcaacaagagctttgagagcacagtgggccagggcagtgacacctacatctacatcttccgggtgtgccgggaggccggcaaccacaccagcggggccggcctggtgcagatcaacaagagcaatggcaaggagaccgtggtgggccgcctgaatgagacccacatcttcaacggcagcaactggatcatgctgatctacaagggaggagatgaatatgacaaccactgtgggaaggagcagaggagagctgtggtgatgatcagctgcaacagacacaccctggccgacaacttcaaccctgtgtctgaggagcggggcaaggtgcaggactgcttctacctgtttgagatggacagcagcctggcctgcagccctgagatcagccacctgtctgtgggcagcatcctgctggtgacctttgccagcctggtggccgtgtatgtggtgggcggcttcctgtaccagaggctggtggtgggcgccaagggcatggagcagttcccccacctggccttctggcaggacctgggcaacctggtggctgatggctgtgactttgtgtgccgcagcaagcccagaaatgtgcctgctgcctacagaggagtgggagatgaccagctgggggaggagagcgaggagagagatgaccacctgctgcccatgtag

SEQ ID NO: 313433 - DNA, 2756 bp, Artificial Sequence
  derived and/or modified sequence
ccgggagcggtcaggcgcgtgaccccgcgtgaccggggtgcgcgagccgagaggccctggaagcgggactctgggaccccattgaaagaaaggcaaccagaaaaggcgaaacgacaacctcgatagtgattggagctgatggaacgagggcggagctaaagtcccagaatactggccaatcagagtttaagattatcagggagcccgggaaggggaaaggggcgaaatggttctatggtcacatgccgcggggtctggtgggaggagcggttgcccagcggcctcttggcgcttcctgtttccggttcccagagtggggcacagcgaggcgctagggggaacgctggcctctgaaactagctctgggaccggggtctgcggccggcccctagctggccccgtctcccatccccagaagggtattcactggggattctgagctttggctactccagtttcccacgacacgatgttccctttctacagctgctggaggactggactgctactactactcctggctgtggcagtgagagaatcctggcagacagaagaaaaaacttgcgacttggtaggagaaaagggtaaagagtcagagaaagagttggctctagtgaagaggctgaaaccactgtttaataaaagctttgagagcactgtgggccagggttcagacacatacatctacatcttcagggtgtgccgggaagctggcaaccacacttctggggcaggcctggtgcaaatcaacaaaagtaatgggaaggagacagtggtagggagactcaacgagactcacatcttcaacggaagtaattggatcatgctgatctataaagggggtgatgaatatgacaaccactgtggcaaggagcagcgtcgtgcagtggtgatgatctcctgcaatcgacacaccctagcggacaattttaaccctgtgtctgaggagcgtggcaaagtccaagattgtttctacctctttgagatggatagcagcctggcctgttcaccagagatctcccacctcagtgtgggttccatcttacttgtcacgtttgcatcactggttgctgtttatgttgttggggggttcctataccagcgactggtagtgggagccaaaggaatggagcagtttccccacttagccttctggcaggatcttggcaacctggtagcagatggctgtgactttgtctgccgttctaaacctcgaaatgtgcctgcagcatatcgtggtgtgggggatgaccagctgggggaggagtcagaagaaagggatgaccatttattaccaatgtagattgcactttatatgtccagcctcttcctcagtcccccaaaccaaagctacacagccagatttctcaagcagtctcaactccagtccctcatctcacccttactattgctcttgctttccagtttgcttttgatttgcatcttctcactagtaaaactgccttccctttgttccttattttctgttttttctctagagaggtacagttgtaagtcagagttaatataatagggcctgtgaaaacagaggcttttgcattgtctcttgacatcagaagttacaataggcatatgggcaaaatggtgtagcaggctcactggccgtttgttttttaaacacattttcacaagtttttgagacactggatttctttaattaaaaaaaaaatgccaagaaacattatttatacagggttgattgctttcatgttgttattctgtaccctatagtagcctccatgagaatctggtatttcttgctgcttggaactactttgcagtgattacttggttgcagtccaagtactctcgtttagtctgagcctggagatgttctagacttgcttctcccacctctgagattaggacaggaaaaatgtgaaatttcccaattacaggattatacggtaccatcacatcatttgtggaaattggggtgactgtatagctgggattgggctaaggactgtggtcttatctgtccacatacagccaaaatgcctatccagaaatccagttcgttggaaaggaaaattggtactcctgtgccacaggggttccagaaaagggaagtcactttaccttgcggtggtgggatcctgatgtctttcatccatttgtagtaaaagctggtaaagcttttcttactcctggttccctaccagtatttctaaacatgtcgcactttctccacaggcatgtggttttgacctttttttcaatcttctagaaagggaacggaagcagaagtgggacatcgagggctctgctgtcctctgcgctgggtgtggaatgctgctgcacctgtcccttctgctggctcagggaagtgtcttcttgcccacatttctgtggggaaaggtttttaatcctctgatgcttccatcttcctgtttaggccatgtgcccagaaacctggactgatctttctttaatagtgaacccctgggccactgaagagtaacatggctccactggacacaaaagagggatggaatcaacaggcagggggccttttataagccttaggaaaagaaaatgaaactatttcatctttggacttttcaatactattggagtgatttttttctttctaaacagggaaaataatgttacaaaagcatcttttttgttatttgtttgcatccctcccccacaccctggtgttttaaaatgaagaaaaaaaaccatcaccttttgtacaaaaactcttaatgattaaaaaacaaacaaaa

SEQ ID NO: 313434 - DNA, 834 bp, Artificial Sequence
  derived and/or modified sequence
atgttccccttctacagctgctggcggaccggcctgctgctgctgctgctggcagtggcagtacgcgaatcatggcagaccgaagaaaagacctgtgacttggtcggcgagaaggggaaagaaagcgagaaggagctggctctggttaagagattaaagccactcttcaacaagtcttttgagagcacagtggggcagggatcagatacatacatttacatttttcgggtatgccgcgaagcaggaaatcacacttccggcgctggcttagtgcagatcaacaagtctaacggaaaggagacagtcgtagggaggttaaacgaaactcatatatttaatggctccaattggattatgctgatttacaagggcggagatgaatacgataaccactgcggaaaagagcagagaagggcggtcgtcatgatttcatgcaatcgacataccttggccgataacttcaatccagtctctgaggagcgtggcaaagtgcaggattgtttttacttgttcgaaatggattccagtcttgcgtgctccccagagatctctcacctgagcgtgggctcaatcctcctggtcaccttcgcttcattggtggcagtgtatgtggtcgggggatttctgtaccaaagactggtcgtgggggcaaaagggatggaacagtttccccatctggcattctggcaagatttagggaacctcgtggcagatggctgcgactttgtgtgtcggtctaaaccccggaacgtgcccgctgcataccggggtgtaggagatgatcagctgggggaggaatcagaagagcgggacgatcacttgctcccaatgtag

SEQ ID NO: 313435 - DNA, 834 bp, Artificial Sequence
  derived and/or modified sequence
atgttcccattctatagttgttggcgaacaggcttgttgctcctgctgctagctgtggccgttcgcgagtcttggcagaccgaagaaaaaacttgtgacctggttggggagaagggaaaagagtcagagaaggaactcgccctggttaagcgcttaaagcccttattcaataagtcattcgaaagtacagttgggcaaggctcagacacgtacatctacatttttagggtgtgtcgtgaggcaggcaaccatacttccggagccggtctggtacaaatcaataagagtaacggcaaagagactgtcgttgggaggttgaacgaaacccacatcttcaacggcagcaactggatcatgttgatctataaaggtggagacgagtacgataaccattgcggcaaagagcagcggagggctgtggttatgattagctgcaaccggcatacgttggcagacaatttcaatcctgtctcagaggagcggggtaaagtacaggactgtttttatttgttcgagatggatagcagcctggcatgctccccggagatatctcatctgagtgtcggtagcatcttgctggtgacatttgcatctttggtggcggtgtacgttgtgggtggcttcctgtaccagaggctagttgtgggagcaaaggggatggagcagtttccacatcttgcgttttggcaggatctgggcaatctggtggctgacggctgcgactttgtttgtcgctctaagccgcgaaatgtgccagccgcttacaggggagtgggcgatgaccaactgggagaggaatccgaggagagagatgaccatttgttgccgatgtag

SEQ ID NO: 313436 - DNA, 834 bp, Artificial Sequence
  derived and/or modified sequence
atgttccccttctacagctgttggagaacgggcttgctattactcctgctggccgtggccgttcgagaatcctggcagaccgaggagaaaacttgcgatctggtgggcgagaagggcaaagaatcagagaaggagcttgcgctagtaaagcggctgaagcccctgttcaataagtcgtttgagtctacagttggacagggcagtgatacttacatttatatctttcgggtttgtagggaggctggcaatcatacaagcggagcgggcttggtgcaaataaataagtctaacggcaaggaaaccgtggtaggtcgcctgaacgagacgcatatattcaatggcagtaactggatcatgcttatctataaaggcggagacgagtacgataatcactgtgggaaggagcagcgacgtgcagtagtgatgatatcttgcaatagacataccctggcagacaattttaaccctgtgagtgaggaacgcggaaaagtccaggattgcttctatctttttgagatggattctagcctggcgtgcagtccagaaatctcccatctgagcgttggctcaatcctgctcgtgacctttgcctctctcgttgccgtctacgtagttggtgggtttttgtatcagaggctggtagtcggagcaaaaggaatggaacagtttccacatctcgcgttttggcaagatctgggaaatctggttgccgatgggtgcgacttcgtatgtaggtcaaagccccgcaatgtacccgctgcctatcgtggcgtgggcgacgaccaactgggggaggagtccgaggaaagggacgatcacctcctgccaatgtag

SEQ ID NO: 313437 - DNA, 834 bp, Artificial Sequence
  derived and/or modified sequence
atgttccccttctactcatgttggaggaccggactcctacttctcctcctcgctgttgccgtcagggagtcatggcagacggaagagaaaacgtgcgacctagttggggagaaaggaaaggagagcgagaaggaactggcactcgtcaagaggcttaaacctctatttaataaatcgttcgagagcacagtcgggcagggaagtgacacgtatatttacatttttagggtatgtcgagaggctggaaatcacacaagcggtgccggcttagtacagatcaataaaagcaacgggaaagaaacagtggttggccgactgaatgagacacacatctttaacgggagtaactggataatgttgatttataagggaggcgacgaatacgataaccattgtggcaaggaacagagaagagctgttgtgatgatctcatgtaatagacatacactcgctgacaacttcaatcctgtgtccgaagagagggggaaggtccaagattgtttttaccttttcgaaatggactcttcactggcatgcagcccagagatcagccatctcagtgtcggcagcatattactcgtgaccttcgcatcgttagtcgctgtgtacgttgtgggaggcttcttatatcaacggttggtggttggtgccaaaggaatggagcagttcccccacctggccttctggcaagatctggggaatctggtggctgatggatgtgattttgtctgtagaagtaagccaagaaacgtgcctgctgcttatagaggtgtaggcgacgaccaactgggcgaggaatctgaagagcgggacgaccacctactgccaatgtag

SEQ ID NO: 313438 - DNA, 834 bp, Artificial Sequence
  derived and/or modified sequence
atgttccccttctacagctgctggagaaccggcctgctgctgctgctgctggccgtggccgtgagagagagctggcagaccgaggagaagacctgcgacctggtgggcgagaagggcaaggagagcgagaaggagctggccctggtgaagagactgaagcccctgttcaacaagagcttcgagagcaccgtgggccagggcagcgacacctacatctacatcttcagagtgtgcagagaggccggcaaccacaccagcggcgccggcctggtgcagatcaacaagagcaacggcaaggagaccgtggtgggcagactgaacgagacccacatcttcaacggcagcaactggatcatgctgatctacaagggcggcgacgagtacgacaaccactgcggcaaggagcagagaagagccgtggtgatgatcagctgcaacagacacaccctggccgacaacttcaaccccgtgagcgaggagagaggcaaggtgcaggactgcttctacctgttcgagatggacagcagcctggcctgcagccccgagatcagccacctgagcgtgggcagcatcctgctggtgaccttcgccagcctggtggccgtgtacgtggtgggcggcttcctgtaccagagactggtggtgggcgccaagggcatggagcagttcccccacctggccttctggcaggacctgggcaacctggtggccgacggctgcgacttcgtgtgcagaagcaagcccagaaacgtgcccgccgcctacagaggcgtgggcgacgaccagctgggcgaggagagcgaggagagagacgaccacctgctgcccatgtag

SEQ ID NO: 313439 - protein, 42 aa, Artificial Sequence
  derived and/or modified sequence
MVDLTQVMDDEVFMAFASYATIILSKMMLMSTATAFYRLTRK

SEQ ID NO: 313440 - protein, 253 aa, Artificial Sequence
  derived and/or modified sequence
MAHYKTEQDDWLIIYLKYLLFVFNFFFWVGGAAVLAVGIWTLVEKSGYLSVLASSTFAASAYILIFAGVLVMVTGFLGFGAILWERKGCLSTYFCLLLVIFLVELVAGVLAHVYYQRLSDELKQHLNRTLAENYGQPGATQITASVDRLQQDFKCCGSNSSADWQHSTYILLREAEGRQVPDSCCKTVVVRCGQRAHPSNIYKVEGGCLTKLEQFLADHLLLMGAVGIGVACLQICGMVLTCCLHQRLQRHFY

SEQ ID NO: 313441 - protein, 243 aa, Artificial Sequence
  derived and/or modified sequence
MRSGGGRNAWDTRGACEQVGGAAVLAVGIWTLVEKSGYLSVLASSTFAASAYILIFAGVLVMVTGFLGFGAILWERKGCLSTYFCLLLVIFLVELVAGVLAHVYYQRLSDELKQHLNRTLAENYGQPGATQITASVDRLQQDFKCCGSNSSADWQHSTYILLREAEGRQVPDSCCKTVVVRCGQRAHPSNIYKVEGGCLTKLEQFLADHLLLMGAVGIGVACLQICGMVLTCCLHQRLQRHFY

SEQ ID NO: 313442 - DNA, 762 bp, Artificial Sequence
  derived and/or modified sequence
atggcccactacaagaccgagcaggacgactggctgatcatctacctgaagtacctgctgttcgtgttcaacttcttcttctgggtgggcggcgccgccgtgctggccgtgggcatctggaccctggtggagaagagcggctacctgagcgtgctggccagcagcaccttcgccgccagcgcctacatcctgatcttcgccggcgtgctggtgatggtgaccggcttcctgggcttcggcgccatcctgtgggagagaaagggctgcctgagcacctacttctgcctgctgctggtgatcttcctggtggagctggtggccggcgtgctggcccacgtgtactaccagagactgagcgacgagctgaagcagcacctgaacagaaccctggccgagaactacggccagcccggcgccacccagatcaccgccagcgtggacagactgcagcaggacttcaagtgctgcggcagcaacagcagcgccgactggcagcacagcacctacatcctgctgagagaggccgagggcagacaggtgcccgacagctgctgcaagaccgtggtggtgagatgcggccagagagcccaccccagcaacatctacaaggtggagggcggctgcctgaccaagctggagcagttcctggccgaccacctgctgctgatgggcgccgtgggcatcggcgtggcctgcctgcagatctgcggcatggtgctgacctgctgcctgcaccagagactgcagagacacttctactag

SEQ ID NO: 313443 - DNA, 732 bp, Artificial Sequence
  derived and/or modified sequence
atgagaagcggcggcggcagaaacgcctgggacaccagaggcgcctgcgagcaggtgggcggcgccgccgtgctggccgtgggcatctggaccctggtggagaagagcggctacctgagcgtgctggccagcagcaccttcgccgccagcgcctacatcctgatcttcgccggcgtgctggtgatggtgaccggcttcctgggcttcggcgccatcctgtgggagagaaagggctgcctgagcacctacttctgcctgctgctggtgatcttcctggtggagctggtggccggcgtgctggcccacgtgtactaccagagactgagcgacgagctgaagcagcacctgaacagaaccctggccgagaactacggccagcccggcgccacccagatcaccgccagcgtggacagactgcagcaggacttcaagtgctgcggcagcaacagcagcgccgactggcagcacagcacctacatcctgctgagagaggccgagggcagacaggtgcccgacagctgctgcaagaccgtggtggtgagatgcggccagagagcccaccccagcaacatctacaaggtggagggcggctgcctgaccaagctggagcagttcctggccgaccacctgctgctgatgggcgccgtgggcatcggcgtggcctgcctgcagatctgcggcatggtgctgacctgctgcctgcaccagagactgcagagacacttctactag

SEQ ID NO: 313444 - DNA, 762 bp, Artificial Sequence
  derived and/or modified sequence
atggcccattataagaccgaacaggatgattggcttatcatatatttgaagtatctgctgtttgtgttcaacttctttttttgggtcggcggggccgctgtgctcgctgtgggcatttggaccctcgtggaaaagagtggctacctgagcgtgcttgcctcgtctaccttcgccgcttccgcttacatactcatctttgctggcgttctcgtgatggtgaccgggttcttgggctttggggccattctgtgggaacggaaaggctgtcttagtacatacttctgcctgctgttagtgatctttttagtcgagctcgtggctggcgtgcttgctcacgtgtattatcagaggctatctgacgaactgaagcagcatctgaataggactctggccgaaaattatgggcagccaggggccacacaaattaccgcctcggtggaccggctgcagcaagacttcaaatgttgtggatctaactcctcagctgactggcagcattcaacatatattctgcttagggaggcagagggtcgacaggttcccgattcttgttgtaaaactgtcgtggtacgctgcgggcagagagcccaccctagcaatatttataaggtcgagggtggttgtttaacaaagctcgagcagtttctggctgaccaccttcttctgatgggggctgtcgggataggggtcgcctgtctgcagatctgcggtatggtactcacatgttgcctgcaccagcgtctacagcggcatttttactag

SEQ ID NO: 313445 - DNA, 732 bp, Artificial Sequence
  derived and/or modified sequence
atgcgtagtggcggggggcgcaacgcctgggatactagaggcgcttgcgagcaggtcgggggagctgccgtgttggccgtgggcatctggactctagttgagaaatcaggttacctgtccgtactcgcctcatctactttcgctgccagcgcatatatcctgatctttgcgggggtattggtcatggttacaggcttcctgggatttggagcaatcctgtgggagcggaagggatgtctgagcacctacttttgtctgctgctggtaatcttcctggtcgagctggtcgcaggtgttctggctcacgtttactatcagcgtctgtctgacgagttaaaacagcacctcaaccgcactctcgcagagaactatggtcagccaggggcaactcagatcaccgcatccgtagaccggctgcagcaagacttcaaatgttgtggtagcaacagctccgccgattggcaacattcaacatacatccttcttagagaagctgagggaagacaagtgcccgactcttgttgtaagacggtagtggttcggtgtggacagagagctcaccccagcaacatctacaaagttgaggggggatgccttactaagctggaacagtttctcgctgatcatctgttactgatgggggccgtagggattggtgttgcatgtctacagatatgcggaatggtgctgacctgctgtttgcatcagcggctgcagcggcacttttactag

SEQ ID NO: 313446 - DNA, 762 bp, Artificial Sequence
  derived and/or modified sequence
atggctcactataaaaccgagcaggatgactggctcataatttacctcaaatatctcttgttcgtgtttaacttcttcttttgggtgggcggggccgccgtgttggcggtcggcatttggacactggtagagaagtccggctatctctctgtcttggcgagttccacatttgctgcctccgcctatatcctgatctttgcaggggtgctggtcatggtaactggattccttggcttcggagcaattttgtgggagcggaagggttgcctgagtacatacttttgcctgctgctggtgatcttcctcgtggagctggtagctggcgtgctcgctcacgtctattatcagcgcctaagcgatgaactgaaacaacatctgaaccgcaccctcgccgagaactacggtcagcccggcgccacccagataactgcttccgttgataggcttcagcaggacttcaagtgttgcggatccaattcttcagccgactggcagcattccacttatatcctgctacgggaggctgaaggtcgccaggtgccagactcctgctgtaaaacagtcgtggtcagatgtgggcagagggctcacccctccaatatttacaaggtggagggtggctgccttacaaagttggagcagttcctggccgatcacttgctactgatgggagctgtgggcataggcgttgcatgtttacagatatgcgggatggtgcttacctgctgcctgcaccaacgcctccaaaggcacttttactag

SEQ ID NO: 313447 - DNA, 762 bp, Artificial Sequence
  derived and/or modified sequence
atggcccactacaagacagagcaggatgactggctgatcatctacctgaagtacctgctgtttgtgttcaacttcttcttctgggtgggcggcgctgctgtgctggccgtgggcatctggaccctggtggagaagagcggctacctgtctgtgctggccagcagcacctttgctgccagcgcctacatcctgatctttgctggggtgctggtgatggtgacaggcttcctgggctttggagccatcctgtgggagaggaagggctgcctgagcacctacttctgcctgctgctggtgatcttcctggtggagctggtggccggcgtgctggcccacgtgtactaccagaggctgagtgatgagctgaagcagcacctgaacagaaccctggccgagaactacggccagcccggggccacccagatcacagcctctgtggaccggctgcagcaggacttcaagtgctgcggcagcaacagcagcgctgactggcagcacagcacctacatcctgctgcgggaggccgagggccggcaggtgcctgacagctgctgcaagacagtggtggtgcgctgtggccagagggcccaccccagcaacatctacaaggtggagggcggctgcctgaccaagctggagcagttcctggccgaccacctgctgctgatgggcgctgtgggcatcggcgtggcctgcctgcagatctgtggcatggtgctgacctgctgcctgcaccagaggctgcagaggcacttctactag

SEQ ID NO: 313448 - DNA, 732 bp, Artificial Sequence
  derived and/or modified sequence
atgaggtctgggggcggcagaaatgcctgggacaccaggggggcctgtgagcaggtgggcggcgctgctgtgctggccgtgggcatctggaccctggtggagaagagcggctacctgtctgtgctggccagcagcacctttgctgccagcgcctacatcctgatctttgctggggtgctggtgatggtgacaggcttcctgggctttggagccatcctgtgggagaggaagggctgcctgagcacctacttctgcctgctgctggtgatcttcctggtggagctggtggccggcgtgctggcccacgtgtactaccagaggctgagtgatgagctgaagcagcacctgaacagaaccctggccgagaactacggccagcccggggccacccagatcacagcctctgtggaccggctgcagcaggacttcaagtgctgcggcagcaacagcagcgctgactggcagcacagcacctacatcctgctgcgggaggccgagggccggcaggtgcctgacagctgctgcaagacagtggtggtgcgctgtggccagagggcccaccccagcaacatctacaaggtggagggcggctgcctgaccaagctggagcagttcctggccgaccacctgctgctgatgggcgctgtgggcatcggcgtggcctgcctgcagatctgtggcatggtgctgacctgctgcctgcaccagaggctgcagaggcacttctactag

SEQ ID NO: 313449 - DNA, 762 bp, Artificial Sequence
  derived and/or modified sequence
atggcccactacaagaccgagcaggacgactggctgatcatctacttgaaatacttactgtttgtttttaactttttcttctgggtgggcggcgccgctgtccttgcggtcggtatctggactctggttgaaaagagcggctacttgtccgtcttggccagctccaccttcgccgcttccgcttatattctcatcttcgccggcgtgctggtcatggtaaccggatttctaggtttcggagctattctttgggaaaggaaaggatgcctcagtacatacttttgccttctgctggtcatatttctcgtcgaattagtcgccggcgttctcgcccatgtctactaccaacgcctttcagatgaactcaagcagcatctcaacaggactctagcagagaactacggacaaccgggagccactcaaatcactgcctcggtggaccggctccaacaggacttcaagtgttgcggctctaactctagcgcggactggcaacactctacctatatcctgctacgggaagccgagggaaggcaggttcccgatagttgctgtaaaaccgttgtcgtcaggtgcggccagcgggcccatccatctaacatatataaggtcgaagggggatgcctgaccaaactggagcagtttttggccgaccacctgttgctaatgggagcggtaggaattggcgtggcgtgcctacagatttgtggaatggtgctgacttgttgcctgcatcagcggttgcagcggcatttttattag

SEQ ID NO: 313450 - DNA, 732 bp, Artificial Sequence
  derived and/or modified sequence
atgcggagcggcggcggccggaacgcctgggacacccggggcgcctgtgagcaggtggggggagccgccgtcttggccgtaggcatatggacactagtggagaagagcggctacctgtcggtgttggcaagttcaacctttgccgcatctgcttatatactgatctttgctggagtgctcgttatggtgacaggcttcctgggctttggagcgattctgtgggaaagaaaggggtgtctgtccacttacttttgtcttcttctcgttattttcctagtcgaacttgtagccggtgtgctggcgcacgtgtattaccagaggctgtccgatgaactgaaacagcacttgaacaggacactggccgagaattacggccagcccggcgctacccagattacagcttctgtggatagactgcagcaggacttcaaatgctgcgggtctaattcctccgcagactggcagcattctacctacattcttttgagggaagccgaaggccggcaagtgccggactcatgttgcaaaactgttgtcgttcgctgcggacagagagcccaccctagtaacatatacaaagtggagggcggatgtctgacgaagctcgaacagtttctcgccgatcacttgctcctgatgggcgcggttggcatcggcgtggcctgccttcagatttgtggcatggtgctcacgtgctgccttcatcagcggctgcagcggcacttctactag

SEQ ID NO: 313451 - DNA, 762 bp, Artificial Sequence
  derived and/or modified sequence
atggcccactacaagaccgagcaggacgactggctgatcatctacctgaagtatttactttttgtattcaattttttcttttgggtaggcggtgctgctgtactggcagtgggaatttggactctcgtggagaagtccggttatttgtccgttctagcttcttctaccttcgctgccagcgcctatatccttattttcgctggagtgctcgtcatggtcacaggcttccttggctttggcgccatcctgtgggagagaaagggctgcttgtccacctatttctgtctgctgctggtgatctttctcgtggaattggtcgccggagtcctggcccatgtgtattatcagcgcctgagcgatgagttgaaacagcacctgaatcggaccctagcggaaaattatgggcagcctggggccactcagatcaccgccagcgtggatagactacagcaagatttcaagtgctgcggcagcaacagctccgctgactggcaacactctacgtatattctgttgcgggaagcagaagggcggcaggtgcctgactcctgctgcaaaacagtggtcgttaggtgcggccagcgcgcccacccatccaatatctacaaggtggaaggtggctgtttgacaaaactggagcagtttctggcagatcacctgctgctcatgggcgccgtgggaattggagtggcttgcctgcaaatttgtggtatggtcttgacatgttgccttcatcaacgactccagagacacttttactag

SEQ ID NO: 313452 - DNA, 762 bp, Artificial Sequence
  derived and/or modified sequence
atggctcattacaaaaccgaacaggacgactggttaataatctacctcaagtacctactattcgtgttcaacttcttcttttgggttgggggagctgcagtgctagcggtgggtatctggaccttggtcgagaagtctggttatctctcagtgctggccagctcaacttttgccgctagtgcctacattctaatctttgctggtgttcttgtgatggtgacaggttttcttggcttcggtgctatcctgtgggaacgaaaaggttgcttgagtacctatttttgccttcttctggtcatctttctcgttgaactcgtggccggtgtgctggcccatgtctactatcagagactttccgatgaactgaaacagcatctgaacaggaccctggccgaaaactacgggcaaccaggagctacccagatcaccgcctccgtggatcgacttcaacaggacttcaagtgttgcgggtctaatagctctgccgactggcagcattcgacatacatcctccttcgtgaggctgaaggcagacaggtcccagatagttgctgtaagacagttgtcgtcaggtgtggccagcgggcacacccaagtaacatctacaaagtggaagggggttgcctaacaaagctcgagcagttcctggctgaccacctgttactaatgggagccgtaggcatcggagttgcatgcctgcagatttgtggtatggtccttacttgctgcctgcaccagcgcctgcagcgccacttttactag

SEQ ID NO: 313453 - DNA, 732 bp, Artificial Sequence
  derived and/or modified sequence
atgagatccggcggaggcagaaacgcatgggatacgcggggtgcgtgcgagcaggtggggggtgctgctgttctggctgtaggcatatggacactggtggagaaatctggttacctttccgtgctggcctcttctacattcgcggctagcgcatacattcttatcttcgccggagtgttggtcatggtcacggggtttcttggcttcggtgcaatcctgtgggagcgtaaaggctgcttgtccacctacttttgcttgctgttagtgatatttctggtggagctggtagcaggcgtcctggcccatgtgtattatcagcgtctgtctgacgaactcaagcaacacctgaatcggaccctcgccgaaaactatggacaacccggtgccacccagataacggcctcagtggaccggctgcagcaggactttaagtgttgcggttcgaacagcagcgccgattggcagcactccacgtatattttgctgcgcgaggccgagggcaggcaagtgcccgactcatgctgtaaaacagtggtggtccgctgtggccaaagggcgcatccttctaacatctataaggtggaagggggatgtctgactaagctcgaacagtttctggccgaccaccttctgcttatgggggctgtgggaattggagttgcatgtttgcagatttgcggaatggtattgacctgctgcctacatcagaggctgcaaaggcatttttactag

SEQ ID NO: 313454 - DNA, 762 bp, Artificial Sequence
  derived and/or modified sequence
atggctcattataaaaccgaacaggatgactggctaatcatctacctgaagtacctgctctttgtctttaacttctttttctgggtggggggagctgcagtgctggcggtgggcatatggaccttggtggagaagtctggttatctgtcagtcctggctagctcaacgttcgcggctagtgcctacattttgatattcgccggtgtgctcgtgatggtgacaggttttttgggattcggcgctatcctctgggagaggaaagggtgtctatccacatatttctgcctgcttttggtgatttttctggtggaattggtggccggtgtgctcgcgcatgtttattaccagagactgtccgatgaactgaaacagcacctgaacagaactttggcggagaactacggccagccgggagccacacagatcacggcgtcagtcgatagattacagcaggacttcaagtgctgtggctctaactcctctgctgactggcagcacagcacgtatattcttttgcgtgaggccgaaggcaggcaggtgccggattcctgctgcaagacagttgtggtccggtgcgggcaacgggctcacccctctaatatttataaagtggaaggcggatgcctaacaaaactagagcagttcttggccgatcatctattgctgatgggcgcagtgggcatcggggtcgcatgtctgcagatctgtggaatggtcctgacttgctgcctccaccagcggcttcaacgccacttttattag

SEQ ID NO: 313455 - DNA, 5505 bp, Artificial Sequence
  derived and/or modified sequence
agtggaggaggcaggaatgcctgggacactcgcggggcatgtgagcaggcccagaagccatggcccactataagactgagcaggacgactggctgatcatctacttgaagtatttactctttgtcttcaacttcttcttctgggtcgggggagcagccgtcctggctgtgggcatctggaccctggtggagaagagtggctacctcagcgtcctggcctccagcacctttgccgcctccgcctacatcctcatctttgcgggcgtacttgtcatggtgaccggcttcctgggcttcggtgccatcctctgggagcggaagggctgcctctccacgtatttctgcctgttgctcgtcatcttcctggttgagctggtggcgggagtcctggcccatgtgtattaccagaggctgagtgatgaactgaagcagcacttgaaccggactctggctgagaactacgggcagcccggagccacgcagatcaccgcctcagtggaccgactccagcaggatttcaagtgctgtggaagcaacagctcagccgactggcagcacagcacgtacatcctgttgcgggaggccgagggccgccaggtgcccgacagctgctgcaagacagtggtggtgcgctgcggccagcgggcccacccctccaacatctataaggtggagggaggctgcctcaccaagctggagcagttcctggccgaccacctgctgcttatgggggcagtgggcatcggggtggcctgcctgcagatctgcgggatggttctcacctgctgcttgcaccagaggctccagcggcatttttactaatggccaaccacctcctcttccaactgcccctcaagacaacatgtggccacatgccatctgcaaggcctgcagagttagcaccagctccactagggccatagatgccccctcctttgtgcctagctcctgcgaatccaccgagtgcctgagaccatagcttctgtgcccacccaggcagagaccctcggccccctctcctccatttctgagcccccatggccagatcctgggcagggaaatgatcctttcaggagacaaccagagcccctcaccaggaacgggggcacccgtggactacgggagggtggcggttgggttctctgctccctcccagctcctgaacctggaacaatcggcagaaaacccaggaaccccggcactcctgcattcagcacgggattcccccacccatgcccagaagccctgaccttgctgtttctggaaaaagcatggggtggggcagggagggctggcatttcccccagaagaccttgccctttgacctgcccactctccacactgcctcacctggaaagccatgtcctgctggcctcattccttcctgaagggcctaggagtggggaggcctgggtagggcagccacaggctgggtagagccgccctggcaggaagcagggggtaaggtggccataccagcacatgctgcactaggagcagagccctgcacctgcctagctgccttcctgggagaaacctccctgggagaccatggccccaagccctggcctctagtgatacgcccctcgggaatctcctgttccggggcctgattctcaggaacaccaggtttcagaccatcttcagcacctaatgttgatgggtgtcaaacatctcctggagtggaccaactcgcaaccctgcaaagtcggagctgctgagaaggggcagctctgaatagaggggcatctgcctgaacctcacttttcctggggccctctccttgaccccgtagccaccaccacactgcttccagggggtccagctctgcttcccttcccacctgtcctagagtggacagagctttttccttgggttctctcttgcatcactaagttcagcagggaatttgcggaattttcaggaagaactttccccagtaataagggagaacagaaagaaaatcctagaaaatacagagtatccatgctggcagctttttgtacaacacccatagggacccccccaaatggctattacaaaggggcagcccattcactacacaagaaccccacacctggcttccaccctccccagctcctgcacttctccccagagcgggaccctcttacttccccccatgaaggggggcaccttgtgctaaggccaaggctgagcgaggtcccagctcacctccctgcttgatccagattgcactgtgatgagcacattgctgacctaggccagtcctggggcaggcgtgctctctctcccatacataggagtggcctcaaggccacccagtgctgaccccaacagagccctgaactgtccagaaactgcatcctcagcacaggaagtacccacatggacagagggaagcccagcctcggggccggttgcctcctcttctctgggtgttctccagtggcttcttggagcctaggctggtttatctcccctgcctaaaaggccctggggttgccaatgcaaattcattaaaacgaagaccagatatcccagactgcacagaggccgagagaaatggtatagtgcgtgattagcattgctgccctccaacctcctgggattcatgcagataatcaaaaactgactatgactcccaagttctctgaaggatgagatcacaactgacaactcttacgacagagggagagtggtgagagagagaaagagggtactgggctagagccatgttcttcctgccgaggtgccagggggaggcggcagtgggcagggggtgctggggccttacctgtctgccctggtggggatgaaagacaggtgacaggcaggtgccctgtgcacagccttatcattgaaggcaggcccaggacagcctgccccatctgccccagccccatgggatggttggtccagcctgactggggcaggattagctgcaattcctgccctgtgtgtcgtccagccagactgcctcttgaaagatggcttgtccaagcggcagacagtggtagaacaacccagggcttggaaatctgacctccttgtccatgccaacagcctgggagatgagacagggttagaggaaacagaggcccaggatacggcaggttctgcctgggagtgtacaatggttggagtccagagccaacgatgtggtccccagcggggtgtgcccctcctgctgacgagggtacagatccatacccaggtcaattcctcccgggcccctgtttggaggctgctacagccttgagttccttggagagagaggacacgcctgtggaatgtcaccttcagtcccgtgcaggcaaaaggcccctgcacaccagggccctaggaaagcagcatcaggtgctgggatcccacccagctggcacgggcacgttcttgccctgcacactccatgctgcccttccctgagctcgcaggggcagacaccaagagaagggcgcgtccccgagtcccctgggtgacctgtgtcaggacagcaggcaagaatgaaacgtggccttggctgacgggttggaatatttgtgaccgttcttgtctttctccctcctgcttccccggcaccctagccccatctccaggagcccctcaggcagagtaagtggggagtgtgtccagggatttttttgtgtttaccaaggtcctgctgtgcacttagaatctgtcaccataaatacttatctcgcagttaccccagcaagagggtgttatttcccccattttataaaaggaaattaaggctgggcaaagttaagacttgcttgtcagtggtcatggctgttgtcttgccacccccagctggggagaaggaagaaaactgggccgggaacccctcccctcagtgtcccccagttctccatctccataaggagccatcaggctgtcattaaggaacagagtgtcactcagggggcactgtcacaaagcagcacccatggcacatgggccgggggtgcagaagcctggcttatttcaggctgacagctggaccctctgggtgcaggggctcaggcagtggccaagagcccaaagggctaaggcccgtgacgaccacccagcccgtcaccccaggtacaaacactgaccccaaagcaagagcagggactgtccctcagccctcagggccttcatgcagggtgcagaatctcatgtccacatggaggtcacccctcaggtcacacccactcccagagcaaccctgggcagggaggggcaccctggggttgtgttgaccacctccccttcaggtgaggcccttttctgccttctttctagccccctgcatggggcacctgctattgctggggctctggggtggaccctgtgtgatttctgtcagggagcttgtgctgtgcatggccagaggtgtttacatccagaagggcccagcacggccctgtggggtgtggggggaatatggtagatcattgtgatgtgcctcggggccctcttgccttggagccagctttgtttcagaatctgctacttgggccctcttcagggttttgaggctggagaagtgagttgggacagtcactgtcatcaccacccaccctgtcacccacctggaaaacattcttgatatactggccatgctgggccgggctcacatccactgagggtatagtgaccaagcgtctaaaccagtcgttctcaaacttcggtgagtatcagaatcacctggaagggcttttacaaacagattgctggccccaccccccagaatttctcatcaggagtgggcaagaccaatcatttgcatttctgacaagttcccaggagctgcagctgctggccctggaaccacactttgagaaccactgctttagaccaaacaccaaaggaagatgcagccaccctcctttacatgtcacaacgctcagggtccatgagtacctcaggctgtccagctgagctccacctgcagcagccgagattcccgactcgctccaccattgggggctaggagtgaagcgtgtcaccatggtcagctcatggccagccaggaaagcctctctgctgtgcgtctgtgcagttcttgttcttccctggaggactcttggatcgcctgtgatcttggccaggagaccaggtgcctgggtcccttcctggaaggggacaagttacacaccccagccccattttcccaccaacttctacatgccttgggagaacctgctacatgttggctgcccccttcccctatttcagcagtgcccagtcctgcttataaacctgaggcctgctccccataccctgccctgtgcaagtgccagccgttattccaggcagcccaatgttgttgaggccagatggattcctggaagcagctggcccatggatgtgagtcatcacagtattctagaaacagagaagaggtcttaacctaatgcgcatagagaaattgttctcattgtaaacatacccctgtccttagctgatctaggtggaagcccagcttcatgtgctagggggcatgataatgataataaaggaattgtatctagga

SEQ ID NO: 313456 - DNA, 988 bp, Artificial Sequence
  derived and/or modified sequence
agactgtcccgagcttcccccgggcgggcagagggaagccggctggggatgaggagtggaggaggcaggaatgcctgggacactcgcggggcatgtgagcaggtcgggggagcagccgtcctggctgtgggcatctggaccctggtggagaagagtggctacctcagcgtcctggcctccagcacctttgccgcctccgcctacatcctcatctttgcgggcgtacttgtcatggtgaccggcttcctgggcttcggtgccatcctctgggagcggaagggctgcctctccacgtatttctgcctgttgctcgtcatcttcctggttgagctggtggcgggagtcctggcccatgtgtattaccagaggctgagtgatgaactgaagcagcacttgaaccggactctggctgagaactacgggcagcccggagccacgcagatcaccgcctcagtggaccgactccagcaggatttcaagtgctgtggaagcaacagctcagccgactggcagcacagcacgtacatcctgttgcgggaggccgagggccgccaggtgcccgacagctgctgcaagacagtggtggtgcgctgcggccagcgggcccacccctccaacatctataaggtggagggaggctgcctcaccaagctggagcagttcctggccgaccacctgctgcttatgggggcagtgggcatcggggtggcctgcctgcagatctgcgggatggttctcacctgctgcttgcaccagaggctccagcggcatttttactaatggccaaccacctcctcttccaactgcccctcaagacaacatgtggccacatgccatctgcaaggcctgcagagttagcaccagctccactagggccatagatgccccctcctttgtgcctagctcctgcgaatccaccgagtgcctgagaccatagcttctgtgcccacccaggcagagaccctcggccccctctcctccatttctg

SEQ ID NO: 313457 - DNA, 1058 bp, Artificial Sequence
  derived and/or modified sequence
agtctctctaggcgcagctcccttcgccgcttccggagcccctggcagggcccagaagccatggcccactataagactgagcaggacgactggctgatcatctacttgaagtatttactctttgtcttcaacttcttcttctgggtcgggggagcagccgtcctggctgtgggcatctggaccctggtggagaagagtggctacctcagcgtcctggcctccagcacctttgccgcctccgcctacatcctcatctttgcgggcgtacttgtcatggtgaccggcttcctgggcttcggtgccatcctctgggagcggaagggctgcctctccacgtatttctgcctgttgctcgtcatcttcctggttgagctggtggcgggagtcctggcccatgtgtattaccagaggctgagtgatgaactgaagcagcacttgaaccggactctggctgagaactacgggcagcccggagccacgcagatcaccgcctcagtggaccgactccagcaggatttcaagtgctgtggaagcaacagctcagccgactggcagcacagcacgtacatcctgttgcgggaggccgagggccgccaggtgcccgacagctgctgcaagacagtggtggtgcgctgcggccagcgggcccacccctccaacatctataaggtggagggaggctgcctcaccaagctggagcagttcctggccgaccacctgctgcttatgggggcagtgggcatcggggtggcctgcctgcagatctgcgggatggttctcacctgctgcttgcaccagaggctccagcggcatttttactaatggccaaccacctcctcttccaactgcccctcaagacaacatgtggccacatgccatctgcaaggcctgcagagttagcaccagctccactagggccatagatgccccctcctttgtgcctagctcctgcgaatccaccgagtgcctgagaccatagcttctgtgcccacccaggcagagaccctcggccccctctcctccatttctgagcccccatggccagatcctgggcaggg

SEQ ID NO: 313458 - protein, 273 aa, Artificial Sequence
  derived and/or modified sequence
MTFDDLKIQTVKDQPDEKSNGKKAKGLQFLYSPWWCLAAATLGVLCLGLVVTIMVLGMQLSQVSDLLTQEQANLTHQKKKLEGQISARQQAEEASQESENELKEMIETLARKLNEKSKEQMELHHQNLNLQETLKRVANCSAPCPQDWIWHGENCYLFSSGSFNWEKSQEKCLSLDAKLLKINSTADLDFIQQAISYSSFPFWMGLSRRNPSYPWLWEDGSPLMPHLFRVRGAVSQTYPSGTCAYIQRGAVYAENCILAAFSICQKKANLRAQ

SEQ ID NO: 313459 - DNA, 822 bp, Artificial Sequence
  derived and/or modified sequence
atgaccttcgatgatttaaagatacagacagtaaaagatcagcccgatgaaaagtccaacggcaagaaggccaaagggttacagtttctttacagtccatggtggtgtctggccgctgctaccctgggtgtgttatgcctggggctcgtcgttacaattatggtgctgggcatgcaactgtctcaagtcagcgacctgctgacccaggagcaggcaaatcttacgcaccagaagaaaaagctcgaaggccagatctctgcaaggcagcaggctgaggaagcttcacaggaatccgagaatgaactgaaggaaatgattgagacactggcgcggaaactgaatgaaaagtctaaagagcagatggagctccatcaccaaaacttaaatctgcaggaaacactgaaaagagttgccaattgcagtgccccctgtccccaggattggatctggcacggggaaaattgttacctcttctcctctggcagtttcaactgggagaaaagtcaagaaaaatgcttatccttggacgctaagctgcttaaaatcaacagtaccgccgatctggacttcattcaacaggcaatctcctactcgagctttcccttctggatggggctatctagacgcaatccttcttatccctggctgtgggaggacggaagcccactgatgcctcatctatttagagtgaggggcgccgtcagtcagacctacccatccggcacatgcgcatatattcagcggggagcagtatacgctgagaattgtattctagccgccttttctatctgccagaagaaagccaacctccgggctcagtag

SEQ ID NO: 313460 - DNA, 822 bp, Artificial Sequence
  derived and/or modified sequence
atgacctttgatgacctgaagatccagacagtgaaggaccagccagatgagaagagcaatggcaagaaggccaagggcctgcagttcctgtacagcccctggtggtgcctggccgccgccaccctgggcgtgctgtgcctgggcctggtggtgaccatcatggtgctgggcatgcagctgagccaggtgtctgacctgctgacccaggagcaggccaacctgacccaccagaagaagaagctggagggccagatcagcgcccggcagcaggccgaggaggccagccaggagagtgaaaatgagctgaaggagatgattgagaccctggccaggaagctgaatgagaagagcaaggagcagatggagctgcaccaccagaacctgaacctgcaggagaccctgaagagggtggccaactgcagcgccccctgcccccaggactggatctggcatggagagaactgctacctgttcagcagcggcagcttcaactgggagaagagccaggagaagtgcctgagcctggatgccaagctgctgaagatcaacagcacagctgacctggacttcatccagcaggccatctcctacagcagcttccccttctggatgggcctgagcagaagaaaccccagctacccctggctgtgggaggatggcagccccctgatgccccacctgttccgggtgagaggagctgtgtcccagacctaccccagcggcacctgtgcctacatccagagaggagctgtgtatgcagagaactgcatcctggccgccttcagcatctgccagaagaaggccaacctgcgggcccagtag

SEQ ID NO: 313461 - DNA, 822 bp, Artificial Sequence
  derived and/or modified sequence
atgaccttcgacgacctgaagatccagaccgtgaaggaccagcccgacgagaagtccaacgggaaaaaagctaagggcttacaattcctgtacagcccctggtggtgcctggccgccgccacactgggagtgctttgccttggcctggtggtgactattatggtcctcggaatgcaattgtcccaggttagtgacctactgacccaggaacaggccaacctgacacaccagaagaagaagttggagggtcagataagtgccaggcaacaggcggaagaagcctcccaggagagcgagaacgagctgaaggaaatgattgagactttggcacggaagctcaatgagaaaagcaaagagcagatggagttacatcatcaaaacttgaatctgcaagaaactctaaaacgagtggccaattgcagcgcgccgtgtccccaggattggatctggcacggagaaaattgctaccttttctctagcggttcattcaattgggaaaagtctcaggagaaatgcctgagtcttgacgccaagctactgaaaatcaacagtacggccgatctggattttattcagcaagctatttcttacagctcctttccattttggatggggctttcacgtcgaaaccccagctacccgtggttgtgggaggacggcagcccgctcatgccccatctctttagagtgcgtggagccgtttctcagacctatccttctggaacttgcgcatacatccaaaggggggcagtctatgctgagaattgcatcctggcagctttctcaatctgtcagaaaaaagccaacctgagggcccagtag

SEQ ID NO: 313462 - DNA, 2460 bp, Artificial Sequence
  derived and/or modified sequence
atttttagtttgttgaagttcgtgactgcttcactctctcattcttagcttgaatttggaaatgacttttgatgacctaaagatccagactgtgaaggaccagcctgatgagaagtcaaatggaaaaaaagctaaaggtcttcagtttctttactctccatggtggtgcctggctgctgcgactctaggggtcctttgcctgggattagtagtgaccattatggtgctgggcatgcaattatcccaggtgtctgacctcctaacacaagagcaagcaaacctaactcaccagaaaaagaaactggagggacagatctcagcccggcaacaagcagaagaagcttcacaggagtcagaaaacgaactcaaggaaatgatagaaacccttgctcggaagctgaatgagaaatccaaagagcaaatggaacttcaccaccagaatctgaatctccaagaaacactgaagagagtagcaaattgttcagctccttgtccgcaagactggatctggcatggagaaaactgttacctattttcctcgggctcatttaactgggaaaagagccaagagaagtgcttgtctttggatgccaagttgctgaaaattaatagcacagctgatctggacttcatccagcaagcaatttcctattccagttttccattctggatggggctgtctcggaggaaccccagctacccatggctctgggaggacggttctcctttgatgccccacttatttagagtccgaggcgctgtctcccagacatacccttcaggtacctgtgcatatatacaacgaggagctgtttatgcggaaaactgcattttagctgccttcagtatatgtcagaagaaggcaaacctaagagcacagtgaatttgaaggctctggaagaaaagaaaaaagtctttgagttttattctggaatttaagctattctttgtcacttgggtgccaaacatgagagcccagaaaactgtcatttagctggctgcagaactcctttgcagaaactggggttccaggagcctggcacctttatgtcaacatttttgattctagctacctgtattatttcacctagcttgtcccaagcttccctgccagcctgaagtccattttcccctttttattttaaaatttgactcctcttcaagcttgaaaaccctctgaactcagtcttctttacctcattatcaccttcccctcacactcctaaaattgcatgaaagacagaacatggagaacttgctcaagtgcaggcagagagcaaaaaggggaaatatgtctgggaaaaagtgcacgtgaagaaacaaagaaggacagaggccattccgaaatcaagaaactcatgttcttaactttaaaaaaggtatcaatccttggtttttaaactgtggtccatctccagactctaccacttacggacagacagacagacagacacacacacacacacacacacacattttgggacaagtggggagcccaagaaagtaattagtaagtgagtggtcttttctgtaagctaatccacaacctgttaccacttcctgaatcagttattatttcttcatttttttttctaccagaggacagattaatagatttaacccttcacaacagttcttgttagaatcatgggatgtgtggcccagaggtaagaatagaatttctttccctaaagaacataccttttgtagatgaactcttctcaactctgttttgctatgctataattccgaaacatacaagacaaaaaaaatgaagacactcaatctagaacaaactaagccaggtatgcaaatatcgctgaatagaaacagatggaattagaaatatatcttctatttttaggcttctatttcctttccacccactcttcacaggctattctactttaaaggaagcctttttattttgctgcacacaatctagcaggaatctttttttttttttaagagctgtgtcatccttatgtaggcaagagatgtttgcttttgttaaaagctttattgagatataattaacataaaataaactgaacatatttaaagtgtactatttgataagttttcacaccttgtggagaacatgcatactacaattaagagagtgaacatatccatcatccctcaaagtgtcacaatgctcctcctgatgactcctccccagaaaaccaccaatcggctttcattttgcattttgtagttttatgtgaatggaatcatatagtatgtcttttttttttgtctggcttctttcactttgcataattattttgagattcatatgtctccatcttgatgctcgtatgaattcattcttttaaatgttgaatattcccttgtatggatataccacaattcatttacccatttacttgttgatgacatttgggttgttttagttttgggatattacaaataaagctgctgtgaacatttgtgtac

SEQ ID NO: 313463 - DNA, 822 bp, Artificial Sequence
  derived and/or modified sequence
atgaccttcgacgatcttaagattcagactgttaaagaccagccagacgaaaagtctaatggtaaaaaggcaaaaggattacagtttttatactcaccctggtggtgcctggccgctgcaacattaggagtgctctgtcttgggttagtggttactataatggtgctgggaatgcaactctcccaggtctccgacctacttactcaggaacaagctaacctgacacatcagaaaaagaaactggaaggtcagattagtgcaaggcagcaagcggaggaggcctcccaggaaagcgaaaatgaattgaaggagatgattgagaccttagccaggaagctgaacgaaaagtctaaagaacaaatggagcttcaccaccaaaatctgaacttgcaagagactctgaagcgagtggccaactgcagcgccccatgcccccaggattggatttggcatggggagaactgctacctgtttagcagcgggtccttcaattgggaaaaatctcaggagaagtgtttatctctcgacgccaagctgctcaaaatcaattccacggccgatttggactttattcagcaggcaatttcttatagttccttccccttctggatggggctctctcgtcggaatcctagctacccgtggctctgggaggatggctccccactaatgccacacctgtttcgtgtccggggagctgtaagccagacctatccctcaggcacttgtgcctacattcagcgcggtgctgtgtacgctgagaattgcattctggcggcattctccatctgccagaagaaggcaaatcttcgagcccagtag

SEQ ID NO: 313464 - DNA, 822 bp, Artificial Sequence
  derived and/or modified sequence
atgaccttcgacgacctgaagatccagaccgtgaaggaccagcccgacgagaagagcaacggcaagaaggccaagggcctgcagttcctgtacagcccctggtggtgcctggccgccgccaccctgggcgtgctgtgcctgggcctggtggtgaccatcatggtgctgggcatgcagctgagccaggtgagcgacctgctgacccaggagcaggccaacctgacccaccagaagaagaagctggagggccagatcagcgccagacagcaggccgaggaggccagccaggagagcgagaacgagctgaaggagatgatcgagaccctggccagaaagctgaacgagaagagcaaggagcagatggagctgcaccaccagaacctgaacctgcaggagaccctgaagagagtggccaactgcagcgccccctgcccccaggactggatctggcacggcgagaactgctacctgttcagcagcggcagcttcaactgggagaagagccaggagaagtgcctgagcctggacgccaagctgctgaagatcaacagcaccgccgacctggacttcatccagcaggccatcagctacagcagcttccccttctggatgggcctgagcagaagaaaccccagctacccctggctgtgggaggacggcagccccctgatgccccacctgttcagagtgagaggcgccgtgagccagacctaccccagcggcacctgcgcctacatccagagaggcgccgtgtacgccgagaactgcatcctggccgccttcagcatctgccagaagaaggccaacctgagagcccagtag

SEQ ID NO: 313465 - protein, 650 aa, Artificial Sequence
  derived and/or modified sequence
MAADLNLEWISLPRSWTYGITRGGRVFFINEEAKSTTWLHPVTGEAVVTGHRRQSTDLPTGWEEAYTFEGARYYINHNERKVTCKHPVTGQPSQDNCIFVVNEQTVATMTSEEKKERPISMINEASNYNVTSDYAVHPMSPVGRTSRASKKVHNFGKRSNSIKRNPNAPVVRRGWLYKQDSTGMKLWKKRWFVLSDLCLFYYRDEKEEGILGSILLPSFQIALLTSEDHINRKYAFKAAHPNMRTYYFCTDTGKEMELWMKAMLDAALVQTEPVKRVDKITSENAPTKETNNIPNHRVLIKPEIQNNQKNKEMSKIEEKKALEAEKYGFQKDGQDRPLTKINSVKLNSLPSEYESGSACPAQTVHYRPINLSSSENKIVNVSLADLRGGNRPNTGPLYTEADRVIQRTNSMQQLEQWIKIQKGRGHEEETRGVISYQTLPRNMPSHRAQIMARYPEGYRTLPRNSKTRPESICSVTPSTHDKTLGPGAEEKRRSMRDDTMWQLYEWQQRQFYNKQSTLPRHSTLSSPKTMVNISDQTMHSIPTSPSHGSIAAYQGYSPQRTYRSEVSSPIQRGDVTIDRRHRAHHPKHVYVPDRRSVPAGLTLQSVSPQSLQGKTWGREKVATATGAAEAVASDTHLPRTGSSSPSLLCV

SEQ ID NO: 313466 - protein, 716 aa, Artificial Sequence
  derived and/or modified sequence
MSGSKKKKVTKAERLKLLQEEEERRLKEEEEARLKYEKEEMERLEIQRIEKEKWHRLEAKDLERRNEELEELYLLERCFPEAEKLKQETKLLSQWKHYIQCDGSPDPSVAQEMNTFISLWKEKTNETFEEVIEKSKVVLNLIEKLKFILLETPPCDLQDKNIIQYQESILQLQELLHLKFGVATEILLKQASTLADLDSGNMEKVIKDENVTLYVWANLKKNPRHRSVRFSETQIGFEIPRILATSDIAVRLLHTHYDHVSALHPVSTPSKEYTSAVTELVKDDVKNVEKAISKEVEEESKQQERGSHLIQEEEIKVEEEQGDIEVKMSSAEEESEAIKCEREMKVLSETVSAAQLLLVENSSEKPDFFEDNVVDLCQFTTLGGVYHLDILELPPQCKPVKGWMIVEILKEGLQKYTYPPETTEEFETENAFPPIEVTLEVHENVIFFEDPVVVRWDAEGKHWRTDGISNVSYKPKERLVTFSLDTFGPVTLIQDAHINMPYQSWELRPLDVNKVLLTVTTVFTEIQIQIKENLCMLSSIKLKDKKHISILEGTWMTPIPFIIALKEAGLNIFPTRHSHFYVIINNKVPLVEVKAYRQMALLSSAFAFGWSKWNLLCNSTKVVFKVREHLTEACTENPNWALLMFSGDRAQRLKIKEESEAFSEALKEETEFHSTLYHMVKDFASEEAMEKVRSSNCQFVNSVCHMLLSTRLLSYS

SEQ ID NO: 313467 - protein, 722 aa, Artificial Sequence
  derived and/or modified sequence
MGPKAKKSGSKKKKVTKAERLKLLQEEEERRLKEEEEARLKYEKEEMERLEIQRIEKEKWHRLEAKDLERRNEELEELYLLERCFPEAEKLKQETKLLSQWKHYIQCDGSPDPSVAQEMNTFISLWKEKTNETFEEVIEKSKVVLNLIEKLKFILLETPPCDLQDKNIIQYQESILQLQELLHLKFGVATEILLKQASTLADLDSGNMEKVIKDENVTLYVWANLKKNPRHRSVRFSETQIGFEIPRILATSDIAVRLLHTHYDHVSALHPVSTPSKEYTSAVTELVKDDVKNVEKAISKEVEEESKQQERGSHLIQEEEIKVEEEQGDIEVKMSSAEEESEAIKCEREMKVLSETVSAAQLLLVENSSEKPDFFEDNVVDLCQFTTLGGVYHLDILELPPQCKPVKGWMIVEILKEGLQKYTYPPETTEEFETENAFPPIEVTLEVHENVIFFEDPVVVRWDAEGKHWRTDGISNVSYKPKERLVTFSLDTFGPVTLIQDAHINMPYQSWELRPLDVNKVLLTVTTVFTEIQIQIKENLCMLSSIKLKDKKHISILEGTWMTPIPFIIALKEAGLNIFPTRHSHFYVIINNKVPLVEVKAYRQMALLSSAFAFGWSKWNLLCNSTKVVFKVREHLTEACTENPNWALLMFSGDRAQRLKIKEESEAFSEALKEETEFHSTLYHMVKDFASEEAMEKVRSSNCQFVNSVCHMLLSTRLLSYS

SEQ ID NO: 313468 - protein, 676 aa, Artificial Sequence
  derived and/or modified sequence
MERLEIQRIEKEKWHRLEAKDLERRNEELEELYLLERCFPEAEKLKQETKLLSQWKHYIQCDGSPDPSVAQEMNTFISLWKEKTNETFEEVIEKSKVVLNLIEKLKFILLETPPCDLQDKNIIQYQESILQLQELLHLKFGVATEILLKQASTLADLDSGNMEKVIKDENVTLYVWANLKKNPRHRSVRFSETQIGFEIPRILATSDIAVRLLHTHYDHVSALHPVSTPSKEYTSAVTELVKDDVKNVEKAISKEVEEESKQQERGSHLIQEEEIKVEEEQGDIEVKMSSAEEESEAIKCEREMKVLSETVSAAQLLLVENSSEKPDFFEDNVVDLCQFTTLGGVYHLDILELPPQCKPVKGWMIVEILKEGLQKYTYPPETTEEFETENAFPPIEVTLEVHENVIFFEDPVVVRWDAEGKHWRTDGISNVSYKPKERLVTFSLDTFGPVTLIQDAHINMPYQSWELRPLDVNKVLLTVTTVFTEIQIQIKENLCMLSSIKLKDKKHISILEGTWMTPIPFIIALKEAGLNIFPTRHSHFYVIINNKVPLVEVKAYRQMALLSSAFAFGWSKWNLLCNSTKVVFKVREHLTEACTENPNWALLMFSGDRAQRLKIKEESEAFSEALKEETEFHSTLYHMVKDFASEEAMEKVRSSNCQFVNSVCHMLLSTRLLSYS

SEQ ID NO: 313469 - DNA, 2151 bp, Artificial Sequence
  derived and/or modified sequence
atgagcggcagcaagaagaagaaggtgaccaaggccgagagactgaagctgctgcaggaggaggaggagagaagactgaaggaggaggaggaggccagactgaagtacgagaaggaggagatggagagactggagatccagagaatcgagaaggagaagtggcacagactggaggccaaggacctggagagaagaaacgaggagctggaggagctgtacctgctggagagatgcttccccgaggccgagaagctgaagcaggagaccaagctgctgagccagtggaagcactacatccagtgcgacggcagccccgaccccagcgtggcccaggagatgaacaccttcatcagcctgtggaaggagaagaccaacgagaccttcgaggaggtgatcgagaagagcaaggtggtgctgaacctgatcgagaagctgaagttcatcctgctggagacccccccctgcgacctgcaggacaagaacatcatccagtaccaggagagcatcctgcagctgcaggagctgctgcacctgaagttcggcgtggccaccgagatcctgctgaagcaggccagcaccctggccgacctggacagcggcaacatggagaaggtgatcaaggacgagaacgtgaccctgtacgtgtgggccaacctgaagaagaaccccagacacagaagcgtgagattcagcgagacccagatcggcttcgagatccccagaatcctggccaccagcgacatcgccgtgagactgctgcacacccactacgaccacgtgagcgccctgcaccccgtgagcacccccagcaaggagtacaccagcgccgtgaccgagctggtgaaggacgacgtgaagaacgtggagaaggccatcagcaaggaggtggaggaggagagcaagcagcaggagagaggcagccacctgatccaggaggaggagatcaaggtggaggaggagcagggcgacatcgaggtgaagatgagcagcgccgaggaggagagcgaggccatcaagtgcgagagagagatgaaggtgctgagcgagaccgtgagcgccgcccagctgctgctggtggagaacagcagcgagaagcccgacttcttcgaggacaacgtggtggacctgtgccagttcaccaccctgggcggcgtgtaccacctggacatcctggagctgcccccccagtgcaagcccgtgaagggctggatgatcgtggagatcctgaaggagggcctgcagaagtacacctacccccccgagaccaccgaggagttcgagaccgagaacgccttcccccccatcgaggtgaccctggaggtgcacgagaacgtgatcttcttcgaggaccccgtggtggtgagatgggacgccgagggcaagcactggagaaccgacggcatcagcaacgtgagctacaagcccaaggagagactggtgaccttcagcctggacaccttcggccccgtgaccctgatccaggacgcccacatcaacatgccctaccagagctgggagctgagacccctggacgtgaacaaggtgctgctgaccgtgaccaccgtgttcaccgagatccagatccagatcaaggagaacctgtgcatgctgagcagcatcaagctgaaggacaagaagcacatcagcatcctggagggcacctggatgacccccatccccttcatcatcgccctgaaggaggccggcctgaacatcttccccaccagacacagccacttctacgtgatcatcaacaacaaggtgcccctggtggaggtgaaggcctacagacagatggccctgctgagcagcgccttcgccttcggctggagcaagtggaacctgctgtgcaacagcaccaaggtggtgttcaaggtgagagagcacctgaccgaggcctgcaccgagaaccccaactgggccctgctgatgttcagcggcgacagagcccagagactgaagatcaaggaggagagcgaggccttcagcgaggccctgaaggaggagaccgagttccacagcaccctgtaccacatggtgaaggacttcgccagcgaggaggccatggagaaggtgagaagcagcaactgccagttcgtgaacagcgtgtgccacatgctgctgagcaccagactgctgagctacagctag

SEQ ID NO: 313470 - DNA, 2151 bp, Artificial Sequence
  derived and/or modified sequence
atgtcggggagcaagaagaagaaagtcacaaaagcagagaggctgaaactgctgcaggaggaggaggagcgccgtctgaaggaagaggaagaggcgcgtttaaagtacgagaaggaggaaatggagcggctagaaatacagcggattgaaaaagagaaatggcacaggctagaagcaaaggatctggaaaggaggaacgaggagctcgaagaattgtacttactagaacgatgttttccagaagctgagaaactgaagcaggaaacaaagctgctgagtcagtggaagcactacatccagtgtgatgggtcacctgacccgtcagtcgcacaggaaatgaatacattcatctctttatggaaagaaaaaaccaacgagacttttgaagaggtaattgagaagtccaaggtggttctcaatcttatcgaaaagctgaaattcatcctgcttgagacacccccctgcgacctacaggataaaaacattatccaatatcaggaatctatccttcagctccaggaattgctgcatctcaaatttggggtggctaccgagatcttgctgaaacaggcttctactctggcagatctagattcaggtaacatggagaaggtgatcaaggacgagaatgtgactctgtacgtatgggcaaatctcaagaaaaatccaagacaccgctcagtcaggttttccgagacccaaattggttttgaaatccccagaatcttggccacgtctgacatagccgtgagactcctgcacacccactatgaccacgtgtccgctctgcatcccgtttccactcccagtaaggagtatacttccgcggtaactgaactggtcaaggatgatgtaaagaatgtcgaaaaggcgattagcaaagaagtcgaggaggagtctaagcagcaggagcgcggcagccacttgatccaggaggaggaaattaaggtcgaggaggagcaaggggacatcgaagtgaaaatgagctccgctgaggaggagtcagaagccatcaagtgcgagagagagatgaaggtcttatccgagactgtctccgcggcccaactcttgctcgtcgagaacagctcagaaaagccagacttctttgaggataatgtggtcgacctctgtcaattcactactctggggggagtttatcacctcgatattctagagctacccccgcagtgtaaaccagtcaagggctggatgatcgtggaaattttgaaggaaggtctccaaaaatatacgtatcctcccgaaaccaccgaggaattcgaaactgagaacgctttcccaccaatcgaagtgacgttggaagtccacgaaaatgtgatcttcttcgaggaccccgtggtggtgaggtgggatgccgaaggtaaacactggcgaactgacggcattagcaacgtatcatacaaacccaaagagagattggtcaccttctcgcttgacaccttcggacctgttacgctgatccaggacgctcacattaacatgccttaccaatcttgggaactgcggcccctcgacgttaataaggtgttattaacagtaaccaccgttttcacagaaatacagattcaaatcaaagagaatctctgtatgctttcaagcattaagctaaaggataagaagcatatctcaattctggagggtacatggatgacaccgattcctttcatcatagctctgaaggaagccgggctgaatatcttcccaacccggcacagtcacttttatgtgataatcaataataaagtccctcttgttgaagtgaaagcctaccgccagatggcactcctcagtagcgcctttgcctttggctggagcaaatggaatctcctttgtaatagcacaaaggtggtctttaaggtgagagagcatctgactgaagcctgcaccgaaaaccctaactgggccctgttaatgttctcaggagaccgcgcacagcggctgaaaattaaggaagagagcgaggctttttcagaggccctgaaggaagaaactgagttccattccactttatatcacatggtgaaggattttgcgtccgaagaagccatggagaaggtgaggagcagtaattgtcagttcgtcaacagcgtgtgccacatgctcctcagcaccaggctcctgagctatagctag

SEQ ID NO: 313471 - DNA, 2151 bp, Artificial Sequence
  derived and/or modified sequence
atgagcggcagcaagaagaagaaggtgaccaaggccgagcggctgaagctgctgcaggaggaggaggagcggcggctgaaggaggaggaggaggcccggctgaagtatgagaaggaggagatggagcggctggagatccagagaattgagaaggagaagtggcaccggctggaggccaaggacctggagaggagaaatgaggagctggaggagctgtacctgctggagcgctgcttccctgaggccgagaagctgaagcaggagaccaagctgctgagccagtggaagcactacatccagtgtgatggcagcccagaccccagcgtggcccaggagatgaacaccttcatcagcctgtggaaggagaagaccaatgagacctttgaggaggtgattgagaagagcaaggtggtgctgaacctgattgagaagctgaagttcatcctgctggagaccccaccctgtgacctgcaggacaagaacatcatccagtaccaggagagcatcctgcagctgcaggagctgctgcacctgaagtttggagtggccacagagatcctgctgaagcaggccagcaccctggccgacctggacagcggcaacatggagaaggtgatcaaggatgaaaatgtgaccctgtatgtgtgggccaacctgaagaagaaccccaggcacaggtctgtgcgcttcagcgagacccagattggatttgagatcccccgcatcctggccaccagtgacattgctgtgcggctgctgcacacccactatgaccacgtgtctgccctgcaccctgtgtccacccccagcaaggagtacaccagcgctgtgacagagctggtgaaggatgatgtgaagaatgtggagaaggccatcagcaaggaggtggaggaggagagcaagcagcaggagcggggcagccacctgatccaggaggaggagatcaaggtggaggaggagcagggcgacatcgaggtgaagatgagcagcgctgaggaggagagcgaggccatcaagtgtgagcgggagatgaaggtgctgtctgagaccgtgtctgctgcccagctgctgctggtggagaacagcagcgagaagccagacttctttgaggacaacgtggtggacctgtgccagttcaccaccctgggcggcgtgtaccacctggacatcctggagctgcccccccagtgcaagcctgtgaagggctggatgattgtggagatcctgaaggagggcctgcagaagtacacctacccacctgagaccacagaggagtttgaaacagaaaatgccttcccccccatcgaggtgaccctggaggtgcatgaaaatgtcatcttctttgaagatcctgtggtggtgcgctgggatgctgagggcaagcactggaggacagatggcatcagcaatgtgtcctacaagcccaaggagcggctggtgaccttcagcctggacacctttggacctgtgaccctcatccaggatgcccacatcaacatgccctaccagagctgggagctgcggcccctggatgtgaacaaggtgctgctgactgtgaccaccgtcttcacagagatccagatccagatcaaggagaacctgtgcatgctgagcagcatcaagctgaaggacaagaagcacatcagcatcctggagggcacctggatgacccccatccccttcatcatcgccctgaaggaggccggcctgaacatcttccccaccaggcacagccacttctacgtgatcatcaacaacaaggtgcccctggtggaggtgaaggcctaccggcagatggccctgctgagcagcgcctttgccttcggctggagcaagtggaacctgctgtgcaacagcaccaaggtggtgttcaaggtgcgggagcacctgacagaggcctgcacagagaaccccaactgggccctgctgatgttcagcggggaccgggcccagaggctgaagatcaaggaggagagcgaggccttcagcgaggccctgaaggaggagacagagttccacagcaccctgtaccacatggtgaaggactttgccagcgaggaggccatggagaaggtgcgcagcagcaactgccagtttgtgaacagcgtgtgccacatgctgctgagcacccggctgctgagctacagctag

SEQ ID NO: 313472 - DNA, 2151 bp, Artificial Sequence
  derived and/or modified sequence
atgagcggcagcaagaagaagaaggtgaccaaggccgagcggctgaaacttctacaagaagaggaggaacgcaggctaaaagaagaagaggaggctcggctcaaatatgagaaggaagaaatggaaagattggagattcagcgcatcgagaaggaaaaatggcatcggcttgaggcaaaagatctcgaacgtcgcaatgaggagcttgaggagctgtacctactcgaacgctgcttccccgaagctgagaagctgaagcaagaaacaaaacttctctcgcaatggaagcattacattcagtgcgacggctcgcctgatcccagcgtcgcccaagaaatgaatacctttatctctttgtggaaggaaaagaccaacgaaacctttgaagaggttattgagaaaagcaaggtggtgctcaacctcatcgagaagttgaagtttattctgctggagactcccccatgcgatctgcaggataagaacataatacagtaccaggagtccatccttcagttgcaggagctgcttcatctgaaattcggagtagccacagaaatactgttgaaacaagccagcacattggccgatttagattctggcaacatggaaaaggtcataaaggatgagaatgtcacactttacgtgtgggcaaatcttaagaagaatcctcggcaccggtctgtgcggttttcagaaacacagatcggcttcgagattcctcgaattctggccactagcgatattgcggttaggcttctccacacccactatgatcacgtcagtgctctgcatcccgtgtccactccatccaaagagtatacttctgccgtcaccgaactggtaaaggatgacgtaaaaaacgtcgagaaagcgattagcaaggaggtggaggaagaatcaaaacagcaagaacggggatcacacttgatacaggaggaggaaataaaggtcgaggaggagcaaggtgatatagaagttaagatgtccagcgcggaggaggaatctgaagcaattaaatgtgagcgcgaaatgaaagtgctcagcgaaaccgtgagcgccgcacagcttctgttagtcgaaaactcatccgagaagcctgacttctttgaggacaatgtggtcgacttatgccagtttaccaccctgggtggggtgtatcacctggatattcttgagctgcctcctcagtgcaaaccggtcaaagggtggatgatcgtggagatcctgaaagaagggctgcagaagtatacttatccgccagagaccaccgaagagtttgaaactgaaaacgcctttcctccaatagaggttacactcgaagttcacgagaacgtgatctttttcgaagaccccgtggtggtccgatgggacgcagaaggcaagcactggcgaactgatggaatcagcaatgtgtcttataagccaaaggagaggttggtgacattcagcctggacacttttggccccgtgacactgatccaggacgctcatatcaacatgccttaccagagctgggaactgcggccgctggacgtaaataaagtcctactcaccgtaaccacagtgttcactgaaatccaaatccagattaaggaaaacctgtgtatgctgtcttctattaaacttaaggataaaaagcacatcagcatcttagagggaacctggatgactcccattccattcatcattgccctaaaggaggcaggcttgaatatttttcccacacggcatagccatttttacgtcatcataaacaacaaggtgccactggtggaagtaaaggcctacagacagatggccttacttagctctgccttcgcttttggttggtctaaatggaatctactttgcaattcaactaaagttgtcttcaaggttcgggagcacttgaccgaggcatgtacggagaatcctaattgggcgttactgatgttttctggcgatagagcacaaagactgaaaatcaaagaagaatccgaagcattcagcgaggcattgaaggaggagacagagtttcactccaccctctaccatatggttaaggacttcgcaagtgaagaagccatggagaaggtgcgaagtagtaattgtcagttcgtcaacagcgtctgccacatgctcttgtctactcgccttctttcttatagctag

SEQ ID NO: 313473 - DNA, 2151 bp, Artificial Sequence
  derived and/or modified sequence
atgtccggttctaaaaaaaagaaggtgacaaaggctgagcggttaaaacttcttcaggaggaagaagagcggcgtctgaaagaggaggaagaggcgagactgaaatatgaaaaggaggagatggaacggctcgaaatccagagaattgaaaaagagaagtggcaccgcctggaagcaaaggatctcgaaagacggaacgaggaactggaggagttatatctgctggagcggtgcttccccgaagctgagaagttaaagcaggaaacaaaacttctctcgcagtggaaacattacattcagtgcgatggctccccagacccgagcgttgcccaagagatgaacacattcatctcactgtggaaagagaagactaacgagacattcgaagaagttatcgaaaagagcaaggttgtgctgaacctcattgagaagctcaagttcatcttgctcgaaacccctccttgtgacttgcaggacaagaacatcatccagtaccaggagtccatcctgcagctgcaggagcttcttcatctcaagttcggagtggctactgagattctgctcaaacaggcatctaccctggctgatctggacagtggaaacatggaaaaggtgataaaagatgagaacgtgaccttgtacgtttgggcaaaccttaagaagaacccacgacatcgatctgtcaggttttccgaaacccagatagggttcgagattcctagaatcctggctacctctgacattgctgtccgcctgctgcatacacattatgatcacgtgtccgctttacatcctgtttctaccccatcaaaagagtatacctcagccgttacagaactggtgaaggacgatgtgaagaatgtcgaaaaggccatcagcaaagaggtcgaggaggaaagtaagcaacaagagaggggatctcatttaatccaggaagaagagatcaaggtggaggaagagcagggggatatcgaagtgaagatgtctagcgccgaggaagagtccgaggccatcaagtgcgaaagagaaatgaaggttctcagtgaaacagtttctgccgcacagcttttattggttgaaaacagttcagaaaaacctgacttttttgaagacaatgtcgttgatctgtgccaatttactaccctcggaggtgtttatcatctggacatccttgagctaccaccacaatgtaaacccgtgaagggttggatgattgtggagattcttaaagaaggtctgcaaaaatatacttacccccctgagacaaccgaggaattcgagaccgaaaacgccttccctccgatagaggtgacactcgaagtccatgagaatgtcatcttttttgaggaccctgtggtagtgcggtgggacgcagaggggaaacattggcggactgacggcatttccaacgtctcttataaaccaaaagagagactcgtgaccttttcactcgataccttcggtccggtaacacttatccaggacgctcatatcaacatgccatatcagtcctgggaactgagacctctcgacgttaataaggtcctgcttaccgtcacaactgtttttacagagattcagatacaaattaaggagaacctgtgcatgcttagtagcatcaagctgaaggataaaaaacatatcagtatccttgagggcacctggatgacacccatcccttttatcattgctctgaaggaagcaggccttaatattttccccacaaggcatagccacttttacgtgataatcaacaacaaggtcccactcgtcgaggtaaaggcctatagacaaatggcccttctgagttctgcgttcgcgttcggctggagtaagtggaatctgctttgtaattcaaccaaggtggtgtttaaggtcagagagcatcttaccgaagcctgtaccgagaaccctaactgggctctgcttatgtttagcggcgatcgcgcacagagattgaaaattaaggaggagtccgaggcattcagtgaggcattgaaggaagaaaccgagttccactcaaccctctatcacatggtgaaagactttgcgtctgaggaggccatggagaaagtcagaagcagcaactgtcagtttgtaaattctgtgtgccatatgctgctgtccaccagactgctctcatactcttag

SEQ ID NO: 313474 - DNA, 2361 bp, Artificial Sequence
  derived and/or modified sequence
gtcgtccgggcaacccgggagcgtttgtccacacaatttctgctccgactctgcggactactgcagtggagcttgactcttaatgtctggcagtaagaaaaagaaagtcaccaaagctgaacgattgaagctgctacaagaggaggaggagagacgactgaaagaggaagaggaagcccgtttgaaatatgagaaagaagaaatggaaaggcttgaaatacagcgaattgagaaagaaaaatggcatcgacttgaagcaaaagatctagaaaggagaaatgaagaacttgaagaactttatttattagagaggtgttttcctgaagcagagaaattgaaacaggaaactaaattgctttctcagtggaagcactacattcaatgtgatgggagtcctgatccttcagtagcccaagaaatgaacacgtttattagtttgtggaaagagaaaacaaatgagacttttgaggaagtgattgagaagagtaaagtagtgctaaatttaattgagaaattgaaatttattttactggaaactccaccatgtgatttgcaagataaaaatataatacagtaccaagaatcaatactacaactgcaggagctccttcatcttaaattcggtgtagccacagaaatacttctcaaacaagctagtactttggcagatctggacagtggaaatatggaaaaagtcattaaagatgaaaatgttactctgtatgtgtgggcaaacctcaagaagaatccaaggcacagaagtgttagattctctgaaacacaaattggatttgagattccaaggatattagcaacaagtgacattgctgtacgactcctgcatacccactatgatcatgtttctgcactgcaccctgtttcaacaccatcaaaagaatacacttctgcagtaactgagcttgtcaaagatgatgttaagaatgtagaaaaagcaatcagcaaggaggtcgaagaagagtccaaacaacaagaaagagggtctcacttaattcaggaggaagaaataaaagttgaggaggaacaaggtgatattgaagtgaaaatgagttctgctgaggaagaatctgaagccataaaatgtgaacgagagatgaaagtattaagtgaaactgtttcagcagcacagttgttgctggtagagaattcttctgaaaagccagatttctttgaagacaatgtggtggatttatgccagttcacaactctgggtggagtataccacttggatattttggagcttcctccacagtgtaaaccagtgaagggatggatgattgtggaaatactcaaagaaggattacagaaatacacatatcctccggaaactacagaagagtttgagacagaaaatgctttcccacctatagaggtcacacttgaggttcatgagaatgtaatcttttttgaggatcctgtggttgtaaggtgggatgctgaaggtaaacattggagaactgatggcatcagcaatgtatcctacaaaccaaaagaaagacttgtaacattcagcctggacacctttggccctgttaccttgattcaagatgctcatattaacatgccgtaccagtcatgggaactaagaccacttgatgtaaataaagtacttttaactgtgactacagtatttactgagattcaaatacaaattaaggaaaacctctgcatgttatcttcaatcaaactaaaagacaagaaacacatctctattttggaaggaacctggatgactcctattcctttcattattgctttgaaagaagctggactgaatatctttcctactagacactctcatttttatgttattataaacaataaggttcctttggtagaagtgaaagcttatcgacagatggccctactaagttctgcttttgcatttggttggagcaagtggaacctactatgtaattctacaaaagtcgtatttaaggtgagggaacaccttactgaagcatgtactgagaatcctaattgggcccttttaatgtttagtggtgacagagcacaaagactgaagatcaaggaagagagtgaggcattttctgaagcacttaaagaagaaactgagtttcattctactttatatcacatggtgaaggattttgcttctgaggaagcaatggagaaagtcaggagttccaactgtcagtttgtcaactctgtgtgccacatgctgctctctaccagattgctcagctactcctaacctccacttacaaactgtattgtaagtatgaagaaccaagcatggtgaaagacaggtatttctgcaacacaatgtaatgagtgaatgaatacatttcaaatcaactattaaaaattttctaatctgca

SEQ ID NO: 313475 - DNA, 2417 bp, Artificial Sequence
  derived and/or modified sequence
gtcgtccgggcaacccgggagcgtttgtccacacaatttctgctccgactctgcggactactgcagtggagcttgactcttaatgggtcccaaagcaaaaaaggaacactgtcatcacaaacaggcttcagtggccaaagatctggcagtaagaaaaagaaagtcaccaaagctgaacgattgaagctgctacaagaggaggaggagagacgactgaaagaggaagaggaagcccgtttgaaatatgagaaagaagaaatggaaaggcttgaaatacagcgaattgagaaagaaaaatggcatcgacttgaagcaaaagatctagaaaggagaaatgaagaacttgaagaactttatttattagagaggtgttttcctgaagcagagaaattgaaacaggaaactaaattgctttctcagtggaagcactacattcaatgtgatgggagtcctgatccttcagtagcccaagaaatgaacacgtttattagtttgtggaaagagaaaacaaatgagacttttgaggaagtgattgagaagagtaaagtagtgctaaatttaattgagaaattgaaatttattttactggaaactccaccatgtgatttgcaagataaaaatataatacagtaccaagaatcaatactacaactgcaggagctccttcatcttaaattcggtgtagccacagaaatacttctcaaacaagctagtactttggcagatctggacagtggaaatatggaaaaagtcattaaagatgaaaatgttactctgtatgtgtgggcaaacctcaagaagaatccaaggcacagaagtgttagattctctgaaacacaaattggatttgagattccaaggatattagcaacaagtgacattgctgtacgactcctgcatacccactatgatcatgtttctgcactgcaccctgtttcaacaccatcaaaagaatacacttctgcagtaactgagcttgtcaaagatgatgttaagaatgtagaaaaagcaatcagcaaggaggtcgaagaagagtccaaacaacaagaaagagggtctcacttaattcaggaggaagaaataaaagttgaggaggaacaaggtgatattgaagtgaaaatgagttctgctgaggaagaatctgaagccataaaatgtgaacgagagatgaaagtattaagtgaaactgtttcagcagcacagttgttgctggtagagaattcttctgaaaagccagatttctttgaagacaatgtggtggatttatgccagttcacaactctgggtggagtataccacttggatattttggagcttcctccacagtgtaaaccagtgaagggatggatgattgtggaaatactcaaagaaggattacagaaatacacatatcctccggaaactacagaagagtttgagacagaaaatgctttcccacctatagaggtcacacttgaggttcatgagaatgtaatcttttttgaggatcctgtggttgtaaggtgggatgctgaaggtaaacattggagaactgatggcatcagcaatgtatcctacaaaccaaaagaaagacttgtaacattcagcctggacacctttggccctgttaccttgattcaagatgctcatattaacatgccgtaccagtcatgggaactaagaccacttgatgtaaataaagtacttttaactgtgactacagtatttactgagattcaaatacaaattaaggaaaacctctgcatgttatcttcaatcaaactaaaagacaagaaacacatctctattttggaaggaacctggatgactcctattcctttcattattgctttgaaagaagctggactgaatatctttcctactagacactctcatttttatgttattataaacaataaggttcctttggtagaagtgaaagcttatcgacagatggccctactaagttctgcttttgcatttggttggagcaagtggaacctactatgtaattctacaaaagtcgtatttaaggtgagggaacaccttactgaagcatgtactgagaatcctaattgggcccttttaatgtttagtggtgacagagcacaaagactgaagatcaaggaagagagtgaggcattttctgaagcacttaaagaagaaactgagtttcattctactttatatcacatggtgaaggattttgcttctgaggaagcaatggagaaagtcaggagttccaactgtcagtttgtcaactctgtgtgccacatgctgctctctaccagattgctcagctactcctaacctccacttacaaactgtattgtaagtatgaagaaccaagcatggtgaaagacaggtatttctgcaacacaatgtaatgagtgaatgaatacatttcaaatcaactattaaaaattttctaatctgca

SEQ ID NO: 313476 - protein, 657 aa, Artificial Sequence
  derived and/or modified sequence
MDLERRNEELEELYLLERCFPEAEKLKQETKLLSQWKHYIQCDGSPDPSVAQEMNTFISLWKEKTNETFEEVIEKSKVVLNLIEKLKFILLETPPCDLQDKNIIQYQESILQLQELLHLKFGVATEILLKQASTLADLDSGNMEKVIKDENVTLYVWANLKKNPRHRSVRFSETQIGFEIPRILATSDIAVRLLHTHYDHVSALHPVSTPSKEYTSAVTELVKDDVKNVEKAISKEVEEESKQQERGSHLIQEEEIKVEEEQGDIEVKMSSAEEESEAIKCEREMKVLSETVSAAQLLLVENSSEKPDFFEDNVVDLCQFTTLGGVYHLDILELPPQCKPVKGWMIVEILKEGLQKYTYPPETTEEFETENAFPPIEVTLEVHENVIFFEDPVVVRWDAEGKHWRTDGISNVSYKPKERLVTFSLDTFGPVTLIQDAHINMPYQSWELRPLDVNKVLLTVTTVFTEIQIQIKENLCMLSSIKLKDKKHISILEGTWMTPIPFIIALKEAGLNIFPTRHSHFYVIINNKVPLVEVKAYRQMALLSSAFAFGWSKWNLLCNSTKVVFKVREHLTEACTENPNWALLMFSGDRAQRLKIKEESEAFSEALKEETEFHSTLYHMVKDFASEEAMEKVRSSNCQFVNSVCHMLLSTRLLSYS

SEQ ID NO: 313477 - DNA, 2169 bp, Artificial Sequence
  derived and/or modified sequence
atgggccccaaggccaagaagagcggcagcaagaagaagaaggtgaccaaggccgagagactgaagctgctgcaggaggaggaggagagaagactgaaggaggaggaggaggccagactgaagtacgagaaggaggagatggagagactggagatccagagaatcgagaaggagaagtggcacagactggaggccaaggacctggagagaagaaacgaggagctggaggagctgtacctgctggagagatgcttccccgaggccgagaagctgaagcaggagaccaagctgctgagccagtggaagcactacatccagtgcgacggcagccccgaccccagcgtggcccaggagatgaacaccttcatcagcctgtggaaggagaagaccaacgagaccttcgaggaggtgatcgagaagagcaaggtggtgctgaacctgatcgagaagctgaagttcatcctgctggagacccccccctgcgacctgcaggacaagaacatcatccagtaccaggagagcatcctgcagctgcaggagctgctgcacctgaagttcggcgtggccaccgagatcctgctgaagcaggccagcaccctggccgacctggacagcggcaacatggagaaggtgatcaaggacgagaacgtgaccctgtacgtgtgggccaacctgaagaagaaccccagacacagaagcgtgagattcagcgagacccagatcggcttcgagatccccagaatcctggccaccagcgacatcgccgtgagactgctgcacacccactacgaccacgtgagcgccctgcaccccgtgagcacccccagcaaggagtacaccagcgccgtgaccgagctggtgaaggacgacgtgaagaacgtggagaaggccatcagcaaggaggtggaggaggagagcaagcagcaggagagaggcagccacctgatccaggaggaggagatcaaggtggaggaggagcagggcgacatcgaggtgaagatgagcagcgccgaggaggagagcgaggccatcaagtgcgagagagagatgaaggtgctgagcgagaccgtgagcgccgcccagctgctgctggtggagaacagcagcgagaagcccgacttcttcgaggacaacgtggtggacctgtgccagttcaccaccctgggcggcgtgtaccacctggacatcctggagctgcccccccagtgcaagcccgtgaagggctggatgatcgtggagatcctgaaggagggcctgcagaagtacacctacccccccgagaccaccgaggagttcgagaccgagaacgccttcccccccatcgaggtgaccctggaggtgcacgagaacgtgatcttcttcgaggaccccgtggtggtgagatgggacgccgagggcaagcactggagaaccgacggcatcagcaacgtgagctacaagcccaaggagagactggtgaccttcagcctggacaccttcggccccgtgaccctgatccaggacgcccacatcaacatgccctaccagagctgggagctgagacccctggacgtgaacaaggtgctgctgaccgtgaccaccgtgttcaccgagatccagatccagatcaaggagaacctgtgcatgctgagcagcatcaagctgaaggacaagaagcacatcagcatcctggagggcacctggatgacccccatccccttcatcatcgccctgaaggaggccggcctgaacatcttccccaccagacacagccacttctacgtgatcatcaacaacaaggtgcccctggtggaggtgaaggcctacagacagatggccctgctgagcagcgccttcgccttcggctggagcaagtggaacctgctgtgcaacagcaccaaggtggtgttcaaggtgagagagcacctgaccgaggcctgcaccgagaaccccaactgggccctgctgatgttcagcggcgacagagcccagagactgaagatcaaggaggagagcgaggccttcagcgaggccctgaaggaggagaccgagttccacagcaccctgtaccacatggtgaaggacttcgccagcgaggaggccatggagaaggtgagaagcagcaactgccagttcgtgaacagcgtgtgccacatgctgctgagcaccagactgctgagctacagctag

SEQ ID NO: 313478 - DNA, 2031 bp, Artificial Sequence
  derived and/or modified sequence
atggagagactggagatccagagaatcgagaaggagaagtggcacagactggaggccaaggacctggagagaagaaacgaggagctggaggagctgtacctgctggagagatgcttccccgaggccgagaagctgaagcaggagaccaagctgctgagccagtggaagcactacatccagtgcgacggcagccccgaccccagcgtggcccaggagatgaacaccttcatcagcctgtggaaggagaagaccaacgagaccttcgaggaggtgatcgagaagagcaaggtggtgctgaacctgatcgagaagctgaagttcatcctgctggagacccccccctgcgacctgcaggacaagaacatcatccagtaccaggagagcatcctgcagctgcaggagctgctgcacctgaagttcggcgtggccaccgagatcctgctgaagcaggccagcaccctggccgacctggacagcggcaacatggagaaggtgatcaaggacgagaacgtgaccctgtacgtgtgggccaacctgaagaagaaccccagacacagaagcgtgagattcagcgagacccagatcggcttcgagatccccagaatcctggccaccagcgacatcgccgtgagactgctgcacacccactacgaccacgtgagcgccctgcaccccgtgagcacccccagcaaggagtacaccagcgccgtgaccgagctggtgaaggacgacgtgaagaacgtggagaaggccatcagcaaggaggtggaggaggagagcaagcagcaggagagaggcagccacctgatccaggaggaggagatcaaggtggaggaggagcagggcgacatcgaggtgaagatgagcagcgccgaggaggagagcgaggccatcaagtgcgagagagagatgaaggtgctgagcgagaccgtgagcgccgcccagctgctgctggtggagaacagcagcgagaagcccgacttcttcgaggacaacgtggtggacctgtgccagttcaccaccctgggcggcgtgtaccacctggacatcctggagctgcccccccagtgcaagcccgtgaagggctggatgatcgtggagatcctgaaggagggcctgcagaagtacacctacccccccgagaccaccgaggagttcgagaccgagaacgccttcccccccatcgaggtgaccctggaggtgcacgagaacgtgatcttcttcgaggaccccgtggtggtgagatgggacgccgagggcaagcactggagaaccgacggcatcagcaacgtgagctacaagcccaaggagagactggtgaccttcagcctggacaccttcggccccgtgaccctgatccaggacgcccacatcaacatgccctaccagagctgggagctgagacccctggacgtgaacaaggtgctgctgaccgtgaccaccgtgttcaccgagatccagatccagatcaaggagaacctgtgcatgctgagcagcatcaagctgaaggacaagaagcacatcagcatcctggagggcacctggatgacccccatccccttcatcatcgccctgaaggaggccggcctgaacatcttccccaccagacacagccacttctacgtgatcatcaacaacaaggtgcccctggtggaggtgaaggcctacagacagatggccctgctgagcagcgccttcgccttcggctggagcaagtggaacctgctgtgcaacagcaccaaggtggtgttcaaggtgagagagcacctgaccgaggcctgcaccgagaaccccaactgggccctgctgatgttcagcggcgacagagcccagagactgaagatcaaggaggagagcgaggccttcagcgaggccctgaaggaggagaccgagttccacagcaccctgtaccacatggtgaaggacttcgccagcgaggaggccatggagaaggtgagaagcagcaactgccagttcgtgaacagcgtgtgccacatgctgctgagcaccagactgctgagctacagctag

SEQ ID NO: 313479 - DNA, 1974 bp, Artificial Sequence
  derived and/or modified sequence
atggacctggagagaagaaacgaggagctggaggagctgtacctgctggagagatgcttccccgaggccgagaagctgaagcaggagaccaagctgctgagccagtggaagcactacatccagtgcgacggcagccccgaccccagcgtggcccaggagatgaacaccttcatcagcctgtggaaggagaagaccaacgagaccttcgaggaggtgatcgagaagagcaaggtggtgctgaacctgatcgagaagctgaagttcatcctgctggagacccccccctgcgacctgcaggacaagaacatcatccagtaccaggagagcatcctgcagctgcaggagctgctgcacctgaagttcggcgtggccaccgagatcctgctgaagcaggccagcaccctggccgacctggacagcggcaacatggagaaggtgatcaaggacgagaacgtgaccctgtacgtgtgggccaacctgaagaagaaccccagacacagaagcgtgagattcagcgagacccagatcggcttcgagatccccagaatcctggccaccagcgacatcgccgtgagactgctgcacacccactacgaccacgtgagcgccctgcaccccgtgagcacccccagcaaggagtacaccagcgccgtgaccgagctggtgaaggacgacgtgaagaacgtggagaaggccatcagcaaggaggtggaggaggagagcaagcagcaggagagaggcagccacctgatccaggaggaggagatcaaggtggaggaggagcagggcgacatcgaggtgaagatgagcagcgccgaggaggagagcgaggccatcaagtgcgagagagagatgaaggtgctgagcgagaccgtgagcgccgcccagctgctgctggtggagaacagcagcgagaagcccgacttcttcgaggacaacgtggtggacctgtgccagttcaccaccctgggcggcgtgtaccacctggacatcctggagctgcccccccagtgcaagcccgtgaagggctggatgatcgtggagatcctgaaggagggcctgcagaagtacacctacccccccgagaccaccgaggagttcgagaccgagaacgccttcccccccatcgaggtgaccctggaggtgcacgagaacgtgatcttcttcgaggaccccgtggtggtgagatgggacgccgagggcaagcactggagaaccgacggcatcagcaacgtgagctacaagcccaaggagagactggtgaccttcagcctggacaccttcggccccgtgaccctgatccaggacgcccacatcaacatgccctaccagagctgggagctgagacccctggacgtgaacaaggtgctgctgaccgtgaccaccgtgttcaccgagatccagatccagatcaaggagaacctgtgcatgctgagcagcatcaagctgaaggacaagaagcacatcagcatcctggagggcacctggatgacccccatccccttcatcatcgccctgaaggaggccggcctgaacatcttccccaccagacacagccacttctacgtgatcatcaacaacaaggtgcccctggtggaggtgaaggcctacagacagatggccctgctgagcagcgccttcgccttcggctggagcaagtggaacctgctgtgcaacagcaccaaggtggtgttcaaggtgagagagcacctgaccgaggcctgcaccgagaaccccaactgggccctgctgatgttcagcggcgacagagcccagagactgaagatcaaggaggagagcgaggccttcagcgaggccctgaaggaggagaccgagttccacagcaccctgtaccacatggtgaaggacttcgccagcgaggaggccatggagaaggtgagaagcagcaactgccagttcgtgaacagcgtgtgccacatgctgctgagcaccagactgctgagctacagctag

SEQ ID NO: 313480 - DNA, 2169 bp, Artificial Sequence
  derived and/or modified sequence
atgggcccaaaggcgaagaagagtggaagtaagaaaaagaaggttaccaaggccgaacgcttgaaattactccaggaagaagaagagcggcggctcaaagaggaggaagaagcccgtctgaagtacgaaaaggaggagatggaacgcctggaaatccaaaggatcgagaaagagaagtggcatcggttggaggcaaaagaccttgaacgacgaaatgaggagctggaggagctttacctgctggagcggtgctttcccgaggcagagaaattgaaacaagagaccaagttgttgagccagtggaagcattatattcagtgtgacgggagcccagacccatctgtagctcaagaaatgaacacgtttatctcattatggaaggagaagacaaacgaaactttcgaagaggtcattgaaaagagtaaggtggtattaaatttgatcgagaagctgaaattcatactccttgaaactccgccttgtgatctgcaagacaagaatatcatccagtatcaggagtctatcctgcagctgcaagagctgcttcatctcaagtttggcgtggccaccgaaatactgctcaaacaagcaagtaccctggccgacctggatagcggtaacatggagaaagtcataaaagatgaaaacgtgactctatatgtgtgggcaaaccttaaaaagaacccgcggcatcgaagcgtgcgtttttccgaaacccaaatcggatttgaaataccccgcattttggcaacatccgacatcgcggtgaggctactgcatactcactacgaccacgtctcggctctccaccccgtgtcgactccctcgaaagaatatacctccgctgttacagagctggtcaaggatgacgtgaagaatgtggagaaggccatttccaaagaggtggaggaagaaagcaaacagcaggagcgtggctcccatctgattcaggaggaggaaataaaggtggaggaggagcagggcgacatcgaggtgaagatgagctcagctgaagaagagtccgaagccatcaagtgcgaaagggaaatgaaggtactttccgagacagtctccgctgcccagctcctgctggtggaaaactccagtgaaaaaccggacttcttcgaagacaacgtggtggatctgtgtcagtttaccacccttgggggtgtgtatcacctcgacattttagagttacccccacaatgcaagccggtaaaaggttggatgatcgttgagatcttgaaagagggattgcagaagtatacctaccctcccgagactactgaagagttcgagacagaaaacgcttttccccccatagaagttacattagaggttcacgaaaatgtcattttctttgaggatcctgtggttgtgcgttgggacgccgagggtaaacactggcggactgacggaatctctaacgtgagttacaaaccaaaagagcggctggtgacattctcgctcgacacctttggcccggtgacacttatccaggatgcacatattaacatgccctatcaaagctgggaattgaggcccctagacgtgaataaggtgctcctgaccgtaaccaccgtctttaccgagattcagatacagatcaaggaaaacttatgtatgctctcctctataaagctgaaagacaagaaacacatctctatccttgaaggcacatggatgacacccattccctttattatagctctgaaagaggccggcctgaacattttccccacccgacatagccacttctacgtgatcattaataataaggttcccctggtggaagtgaaggcctaccggcagatggcactgctgagctccgctttcgctttcggctggagcaaatggaacctgttgtgcaattcaactaaggtggtttttaaagtcagggagcatctcaccgaggcatgcacagagaaccctaactgggccttattaatgttcagtggggaccgcgcccaaaggctgaaaattaaggaggagagtgaggccttttccgaggcactgaaggaagagacagaatttcattctacgctgtatcacatggtgaaggatttcgccagcgaggaggctatggaaaaggtgcgctcgtcaaattgtcagtttgtgaatagtgtgtgtcacatgttactctcgacaagattgctttcgtatagctag

SEQ ID NO: 313481 - DNA, 2031 bp, Artificial Sequence
  derived and/or modified sequence
atggagcgactggagatccagcggattgaaaaggaaaagtggcaccggctggaagccaaggatctggagcggcgtaatgaagagttggaagagttgtacctgctggagcgctgcttccctgaggctgagaaactgaagcaagaaacaaaactcttatcacagtggaagcactatatccagtgcgatggctcacctgatcctagcgtggctcaagagatgaacacatttatttcactttggaaggaaaaaaccaatgagacatttgaggaggttatcgagaaaagtaaggtggttctcaatttgattgagaagttgaaattcattttactggaaacacctccatgtgatctccaggacaagaatataatccagtatcaagaatccatcctacaactgcaggaactcttacatcttaagttcggagttgcaacggaaatcctgctgaaacaggcgtccacactggcagacctcgactctgggaatatggaaaaagttataaaagatgaaaatgtgacactatacgtctgggcgaacctgaagaaaaaccccagacacaggtccgtcagattctctgagacacagatcgggttcgagattccaaggattctggccacatcagacattgctgtgcggttgctgcacacccattacgaccatgtgtccgcactgcaccccgtaagcactccctctaaggaatatacttccgcagttactgagctcgttaaagatgatgtgaaaaacgtagaaaaagccatttccaaagaagtggaagaggagagcaaacagcaagagagagggtcccacctgatacaagaggaagagataaaggtagaggaggagcagggcgatatcgaggtgaagatgtcctccgctgaggaggaaagtgaggctattaaatgtgagcgggaaatgaaggtgctctctgagactgtctctgcagctcaactgctccttgttgagaactctagcgaaaaacctgatttttttgaggacaacgtagttgacttgtgccagttcaccaccctcggcggtgtgtatcatctcgatatacttgaactcccgccgcagtgcaaacccgtcaaggggtggatgattgtggagattctgaaggagggactgcaaaaatacacttatccccctgagactacagaagaattcgagaccgaaaacgcctttccaccaattgaggtcactctggaagtgcacgagaatgtaattttctttgaagatcccgtcgtagtccggtgggacgccgagggaaagcattggcggaccgatggaatttccaacgtttcctacaagcccaaagagcgcctcgttaccttttccctcgacacatttggacctgtcactctcatccaagacgcgcacatcaacatgccctaccaatcttgggaactgcgacccctggatgtcaacaaagtgctcctgacagtgactactgtattcactgagatacagattcagatcaaggaaaatctttgcatgctgtcctcaatcaaattgaaagacaaaaagcacatcagtatcctcgaaggtacctggatgacccctattccattcattattgctctgaaagaggcagggctgaatatatttccaacacgacatagtcacttctacgtgatcattaacaataaggtgccactcgtggaggtgaaggcatacaggcagatggccctcctgagtagtgcctttgccttcgggtggtctaaatggaacctcctctgtaatagcacaaaagttgtgtttaaggtcagggagcatttgacggaagcgtgtacagaaaaccctaactgggcccttctaatgttctctggtgacagagcccagcgactgaaaattaaggaagaaagtgaagccttctctgaagcattaaaggaagaaaccgagtttcacagcacattgtaccatatggtgaaggatttcgcttcagaggaagccatggagaaggttaggtcttccaactgtcaattcgttaattcagtgtgccacatgcttctgtccacaagattactcagctattcatag

SEQ ID NO: 313482 - DNA, 1974 bp, Artificial Sequence
  derived and/or modified sequence
atggatctggaacgtagaaacgaggaattagaggagctgtatctcttagagaggtgcttccccgaggccgaaaaattaaagcaagaaactaaactgcttagccagtggaaacattatatccaatgcgacgggtcccccgatccttctgttgcccaagagatgaacacatttatttccctgtggaaagagaaaaccaatgaaacctttgaggaggtcatcgaaaagtcaaaggtggtcttgaaccttatagaaaaattaaaattcatactacttgaaacccctccctgcgaccttcaggacaaaaacataattcagtaccaggagtctatattgcaactccaagaactactccatctcaaatttggagtggctacggagatactcttgaaacaggcttcaacccttgcggatctggatagcggcaatatggaaaaggttatcaaggacgaaaatgtgacactatacgtttgggcgaacctcaaaaagaatccccgccataggagcgtgcggttttctgagacccagattggcttcgaaatccccagaattctcgccacttccgatatcgccgttagacttctccacacccactacgaccacgtgtctgcactgcacccagtgagcactccaagcaaggagtacacctctgccgtgacagaactcgtgaaagatgatgtgaaaaacgtggagaaagccattagtaaggaagtggaggaagagagcaagcagcaagagcgcggttcccatttgatacaggaggaggagataaaggtggaggaagaacagggagatatcgaagtgaagatgtccagcgctgaggaggagagcgaggctatcaagtgcgaacgggaaatgaaagtgctaagtgagactgtatccgcagcccaactgctcctcgttgaaaattcttccgagaagcctgatttcttcgaagacaacgtggtcgatctctgtcaatttactacactgggaggagtttatcaccttgacatcctggaactgcctcctcaatgtaagcctgtcaagggttggatgatcgtagaaattctgaaggaagggctacaaaaatacacctacccacctgaaacaactgaggaattcgagacggaaaacgcttttccgcccattgaggttacgctggaggttcacgagaatgtgatcttcttcgaagatccagttgtagttagatgggatgccgaagggaaacactggcggactgacgggatctcaaacgttagttataaaccaaaggaaaggctcgtcacattcagcctcgacacattcggacctgtgacactgattcaagatgcgcatatcaatatgccataccaaagttgggaactgcggccactcgatgtcaataaagtgctgcttactgtcactacagtatttacggagatccagattcagatcaaggaaaacctctgtatgttgtcatcaatcaaactcaaggataaaaaacacatcagcattctggagggcacatggatgacccctattccgttcataattgcactgaaggaggccggactgaacatatttcccacccggcactctcacttctacgttatcattaacaataaagttccgctggtggaagtgaaggcctaccgccagatggccttgctgtcttccgcttttgctttcggttggtctaaatggaatctgctgtgcaacagtaccaaagtcgttttcaaggtcagggagcacctgaccgaggcctgcacagagaacccaaattgggctcttttgatgttcagtggcgatagagcccaaaggctgaagattaaggaggaaagcgaagcatttagtgaggccctcaaggaagaaactgaatttcactctactctttaccatatggtcaaagattttgcatccgaggaagctatggagaaggtgaggtctagtaattgtcaattcgttaattctgtatgccacatgctgctgtccactcgtcttttgtcttattcgtag

SEQ ID NO: 313483 - DNA, 2169 bp, Artificial Sequence
  derived and/or modified sequence
atgggccccaaggccaagaagagcggcagcaagaagaagaaggtgaccaaggccgagcggctgaagctgctgcaggaggaggaggagcggcggctgaaggaggaggaggaggcccggctgaagtatgagaaggaggagatggagcggctggagatccagagaattgagaaggagaagtggcaccggctggaggccaaggacctggagaggagaaatgaggagctggaggagctgtacctgctggagcgctgcttccctgaggccgagaagctgaagcaggagaccaagctgctgagccagtggaagcactacatccagtgtgatggcagcccagaccccagcgtggcccaggagatgaacaccttcatcagcctgtggaaggagaagaccaatgagacctttgaggaggtgattgagaagagcaaggtggtgctgaacctgattgagaagctgaagttcatcctgctggagaccccaccctgtgacctgcaggacaagaacatcatccagtaccaggagagcatcctgcagctgcaggagctgctgcacctgaagtttggagtggccacagagatcctgctgaagcaggccagcaccctggccgacctggacagcggcaacatggagaaggtgatcaaggatgaaaatgtgaccctgtatgtgtgggccaacctgaagaagaaccccaggcacaggtctgtgcgcttcagcgagacccagattggatttgagatcccccgcatcctggccaccagtgacattgctgtgcggctgctgcacacccactatgaccacgtgtctgccctgcaccctgtgtccacccccagcaaggagtacaccagcgctgtgacagagctggtgaaggatgatgtgaagaatgtggagaaggccatcagcaaggaggtggaggaggagagcaagcagcaggagcggggcagccacctgatccaggaggaggagatcaaggtggaggaggagcagggcgacatcgaggtgaagatgagcagcgctgaggaggagagcgaggccatcaagtgtgagcgggagatgaaggtgctgtctgagaccgtgtctgctgcccagctgctgctggtggagaacagcagcgagaagccagacttctttgaggacaacgtggtggacctgtgccagttcaccaccctgggcggcgtgtaccacctggacatcctggagctgcccccccagtgcaagcctgtgaagggctggatgattgtggagatcctgaaggagggcctgcagaagtacacctacccacctgagaccacagaggagtttgaaacagaaaatgccttcccccccatcgaggtgaccctggaggtgcatgaaaatgtcatcttctttgaagatcctgtggtggtgcgctgggatgctgagggcaagcactggaggacagatggcatcagcaatgtgtcctacaagcccaaggagcggctggtgaccttcagcctggacacctttggacctgtgaccctcatccaggatgcccacatcaacatgccctaccagagctgggagctgcggcccctggatgtgaacaaggtgctgctgactgtgaccaccgtcttcacagagatccagatccagatcaaggagaacctgtgcatgctgagcagcatcaagctgaaggacaagaagcacatcagcatcctggagggcacctggatgacccccatccccttcatcatcgccctgaaggaggccggcctgaacatcttccccaccaggcacagccacttctacgtgatcatcaacaacaaggtgcccctggtggaggtgaaggcctaccggcagatggccctgctgagcagcgcctttgccttcggctggagcaagtggaacctgctgtgcaacagcaccaaggtggtgttcaaggtgcgggagcacctgacagaggcctgcacagagaaccccaactgggccctgctgatgttcagcggggaccgggcccagaggctgaagatcaaggaggagagcgaggccttcagcgaggccctgaaggaggagacagagttccacagcaccctgtaccacatggtgaaggactttgccagcgaggaggccatggagaaggtgcgcagcagcaactgccagtttgtgaacagcgtgtgccacatgctgctgagcacccggctgctgagctacagctag

SEQ ID NO: 313484 - DNA, 2031 bp, Artificial Sequence
  derived and/or modified sequence
atggagcggctggagatccagagaattgagaaggagaagtggcaccggctggaggccaaggacctggagaggagaaatgaggagctggaggagctgtacctgctggagcgctgcttccctgaggccgagaagctgaagcaggagaccaagctgctgagccagtggaagcactacatccagtgtgatggcagcccagaccccagcgtggcccaggagatgaacaccttcatcagcctgtggaaggagaagaccaatgagacctttgaggaggtgattgagaagagcaaggtggtgctgaacctgattgagaagctgaagttcatcctgctggagaccccaccctgtgacctgcaggacaagaacatcatccagtaccaggagagcatcctgcagctgcaggagctgctgcacctgaagtttggagtggccacagagatcctgctgaagcaggccagcaccctggccgacctggacagcggcaacatggagaaggtgatcaaggatgaaaatgtgaccctgtatgtgtgggccaacctgaagaagaaccccaggcacaggtctgtgcgcttcagcgagacccagattggatttgagatcccccgcatcctggccaccagtgacattgctgtgcggctgctgcacacccactatgaccacgtgtctgccctgcaccctgtgtccacccccagcaaggagtacaccagcgctgtgacagagctggtgaaggatgatgtgaagaatgtggagaaggccatcagcaaggaggtggaggaggagagcaagcagcaggagcggggcagccacctgatccaggaggaggagatcaaggtggaggaggagcagggcgacatcgaggtgaagatgagcagcgctgaggaggagagcgaggccatcaagtgtgagcgggagatgaaggtgctgtctgagaccgtgtctgctgcccagctgctgctggtggagaacagcagcgagaagccagacttctttgaggacaacgtggtggacctgtgccagttcaccaccctgggcggcgtgtaccacctggacatcctggagctgcccccccagtgcaagcctgtgaagggctggatgattgtggagatcctgaaggagggcctgcagaagtacacctacccacctgagaccacagaggagtttgaaacagaaaatgccttcccccccatcgaggtgaccctggaggtgcatgaaaatgtcatcttctttgaagatcctgtggtggtgcgctgggatgctgagggcaagcactggaggacagatggcatcagcaatgtgtcctacaagcccaaggagcggctggtgaccttcagcctggacacctttggacctgtgaccctcatccaggatgcccacatcaacatgccctaccagagctgggagctgcggcccctggatgtgaacaaggtgctgctgactgtgaccaccgtcttcacagagatccagatccagatcaaggagaacctgtgcatgctgagcagcatcaagctgaaggacaagaagcacatcagcatcctggagggcacctggatgacccccatccccttcatcatcgccctgaaggaggccggcctgaacatcttccccaccaggcacagccacttctacgtgatcatcaacaacaaggtgcccctggtggaggtgaaggcctaccggcagatggccctgctgagcagcgcctttgccttcggctggagcaagtggaacctgctgtgcaacagcaccaaggtggtgttcaaggtgcgggagcacctgacagaggcctgcacagagaaccccaactgggccctgctgatgttcagcggggaccgggcccagaggctgaagatcaaggaggagagcgaggccttcagcgaggccctgaaggaggagacagagttccacagcaccctgtaccacatggtgaaggactttgccagcgaggaggccatggagaaggtgcgcagcagcaactgccagtttgtgaacagcgtgtgccacatgctgctgagcacccggctgctgagctacagctag

SEQ ID NO: 313485 - DNA, 1974 bp, Artificial Sequence
  derived and/or modified sequence
atggacctggagaggagaaatgaggagctggaggagctgtacctgctggagcgctgcttccctgaggccgagaagctgaagcaggagaccaagctgctgagccagtggaagcactacatccagtgtgatggcagcccagaccccagcgtggcccaggagatgaacaccttcatcagcctgtggaaggagaagaccaatgagacctttgaggaggtgattgagaagagcaaggtggtgctgaacctgattgagaagctgaagttcatcctgctggagaccccaccctgtgacctgcaggacaagaacatcatccagtaccaggagagcatcctgcagctgcaggagctgctgcacctgaagtttggagtggccacagagatcctgctgaagcaggccagcaccctggccgacctggacagcggcaacatggagaaggtgatcaaggatgaaaatgtgaccctgtatgtgtgggccaacctgaagaagaaccccaggcacaggtctgtgcgcttcagcgagacccagatcggctttgagatcccccgcatcctggccaccagtgacattgctgtgcggctgctgcacacccactatgaccacgtgtctgccctgcaccctgtgtccacccccagcaaggagtacaccagcgctgtgacagagctggtgaaggatgatgtgaagaatgtggagaaggccatcagcaaggaggtggaggaggagagcaagcagcaggagcggggcagccacctgatccaggaggaggagatcaaggtggaggaggagcagggcgacatcgaggtgaagatgagcagcgctgaggaggagagcgaggccatcaagtgtgagcgggagatgaaggtgctgtctgaaacagtgtctgctgcccagctgctgctggtggagaacagcagcgagaagccagacttctttgaagataatgtggtggacctgtgccagttcaccaccctgggcggcgtgtaccacctggacatcctggagctgcccccccagtgcaagcctgtgaagggctggatgattgtggagatcctgaaggagggcctgcagaagtacacctacccacctgagaccacagaggagtttgaaacagaaaatgccttcccccccatcgaggtgaccctggaggtgcatgaaaatgtcatcttctttgaggaccctgtggtggtgcgctgggatgctgagggcaagcactggaggacagatggcatcagcaatgtgtcctacaagcccaaggagcggctggtgaccttcagcctggacaccttcggccctgtgaccctcatccaggatgcccacatcaacatgccctaccagagctgggagctgcggcccctggatgtgaacaaggtgctgctgactgtgaccaccgtcttcacagagatccagatccagatcaaggagaacctgtgcatgctgagcagcatcaagctgaaggacaagaagcacatcagcatcctggagggcacctggatgacccccatccccttcatcatcgccctgaaggaggccggcctgaacatcttccccaccaggcacagccacttctacgtgatcatcaacaacaaggtgcccctggtggaggtgaaggcctaccggcagatggccctgctgagcagcgcctttgccttcggctggagcaagtggaacctgctgtgcaacagcaccaaggtggtgttcaaggtgcgggagcacctgacagaggcctgcacagagaaccccaactgggccctgctgatgttttctggggaccgggcccagaggctgaagatcaaggaggagagcgaggccttcagcgaggccctgaaggaggagacagagttccacagcaccctgtaccacatggtgaaggactttgccagcgaggaggccatggagaaggtgcgcagcagcaactgccagtttgtgaacagcgtgtgccacatgctgctgagcacccggctgctgagctacagctag

SEQ ID NO: 313486 - DNA, 2169 bp, Artificial Sequence
  derived and/or modified sequence
atgggccccaaggccaagaagagcggcagcaagaagaagaaggtgaccaaagcggaacgtctgaagctcctacaggaagaggaagaaagaaggctaaaagaggaagaggaagccaggctgaagtacgagaaagaggaaatggagcggttggagatccagcgcatcgagaaagaaaagtggcacagactggaggccaaggacctcgagcgccgcaacgaggagctcgaagaattatacctgctggagcgttgtttcccagaagctgagaagctgaaacaggagacaaaacttctgagtcaatggaagcattatattcaatgcgatggctcccccgatccctctgtggcccaggagatgaatacctttatctctctgtggaaggaaaagacgaatgaaacgtttgaggaagttatcgaaaagtcaaaggtggttctgaaccttatagaaaagctgaaattcattctgctggagactccaccatgtgacctgcaggataagaacattattcagtatcaagaatctatcctccagctccaggaactactgcatttgaagttcggcgtcgcgactgagattctgctaaaacaggccagtactttggccgatctggacagtgggaacatggaaaaagtgatcaaggatgagaacgtaacactttacgtttgggccaatttgaaaaagaacccccgacatcggagcgtgcgatttagtgagactcagatcggcttcgaaattcctcgcatcctggctacttctgacatagccgtgcgtctgctgcacactcactatgaccacgtgagtgcactgcaccctgtgtccactcccagcaaggagtacacatcagccgtgacagaactcgtgaaggatgatgtcaaaaatgttgagaaagcaatctctaaagaagttgaagaggagtcaaagcaacaggaacgcggatcacacctcatccaggaggaggagataaaagtggaggaggaacagggcgacatagaagttaagatgtcctctgcagaggaggagtccgaggccatcaagtgcgagagggagatgaaggttctgtcagagaccgtctcagctgctcagttgctgctggtggagaactcctccgaaaaacccgatttctttgaagataacgtggtggatctgtgtcagttcaccacactggggggggtctatcaccttgacatactagagctaccaccccagtgcaagcccgtcaaggggtggatgatcgtggagattctgaaggagggcctacagaagtacacctatcctcccgagactactgaagagtttgaaactgaaaacgccttcccccctattgaggtaactctggaagtgcacgagaatgtcatattcttcgaggaccctgtagttgtgcgctgggacgcagagggtaaacattggcggactgatggcattagcaacgtttcttacaaaccaaaggaaaggctcgtgaccttctctcttgataccttcgggccagtgaccctgatccaggacgcccacattaatatgccttatcagtcctgggagcttcgtccactggacgtgaacaaagttctgctcactgtcacgactgtgtttaccgaaattcaaattcagattaaggagaacctctgtatgctctcatcaattaagctcaaagataagaagcatattagcattctggaaggcacttggatgacaccaattccattcattatcgcgctgaaggaggcaggcctcaacatttttcctactcggcactctcatttctatgtcatcatcaataacaaagttcccctggtcgaggtcaaggcctacaggcagatggccctgctctcttctgcattcgcctttggctggagcaagtggaacctattgtgcaacagtaccaaggtcgtgttcaaagtccgcgaacacttgactgaagcgtgcacagagaatccaaattgggctctgctgatgttttctggtgatcgggcccagaggctcaagatcaaagaagaatcagaggccttttcggaagccttgaaggaggaaacagaattccatagtacactctaccatatggttaaagattttgcgagtgaagaagcaatggagaaagtacgttcgagcaattgccaattcgtgaactccgtctgccacatgctgttatctacccgcctgctttcctactcttag

SEQ ID NO: 313487 - DNA, 2031 bp, Artificial Sequence
  derived and/or modified sequence
atggagcggctggagatccagcggatcgagaaggagaagtggcaccggcttgaggccaaagatttagagcggcgaaacgaagaattggaagagctctatctccttgagcggtgtttccccgaggccgagaagctgaagcaggagacaaagttgcttagccagtggaaacattatatccaatgtgacggttcgccagatccttctgtcgcacaggagatgaatactttcatcagtctgtggaaagaaaagactaacgaaacattcgaagaggtcattgagaaatcgaaggtggttctcaatttgatcgagaaactcaaatttatcctcctggagacacccccttgcgatttgcaggataagaatatcatccaatatcaggaatccattttacagttacaggaactgctccacctaaaattcggggtagctaccgaaatcctactaaaacaggccagcactctggccgacttagacagcggtaacatggagaaggtgattaaagatgaaaacgtgacactgtatgtctgggcaaatctgaaaaagaatcctcggcacaggagcgtacgtttttcagagacacagatcggttttgagattccccgtatacttgcgacctcagacatcgcagtacggctgctacacactcactacgatcacgtgtctgctctgcacccagttagcacacccagcaaggaatacacctctgctgtcacggagctagtgaaggacgatgttaagaatgtggagaaagccataagcaaagaggtggaggaggagtccaagcagcaggaacgcggatctcaccttattcaggaggaggagatcaaggtagaggaagaacagggcgatattgaagttaaaatgtcatcggccgaggaagagagtgaagccattaagtgcgaacgggagatgaaggtgctgagcgaaaccgtcagtgctgcccagttgctcctggtggagaattcatcagaaaaacctgatttcttcgaggataacgtcgtggatctgtgccagtttaccacattggggggtgtttatcatctagacatactggagcttccacctcaatgtaaacctgtcaaaggctggatgatcgtggagattctcaaggaggggttgcaaaagtacacataccctcctgaaaccactgaagagttcgaaaccgaaaacgcctttccacctatcgaggttaccctggaggtgcatgaaaacgttatatttttcgaagatcctgtcgtggtccgatgggacgccgaagggaagcattggcgaactgatggaatctctaacgtcagctacaaacccaaagagcggcttgttacattttctttggatacctttggccctgtcacgttgatccaagacgcccatattaacatgccatatcagagttgggagctccgacctctagacgtcaataaggttctgctgacggtgacaacagtgtttaccgaaatccagatccagatcaaggaaaatttatgtatgttgagctctattaagctgaaggataaaaagcacatatcaatattagaagggacgtggatgactcccattccatttatcatcgccctcaaagaggctgggctcaacatctttcccacgaggcacagccacttttacgtgataatcaataacaaagtgcccctggtggaagtgaaggcgtaccgtcagatggcattgctcagctcagcttttgcatttgggtggagtaaatggaacctactctgtaattctaccaaggtagttttcaaggtgagagaacacctcaccgaggcttgtactgagaatccaaattgggcactgttgatgttcagcggtgatcgtgctcagcggctcaaaatcaaagaggaatccgaagccttctctgaggctctcaaagaggagaccgagttccatagcactctctaccacatggttaaggatttcgcttcagaagaggctatggaaaaggtcaggtcttcgaattgccagttcgtcaactccgtatgtcacatgctgttgtctacgaggctcttgagctacagctag

SEQ ID NO: 313488 - DNA, 1974 bp, Artificial Sequence
  derived and/or modified sequence
atggacctggagcggcggaacgaggagctggaggagctgtacctgttggaaagatgctttccagaggcagagaaactgaaacaggagaccaaactgctgtcacagtggaaacactacattcagtgtgacggaagtcccgatcctagcgtggcccaggagatgaacacattcattagcctttggaaggagaagacaaacgaaacctttgaagaagtgatcgagaagtctaaagtggtgctaaacctcatcgagaagctgaagtttatcctgttggagacaccgccatgcgacttgcaggataagaacatcattcagtaccaggaatcaatcctccagctccaagaattgcttcatcttaaattcggagtcgctaccgaaattctcctcaagcaggctagcacactggccgatctggattccggcaacatggaaaaagtgatcaaagacgaaaacgttaccctctacgtctgggctaacttgaagaagaatccacgccaccgatcagtgcgcttctccgagacccagatcggtttcgagatcccccgaattctggctacgtctgacattgcagtccgcctgctgcatacccactacgaccatgtctcggctctacatcctgtgtcaactccaagcaaggagtacacttcagccgtgacagaactcgtgaaggacgacgtaaagaacgtggagaaagccatatcgaaagaggttgaggaggagagtaagcagcaggagcgcgggtcgcacctgatccaggaagaggagatcaaagtggaagaggagcagggcgatattgaagtaaagatgagtagtgccgaagaagaaagtgaggccatcaagtgtgaaagggaaatgaaagtcttgagcgagacagtgagcgccgcccagctcctgctggtagagaattcaagcgaaaagcctgatttttttgaagacaatgtcgtggacctgtgtcagtttacaactctgggcggagtataccacctggacattcttgagcttccgccccaatgtaaacctgtgaaaggatggatgattgtcgagattttaaaagaaggcttgcagaagtacacttaccctccagagacaaccgaggaattcgagaccgagaacgccttcccacccatagaggtcactttggaggtccatgaaaacgtaatcttttttgaagatccagttgtggtgagatgggatgcagaagggaagcactggcgcacagacggaatctccaacgtgtcgtataaaccaaaggaaaggctggtgaccttttccttggacaccttcggacctgtgactttgatccaagatgctcacatcaacatgccctaccaaagctgggagctaagacctctagatgtcaataaggtcctgctgacagtgactaccgtgttcacggagattcagattcagatcaaggagaacctgtgtatgctttcgtccattaagctgaaagacaagaaacacattagtatccttgagggcacatggatgacgccgataccgtttatcatagcactcaaagaggcaggcttgaacatattccccacgcggcattcccatttctacgtgatcattaataataaggtgcccctcgtcgaagttaaggcttatcgccagatggctttgctgagctcagccttcgcatttgggtggtcaaaatggaatctgttatgcaacagtacaaaagtggtgttcaaggtacgcgagcatctcacggaggcatgtaccgaaaaccctaactgggctctcctcatgttcagcggggatcgcgcacagaggctgaaaatcaaggaagaaagcgaagctttctcagaggcgctgaaggaggaaacagaattccatagtaccttgtaccacatggtcaaggactttgcctcggaagaggccatggagaaagtgcgtagtagtaattgccaatttgtgaattcagtctgtcacatgctgctttcaactagactgctgtcttattcctag

SEQ ID NO: 313489 - DNA, 2169 bp, Artificial Sequence
  derived and/or modified sequence
atgggcccaaaagcaaaaaaatctggctccaagaagaagaaggtaacaaaggctgagcggctcaagctcctgcaggaggaggaagaaaggagactaaaggaagaagaggaggcacggctcaaatacgagaaagaggagatggaacgcctggaaattcagcgtattgagaaagagaaatggcacagactggaggccaaggacttagagcggagaaatgaggagctggaagaactgtatctgctggagcgatgcttccccgaggccgaaaagctgaaacaggagacgaagctgctgtctcagtggaagcattacatccaatgcgacgggtcccctgacccatccgttgctcaggagatgaacacgttcatctcattgtggaaggaaaaaaccaacgagacttttgaggaggtaattgagaaatctaaagtcgtgctgaatctgatcgagaaactaaaattcatccttttagagactcccccatgtgatctccaggacaagaacatcatacaataccaggagagcatactgcagctgcaggagcttctccacctaaaattcggggtagccacagagattctcctgaagcaggctagtacattagctgatcttgactcaggaaatatggaaaaagttattaaggatgaaaatgtgacactgtacgtctgggctaacttgaagaaaaatccaaggcataggagtgtgcgctttagcgagacccagattggcttcgagatcccacgcattctcgccacaagcgacattgctgtcagactgctccatacacattacgaccatgtatcagcccttcacccggtttccactccgagtaaagagtatacgtctgcagtgacagaattggttaaagacgatgttaaaaacgttgaaaaggcaatatctaaagaggtggaggaggagagcaaacagcaggagagaggatcccaccttatccaggaagaagagatcaaggtcgaagaagagcagggagacatcgaggttaaaatgagctctgcagaagaggagagcgaggctataaagtgtgaaagagaaatgaaagtgttgtccgagactgtgtctgccgcacagctcctcctggtggagaacagctccgagaagcccgacttctttgaggacaatgtggtggatttatgccagtttacgaccctggggggagtttatcatctggatattttagaactgccaccacagtgcaaacccgttaagggatggatgattgtcgaaattctgaaagaaggcctgcagaagtacacttatcctcccgagaccacggaggaatttgagacggagaatgcctttccccctatagaggtcactctggaagtgcacgagaatgttatcttcttcgaggacccggtggtggtccgttgggacgctgaggggaagcactggcgaacagacggtatttcaaatgtctcgtataaaccaaaagaaaggctcgttacgttctccctggataccttcggtccggtaaccctcatccaggatgctcacatcaatatgccttatcagtcctgggaactgagaccgctcgacgtaaacaaggttctactcacagtgaccactgtgtttactgagattcaaattcagatcaaggagaatctgtgcatgctgagcagtatcaagctcaaggacaaaaagcacatcagcattctggaaggcacctggatgacaccgatccccttcataatcgcgttgaaggaggctggtctgaacattttcccaacgaggcatagccatttttacgtaatcatcaacaataaagttccattagtggaggtcaaggcgtacaggcaaatggctcttttgagcagcgccttcgcttttgggtggtcaaagtggaatctgctttgcaacagcacaaaagttgtctttaaggtacgggagcaccttactgaagcatgtaccgagaatccgaattgggccctgttgatgttcagcggtgatcgcgctcagcggctgaaaattaaagaggagtccgaagctttttccgaagctctcaaggaagagaccgaattccactccaccctataccacatggttaaagacttcgccagtgaggaagccatggaaaaggtgagatcctctaactgtcagttcgtcaattctgtttgccacatgctgctgagtactaggctgctgagttacagctag

SEQ ID NO: 313490 - DNA, 2031 bp, Artificial Sequence
  derived and/or modified sequence
atggaaaggctcgagatccagcgcatcgagaaagaaaagtggcatcgcctcgaggccaaggacttagaacggagaaatgaggaactcgaggagctttacctgctagagcgctgttttcctgaggctgagaagttgaagcaggaaacaaagctgttatcgcagtggaaacactatatccaatgtgatggctctccagacccctctgtcgcccaggagatgaacaccttcatttctttgtggaaagagaaaaccaatgagacatttgaagaggtcatcgagaaaagtaaagtcgtgctcaatttgatcgagaagcttaagtttattctccttgagacacccccttgcgacctgcaagataaaaacattatccagtaccaggaatccattctgcagctgcaagaattattacatttgaaattcggcgtggccactgaaatcctgctcaaacaggctagcactctggctgacctggactctgggaatatggagaaagtgataaaagacgaaaatgttaccctttatgtgtgggcaaatctgaagaagaaccctcgtcaccgctccgtgcgcttttcagagacacagatcggttttgaaatacctagaatcctggcaacctctgatattgcggtacgccttctgcatacccattacgatcacgtgtccgcactgcatcccgtgtcaactccttctaaagagtacaccagtgccgtaacagaactcgtaaaggatgatgttaagaatgtcgagaaagctataagtaaagaggttgaggaggaaagcaagcagcaggagcgcggaagccacctgatccaggaggaggaaatcaaagtcgaagaggaacagggcgatatcgaagtgaagatgtcctccgccgaggaagagagcgaagcaattaagtgcgagagagagatgaaggtgctgtccgagaccgtgtccgcagcccagctgttgcttgtagaaaattcgtccgagaaaccagatttttttgaagacaacgtggttgatctctgtcagttcaccactctgggcggagtgtatcacctcgacatccttgagttgccaccacaatgcaagccagtgaaagggtggatgatcgtggagatcctgaaagaaggcttgcagaaatacacatatcccccagagacaacagaagaatttgagaccgaaaatgccttcccccctatagaggttaccctggaagtgcatgaaaacgttatctttttcgaggatccggtggtggtacgatgggacgctgaaggtaagcactggaggaccgacggaatctctaacgtcagttacaaaccaaaagaacgtcttgtcaccttctccctggatacattcggacctgtgacattgatacaagacgcccacataaatatgccgtaccaaagctgggagcttcgcccattggatgtgaataaggtgcttttgacggtcacaacggtgttcaccgagatacaaatccagatcaaagagaatctttgcatgctcagcagcatcaaacttaaggacaagaagcacatctccatactggaggggacctggatgactccaattccttttatcatcgctctcaaagaggctggcctcaatatcttccccacacgccactctcatttttatgtgataataaataataaagtacccttggttgaggtgaaggcctacaggcagatggcgttattgtcatcggctttcgcttttggctggtctaagtggaacctgttgtgcaatagcactaaagtagtgtttaaagtacgcgagcatttaacagaggcctgtacagagaacccgaactgggccctcttaatgttcagcggcgacagggcccagcggctgaagatcaaagaagaatctgaggccttcagtgaggcgctgaaagaggagaccgagtttcactcaacactgtatcacatggttaaagatttcgctagcgaagaggccatggagaaggtaaggtccagtaactgccagttcgtgaattccgtatgtcacatgcttctgtctacccggttgctatcctatagttag

SEQ ID NO: 313491 - DNA, 1974 bp, Artificial Sequence
  derived and/or modified sequence
atggacctggagcgacggaatgaagagctcgaggagctctatctcctcgagcgttgtttccctgaagctgagaagctgaaacaggagactaaactactatcccagtggaaacactacatacagtgtgacggctctcccgatccttctgtggcacaggagatgaacaccttcatctccctttggaaggagaagaccaacgagacgttcgaagaagtcattgaaaaatccaaggtcgtcctgaatctcatcgaaaagctaaagttcatcttgctcgagacacccccttgcgatttgcaggataagaacattatccaataccaggaatcaatcctccaactccaagagctcttgcatcttaaatttggtgtggcaaccgagatccttctgaaacaggcatctaccctggccgaccttgactcaggaaatatggaaaaggtaattaaggacgagaatgtgacactgtatgtgtgggctaacctaaagaagaacccccgtcatagaagtgttcgctttagcgagacccagataggttttgaaatcccccgtattttggcaacatcagatattgcagtgcgcctgctacacacacactacgaccatgtcagtgctcttcacccagttagtacaccctcgaaggagtatacatccgcggtgacagaactggtgaaggatgatgtgaagaatgtggaaaaggctatttcaaaagaggtggaggaggaatctaagcagcaggagcgcggaagtcacctcatccaggaagaggagattaaggttgaggaggagcaaggagacatcgaagtgaaaatgagcagcgctgaggaggaaagtgaagctatcaagtgcgagagagagatgaaggtgttatcagagacagtgtcggcggcacagctcctgctcgtggagaatagtagtgaaaaaccagatttcttcgaggacaacgtcgtggatctatgtcagtttaccactctaggaggtgtctatcaccttgacattctcgagctccccccacagtgtaaaccagtaaagggatggatgattgtagagattctcaaggagggactgcagaagtacacctacccacccgaaaccaccgaggaattcgagactgagaatgcatttcctccaatcgaggttacacttgaagtccacgagaatgtaatattctttgaagaccctgtggtcgtccggtgggacgcggaaggcaaacattggagaaccgatggaatttcaaatgtcagctacaaacccaaagaaaggctggttacctttagcctggataccttcggacccgtcacgctgatacaagacgcccatatcaatatgccttaccagagttgggagctcagacccctggatgttaacaaggttctgttgaccgttaccacggtgtttacagaaattcagatccaaataaaagaaaatctctgcatgctcagctccataaagctgaaggataagaaacatatctctatcctcgaggggacctggatgacacctataccctttatcatcgccctcaaggaggctggtttaaacatttttcctacaaggcatagccacttttatgtgatcatcaataataaggttcccctggtggaggtcaaggcctataggcagatggccctcctttcctctgctttcgctttcggttggtccaagtggaacttgctgtgcaattctaccaaagtcgtatttaaggtccgcgagcatctcacagaggcttgcacagagaaccccaactgggccctgttgatgttttccggtgatagagcgcagcgtctgaagatcaaggaggagagcgaagcattctctgaagctctgaaggaagagacagagttccactctactctttatcacatggtgaaagactttgcaagcgaggaagctatggaaaaggtaagaagctctaactgccagtttgtgaattccgtgtgccatatgctgctttccactaggctgctatcatacagctag

SEQ ID NO: 313492 - DNA, 2363 bp, Artificial Sequence
  derived and/or modified sequence
gggagcgtttgtccacacaatttctgctccgactctgcggactactgcagtggagcttgactcttaatgggtcccaaagcaaaaaagtctggcagtaagaaaaagaaagtcaccaaagctgaacgattgaagctgctacaagaggaggaggagagacgactgaaagaggaagaggaagcccgtttgaaatatgagaaagaagaaatggaaaggcttgaaatacagcgaattgagaaagaaaaatggcatcgacttgaagcaaaagatctagaaaggagaaatgaagaacttgaagaactttatttattagagaggtgttttcctgaagcagagaaattgaaacaggaaactaaattgctttctcagtggaagcactacattcaatgtgatgggagtcctgatccttcagtagcccaagaaatgaacacgtttattagtttgtggaaagagaaaacaaatgagacttttgaggaagtgattgagaagagtaaagtagtgctaaatttaattgagaaattgaaatttattttactggaaactccaccatgtgatttgcaagataaaaatataatacagtaccaagaatcaatactacaactgcaggagctccttcatcttaaattcggtgtagccacagaaatacttctcaaacaagctagtactttggcagatctggacagtggaaatatggaaaaagtcattaaagatgaaaatgttactctgtatgtgtgggcaaacctcaagaagaatccaaggcacagaagtgttagattctctgaaacacaaattggatttgagattccaaggatattagcaacaagtgacattgctgtacgactcctgcatacccactatgatcatgtttctgcactgcaccctgtttcaacaccatcaaaagaatacacttctgcagtaactgagcttgtcaaagatgatgttaagaatgtagaaaaagcaatcagcaaggaggtcgaagaagagtccaaacaacaagaaagagggtctcacttaattcaggaggaagaaataaaagttgaggaggaacaaggtgatattgaagtgaaaatgagttctgctgaggaagaatctgaagccataaaatgtgaacgagagatgaaagtattaagtgaaactgtttcagcagcacagttgttgctggtagagaattcttctgaaaagccagatttctttgaagacaatgtggtggatttatgccagttcacaactctgggtggagtataccacttggatattttggagcttcctccacagtgtaaaccagtgaagggatggatgattgtggaaatactcaaagaaggattacagaaatacacatatcctccggaaactacagaagagtttgagacagaaaatgctttcccacctatagaggtcacacttgaggttcatgagaatgtaatcttttttgaggatcctgtggttgtaaggtgggatgctgaaggtaaacattggagaactgatggcatcagcaatgtatcctacaaaccaaaagaaagacttgtaacattcagcctggacacctttggccctgttaccttgattcaagatgctcatattaacatgccgtaccagtcatgggaactaagaccacttgatgtaaataaagtacttttaactgtgactacagtatttactgagattcaaatacaaattaaggaaaacctctgcatgttatcttcaatcaaactaaaagacaagaaacacatctctattttggaaggaacctggatgactcctattcctttcattattgctttgaaagaagctggactgaatatctttcctactagacactctcatttttatgttattataaacaataaggttcctttggtagaagtgaaagcttatcgacagatggccctactaagttctgcttttgcatttggttggagcaagtggaacctactatgtaattctacaaaagtcgtatttaaggtgagggaacaccttactgaagcatgtactgagaatcctaattgggcccttttaatgtttagtggtgacagagcacaaagactgaagatcaaggaagagagtgaggcattttctgaagcacttaaagaagaaactgagtttcattctactttatatcacatggtgaaggattttgcttctgaggaagcaatggagaaagtcaggagttccaactgtcagtttgtcaactctgtgtgccacatgctgctctctaccagattgctcagctactcctaacctccacttacaaactgtattgtaagtatgaagaaccaagcatggtgaaagacaggtatttctgcaacacaatgtaatgagtgaatgaatacatttcaaatcaactattaaaaattttctaatctgca

SEQ ID NO: 313493 - DNA, 2347 bp, Artificial Sequence
  derived and/or modified sequence
acacaatttctgctccgactctgcggactactgcagtggagcttgactcttaatgggtcccaaagcaaaaaagtctggcagtaagaaaaagaaagtcaccaaagctgaacgattgaagctgctacaagaggaggaggagagacgactgaaagaggaagaggaagcccgtttgaaatatgagaaagaagaaatggaaaggcttgaaatacagcgaattgagaaagaaaaatggcatcgacttgaagcaaaagatctagaaaggagaaatgaagaacttgaagaactttatttattagagaggtgttttcctgaagcagagaaattgaaacaggaaactaaattgctttctcagtggaagcactacattcaatgtgatgggagtcctgatccttcagtagcccaagaaatgaacacgtttattagtttgtggaaagagaaaacaaatgagacttttgaggaagtgattgagaagagtaaagtagtgctaaatttaattgagaaattgaaatttattttactggaaactccaccatgtgatttgcaagataaaaatataatacagtaccaagaatcaatactacaactgcaggagctccttcatcttaaattcggtgtagccacagaaatacttctcaaacaagctagtactttggcagatctggacagtggaaatatggaaaaagtcattaaagatgaaaatgttactctgtatgtgtgggcaaacctcaagaagaatccaaggcacagaagtgttagattctctgaaacacaaattggatttgagattccaaggatattagcaacaagtgacattgctgtacgactcctgcatacccactatgatcatgtttctgcactgcaccctgtttcaacaccatcaaaagaatacacttctgcagtaactgagcttgtcaaagatgatgttaagaatgtagaaaaagcaatcagcaaggaggtcgaagaagagtccaaacaacaagaaagagggtctcacttaattcaggaggaagaaataaaagttgaggaggaacaaggtgatattgaagtgaaaatgagttctgctgaggaagaatctgaagccataaaatgtgaacgagagatgaaagtattaagtgaaactgtttcagcagcacagttgttgctggtagagaattcttctgaaaagccagatttctttgaagacaatgtggtggatttatgccagttcacaactctgggtggagtataccacttggatattttggagcttcctccacagtgtaaaccagtgaagggatggatgattgtggaaatactcaaagaaggattacagaaatacacatatcctccggaaactacagaagagtttgagacagaaaatgctttcccacctatagaggtcacacttgaggttcatgagaatgtaatcttttttgaggatcctgtggttgtaaggtggatgctgaaggtaaacattggagaactgatggcatcagcaatgtatcctacaaaccaaaagaaagacttgtaacattcagcctggacacctttggccctgttaccttgattcaagatgctcatattaacatgccgtaccagtcatgggaactaagaccacttgatgtaaataaagtacttttaactgtgactacagtatttactgagattcaaatacaaattaaggaaaacctctgcatgttatcttcaatcaaactaaaagacaagaaacacatctctattttggaaggaacctggatgactcctattcctttcattattgctttgaaagaagctggactgaatatctttcctactagacactctcatttttatgttattataaacaataaggttcctttggtagaagtgaaagcttatcgacagatggccctactaagttctgcttttgcatttggttggagcaagtggaacctactatgtaattctacaaaagtcgtatttaaggtgagggaacaccttactgaagcatgtactgagaatcctaattgggcccttttaatgtttagtggtgacagagcacaaagactgaagatcaaggaagagagtgaggcattttctgaagcacttaaagaagaaactgagtttcattctactttatatcacatggtgaaggattttgcttctgaggaagcaatggagaaagtcaggagttccaactgtcagtttgtcaactctgtgtgccacatgctgctctctaccagattgctcagctactcctaacctccacttacaaactgtattgtaagtatgaagaaccaagcatggtgaaagacaggtatttctgcaacacaatgtaatgagtgaatgaatacatttcaaatcaactattaaaaattttctaatctgc

SEQ ID NO: 313494 - DNA, 2146 bp, Artificial Sequence
  derived and/or modified sequence
aatttctgctccgactctgcggactactgcagtggagcttgactcttaatggatctagaaaggagaaatgaagaacttgaagaactttatttattagagaggtgttttcctgaagcagagaaattgaaacaggaaactaaattgctttctcagtggaagcactacattcaatgtgatgggagtcctgatccttcagtagcccaagaaatgaacacgtttattagtttgtggaaagagaaaacaaatgagacttttgaggaagtgattgagaagagtaaagtagtgctaaatttaattgagaaattgaaatttattttactggaaactccaccatgtgatttgcaagataaaaatataatacagtaccaagaatcaatactacaactgcaggagctccttcatcttaaattcggtgtagccacagaaatacttctcaaacaagctagtactttggcagatctggacagtggaaatatggaaaaagtcattaaagatgaaaatgttactctgtatgtgtgggcaaacctcaagaagaatccaaggcacagaagtgttagattctctgaaacacaaattggatttgagattccaaggatattagcaacaagtgacattgctgtacgactcctgcatacccactatgatcatgtttctgcactgcaccctgtttcaacaccatcaaaagaatacacttctgcagtaactgagcttgtcaaagatgatgttaagaatgtagaaaaagcaatcagcaaggaggtcgaagaagagtccaaacaacaagaaagagggtctcacttaattcaggaggaagaaataaaagttgaggaggaacaaggtgatattgaagtgaaaatgagttctgctgaggaagaatctgaagccataaaatgtgaacgagagatgaaagtattaagtgaaactgtttcagcagcacagttgttgctggtagagaattcttctgaaaagccagatttctttgaagacaatgtggtggatttatgccagttcacaactctgggtggagtataccacttggatattttggagcttcctccacagtgtaaaccagtgaagggatggatgattgtggaaatactcaaagaaggattacagaaatacacatatcctccggaaactacagaagagtttgagacagaaaatgctttcccacctatagaggtcacacttgaggttcatgagaatgtaatcttttttgaggatcctgtggttgtaaggtgggatgctgaaggtaaacattggagaactgatggcatcagcaatgtatcctacaaaccaaaagaaagacttgtaacattcagcctggacacctttggccctgttaccttgattcaagatgctcatattaacatgccgtaccagtcatgggaactaagaccacttgatgtaaataaagtacttttaactgtgactacagtatttactgagattcaaatacaaattaaggaaaacctctgcatgttatcttcaatcaaactaaaagacaagaaacacatctctattttggaaggaacctggatgactcctattcctttcattattgctttgaaagaagctggactgaatatctttcctactagacactctcatttttatgttattataaacaataaggttcctttggtagaagtgaaagcttatcgacagatggccctactaagttctgcttttgcatttggttggagcaagtggaacctactatgtaattctacaaaagtcgtatttaaggtgagggaacaccttactgaagcatgtactgagaatcctaattgggcccttttaatgtttagtggtgacagagcacaaagactgaagatcaaggaagagagtgaggcattttctgaagcacttaaagaagaaactgagtttcattctactttatatcacatggtgaaggattttgcttctgaggaagcaatggagaaagtcaggagttccaactgtcagtttgtcaactctgtgtgccacatgctgctctctaccagattgctcagctactcctaacctccacttacaaactgtattgtaagtatgaagaaccaagcatggtgaaagacaggtatttctgcaacacaatgtaatgagtgaatgaatacatttcaaatcaactattaaaaattttctaatc

SEQ ID NO: 313495 - protein, 92 aa, Artificial Sequence
  derived and/or modified sequence
MERLEIQRIEKEKWHRLEAKDLERRNEELEELYLLERCFPEAEKLKQETKLLSQWKHYIQCDGSPDPSVAQEMNTFISLWKEKTNETFEEVI

SEQ ID NO: 313496 - DNA, 1458 bp, Artificial Sequence
  derived and/or modified sequence
atgggccccaaggccaagaagagcggcagcaagaagaagaaggtgaccaaggccgagagactgaagctgctgcaggaggaggaggagagaagactgaaggaggaggaggaggccagactgaagtacgagaaggaggagatggagagactggagatccagagaatcgagaaggagaagtggcacagactggaggccaaggacctggagagaagaaacgaggagctggaggagctgtacctgctggagagatgcttccccgaggccgagaagctgaagcaggagaccaagctgctgagccagtggaagcactacatccagtgcgacggcagccccgaccccagcgtggcccaggagatgaacaccttcatcagcctgtggaaggagaagaccaacgagaccttcgaggaggtgatcgagaagagcaaggtggtgctgaacctgatcgagaagctgaagttcatcctgctggagacccccccctgcgacctgcaggacaagaacatcatccagtaccaggagagcatcctgcagctgcaggagctgctgcacctgaagttcggcgtggccaccgagatcctgctgaagcaggccagcaccctggccgacctggacagcggcaacatggagaaggtgatcaaggacgagaacgtgaccctgtacgtgtgggccaacctgaagaagaaccccagacacagaagcgtgagattcagcgagacccagatcggcttcgagatccccagaatcctggccaccagcgacatcgccgtgagactgctgcacacccactacgaccacgtgagcgccctgcaccccgtgagcacccccagcaaggagtacaccagcgccgtgaccgagctggtgaaggacgacgtgaagaacgtggagaaggccatcagcaaggaggtggaggaggagagcaagcagcaggagagaggcagccacctgatccaggaggaggagatcaaggtggaggaggagcagggcgacatcgaggtgaagatgagcagcgccgaggaggagagcgaggccatcaagtgcgagagagagatgaaggtgctgagcgagaccgtgagcgccgcccagctgctgctggtggagaacagcagcgagaagcccgacttcttcgaggacaacgtggtggacctgtgccagttcaccaccctgggcggcgtgtaccacctggacatcctggagctgcccccccagtgcaagcccgtgaagggctggatgatcgtggagatcctgaaggagggcctgcagaagtacacctacccccccgagaccaccgaggagttcgagaccgagaacgccttcccccccatcgaggtgaccctggaggtgcacgagaacgtgatcttcttcgaggaccccgtggtggtgagatggatgctgaaggtgaacatcggcgagctgatggccagcgccatgtaccccaccaaccagaagaaggacctgtag

SEQ ID NO: 313497 - DNA, 1458 bp, Artificial Sequence
  derived and/or modified sequence
atggggcccaaggccaagaagagcggttccaagaaaaagaaggttactaaggctgagcgcttgaaactgctgcaggaagaggaggagagacgcctaaaagaagaggaagaggccaggctgaagtatgaaaaggaagagatggaaagactggagattcagaggatcgaaaaagagaaatggcaccgcctggaagctaaagacctggaacggcgcaacgaggagctggaagagctgtatctgctcgagcgctgtttccccgaagctgagaaactcaaacaagaaacaaagttgctgtctcagtggaaacactatatccagtgcgacggcagtcccgatccctcagtagcccaagaaatgaatactttcatcagcctttggaaggagaagactaacgaaactttcgaggaggttattgaaaaatccaaggtggtactgaaccttatagagaagcttaaattcattctgcttgagactcccccttgcgacctccaagacaagaatatcattcaatatcaggagtcgattctgcaactgcaagagctgctccacctgaaatttggggtcgcgacagagatccttttgaaacaagctagcactttggccgacctggattccggcaacatggagaaagtgatcaaagacgaaaacgtgacgctgtacgtctgggccaacctcaagaagaacccccgtcacagatcagtccgattttccgagacacagattggcttcgagattcccagaatactggctactagcgatatcgctgttcgacttctccatacccactatgatcacgtcagtgccttgcaccctgtgtcaaccccttcgaaagagtatacctccgccgtcacagagctggtgaaggacgatgttaaaaacgtggagaaggcgatcagcaaggaggtcgaggaggaatccaagcagcaagaacggggcagccacctgatccaagaggaagaaattaaggtagaggaagagcagggagatatagaggtgaaaatgtcatccgctgaagaggaaagcgaggccattaagtgtgagcgcgaaatgaaggtccttagcgagactgtctctgccgcccagctccttctggtggagaacagctcagaaaagccagacttctttgaagacaatgttgtggatttgtgtcaatttactaccctggggggcgtctatcacctggacattctggagctgccgcctcagtgtaaacctgtcaagggatggatgattgtcgagatcctcaaagagggtcttcaaaagtacacctatccaccagaaaccacggaggagttcgagactgagaatgcatttccacctatagaggtgactctcgaagtccacgaaaatgtgatcttcttcgaagaccccgtagttgttagatggatgctgaaagtcaacatcggcgagctcatggcctcagctatgtatcccaccaatcagaaaaaagatctctag

SEQ ID NO: 313498 - DNA, 1458 bp, Artificial Sequence
  derived and/or modified sequence
atgggccccaaggccaagaagagcggcagcaagaagaagaaggtgaccaaggccgagcggctgaagctgctgcaggaggaggaggagcggcggctgaaggaggaggaggaggcccggctgaagtatgagaaggaggagatggagcggctggagatccagagaattgagaaggagaagtggcaccggctggaggccaaggacctggagaggagaaatgaggagctggaggagctgtacctgctggagcgctgcttccctgaggccgagaagctgaagcaggagaccaagctgctgagccagtggaagcactacatccagtgtgatggcagcccagaccccagcgtggcccaggagatgaacaccttcatcagcctgtggaaggagaagaccaatgagacctttgaggaggtgattgagaagagcaaggtggtgctgaacctgattgagaagctgaagttcatcctgctggagaccccaccctgtgacctgcaggacaagaacatcatccagtaccaggagagcatcctgcagctgcaggagctgctgcacctgaagtttggagtggccacagagatcctgctgaagcaggccagcaccctggccgacctggacagcggcaacatggagaaggtgatcaaggatgaaaatgtgaccctgtatgtgtgggccaacctgaagaagaaccccaggcacaggtctgtgcgcttcagcgagacccagattggatttgagatcccccgcatcctggccaccagtgacattgctgtgcggctgctgcacacccactatgaccacgtgtctgccctgcaccctgtgtccacccccagcaaggagtacaccagcgctgtgacagagctggtgaaggatgatgtgaagaatgtggagaaggccatcagcaaggaggtggaggaggagagcaagcagcaggagcggggcagccacctgatccaggaggaggagatcaaggtggaggaggagcagggcgacatcgaggtgaagatgagcagcgctgaggaggagagcgaggccatcaagtgtgagcgggagatgaaggtgctgtctgagaccgtgtctgctgcccagctgctgctggtggagaacagcagcgagaagccagacttctttgaggacaacgtggtggacctgtgccagttcaccaccctgggcggcgtgtaccacctggacatcctggagctgcccccccagtgcaagcctgtgaagggctggatgattgtggagatcctgaaggagggcctgcagaagtacacctacccacctgagaccacagaggagtttgaaacagaaaatgccttcccccccatcgaggtgaccctggaggtgcatgaaaatgtcatcttctttgaagatcctgtggtggtgcgctggatgctgaaggtgaacatcggggagctgatggccagcgccatgtaccccaccaaccagaagaaggacctgtag

SEQ ID NO: 313499 - DNA, 1458 bp, Artificial Sequence
  derived and/or modified sequence
atgggccccaaggccaagaagagcggcagcaagaagaagaaggtgacaaaggcggagaggctcaaattactgcaggaggaagaggagcgccgtctgaaagaggaagaagaagcccgcctcaaatacgagaaagaagaaatggaacggctggaaatacaacgcattgaaaaagaaaagtggcaccgcctagaggcgaaagacctggaaagaaggaacgaggagcttgaagaattgtatctgttggaaagatgttttcctgaggccgagaaactgaaacaagagactaagctccttagtcaatggaagcactatatccaatgcgatggctctccggacccgtctgtggcgcaggagatgaacaccttcatttcgctgtggaaagagaagacaaacgaaacgttcgaggaagtcattgaaaaatccaaggtggtgctgaatctcattgagaaactgaaattcatcctgcttgagacccccccgtgtgatttgcaagacaagaatattatacagtaccaggaaagtatcctgcaactgcaggagcttctgcacctaaaattcggagtggccacggagatactgttgaagcaagcatcaacgctcgccgatctggattctggcaacatggagaaggtcattaaggatgaaaacgtgaccttgtacgtgtgggctaacctgaagaagaacccccgacacaggtccgttaggttttcggaaacccagattggtttcgaaataccccggatcctggccacatctgatatcgccgtcaggcttcttcacacccactatgatcatgtaagtgctctgcaccccgtgagcactccatccaaggagtacaccagtgccgtaactgagctggtgaaggatgacgtgaagaacgtggaaaaggctatcagtaaagaggttgaggaggagtccaagcagcaggaaaggggctcacacttgattcaggaggaggaaataaaggtggaagaggagcagggcgacatagaggtcaagatgtcgagcgccgaagaagaaagcgaagcaatcaaatgtgagagagagatgaaggtgctatctgagacagtcagcgctgctcagctgttgctcgtggaaaactcctcagagaagcccgatttctttgaggacaatgtagtcgatctgtgccaatttacaaccttaggcggggtgtaccacttggacatacttgaattaccaccacagtgcaaacccgtgaaaggctggatgatcgtggaaatactgaaggaggggttacagaaatacacataccccccagaaacaacagaggaattcgagactgagaatgctttccccccaatagaagtgaccttagaggtgcacgagaatgtcatcttcttcgaggatcctgtggtcgtgcgatggatgctgaaagtgaatatcggtgaactgatggcctccgcgatgtatcccactaatcagaagaaggacctttag

SEQ ID NO: 313500 - DNA, 1458 bp, Artificial Sequence
  derived and/or modified sequence
atgggcccaaaagcgaaaaagagcggatccaagaaaaagaaagttactaaagcggagcggctgaaactgctgcaagaggaagaggagaggcgactcaaagaggaggaagaggccaggctgaagtacgaaaaagaagagatggaacggctggagattcagcggatcgaaaaggagaaatggcatcggttggaggctaaagacttggagcgtagaaacgaagaacttgaagaattatacttactggaaaggtgctttcctgaagccgaaaagttgaaacaagagaccaagttactgagtcagtggaagcactatattcagtgtgatggaagcccagacccgtccgtggctcaggagatgaatacttttatctccctgtggaaagagaaaacgaacgaaacatttgaagaggtcatagaaaaatccaaagttgtcctaaacttgattgaaaaactgaagtttatactgctggagactcctccatgtgatctccaggacaagaatatcatacagtaccaggaaagtatcctccagttgcaggagctcttgcacctgaagttcggcgtagctacggaaatcctcctcaagcaggcttcaacgttggcagatcttgactccgggaacatggagaaagtgatcaaggacgagaacgtgacactctacgtttgggctaacctgaagaagaatcccaggcacaggagtgtccgctttagcgaaacacagatcggcttcgagattccaaggatcctggcaacaagcgacatagctgtcaggctgctgcacacccactatgaccacgttagcgctctccatcctgtgtccaccccctccaaagagtatactagcgccgtaaccgagctggtaaaagacgatgttaagaatgttgaaaaggcgatctctaaggaagtcgaagaggagagcaaacagcaggagaggggctcccacctgatccaggaagaagagatcaaagtggaggaagaacagggcgacatcgaagttaagatgtcaagtgccgaagaggagtccgaggctattaagtgcgaacgagagatgaaagtgctgagcgagaccgtgtccgcagcgcagctcctgctggtagaaaattcttccgagaagcctgatttcttcgaggacaacgtggtggacttgtgtcaattcaccacactcggaggagtctaccatctggacatcttagaactgccaccccagtgcaaaccagtcaaaggctggatgatagtggaaattctgaaagaaggtctgcagaaatacacttatcccccagagactaccgaggagtttgaaacggagaatgcctttcctcctatcgaggtaacgttggaagtgcacgagaatgtgattttttttgaggatcccgttgtagttcgatggatgttgaaggtaaacattggtgagctgatggccagcgctatgtatccaactaatcagaagaaagacctttag

SEQ ID NO: 313501 - protein, 411 aa, Artificial Sequence
  derived and/or modified sequence
MPMWNKVSGVHLSPSSPEIVLDRDHSSSIGCLSSDAIISSPENTHAANSIVSQTIPKAQIQQSTHTHLDISLFPLGLTDEKSNGTIALVDDSEDPGANVSNIQLQQKISSLEIKLKVSEEEKQRIKQDVESLMEKHNVLEKGFLKEKEQEAISFQDRYKELQEKHKQELEDMRKAGHEALSIIVDEYKALLQSSVKQQVEAIEKQYISAIEKQAHKCEELLNAQHQRLLEMLDTEKELLKEKIKEALIQQSQEQKEILEKCLEEERQRNKEALVSAAKLEKEAVKDAVLKVVEEERKNLEKAHAEERELWKTEHAKDQEKVSQEIQKAIQEQRKISQETVKAAIIEEQKRSEKAVEEAVKRTRDELIEYIKEQKRLDQVIRQRSLSSLELFLSCAQKQLSALIATEPVDIE

SEQ ID NO: 313502 - DNA, 2228 bp, Artificial Sequence
  derived and/or modified sequence
atgccaatgtggaataaagtatctggagtccatctttcaccatcttctcctgagattgtactggaccgtgaccactcttcttccattggctgcctctcttctgatgccattatttcatcaccagagaatacacatgcagcaaatagcattgtgagtcaaactattccaaaagcacagattcagcaatcaacacacactcatctggatatctcactttttccattgggtttaactgatgaaaaaagtaatggaacaattgcccttgtggatgattctgaggatcctggagccaatgtatctaacatacagcttcagcaaaaaatttcaagtctggagattaaactcaaagtatctgaagaagaaaaacagagaattaaacaggatgtggaatcattgatggaaaagcataatgtcttagaaaaaggctttctaaaagaaaaagagcaagaggccatttcttttcaagatagatacaaagaacttcaggaaaaacataaacaagaattggaagacatgaggaaagctggtcacgaagccctcagcattattgtggatgaatataaggcactactgcagtcttcagttaagcaacaagtagaagctattgaaaaacagtacatttctgcaattgagaaacaggcacacaagtgtgaggagttgctaaatgctcagcatcagaggctccttgaaatgctagatacagagaaggaactgttaaaagaaaaaataaaggaagctttgattcagcaatctcaagaacagaaggaaatattggaaaagtgtttggaggaagaaaggcaaagaaataaagaggcattagtatccgctgcaaagcttgaaaaagaagcagtgaaggatgcagttttaaaagtcgtagaagaagaaagaaaaaatttagaaaaagcgcatgctgaagaaagggaattatggaagacagaacatgcaaaagatcaagaaaaagtatctcaggaaattcaaaaagctatacaagaacaaagaaaaataagtcaggaaactgttaaggcagcaataatagaagagcagaaacgaagtgaaaaggctgtggaagaggcagtgaaaagaacaagagatgaattgatagagtatataaaagaacagaaaaggctcgatcaagtcatccgccaaagaagcctgtccagtttggaactgttcctctcctgtgcacagaaacagttaagtgctttaatagctacggaaccagttgacattgaataaaaagaacatgacaaacccacactggcattggataaatcatattacaccttcaaaatacacactctgaattataaagatgtgtttgttttctttccaaatcatgtagaattgatttccagttcaaggataaaccaaaacaatatttagaactatcaagtgatctaatttattttcttttggtttcttctttacatttactgttattttattattattagtagtagcagcaacagagtatgatatgacccaaaagccattgtaaagtgccacattaccaaaattaattaagtaaactttatagcctgtgggagtctattatatattattttgcaaaagtagtaaatatattattgtttcatgatgactcttgatgagatgctagaatgtaaccatacatttatcttattttgaggatagaaatagcatggatttcaacatcacttatttatctgtataattggaaataaaacaccgatatgatagagaatcattccggcattacctaacctcttctgcagttggatctatgtattttcattggtctactgaaaacaaacaatacaattaaaagcactaaagattattatattaattcaactttgatctgatatatcacttaaactaaaggggtgtgtgtggtgtatgcttgtttcctatttctgctctttaaagatactttgaatcaataaaaccattagtctacaaatcaaattgtgaacttaatctctagaaagagaatataactcagccatttataggaatttaggttcaagtacaggatatatgaaatcttttcccagtatttcagaatgtacttaattcacaggcaggatgcttcaatgcaaaatcatgaatatttttaattcaaaactaaaatgtcattaatatgtatgtatgcaaatgttttatcttattttctgaaatgcatctactttcatgggctttgtacgtttctgagatttctcagtgtaataaaaagagctcccaaactt

SEQ ID NO: 313503 - DNA, 1236 bp, Artificial Sequence
  derived and/or modified sequence
atgcccatgtggaacaaggtgagcggcgtgcacctgagccccagcagccccgagatcgtgctggacagagaccacagcagcagcatcggctgcctgagcagcgacgccatcatcagcagccccgagaacacccacgccgccaacagcatcgtgagccagaccatccccaaggcccagatccagcagagcacccacacccacctggacatcagcctgttccccctgggcctgaccgacgagaagagcaacggcaccatcgccctggtggacgacagcgaggaccccggcgccaacgtgagcaacatccagctgcagcagaagatcagcagcctggagatcaagctgaaggtgagcgaggaggagaagcagagaatcaagcaggacgtggagagcctgatggagaagcacaacgtgctggagaagggcttcctgaaggagaaggagcaggaggccatcagcttccaggacagatacaaggagctgcaggagaagcacaagcaggagctggaggacatgagaaaggccggccacgaggccctgagcatcatcgtggacgagtacaaggccctgctgcagagcagcgtgaagcagcaggtggaggccatcgagaagcagtacatcagcgccatcgagaagcaggcccacaagtgcgaggagctgctgaacgcccagcaccagagactgctggagatgctggacaccgagaaggagctgctgaaggagaagatcaaggaggccctgatccagcagagccaggagcagaaggagatcctggagaagtgcctggaggaggagagacagagaaacaaggaggccctggtgagcgccgccaagctggagaaggaggccgtgaaggacgccgtgctgaaggtggtggaggaggagagaaagaacctggagaaggcccacgccgaggagagagagctgtggaagaccgagcacgccaaggaccaggagaaggtgagccaggagatccagaaggccatccaggagcagagaaagatcagccaggagaccgtgaaggccgccatcatcgaggagcagaagagaagcgagaaggccgtggaggaggccgtgaagagaaccagagacgagctgatcgagtacatcaaggagcagaagagactggaccaggtgatcagacagagaagcctgagcagcctggagctgttcctgagctgcgcccagaagcagctgagcgccctgatcgccaccgagcccgtggacatcgagtag

SEQ ID NO: 313504 - DNA, 1236 bp, Artificial Sequence
  derived and/or modified sequence
atgcccatgtggaacaaggtgtccggagttcatctgtctccctccagtcccgagatcgtcttagatagggaccactccagtagtattggctgtctgtcttcagacgccattatcagcagccctgagaacacccacgccgcaaacagcatcgtgagtcagacaattcccaaagcccagattcaacaatccacccatacacaccttgatatttcgctgtttcccctcggcctgactgacgagaaatcaaacggcaccattgcattggtggacgactctgaagacccaggcgctaatgtttcgaatattcaactacagcagaaaatatcatcactggagattaagttaaaggtatcagaggaggaaaagcaaaggattaaacaggatgtggagtccctgatggagaagcacaatgtcctcgagaagggttttctcaaggaaaaagagcaagaagcaatctccttccaagataggtataaagaactacaggaaaaacacaaacaggaactcgaagacatgcggaaagctgggcatgaagccctatctattattgtggacgagtacaaagccctccttcaatcttctgtgaagcagcaggtagaggcaatagagaagcagtacataagcgcaattgagaaacaggcccataagtgcgaggagctcctcaacgcacagcaccagcggctgctggaaatgttggacactgagaaggaattgttaaaggagaagataaaagaggcactcattcaacagtcacaggaacagaaagaaatactggagaagtgtctggaggaagaaagacagaggaataaagaagctctggtgtccgcagcaaagctggagaaagaggccgtgaaagacgcggtgctcaaggtcgtggaggaggaacgaaagaatctcgaaaaagcccacgcagaagaacgcgaactatggaaaaccgagcatgcaaaggaccaagaaaaggtttcacaggaaattcagaaggcaattcaggagcagagaaagataagccaggagactgttaaagctgcaatcatcgaggagcagaaacgctctgaaaaggctgtggaggaggctgtaaaacggacccgagacgaactgattgaatacataaaggaacagaaacgtttggatcaggttatacgacagaggtctctgagcagcttagagctgtttctgagttgcgcccagaaacagctgtccgccctgattgccactgagcccgtggacattgagtag

SEQ ID NO: 313505 - DNA, 1236 bp, Artificial Sequence
  derived and/or modified sequence
atgcccatgtggaacaaggtgtctggagtgcacctgagccccagcagccctgagatcgtgctggaccgggaccacagcagcagcatcggctgcctgagcagtgatgccatcatcagcagccctgagaacacccacgccgccaacagcatcgtgtcccagaccatccccaaggcccagatccagcagagcacccacacccacctggacatcagcctcttccccctgggcctgacagatgagaagagcaatggcaccatcgccctggtggatgacagtgaagatcctggggccaacgtgagcaacatccagctgcagcagaagatcagcagcctggagatcaagctgaaggtgtctgaggaggagaagcagaggatcaagcaggatgtggagagcctgatggagaagcacaacgtgctggagaagggcttcctgaaggagaaggagcaggaggccatctccttccaggaccgctacaaggagctgcaggagaagcacaagcaggagctggaggacatgaggaaggccggccacgaggccctgagcatcatcgtggatgagtacaaggccctgctgcagagctctgtgaagcagcaggtggaggccatcgagaagcagtacatcagcgccatcgagaagcaggcccacaagtgtgaggagctgctgaatgcccagcaccagaggctgctggagatgctggacacagagaaggagctgctgaaggagaagatcaaggaggccctgatccagcagagccaggagcagaaggagatcctggagaagtgcctggaggaggagcggcagaggaacaaggaggccctggtgtctgctgccaagctggagaaggaggccgtgaaggatgctgtgctgaaggtggtggaggaggagaggaagaacctggagaaggcccacgccgaggagcgggagctgtggaagacagagcacgccaaggaccaggagaaggtgtcccaggagatccagaaggccatccaggagcagaggaagatcagccaggagaccgtgaaggccgccatcatcgaggagcagaagaggtctgagaaggctgtggaggaggccgtgaagaggaccagagatgagctgattgagtacatcaaggagcagaagaggctggaccaggtgatccggcagaggagcctgagcagcctggagctgttcctgagctgtgcccagaagcagctgagcgccctgattgccacagagcctgtggacatcgagtag

SEQ ID NO: 313506 - DNA, 1236 bp, Artificial Sequence
  derived and/or modified sequence
atgcccatgtggaacaaggtgagcggcgtgcacctgagccccagcagtcctgaaatcgtcttggaccgtgaccacagttctagcattggatgcctttccagtgacgctattatatcctccccagagaacacccacgcagctaacagcatcgtctctcagaccatccccaaggcccagatccagcagagtacacatactcacctcgacatatccctgttcccacttggtctcaccgatgagaagtccaacggaacaatagccctagtcgacgattccgaggaccctggagcgaacgtatccaatatccaacttcaacaaaaaattagctcactggagataaagttgaaggtgtctgaagaagagaagcaacggatcaagcaggatgtcgagagcctgatggagaagcacaatgtgctggaaaagggatttctgaaagagaaggaacaggaggctattagcttccaggataggtataaagagctgcaggagaaacacaaacaggagctcgaggacatgaggaaggccggccacgaggcgctgtcaataatcgtggatgagtataaggctctgcttcagtcaagcgtgaagcagcaggtggaagcaatcgagaaacaatacatttccgcgatagaaaaacaggctcacaaatgcgaggaactgctgaatgcacagcaccagagactactcgagatgttggacacagagaaagagctgctcaaggaaaagatcaaagaggctcttatccagcaaagccaggagcaaaaagagatactcgaaaaatgtctggaagaggaacgccaaaggaataaagaggccctggtgtctgcagccaagctcgagaaggaggctgtgaaggatgcagtgcttaaggtagtggaggaggaaagaaaaaatctcgagaaagcccatgcagaagagagggaattgtggaagacagagcacgctaaagatcaagaaaaggttagtcaggagatccagaaggcaatccaggaacagcgtaaaatcagccaggaaacggtgaaggcagcgatcatcgaagaacagaagcgaagcgagaaagccgttgaagaggccgtcaaaaggacccgcgacgaacttatagagtacatcaaagaacagaaaagactcgaccaggtcattcgacagaggagcttgagctctctggagctgttcttgtcctgtgcacagaaacagctgagcgcgctcatcgccactgaaccggttgatatagaatag

SEQ ID NO: 313507 - DNA, 1236 bp, Artificial Sequence
  derived and/or modified sequence
atgcctatgtggaataaagtaagtggtgttcatttgagtcctagttctcccgaaattgtactggaccgggaccattcctcctcaatcggatgtcttagcagtgatgccataatcagttccccggaaaatacacatgccgctaattctattgtgagccaaactatccccaaagcccaaatacaacagtcgactcacacacacttggacatttcacttttccccctcggattgacagatgaaaaatctaatggaaccatcgccctggtggatgactccgaggatcccggtgctaatgtcagtaatattcagctgcagcagaaaattagctctctggagatcaaattaaaggtgtcagaggaggaaaaacagaggatcaagcaggatgtcgagtccttgatggagaaacacaacgtcctagagaaaggctttctgaaggagaaggaacaagaagccatctcatttcaggacagatataaagagctccaggaaaagcataaacaggagctggaggatatgaggaaggcgggacatgaggccctgtccattatcgtagatgagtataaggccctcctgcagtcgagcgttaagcagcaagtagaggctatcgagaagcagtatatctcggccattgaaaagcaggcccataagtgcgaggagctcctcaacgctcagcaccagaggctgctcgagatgttggacactgagaaagagcttctaaaggagaagataaaggaggcactcattcagcagagccaggagcagaaagagattctagaaaaatgcctggaggaagaaagacagcgcaataaagaggctttggtttcagccgcaaagctcgagaaagaagccgtcaaggacgccgtcctcaaggtcgtggaggaggaaagaaagaacctggaaaaggctcatgccgaggaacgggagctgtggaagaccgaacatgccaaggatcaggagaaggtaagccaagagatccagaaggccatccaggaacagcggaagatctcgcaggagacagtaaaggccgctataatcgaggagcaaaaaagatccgagaaagcggttgaggaagcggtcaagcgcactcgggacgagctcattgaatacatcaaagaacagaaacggttggatcaggtaatccggcaaaggtccctgagcagtctggagctatttctatcgtgcgcacagaaacagttgtcagcactaatcgcaactgagcccgtcgacatcgaatag

SEQ ID NO: 313508 - protein, 65 aa, Artificial Sequence
  derived and/or modified sequence
MGMTRMLLECSLSDKLCVIQEKQYEVIIVPTLLVTIFLILLGVILWLFIREQRTQQQRSGPQGKA

SEQ ID NO: 313509 - protein, 83 aa, Artificial Sequence
  derived and/or modified sequence
MGMTRMLLECSLSDKLCVIQEKQYEVIIVPTLLVTIFLILLGVILWLFIREQRTQQQRSGPQGIAPVPPPRDLSWEAGHGGNV

SEQ ID NO: 313510 - protein, 41 aa, Artificial Sequence
  derived and/or modified sequence
MGMTRMLLECSLSDKLCVIQEKQYEVIIVPTLLVTIFLILL

SEQ ID NO: 313511 - protein, 87 aa, Artificial Sequence
  derived and/or modified sequence
MGMTRMLLECSLSDKLCVIQEKQYEVIIVPTLLVTIFLILLGVILWLFIREQRTQQQRSGPQGIAPVPPPRDLSWEAGHGGNVALPL

SEQ ID NO: 313512 - DNA, 198 bp, Artificial Sequence
  derived and/or modified sequence
atgggcatgaccagaatgctgctggagtgcagcctgagcgacaagctgtgcgtgatccaggagaagcagtacgaggtgatcatcgtgcccaccctgctggtgaccatcttcctgatcctgctgggcgtgatcctgtggctgttcatcagagagcagagaacccagcagcagagaagcggcccccagggcaaggcctag

SEQ ID NO: 313513 - DNA, 252 bp, Artificial Sequence
  derived and/or modified sequence
atgggcatgaccagaatgctgctggagtgcagcctgagcgacaagctgtgcgtgatccaggagaagcagtacgaggtgatcatcgtgcccaccctgctggtgaccatcttcctgatcctgctgggcgtgatcctgtggctgttcatcagagagcagagaacccagcagcagagaagcggcccccagggcatcgcccccgtgcccccccccagagacctgagctgggaggccggccacggcggcaacgtgtag

SEQ ID NO: 313514 - DNA, 126 bp, Artificial Sequence
  derived and/or modified sequence
atgggcatgaccagaatgctgctggagtgcagcctgagcgacaagctgtgcgtgatccaggagaagcagtacgaggtgatcatcgtgcccaccctgctggtgaccatcttcctgatcctgctgtag

SEQ ID NO: 313515 - DNA, 264 bp, Artificial Sequence
  derived and/or modified sequence
atgggcatgaccagaatgctgctggagtgcagcctgagcgacaagctgtgcgtgatccaggagaagcagtacgaggtgatcatcgtgcccaccctgctggtgaccatcttcctgatcctgctgggcgtgatcctgtggctgttcatcagagagcagagaacccagcagcagagaagcggcccccagggcatcgcccccgtgcccccccccagagacctgagctgggaggccggccacggcggcaacgtggccctgcccctgtag

SEQ ID NO: 313516 - DNA, 198 bp, Artificial Sequence
  derived and/or modified sequence
atggggatgacccggatgcttctggagtgctccctatctgataaactgtgtgttattcaggagaaacaatatgaagtcattattgtaccaaccctgctagtcactatttttctcatcctgctcggcgtgattctatggctgttcatcagagaacagaggacacagcagcaacggtccggcccacagggaaaggcttag

SEQ ID NO: 313517 - DNA, 252 bp, Artificial Sequence
  derived and/or modified sequence
atgggaatgaccagaatgctgttggagtgctccctgagcgacaagctctgtgtaatccaagagaaacagtacgaggtgattatagtcccaactctcctggtaactatttttttgatcctgctcggcgtgattttatggctgttcattagggagcagcggacccagcagcagagatctggaccccagggcattgccccggttccacctccacgggacctgagctgggaggcaggtcacgggggcaacgtgtag

SEQ ID NO: 313518 - DNA, 126 bp, Artificial Sequence
  derived and/or modified sequence
atgggaatgacacgaatgctccttgaatgttcattgagtgataagctgtgcgtgatacaggagaagcaatatgaggtcatcattgtgcccacactcttggttactattttcttaatcctcctgtag

SEQ ID NO: 313519 - DNA, 264 bp, Artificial Sequence
  derived and/or modified sequence
atggggatgacaaggatgctcttggaatgctccctttcagacaagttgtgcgtaatccaggagaagcaatacgaggtgatcatcgtccctacactgctggtcaccatttttcttatactcctgggtgtcatactgtggctgttcatacgagaacaacgcacacagcagcagagaagcggtccccagggaattgctcccgtacccccgccccgcgacctcagctgggaagctgggcacgggggtaatgttgcgctgccgttatag

SEQ ID NO: 313520 - DNA, 198 bp, Artificial Sequence
  derived and/or modified sequence
atgggcatgaccaggatgctgctggagtgcagcctgagtgacaagctgtgtgtgatccaggagaagcagtatgaggtgatcatcgtgcccaccctgctggtgaccatcttcctgatcctgctgggcgtcatcctgtggctgttcatccgggagcagaggacccagcagcagaggagcggcccccagggcaaggcctag

SEQ ID NO: 313521 - DNA, 252 bp, Artificial Sequence
  derived and/or modified sequence
atgggcatgaccaggatgctgctggagtgcagcctgagtgacaagctgtgtgtgatccaggagaagcagtatgaggtgatcatcgtgcccaccctgctggtgaccatcttcctgatcctgctgggcgtcatcctgtggctgttcatccgggagcagaggacccagcagcagaggagcggcccccagggcatcgcccctgtgcccccaccccgggacctgtcctgggaggccggccatggaggaaatgtgtag

SEQ ID NO: 313522 - DNA, 126 bp, Artificial Sequence
  derived and/or modified sequence
atgggcatgaccaggatgctgctggagtgcagcctgagtgacaagctgtgtgtgatccaggagaagcagtatgaggtgatcatcgtgcccaccctgctggtgaccatcttcctgatcctgctgtag

SEQ ID NO: 313523 - DNA, 264 bp, Artificial Sequence
  derived and/or modified sequence
atgggcatgaccaggatgctgctggagtgcagcctgagtgacaagctgtgtgtgatccaggagaagcagtatgaggtgatcatcgtgcccaccctgctggtgaccatcttcctgatcctgctgggcgtcatcctgtggctgttcatccgggagcagaggacccagcagcagaggagcggcccccagggcatcgcccctgtgcccccaccccgggacctgtcctgggaggccggccatggaggaaatgtggccctgcccctgtag

SEQ ID NO: 313524 - DNA, 198 bp, Artificial Sequence
  derived and/or modified sequence
atgggcatgacccggatgctgctggagtgcagcctgagcgacaagctttgtgtcatccaggagaagcagtacgaagtcattatcgtgccaacacttctagtgaccatcttcctcattctgctcggggtgatcctctggctgtttattagagagcagcgtacccaacagcaaagatccggcccccagggcaaggcttag

SEQ ID NO: 313525 - DNA, 252 bp, Artificial Sequence
  derived and/or modified sequence
atgggcatgacccggatgctgctggagtgcagcctgagcgacaagctgtgcgtaatccaggagaaacagtatgaggtgataatcgtgcccactttgctcgtgaccatattcctaatcctgctgggggtgatcctctggttattcataagagaacagcgtactcaacaacaaaggtcagggccccaaggaatcgctcctgtccccccaccaagagaccttagctgggaggcgggccatggaggaaacgtgtag

SEQ ID NO: 313526 - DNA, 126 bp, Artificial Sequence
  derived and/or modified sequence
atgggcatgacccggatgctgctggagtgcagcctgagcgacaagctgtgtgtcatccaggaaaaacagtatgaggtgattatcgtccccacattgcttgtcactatcttcctgattctgctgtag

SEQ ID NO: 313527 - DNA, 264 bp, Artificial Sequence
  derived and/or modified sequence
atgggcatgacccggatgctgctggagtgcagcctgagcgacaagctgtgtgtgattcaagagaagcagtatgaggtcatcattgtaccgaccttgctagtgacaatctttctgattctgctgggcgtcatactttggctgttcattcgagagcaaaggacccagcagcagcgctccggaccccagggcattgctccagtccctcctccacgggacctctcgtgggaagctggccacggcgggaatgtggccttgccactttag

SEQ ID NO: 313528 - DNA, 198 bp, Artificial Sequence
  derived and/or modified sequence
atggggatgacccggatgctgctagagtgcagcttaagcgacaagctgtgtgtcattcaagagaaacaatatgaggtgatcatagttccaactctgctggtgaccatctttctgatcctgctgggagtgatactgtggctgttcatacgtgaacagcgcacacagcagcagcggagcgggcctcagggaaaggcatag

SEQ ID NO: 313529 - DNA, 252 bp, Artificial Sequence
  derived and/or modified sequence
atgggcatgaccagaatgttgttggagtgctccctgtctgacaagttgtgcgtcatccaagaaaagcaatatgaagtaatcatagtccccaccctgttagtaacgatttttttgatcctgctcggagttatcctctggttattcattagagagcagcgcacacaacaacagcgcagtggcccacagggcatcgcaccggtaccaccccctagggatctttcctgggaggcaggtcacggagggaatgtatag

SEQ ID NO: 313530 - DNA, 126 bp, Artificial Sequence
  derived and/or modified sequence
atgggaatgactagaatgctcttagaatgctccctctcagataagctttgcgttatccaggagaaacagtacgaggtgataatcgtgcccacgttgctggtgaccatctttttgatcttgctgtag

SEQ ID NO: 313531 - DNA, 264 bp, Artificial Sequence
  derived and/or modified sequence
atgggaatgacccgcatgctgctggaatgcagcctgtccgacaaactctgcgttatacaggagaagcagtacgaagtgatcatagtacccaccctactggtgacaatctttttgattcttctcggggtaattctctggctgtttattagagaacagcggacccagcagcagcggtccggtcctcagggcatcgctcccgtgccgccaccacgggatctgtcctgggaggcagggcatgggggaaacgtggctctgcccctctag

SEQ ID NO: 313532 - DNA, 520 bp, Artificial Sequence
  derived and/or modified sequence
gtcattatttcccctccgactgggccggtgccatcggaaaccggagtgaccagaggagggacacggaatctctggagacaggtaaaaatagaagcaagaaaaactgatagccctcagatttcataatttgcatccaatttcactgggctgcaagatatcaataagccttgcctctttaaactacttatgtacaaataaaagtgatggtgagaacctggctcaggaaatgcagtagcaggccatattgcatccaaaggaattactcacagctgtgctgtgtgcattctctgtgggcctagcagggaaggggacagccctgtggcaatgggcatgacacggatgctcctggaatgcagtctcagtgacaagttgtgtgtcatccaggagaagcagtatgaagtgattatcgtcccaactttgttggttactatcttcctcatccttcttggggtcatcctgtggctttttatcagagaacaaagaactcaacagcagcgttctggacctcaaggtaaagctc

SEQ ID NO: 313533 - DNA, 586 bp, Artificial Sequence
  derived and/or modified sequence
attcctggagagggggccatcaggagagggggaagggaaagaatgaggttacaggaattacttgtcagaggactgcatagcctttcagaccatggaatcgttgctttcagcttcggcttcctcatctgcaaagcataaatacgcatccaatttcactgggctgcaagatatcaataagccttgcctctttaaactacttatgtacaaataaaagtgatggtgagaacctggctcaggaaatgcagtagcaggccatattgcatccaaaggaattactcacagctgtgctgtgtgcattctctgtgggcctagcagggaaggggacagccctgtggcaatgggcatgacacggatgctcctggaatgcagtctcagtgacaagttgtgtgtcatccaggagaagcagtatgaagtgattatcgtcccaactttgttggttactatcttcctcatccttcttggggtcatcctgtggctttttatcagagaacaaagaactcaacagcagcgttctggacctcaaggcattgcccctgttcctccacctagggacctaagctgggaagcaggacatggaggaaatgtg

SEQ ID NO: 313534 - DNA, 543 bp, Artificial Sequence
  derived and/or modified sequence
atcgtgactccgttttcacctggactggagtcaccgtgatacctgacatctagcaatcactagagtaggaaatgagtatagatcagcaacaagtccagcctttacagttgcagcagaggtttcctgtggctcgagtgtggcgagtcccggaaacctcggagcccgcagacttcccttcgcgggagcccgcccgaactccatcctttgccggcagccacgccccgcagtgggaaggagggactgaaaagcatttccttgaggctggcacaccttgccctacccaaccctgtcattatttcccctccgactgggccggtgccatcggaaaccggagtgaccagaggagggacacggaattactcacagctgtgctgtgtgcattctctgtgggcctagcagggaaggggacagccctgtggcaatgggcatgacacggatgctcctggaatgcagtctcagtgacaagttgtgtgtcatccaggagaagcagtatgaagtgattatcgtcccaactttgttggttactatcttcctcatccttct

SEQ ID NO: 313535 - DNA, 582 bp, Artificial Sequence
  derived and/or modified sequence
accttgccctacccaaccctgtcattatttcccctccgactgggccggtgccatcggaaaccggagtgaccagaggagggacacgagacagggtcttgctgaagaccctggctaaccaggctggcctggaactcctggcctcaagtgatcctcatgccttcatcttccaaagtgctgggattacagaagtcagccacggaggtcagctgacagctaattcttaacaattgacatggtcagagcaaatcgaaggaattactcacagctgtgctgtgtgcattctctgtgggcctagcagggaaggggacagccctgtggcaatgggcatgacacggatgctcctggaatgcagtctcagtgacaagttgtgtgtcatccaggagaagcagtatgaagtgattatcgtcccaactttgttggttactatcttcctcatccttcttggggtcatcctgtggctttttatcagagaacaaagaactcaacagcagcgttctggacctcaaggcattgcccctgttcctccacctagggacctaagctgggaagcaggacatggaggaaatgtggctttgccactta

SEQ ID NO: 313536 - protein, 434 aa, Artificial Sequence
  derived and/or modified sequence
MLCGRPRSSSDNRNFLRERAGLSSAAVQTRIGNSAASRRSPAARPPVPAPPALPRGRPGTEGSTSLSAPAVLVVAVAVVVVVVSAVAWAMANYIHVPPGSPEVPKLNVTVQDQEEHRCREGALSLLQHLRPHWDPQEVTLQLFTDGITNKLIGCYVGNTMEDVVLVRIYGNKTELLVDRDEEVKSFRVLQAHGCAPQLYCTFNNGLCYEFIQGEALDPKHVCNPAIFRLIARQLAKIHAIHAHNGWIPKSNLWLKMGKYFSLIPTGFADEDINKRFLSDIPSSQILQEEMTWMKEILSNLGSPVVLCHNDLLCKNIIYNEKQGDVQFIDYEYSGYNYLAYDIGNHFNEFAGVSDVDYSLYPDRELQSQWLRAYLEAYKEFKGFGTEVTEKEVEILFIQVNQFALGENLNFIIGNKYCQLFSLKWLLISFGDCGL

SEQ ID NO: 313537 - DNA, 1305 bp, Artificial Sequence
  derived and/or modified sequence
atgctgtgtggccgcccccgctcttcaagcgataaccggaacttcctccgggagcgcgccggtctgtcctctgctgcagtgcaaactcggataggcaattctgccgctagccgccggagccctgccgctcggccccctgtgcccgccccacctgcgctgcccagaggtcggcctgggacagagggaagcaccagtctgagcgcacccgccgtactcgtagtcgcagtcgccgtcgtggtggttgtcgtgtccgccgttgcctgggccatggccaattatatacacgtgccacctgggagtcccgaggtacccaaacttaatgtaaccgtccaggaccaagaggagcaccgctgcagagaaggtgccctgtccctgctacagcacctgagacctcattgggatccccaggaggtcaccctgcaactttttaccgacgggatcaccaataaacttattggatgttatgtggggaacacaatggaagacgtcgtcctggtcagaatttacggcaacaaaaccgaactcctggtcgatagagacgaggaggtgaagtcattcagggtcttgcaagcacatggttgcgccccgcagctctattgcaccttcaacaatggactctgctacgagtttatccagggcgaagccttggatcccaaacatgtgtgtaatcctgccatcttccgcctgatcgctagacagctggccaaaatccacgcaatacacgcgcacaacggctggatccctaagtccaacttgtggctgaaaatgggaaagtatttctcattaatcccgaccggatttgctgacgaggatatcaataagcgttttctatctgacataccctctagccaaattctgcaggaggaaatgacctggatgaaagaaattctgtccaatttagggtctcccgtggtgctttgccataatgacttgctttgcaagaacataatctacaatgagaaacagggcgacgtccagtttatagattatgaatactccggctacaactatctagcatacgacatcggcaatcatttcaacgaatttgccggtgtgtccgacgtggattatagcctttacccagatagggaattacagtcccaatggctgcgagcctacctggaggcttataaagaatttaaaggcttcggaacggaggtgactgagaaggaagtcgagatactatttattcaggttaatcagtttgcactgggcgaaaaccttaattttataataggaaacaagtactgccagctcttttctctaaagtggcttctgattagttttggcgattgcggactctag

SEQ ID NO: 313538 - DNA, 1305 bp, Artificial Sequence
  derived and/or modified sequence
atgctgtgtggccggcccaggagcagcagtgacaacagaaacttcctgcgggagcgggccggcctgagcagcgctgctgtgcagaccagaattggcaacagcgctgccagccgccgcagccctgctgcccggccccctgtgcctgcccccccagccctgccccggggccggcccggcacagagggcagcaccagcctgagcgccccagctgtgctggtggtggccgtggccgtggtggtggtggtggtgtctgctgtggcctgggccatggccaactacatccacgtgcccccaggcagccctgaggtgcccaagctgaatgtgacagtgcaggaccaggaggagcaccgctgccgggagggcgccctgagcctgctgcagcacctgcggccccactgggacccccaggaggtgaccctgcagctgttcacagatggcatcaccaacaagctgattggctgctacgtgggcaacaccatggaggatgtggtgctggtgcgcatctacggcaacaagacagagctgctggtggacagagatgaggaggtgaagagcttccgggtgctgcaggcccacggctgtgccccccagctgtactgcaccttcaacaacggcctgtgctatgagttcatccagggcgaggccctggaccccaagcacgtgtgcaacccagccatcttccgcctcatcgcccggcagctggccaagatccacgccatccacgcccacaacggctggatccccaagagcaacctgtggctgaagatgggcaagtacttcagcctcatccccactggatttgctgatgaggacatcaacaagcgcttcctgagtgacatccccagcagccagatcctgcaggaggagatgacctggatgaaggagatcctgagcaacctgggcagccctgtggtgctgtgccacaatgacctgctgtgcaagaacatcatctacaatgagaagcagggagatgtgcagttcatcgactatgagtacagcggctacaactacctggcctatgacatcggcaaccacttcaatgaatttgctggggtgtctgatgtggactacagcctgtacccagaccgggagctgcagagccagtggctgcgggcctacctggaggcctacaaggagttcaagggctttggaacagaggtgacagagaaggaggtggagatcctcttcatccaggtgaaccagtttgccctgggggagaacctgaacttcatcatcggcaacaagtactgccagctgttcagcctgaagtggctgctgatcagctttggagactgtggcctgtag

SEQ ID NO: 313539 - DNA, 1305 bp, Artificial Sequence
  derived and/or modified sequence
atgctgtgcggccggccccggagcagcagcgacaaccggaacttcctgcgggagagggccggtctctccagcgctgctgttcaaactagaataggtaacagcgccgcatcacgccggagtccagccgctcgcccaccggttcccgcccctccagccttgccgagggggagaccgggaaccgaagggtccaccagtttgtccgcacctgcagtgctggtcgtagctgtcgctgtggtcgttgtggttgttagtgccgtggcctgggccatggcgaattatattcacgtgccccctggaagcccggaggtgccaaagttgaacgttaccgtgcaagaccaagaggaacataggtgtcgtgagggggccctgtcactcctgcagcacctgcggccacattgggacccccaggaggtcaccctccaactgttcacagatggaataacaaataagctgatcggctgttacgtcgggaataccatggaagacgtcgtcctagtgagaatctatggaaataagaccgagctgttagttgatcgggatgaagaagtcaagtcatttcgagtgctgcaggcccacggctgcgctcctcaactttattgcacctttaataacgggctgtgttatgagttcatccaaggtgaggccttggatcctaaacacgtgtgtaaccccgctatcttcaggctcatcgctaggcagctggcgaagatccatgccatacatgcccataatggctggatccctaaatctaacttgtggctcaagatgggcaaatactttagcctgatccctaccgggtttgcagatgaggacataaataagagattcttaagcgacattcctagttcccagatcctgcaagaagagatgacctggatgaaagagattctcagcaacttagggagtccggtggtgctgtgccataacgacttattgtgcaagaatattatctataacgaaaagcagggcgatgtgcagtttattgattacgaatactctggctataattacctggcctacgatatcggaaaccactttaacgagttcgcgggcgtgagcgatgtcgactattcgctgtatcccgaccgcgagctccagagccagtggctcagagcctacctcgaagcttacaaggagttcaaaggctttggaactgaggttactgagaaagaggtggagatcctattcatccaggttaaccagttcgcgctcggagagaatctgaattttatcatcggtaataagtactgtcagctgttcagcttaaaatggctcctgatctcatttggggactgcggcctctag

SEQ ID NO: 313540 - DNA, 1305 bp, Artificial Sequence
  derived and/or modified sequence
atgctctgcggcagacccaggtcatctagcgataatagaaatttcctccgtgagcgtgctggcttgtcttccgccgcagtgcagactcgtattggaaattctgcagcatcccgcagatccccggcagctcgcccacctgtgccggctccccctgccctaccaagaggacgtcctggcaccgagggcagcacatcactgtcagccccagccgtattggttgtggcagtcgcggtcgtggttgtggtggtgtcagcagttgcatgggctatggcaaactatattcacgtgccccctggctcacccgaggtgccaaaactgaatgtgaccgtgcaggaccaagaggaacatcgatgccgtgaaggagctttgtctttgctgcaacatctcagacctcactgggaccctcaggaagtgacactgcagctgttcacagatggtatcactaataagctcatcggctgctacgtgggcaatactatggaggatgtggtgctagtccgaatttacggaaataagactgagctgctggtggatagagatgaagaagtaaagtcgtttagggtgctccaggcccatggctgcgcccctcagctctattgtaccttcaacaacggcctctgctatgaatttatacagggggaggcccttgaccccaagcatgtatgcaatcccgctatattcagactaatagcaagacagcttgcaaagatccatgccatccatgcccacaatggttggatcccaaaatcaaatctatggttaaagatgggcaagtacttctccctgatccctacaggtttcgcggatgaggatataaataagcggtttctctccgatatcccaagttcacaaatcctgcaggaggagatgacatggatgaaggagattctcagcaacttaggctccccagttgtgctgtgtcataacgatttgctctgcaagaatattatctataacgagaaacagggtgacgtccagtttattgattatgagtacagcgggtacaactatctcgcttatgacataggtaatcactttaatgaatttgcgggagtctccgatgtggactacagtctgtaccccgacagggagctccagagccagtggctgagggcctatctggaggcatataaagagttcaagggtttcggaacggaggtaacagaaaaggaggtagagattctttttattcaggtgaatcagttcgctctgggtgaaaatctgaactttatcatcgggaacaagtattgtcagctattctccctaaaatggctgctgatatccttcggcgattgcggcctgtag

SEQ ID NO: 313541 - DNA, 1305 bp, Artificial Sequence
  derived and/or modified sequence
atgctgtgcggcagacccagaagcagcagcgacaacagaaacttcctgagagagagagccggcctgagcagcgccgccgtgcagaccagaatcggcaacagcgccgccagcagaagaagccccgccgccagaccccccgtgcccgccccccccgccctgcccagaggcagacccggcaccgagggcagcaccagcctgagcgcccccgccgtgctggtggtggccgtggccgtggtggtggtggtggtgagcgccgtggcctgggccatggccaactacatccacgtgccccccggcagccccgaggtgcccaagctgaacgtgaccgtgcaggaccaggaggagcacagatgcagagagggcgccctgagcctgctgcagcacctgagaccccactgggacccccaggaggtgaccctgcagctgttcaccgacggcatcaccaacaagctgatcggctgctacgtgggcaacaccatggaggacgtggtgctggtgagaatctacggcaacaagaccgagctgctggtggacagagacgaggaggtgaagagcttcagagtgctgcaggcccacggctgcgccccccagctgtactgcaccttcaacaacggcctgtgctacgagttcatccagggcgaggccctggaccccaagcacgtgtgcaaccccgccatcttcagactgatcgccagacagctggccaagatccacgccatccacgcccacaacggctggatccccaagagcaacctgtggctgaagatgggcaagtacttcagcctgatccccaccggcttcgccgacgaggacatcaacaagagattcctgagcgacatccccagcagccagatcctgcaggaggagatgacctggatgaaggagatcctgagcaacctgggcagccccgtggtgctgtgccacaacgacctgctgtgcaagaacatcatctacaacgagaagcagggcgacgtgcagttcatcgactacgagtacagcggctacaactacctggcctacgacatcggcaaccacttcaacgagttcgccggcgtgagcgacgtggactacagcctgtaccccgacagagagctgcagagccagtggctgagagcctacctggaggcctacaaggagttcaagggcttcggcaccgaggtgaccgagaaggaggtggagatcctgttcatccaggtgaaccagttcgccctgggcgagaacctgaacttcatcatcggcaacaagtactgccagctgttcagcctgaagtggctgctgatcagcttcggcgactgcggcctgtag

SEQ ID NO: 313542 - DNA, 2262 bp, Artificial Sequence
  derived and/or modified sequence
gtgaccggaggcgagaaaccccgcctcggcaccctgacgcagcgcaggacccgccccgcgcgtgacgccagcgtcaggccagccccggcatgctctgcggccgcccgcggtccagctccgacaacaggaattttctccgagagcgggccgggctcagttcagctgctgtccagacccggatcggcaacagtgccgcctccagacgttctcctgccgctcgcccgcccgtcccagcgcccccagccctcccgcgagggcgccccgggacggaaggatccaccagtctgtcggcgcccgccgttctcgtggtcgccgtcgccgtcgtcgtggtggtagtctccgccgtcgcctgggccatggccaattacatccacgtccctcccggctccccggaggtgcccaagctgaacgtcaccgttcaggatcaggaggagcatcgctgccgggagggggccctgagcctcctgcaacacctgcggcctcactgggacccccaggaggtgaccctgcagctcttcacagatggaatcacaaataaacttattggctgttacgtgggaaacaccatggaggatgtagtcctggtgagaatttatggcaataagactgagttattagtcgatcgagatgaggaagtaaagagttttcgagtgttgcaggctcatgggtgtgcaccacaactctactgtaccttcaataatggactatgctatgaatttatacaaggagaagcactggatccaaagcatgtctgcaacccagccattttcaggctaatagctcgtcagcttgctaaaatccatgctattcatgcacacaatggctggatccccaaatctaatctttggctaaagatgggaaagtatttctctctcattcccacaggatttgcagatgaagacattaataaaaggttcctaagtgatatcccaagctctcagattctccaggaagagatgacttggatgaaggagattctttccaacctgggctcacctgttgtgctttgccataatgacctattgtgtaagaatataatctacaatgagaaacaaggtgatgtacagttcattgattatgaatattctggatacaactacctggcatatgatattggaaatcatttcaatgaatttgcaggtgtgagtgatgtagactatagtctgtatccagatagagaactacagagtcagtggctgcgtgcttaccttgaagcctacaaagaatttaagggctttgggactgaagttactgaaaaggaggtagaaatactcttcattcaagtcaatcagtttgcattgggtgaaaacttgaattttatcattggcaacaaatattgtcagttattttcactgaaatggcttctcatttcttttggggattgtgggctttgattcaagccaaatactccactattgagtttgatttccttgggtatgcaattgttcgttttaaccagtactttaaaatgaagcctgaggttactgcattaaaagtgcctgagtaaagaagagatttaattattctccagtagctgagcaatgcttgtgaatcttttcttaagaaatcccaaaaagccaatattagttaaaattctgttgtttaatttggttatcttgctttataaattatgcctctaaacaatcaaatctatttttgaaatagactgaatgatgtcaagaaatatacctactgctatccgtatgtggtggattagaaatgtgttaaatctgcaaaaggtataaagatgtcagtttaatttctttgataatttaacctatgttgtatgtgaattatttattataaacttagcacgattctgtgactgtttttctctgtttcacgttcgttgagtgtaagcaatgaaaatgtcccaaataagttttttaagttttactttaataagattaatttcagtaaacattctagttgttcagtgtaacctttttatcttgatgcattgtaagtaaaatgaatcatttactcttgaaatgccagtcattgactgatgtagataatttaggattttcatataaaaatagctgtttaggaaggtgaaatacattcactgtctctgttggtggtacatcttgttgaattcaatattagaaagtatttctttttggggtaatataacttagaattaaatccctgtttctctatgtagtctggcagtataaatataaatatttaccatataatcttggaataagtattagttaatgttaccaaaatctgtattaaataatgttttcaaatgct

SEQ ID NO: 313543 - protein, 300 aa, Artificial Sequence
  derived and/or modified sequence
MYKDCIESTGDYFLLCDAEGPWGIILESLAILGIVVTILLLLAFLFLMRKIQDCSQWNVLPTQLLFLLSVLGLFGLAFAFIIELNQQTAPVRYFLFGVLFALCFSCLLAHASNLVKLVRGCVSFSWTTILCIAIGCSLLQIIIATEYVTLIMTRGMMFVNMTPCQLNVDFVVLLVYVLFLMALTFFVSKATFCGPCENWKQHGRLIFITVLFSIIIWVVWISMLLRGNPQFQRQPQWDDPVVCIALVTNAWVFLLLYIVPELCILYRSCRQECPLQGNACPVTAYQHSFQVENQELSRDC

SEQ ID NO: 313544 - DNA, 903 bp, Artificial Sequence
  derived and/or modified sequence
atgtacaaggactgcatcgagtccactggagactattttcttctctgtgacgccgaggggccatggggcatcattctggagtccctggccatacttggcatcgtggtcacaattctgctactcttagcatttctcttcctcatgcgaaagatccaagactgcagccagtggaatgtcctccccacccagctcctcttcctcctgagtgtcctggggctcttcggactcgcttttgccttcatcatcgagctcaatcaacaaactgcccccgtacgctactttctctttggggttctctttgctctctgtttctcatgcctcttagctcatgcctccaatctagtgaagctggttcggggttgtgtctccttctcctggacgacaattctgtgcattgctattggttgcagtctgttgcaaatcattattgccactgagtatgtgactctcatcatgaccagaggtatgatgtttgtgaatatgacaccctgccagctcaatgtggactttgttgtactcctggtctatgtcctcttcctgatggccctcacattcttcgtctccaaagccaccttctgtggcccgtgtgagaactggaagcagcatggaaggctcatctttatcactgtgctcttctccatcatcatctgggtggtgtggatctccatgctcctgagaggcaacccgcagttccagcgacagccccagtgggacgacccggtcgtctgcattgctctggtcaccaacgcatgggttttcctgctgctgtacatcgtccctgagctctgcattctctacagatcgtgtagacaggagtgccctttacaaggcaatgcctgccccgtcacagcctaccaacacagcttccaagtggagaaccaggagctctccagagactgttga

SEQ ID NO: 313545 - DNA, 448 bp, Artificial Sequence
  derived and/or modified sequence
ccagcactacagcctaagcttccagagtggacacggagaagggcatcagaaaaccattctggtgaggtccacacccataagtcaccatgtacaaggactgcatcgagtccactggagactattttcttctctgtgacgccgaggggccatggggcatcattctggagtccctggccatacttggcatcgtggtcacaattctgctactcttagcatttctcttcctcatgcgaaagatccaagactgcagccagtggaatgtcctccccacccagctcctcttcctcctgagtgtcctggggctcttcggactcgcttttgccttcatcatcgagctcaatcaacaaactgcccccgtacgctactttctctttggggttctctttgctctctgtttctcatgcctcttagctcatgcctccaatctagtgaagctggttcggggttg

SEQ ID NO: 313546 - DNA, 903 bp, Artificial Sequence
  derived and/or modified sequence
atgtataaggactgcattgaaagcacaggcgactacttcttgttatgcgatgcggagggaccatggggaataatattggaaagtctagccattctgggcattgtcgttacgatcttgctgttattggccttccttttcctgatgcggaagatccaggactgctcacaatggaacgtacttcctactcaactgctgtttttgttgtctgtcctcggactgtttggcctagcattcgctttcatcattgaactgaaccagcagacggcccccgttcggtacttcctttttggtgtgttatttgccctgtgttttagttgcttactggcccacgcgagcaatctcgttaagcttgtcagaggctgcgtatctttcagctggactaccattctatgcatcgctattgggtgcagcctcttgcagattataattgccactgagtatgtgaccctgataatgacgcgcggtatgatgttcgtcaacatgacgccctgtcagctcaacgtggatttcgtggtactgctagtgtacgtgctgtttctgatggccctcactttcttcgtttcaaaagctaccttttgtggaccctgtgagaactggaaacagcacggacggctgatctttatcacggtgctgttcagcatcatcatatgggtggtgtggatttctatgctcctccgggggaacccccagttccaacgccagcctcagtgggacgatcctgtggtgtgtatcgccctcgtgaccaatgcatgggttttcctcttgctatatatcgtgcccgaattatgcatcctatatcgcagctgtcggcaggaatgtccccttcagggaaacgcgtgtcctgtcactgcatatcagcactctttccaggtcgaaaatcaggaactgagccgcgattgctag

SEQ ID NO: 313547 - DNA, 363 bp, Artificial Sequence
  derived and/or modified sequence
atgtacaaagactgtattgagtcaacaggcgattacttccttctgtgtgacgccgaaggaccatggggtattatcctggagtccctggcgatcttaggtatcgtggtcaccattcttctgttgctcgctttcctcttcctgatgcggaaaatccaggattgctcccagtggaacgtgctacctacccagcttttatttttactatctgtgctgggactgtttggtctcgccttcgcatttataatcgaactcaatcaacagacagcaccggttcgctacttcctgtttggagttctgtttgcgctgtgcttctcctgcctccttgcgcacgctagcaatcttgtgaaattggtcagagggtag

SEQ ID NO: 313548 - DNA, 903 bp, Artificial Sequence
  derived and/or modified sequence
atgtacaaggactgcatcgagagcactggagactacttcctgctgtgtgatgctgagggcccctggggcatcatcctggagagcctggccatcctgggcatcgtggtgaccatcctgctgctgctggccttcctgttcctgatgaggaagatccaggactgcagccagtggaatgtgctgcccacccagctgctcttcctgctgtctgtgctgggcctgtttggcctggcctttgccttcatcatcgagctgaaccagcagacagcccctgtgcgctacttcctgtttggagtgctgtttgccctgtgcttcagctgcctgctggcccacgccagcaacctggtgaagctggtgcggggctgtgtgtccttctcctggaccaccatcctgtgcatcgccatcggctgcagcctgctgcagatcatcatcgccacagaatatgtgaccctcatcatgacccggggcatgatgtttgtgaacatgaccccctgccagctgaatgtggactttgtggtgctgctggtgtatgtgctcttcctgatggccctgaccttctttgtgtccaaggccaccttctgtggcccctgtgagaactggaagcagcacggccgcctcatcttcatcaccgtgctcttcagcatcatcatctgggtggtgtggatctccatgctgctgcggggcaacccccagttccagaggcagccccagtgggatgatcctgtggtgtgcatcgccctggtgaccaatgcctgggtgttcctgctgctgtacatcgtgcctgagctgtgcatcctgtaccgcagctgccggcaggagtgccccctgcagggcaatgcctgccctgtgacagcctaccagcacagcttccaggtggagaaccaggagctgagccgggactgctag

SEQ ID NO: 313549 - DNA, 363 bp, Artificial Sequence
  derived and/or modified sequence
atgtacaaggactgcatcgagagcactggagactacttcctgctgtgtgatgctgagggcccctggggcatcatcctggagagcctggccatcctgggcatcgtggtgaccatcctgctgctgctggccttcctgttcctgatgaggaagatccaggactgcagccagtggaatgtgctgcccacccagctgctcttcctgctgtctgtgctgggcctgtttggcctggcctttgccttcatcatcgagctgaaccagcagacagcccctgtgcgctacttcctgtttggagtgctgtttgccctgtgcttcagctgcctgctggcccacgccagcaacctggtgaagctggtgcggggctag

SEQ ID NO: 313550 - DNA, 903 bp, Artificial Sequence
  derived and/or modified sequence
atgtacaaggactgcatcgagagcaccggcgactacttcctgctgtgtgatgccgaggggccctgggggatcatactcgagtccttagcaatcttgggcattgttgttactatcctgctgctgctggcatttctgtttcttatgaggaagatccaggattgtagtcagtggaacgtactgcccactcagctcttgtttctcctatccgtcctcggattgtttggactcgcattcgccttcatcattgagctcaaccaacagacagctcccgtccgctacttcctgtttggagtcctgttcgcattgtgcttcagttgcctgcttgcccacgcaagtaacctcgtgaaactggttcgaggctgcgtgtccttctcctggacaaccatcctgtgtattgccattgggtgtagcttactgcagatcatcatagctacagaatacgtgacactgattatgacccgcggcatgatgtttgtgaacatgacgccgtgtcagctgaacgtggacttcgtggtgctgctcgtttatgtcctcttccttatggccttgacttttttcgtatcaaaagcaacgttttgtggcccttgcgagaattggaagcaacacggacggttgatattcattaccgtgctgttctcgatcattatctgggtggtgtggatcagcatgctcctgaggggcaatcctcagttccaaaggcagccacagtgggacgaccccgtcgtgtgtatcgccctcgtcaccaacgcctgggtattcctgctgctttatattgtgcccgaattgtgcatattgtataggtcctgtcgccaagaatgtccactccagggtaacgcctgtccagtgactgcttaccagcattcattccaggttgaaaatcaagaactgtcaagggattgctag

SEQ ID NO: 313551 - DNA, 363 bp, Artificial Sequence
  derived and/or modified sequence
atgtacaaggactgcatcgagagcaccggcgactacttcctgctgtgcgacgcagagggaccctgggggatcattcttgagtctctggcgatcttgggtattgttgtgaccatactgctgttgctggcctttcttttcctaatgcgaaaaattcaggactgtagtcagtggaacgttcttccgacacagctgctgtttctgctctctgtgctgggcctgttcggactcgcctttgcctttatcatcgagcttaatcagcaaacggcaccagtccggtattttctatttggtgttctgtttgccctgtgctttagctgcctccttgcccacgccagtaacttagtcaaactggtgcgaggatag

SEQ ID NO: 313552 - DNA, 903 bp, Artificial Sequence
  derived and/or modified sequence
atgtacaaggattgcattgagtccaccggagactatttcctgctgtgcgacgcagagggaccttggggcattatacttgaatctttggccatactgggtattgtcgtcaccattttactcctcctggcgttcctgttcctcatgagaaaaatccaggattgctctcagtggaatgtactgccaactcagctgctctttctgctaagcgtgttgggactgttcggccttgctttcgcattcatcatagagttaaaccagcagacggcaccagttcgatatttcctattcggcgtcctctttgccctatgcttttcatgcctgcttgcccatgcctcgaatctggtaaaactggttaggggatgcgtgtcctttagctggactactatactgtgtattgcaattggttgttctctgctgcaaatcatcattgctacggaatacgtgacactaataatgaccagggggatgatgtttgttaatatgacaccttgccagcttaacgtcgactttgtggtcctgctggtttacgtgctgtttctgatggcactgacgttcttcgtttccaaagccaccttctgtggcccttgtgagaactggaaacagcatggccgtctcatctttatcactgtgctctttagtatcattatctgggttgtctggatctctatgcttttacgcggtaacccacaattccagcggcagccacaatgggatgacccagtggtctgcattgctctcgtcactaacgcttgggtgttcctgctactctatatcgtccccgagctgtgcattttatatcgatcctgcagacaggagtgccccctccagggtaacgcttgcccagtaactgcgtaccagcattcgtttcaggtcgagaaccaggaactcagccgggattgctag

SEQ ID NO: 313553 - DNA, 363 bp, Artificial Sequence
  derived and/or modified sequence
atgtacaaagactgcatagagtccactggtgactattttctgttatgtgacgctgaaggtccatggggcataatcctcgaatctctcgctatcctgggaatcgtggtcaccatcctgttgcttttagcatttctatttttgatgaggaagatccaggactgttctcagtggaatgtgctgccaactcaactgttgttcctgttgagtgtgctgggtctgttcggtctagccttcgcatttatcatcgagttaaatcagcagactgcccctgtacgttatttcctattcggagtgctctttgccctctgcttttcttgcctgctggcccatgcctcaaacctagttaagcttgttaggggctag

SEQ ID NO: 313554 - DNA, 903 bp, Artificial Sequence
  derived and/or modified sequence
atgtacaaggactgcatcgagagcaccggcgactacttcctgctgtgcgacgccgagggcccctggggcatcatcctggagagcctggccatcctgggcatcgtggtgaccatcctgctgctgctggccttcctgttcctgatgagaaagatccaggactgcagccagtggaacgtgctgcccacccagctgctgttcctgctgagcgtgctgggcctgttcggcctggccttcgccttcatcatcgagctgaaccagcagaccgcccccgtgagatacttcctgttcggcgtgctgttcgccctgtgcttcagctgcctgctggcccacgccagcaacctggtgaagctggtgagaggctgcgtgagcttcagctggaccaccatcctgtgcatcgccatcggctgcagcctgctgcagatcatcatcgccaccgagtacgtgaccctgatcatgaccagaggcatgatgttcgtgaacatgaccccctgccagctgaacgtggacttcgtggtgctgctggtgtacgtgctgttcctgatggccctgaccttcttcgtgagcaaggccaccttctgcggcccctgcgagaactggaagcagcacggcagactgatcttcatcaccgtgctgttcagcatcatcatctgggtggtgtggatcagcatgctgctgagaggcaacccccagttccagagacagccccagtgggacgaccccgtggtgtgcatcgccctggtgaccaacgcctgggtgttcctgctgctgtacatcgtgcccgagctgtgcatcctgtacagaagctgcagacaggagtgccccctgcagggcaacgcctgccccgtgaccgcctaccagcacagcttccaggtggagaaccaggagctgagcagagactgctag

SEQ ID NO: 313555 - DNA, 363 bp, Artificial Sequence
  derived and/or modified sequence
atgtacaaggactgcatcgagagcaccggcgactacttcctgctgtgcgacgccgagggcccctggggcatcatcctggagagcctggccatcctgggcatcgtggtgaccatcctgctgctgctggccttcctgttcctgatgagaaagatccaggactgcagccagtggaacgtgctgcccacccagctgctgttcctgctgagcgtgctgggcctgttcggcctggccttcgccttcatcatcgagctgaaccagcagaccgcccccgtgagatacttcctgttcggcgtgctgttcgccctgtgcttcagctgcctgctggcccacgccagcaacctggtgaagctggtgagaggctag

SEQ ID NO: 313556 - protein, 84 aa, Artificial Sequence
  derived and/or modified sequence
MERKNDPLPISTVGTRGKGPKRDEQYRIMWNELETLVRAHINNSEKHQRVLECLMACRSKPPEEEERKKEEERGKTKRTSQRKQ

SEQ ID NO: 313557 - protein, 293 aa, Artificial Sequence
  derived and/or modified sequence
MVVLFYWNNHESQVLKSLVICLVAMEERFLHVLSSSRSILEDPPSISEGCGGRVTDYRITVVPLASVIVKESLTEEDVLNCQKTIYNLVDMERKNDPLPISTVGTRGKGPKRDEQYRIMWNELETLVRAHINNSEKHQRVLECLMACRSKPPEEEERKKRGRKREDKEDKSEKAVKDYEQEKSWQDSERLKGILERGKEELAEAEIIKDSPDSPEPPNKKPLVEMDETPQVEKSKGPVSLLSLWSNRINTANSRKHQEFAGRLNSVNNRAELYQHLKEENGMETTENGKASRQ

SEQ ID NO: 313558 - protein, 163 aa, Artificial Sequence
  derived and/or modified sequence
MKIFSESHKTVFVVDHCPYMAESCRQHVEFDMLVKNRTQGIIPLAPISKSLWTCSVESSMEYCRIMYDIFPFKKLVNFIVSDSGAHVLNSWTQEDQNLQELMAALAAVGPPNPRADPECCSILHGLVAAVETLCKITEYQHEARTLLMENAERVGNRGRIICI

SEQ ID NO: 313559 - protein, 225 aa, Artificial Sequence
  derived and/or modified sequence
MKIFSESHKTVFVVDHCPYMAESCRQHVEFDMLVKNRTQGIIPLAPISKSLWTCSVESSMEYCRIMYDIFPFKKLVNFIVSDSGAHVLNSWTQEDQNLQELMAALAAVGPPNPRADPECCSILHGLVAAVETLCKITEYQHEARTLLMENAERVGNRGRIICITNAKSDSHVRMLEDCVQETIHEHNKLAANSDHLMQIQKCELVLIHTYPVGEDSLVSDRSKKE

SEQ ID NO: 313560 - DNA, 1198 bp, Artificial Sequence
  derived and/or modified sequence
gaattacactattgtactggagcttatcggatttcacctgtagatgtaaatagtagaccttcctcctgccttactaattttcttctaaatggtcgttctgttttattggaacaaccacgaaagtcaggttctaaagtcattagtcatatgcttagtagccatggaggagagatttttgcacgtccttagcagttctcgatccattctagaagatccaccttcaattagtgaaggatgtggaggaagagttacagactaccggattacagtagttccattagccagtgttattgtgaaagaatctctgacagaagaagatgtgttaaactgtcaaaaaacaatatacaacttagttgatatggaaagaaaaaatgatcctctacctatttccacagttggtacaagaggaaagggccctaaaagagatgaacaataccgtatcatgtggaatgaattagaaacccttgtcagagcccatatcaacaactcagagaaacatcaaagagtcttggaatgtctgatggcatgcaggagcaaacccccagaagaggaagaacgaaagaaacgaggaagaaagagggaagacaaagaggacaagtcagagaaagcagtgaaagattatgaacaggaaaagtcttggcaagactcagagagattaaaaggaatcttagagcgtggaaaagaagaattggctgaagctgagattataaaagattcgcctgattccccagaacctccaaacaaaaaaccccttgttgaaatggatgaaactccacaagtggaaaaatcaaaagggccagtgtcgttattatccttgtggagtaatagaatcaatactgccaattccagaaaacatcaggaatttgctggacgtttgaactctgttaataacagagctgaactatatcaacatcttaaagaggaaaatgggatggagacaacagaaaatggaaaagccagccggcagtgaagagtgacttgaagaactaaatttagcatattgcaaaaatattttgtgcggaattcgatataagtacttttacagcaagatggtatagttatgttgcctggactggtttttacatttttaaaatatttcagctgtcatttttgtactaattataaaattggcacataattcaaaaatatacatttgagatgatttgtcctcccaaattatacaagtttattttatggt

SEQ ID NO: 313561 - protein, 124 aa, Artificial Sequence
  derived and/or modified sequence
MAALAAVGPPNPRADPECCSILHGLVAAVETLCKITEYQHEARTLLMENAERVGNRGRIICITNAKSDSHVRMLEDCVQETIHEHNKLAANSDHLMQIQKCELVLIHTYPVGEDSLVSDRSKKE

SEQ ID NO: 313562 - DNA, 492 bp, Artificial Sequence
  derived and/or modified sequence
atgaagatcttcagcgagagccacaagaccgtgttcgtggtggaccactgcccctacatggccgagagctgcagacagcacgtggagttcgacatgctggtgaagaacagaacccagggcatcatccccctggcccccatcagcaagagcctgtggacctgcagcgtggagagcagcatggagtactgcagaatcatgtacgacatcttccccttcaagaagctggtgaacttcatcgtgagcgacagcggcgcccacgtgctgaacagctggacccaggaggaccagaacctgcaggagctgatggccgccctggccgccgtgggcccccccaaccccagagccgaccccgagtgctgcagcatcctgcacggcctggtggccgccgtggagaccctgtgcaagatcaccgagtaccagcacgaggccagaaccctgctgatggagaacgccgagagagtgggcaacagaggcagaatcatctgcatctag

SEQ ID NO: 313563 - DNA, 375 bp, Artificial Sequence
  derived and/or modified sequence
atggccgccctggccgccgtgggcccccccaaccccagagccgaccccgagtgctgcagcatcctgcacggcctggtggccgccgtggagaccctgtgcaagatcaccgagtaccagcacgaggccagaaccctgctgatggagaacgccgagagagtgggcaacagaggcagaatcatctgcatcaccaacgccaagagcgacagccacgtgagaatgctggaggactgcgtgcaggagaccatccacgagcacaacaagctggccgccaacagcgaccacctgatgcagatccagaagtgcgagctggtgctgatccacacctaccccgtgggcgaggacagcctggtgagcgacagaagcaagaaggagtag

SEQ ID NO: 313564 - DNA, 678 bp, Artificial Sequence
  derived and/or modified sequence
atgaagatcttcagcgagagccacaagaccgtgttcgtggtggaccactgcccctacatggccgagagctgcagacagcacgtggagttcgacatgctggtgaagaacagaacccagggcatcatccccctggcccccatcagcaagagcctgtggacctgcagcgtggagagcagcatggagtactgcagaatcatgtacgacatcttccccttcaagaagctggtgaacttcatcgtgagcgacagcggcgcccacgtgctgaacagctggacccaggaggaccagaacctgcaggagctgatggccgccctggccgccgtgggcccccccaaccccagagccgaccccgagtgctgcagcatcctgcacggcctggtggccgccgtggagaccctgtgcaagatcaccgagtaccagcacgaggccagaaccctgctgatggagaacgccgagagagtgggcaacagaggcagaatcatctgcatcaccaacgccaagagcgacagccacgtgagaatgctggaggactgcgtgcaggagaccatccacgagcacaacaagctggccgccaacagcgaccacctgatgcagatccagaagtgcgagctggtgctgatccacacctaccccgtgggcgaggacagcctggtgagcgacagaagcaagaaggagtag

SEQ ID NO: 313565 - DNA, 492 bp, Artificial Sequence
  derived and/or modified sequence
atgaagatcttctccgagagtcacaagacagtgttcgttgtcgatcactgcccctacatggctgaatcgtgtaggcagcatgtggaatttgacatgttagtaaaaaatcgtacccagggaatcatcccattagccccgatctcgaaatctctgtggacctgctcagtggaatcctctatggagtactgccgaattatgtacgacatcttcccttttaagaagctcgtcaattttattgtttccgattctggcgcccatgttttgaattcttggacccaagaagaccagaatcttcaggagttgatggctgctttagctgcagtgggccccccaaatcctcgcgcggatcctgagtgttgcagcattctgcatggtctggttgccgccgtggagaccctgtgtaagataacagagtatcagcatgaagcacgcaccctcctgatggaaaacgccgaacgcgtcggcaataggggcaggattatctgcatatag

SEQ ID NO: 313566 - DNA, 375 bp, Artificial Sequence
  derived and/or modified sequence
atggccgccctcgcggccgtgggtccaccaaaccctagggcagacccagaatgttgctcaattctgcacggtctcgttgcagcagtcgagacactctgcaaaataaccgagtaccagcacgaggcacggacgctgttaatggaaaatgcagaacgggtgggtaataggggtcggattatctgtataacgaacgcaaaatctgattcacatgtccgaatgctggaggactgtgtgcaggaaacaattcatgagcacaacaagctcgcggctaactcagaccacttgatgcagatacaaaagtgcgagttggtgctgatccatacttaccccgtcggagaggactctctggtctcagacaggtcaaagaaggagtag

SEQ ID NO: 313567 - DNA, 678 bp, Artificial Sequence
  derived and/or modified sequence
atgaaaatcttctctgaaagtcacaaaactgttttcgtggtagaccattgcccctacatggccgagtcatgccggcagcatgtagaatttgacatgcttgtaaagaatcggacccaaggaataatcccattagctccaattagtaagagcctttggacctgcagtgtcgagtccagcatggaatactgcaggattatgtacgatattttcccattcaaaaagctcgtgaacttcatcgtgtcagattcgggggcccacgtgctgaacagctggacacaggaggaccaaaaccttcaagaattaatggccgcattggccgctgtgggaccgcctaatccccgggcggacccagagtgctgttcaatcctgcatggccttgtcgccgcagtggaaaccctgtgcaaaatcaccgaatatcagcatgaggctcgcaccctccttatggagaacgcagaacgagtggggaacagggggagaatcatttgtatcaccaacgctaagtccgattcacacgtgaggatgctggaagactgcgtccaggaaaccattcatgagcataacaagctcgcagccaactccgaccacttaatgcagatccaaaagtgcgaactcgtgctgattcatacctatcccgtgggagaggatagcttggtgtctgatcgatcaaagaaagagtag

SEQ ID NO: 313568 - DNA, 492 bp, Artificial Sequence
  derived and/or modified sequence
atgaagatcttcagcgagagccacaagacagtgtttgtggtggaccactgcccctacatggccgagagctgccggcagcacgtggagtttgacatgctggtgaagaacagaacccagggcatcatccccctggcccccatcagcaagagcctgtggacctgcagcgtggagagctccatggagtactgccgcatcatgtatgacatcttccccttcaagaagctggtgaacttcatcgtgtctgattctggggcccacgtgctgaacagctggacccaggaggaccagaacctgcaggagctgatggccgccctggccgctgtgggcccccccaaccccagggctgaccctgagtgctgcagcatcctgcacggcctggtggccgctgtggagaccctgtgcaagatcacagagtaccagcacgaggcccggaccctgctgatggagaatgctgagcgggtgggcaacagaggccgcatcatctgcatctag

SEQ ID NO: 313569 - DNA, 375 bp, Artificial Sequence
  derived and/or modified sequence
atggccgccctggccgctgtgggcccccccaaccccagggctgaccctgagtgctgcagcatcctgcacggcctggtggccgctgtggagaccctgtgcaagatcacagagtaccagcacgaggcccggaccctgctgatggagaatgctgagcgggtgggcaacagaggccgcatcatctgcatcaccaatgccaagagtgacagccacgtgaggatgctggaggactgtgtgcaggagaccatccacgagcacaacaagctggccgccaacagcgaccacctgatgcagatccagaagtgtgagctggtgctgatccacacctaccctgtgggggaggacagcctggtgtctgacaggagcaagaaggagtag

SEQ ID NO: 313570 - DNA, 678 bp, Artificial Sequence
  derived and/or modified sequence
atgaagatcttcagcgagagccacaagacagtgtttgtggtggaccactgcccctacatggccgagagctgccggcagcacgtggagtttgacatgctggtgaagaacagaacccagggcatcatccccctggcccccatcagcaagagcctgtggacctgcagcgtggagagctccatggagtactgccgcatcatgtatgacatcttccccttcaagaagctggtgaacttcatcgtgtctgattctggggcccacgtgctgaacagctggacccaggaggaccagaacctgcaggagctgatggccgccctggccgctgtgggcccccccaaccccagggctgaccctgagtgctgcagcatcctgcacggcctggtggccgctgtggagaccctgtgcaagatcacagagtaccagcacgaggcccggaccctgctgatggagaatgctgagcgggtgggcaacagaggccgcatcatctgcatcaccaatgccaagagtgacagccacgtgaggatgctggaggactgtgtgcaggagaccatccacgagcacaacaagctggccgccaacagcgaccacctgatgcagatccagaagtgtgagctggtgctgatccacacctaccctgtgggggaggacagcctggtgtctgacaggagcaagaaggagtag

SEQ ID NO: 313571 - DNA, 492 bp, Artificial Sequence
  derived and/or modified sequence
atgaagatcttcagcgagagccacaagaccgtgttcgtggtggaccactgcccatacatggcagaatcctgtcgacagcacgtggagttcgatatgctggtgaaaaaccggactcagggcatcattcccctcgctcccataagcaagagcctgtggacatgcagtgttgagtctagtatggaatactgtaggattatgtatgacatcttcccttttaagaagttagttaacttcatcgtaagcgatagtggcgcacacgtgctcaactcatggacacaggaagatcagaacttgcaggagctgatggctgctcttgccgcagtcgggccacctaaccccagagccgaccccgagtgctgcagtattcttcacggattagtggctgctgtggaaaccctgtgtaaaataaccgagtaccaacatgaagctcgaactctgttaatggagaatgcagagagagtcgggaatagaggacgcatcatctgtatctag

SEQ ID NO: 313572 - DNA, 375 bp, Artificial Sequence
  derived and/or modified sequence
atggccgccctggccgccgtgggcccccccaacccccgggccgaccccgaatgctgtagcatccttcatggactggttgccgccgtcgaaactctgtgcaaaattaccgaataccagcatgaggctcggacactgctgatggagaacgctgaacgagtcggcaaccggggcagaataatatgtatcaccaacgccaagagcgacagccacgttagaatgctggaggactgcgttcaggaaaccatccacgaacataacaagctcgcggccaactcggatcacttgatgcagatccagaaatgcgagctagtcctgatccatacctatcccgtgggtgaggacagtctggtgtccgaccgatctaagaaagagtag

SEQ ID NO: 313573 - DNA, 678 bp, Artificial Sequence
  derived and/or modified sequence
atgaagatcttcagcgagagccacaagaccgtgttcgtggtggaccactgcccctatatggctgaatcttgcaggcagcacgtggagtttgatatgctggtcaaaaaccggacccaggggatcatccctcttgcccctatttctaaaagtttatggacatgtagtgtcgaatcatccatggagtattgtagaataatgtacgatatttttccatttaaaaagctggtcaattttatcgttagcgactctggggcacacgtcctgaactcatggacccaggaggaccaaaacctacaggagttgatggccgcactcgctgctgttggcccccctaacccgagggcggacccagaatgctgctctatcttgcatggtcttgtggctgcagtagagaccttgtgcaaaataaccgaataccaacacgaagccagaacactactgatggaaaacgctgagagagtgggaaatagaggcagaataatctgcatcacaaatgcaaaatctgacagtcatgtccggatgctggaggactgtgttcaggaaaccattcatgaacacaacaagctggctgccaactcagatcacctgatgcagatccagaagtgcgagctcgtgctcattcatacttatccagtgggtgaagacagtctggtgagcgatcggagtaaaaaagaatag

SEQ ID NO: 313574 - DNA, 492 bp, Artificial Sequence
  derived and/or modified sequence
atgaagatcttttccgaaagccacaagactgtctttgtggtggaccactgtccttacatggctgaatcctgccgtcagcatgtcgagtttgatatgctcgtcaaaaaccgaacacagggaatcattccgctggcgcctattagcaaatctctctggacttgcagcgtagagtcatccatggaatactgccgcatcatgtatgacattttccccttcaaaaagctcgtgaattttattgtgagcgacagcggcgctcacgtactgaactcctggacacaggaggatcaaaatctgcaagaactgatggctgcactcgccgcagttggtccaccaaatcccagagcggatcctgagtgctgttccatactgcacggtttggtagccgcagtggaaacgctatgtaagatcacagagtatcagcacgaagcgcgaacgctcctgatggagaacgccgagagagtgggaaatcgtgggcgaattatatgtatctag

SEQ ID NO: 313575 - DNA, 375 bp, Artificial Sequence
  derived and/or modified sequence
atggctgctctggctgctgtgggcccacccaatcctagggcagaccctgagtgctgcagcatcctccacggattggtagccgcagtggagacactgtgcaaaatcacggagtaccagcacgaagcgcgtacacttctaatggaaaacgccgaacgtgtcggaaatagggggagaattatctgtattactaacgctaagtccgattctcacgtgagaatgctggaagactgcgtgcaggagactattcatgagcataacaagttagctgctaatagtgatcacctcatgcaaattcagaagtgcgagttggtgttgatacacacctatcctgtcggcgaggacagtcttgttagcgacaggtccaagaaagagtag

SEQ ID NO: 313576 - DNA, 678 bp, Artificial Sequence
  derived and/or modified sequence
atgaaaatttttagtgagtcccataagactgtgttcgtggttgaccactgcccgtacatggcagaaagctgtagacagcacgtcgagttcgacatgctcgtgaagaaccgcacgcagggaataataccattggcaccaataagtaagtcattgtggacctgtagcgtcgagtcctcaatggaatactgcagaataatgtacgatatctttccttttaaaaagcttgttaacttcattgtttccgacagcggtgcccacgtcctcaactcctggacccaggaggatcaaaacctgcaagaacttatggctgctctggcggctgtgggacccccaaatcccagggccgatcccgagtgctgttccattctccacggcctggtcgctgcagttgagactctctgtaaaattaccgaataccaacacgaggcgaggacccttctgatggaaaatgctgagagagtcggcaatcgcggaagaatcatctgcatcaccaatgcaaaatcagatagccacgttagaatgctcgaggattgcgtccaggagactattcacgagcataataaactcgccgcaaactcggatcacttgatgcagattcagaaatgcgaactcgtgttgattcacacctaccctgtaggggaggattccctggtgagcgatagaagcaagaaggaatag

SEQ ID NO: 313577 - DNA, 560 bp, Artificial Sequence
  derived and/or modified sequence
ctcgcgagtttttccaggggaaaccggcctgggtggagagacagagaaggggagaccgggttaaaacaaaatgaagattttttctgaatctcataaaacagtgtttgttgtggatcactgcccttatatggcagaatcttgcaggcagcatgtcgagtttgatatgctggtgaagaatagaacccaaggaatcattcctttggcccccatatctaaatcattgtggacttgctcagtagaatcttccatggaatattgtagaataatgtatgatatatttcctttcaaaaagctggtgaattttattgtgagtgactctggagcacatgttttaaattcttggactcaagaagaccaaaatttacaggagctaatggcagcattagccgctgttgggcctcctaatcctcgggcagatccagagtgctgcagtattctgcatggccttgttgcagcagtggaaactctctgcaaaattactgaataccaacatgaggctcgtactctactcatggagaatgcagaacgtgttggaaatagaggacgaataatctgtatta

SEQ ID NO: 313578 - DNA, 552 bp, Artificial Sequence
  derived and/or modified sequence
aggaagcctgggaaggaccggtgtgctaggagatgatcggggaaagcatagtcccctgtctgtggcaccagacactcccgactgtgcgctgactctccccgcccagccagcagccttttccagagaggctgtggtccatagcctctgttcgttttcactgcaggaccaggcacgaaactaatggcagcattagccgctgttgggcctcctaatcctcgggcagatccagagtgctgcagtattctgcatggccttgttgcagcagtggaaactctctgcaaaattactgaataccaacatgaggctcgtactctactcatggagaatgcagaacgtgttggaaatagaggacgaataatctgtattactaatgcaaaaagtgatagtcatgtgcgaatgcttgaagactgtgtccaggaaacgattcatgaacataacaagcttgctgcaaattcagatcatctcatgcagattcaaaaatgtgagttggtcttgatccacacctacccagttggtgaagacagccttgtatctgatcgttctaaaaaagag

SEQ ID NO: 313579 - DNA, 875 bp, Artificial Sequence
  derived and/or modified sequence
accggcctgggtggagagacagagaaggggagaccgggaccaggcacgaaagtaagcgaacctcgatcctgaggtcttccctatccactcaccttgtattttccaccccccaccctccagcaaagtgggtctagaaggtttctcaaagagagttttgcatgaaggggagatgcgtcttgaaagcaagaggttaaaacaaaatgaagattttttctgaatctcataaaacagtgtttgttgtggatcactgcccttatatggcagaatcttgcaggcagcatgtcgagtttgatatgctggtgaagaatagaacccaaggaatcattcctttggcccccatatctaaatcattgtggacttgctcagtagaatcttccatggaatattgtagaataatgtatgatatatttcctttcaaaaagctggtgaattttattgtgagtgactctggagcacatgttttaaattcttggactcaagaagaccaaaatttacaggagctaatggcagcattagccgctgttgggcctcctaatcctcgggcagatccagagtgctgcagtattctgcatggccttgttgcagcagtggaaactctctgcaaaattactgaataccaacatgaggctcgtactctactcatggagaatgcagaacgtgttggaaatagaggacgaataatctgtattactaatgcaaaaagtgatagtcatgtgcgaatgcttgaagactgtgtccaggaaacgattcatgaacataacaagcttgctgcaaattcagatcatctcatgcagattcaaaaatgtgagttggtcttgatccacacctacccagttggtgaagacagccttgtatctgatcgttctaaaaaagag

SEQ ID NO: 313580 - DNA, 255 bp, Artificial Sequence
  derived and/or modified sequence
atggagagaaagaacgaccccctgcccatcagcaccgtgggcaccagaggcaagggccccaagagagacgagcagtacagaatcatgtggaacgagctggagaccctggtgagagcccacatcaacaacagcgagaagcaccagagagtgctggagtgcctgatggcctgcagaagcaagccccccgaggaggaggagagaaagaaggaggaggagagaggcaagaccaagagaaccagccagagaaagcagtag

SEQ ID NO: 313581 - DNA, 255 bp, Artificial Sequence
  derived and/or modified sequence
atggagcggaagaacgacccacttccaatcagcactgtaggcactcgcggcaagggaccgaaaagggatgagcaatatagaatcatgtggaacgagcttgaaactctggttagggcccacattaataattctgagaaacatcagagagttcttgaatgcctgatggcctgcagatctaagcccccagaagaagaagagcggaagaaggaagaagaacgaggaaagactaagaggacttcacaaaggaaacaatag

SEQ ID NO: 313582 - DNA, 255 bp, Artificial Sequence
  derived and/or modified sequence
atggagaggaagaatgaccccctgcccatcagcacagtgggcacccggggcaagggccccaagagagatgagcagtaccgcatcatgtggaatgagctggagaccctggtgcgggcccacatcaacaacagcgagaagcaccagagggtgctggagtgcctgatggcctgccgcagcaagcccccagaggaggaggagaggaagaaggaggaggagcggggcaagaccaagaggaccagccagaggaagcagtag

SEQ ID NO: 313583 - DNA, 255 bp, Artificial Sequence
  derived and/or modified sequence
atggagcggaagaacgaccccctgcccatcagcaccgtgggcaccagaggtaaggggccaaagagggacgagcagtaccgcatcatgtggaacgagcttgagaccctcgtcagggcccatatcaataattcagagaagcaccagagagtcctggaatgcttgatggcttgtcggtccaagcctcccgaagaggaagagcgaaaaaaagaagaagaacgaggaaaaacaaaaaggacttcacagcgtaaacagtag

SEQ ID NO: 313584 - DNA, 255 bp, Artificial Sequence
  derived and/or modified sequence
atggagcgtaaaaatgaccctttacctatcagtactgtgggtaccaggggtaaggggcctaaaagagacgagcagtataggataatgtggaatgagctggagaccctcgtccgcgcacacattaataactccgaaaaacaccaacgagtgcttgaatgtttgatggcctgcagaagcaagccacctgaagaagaagagcggaagaaagaggaagagcgcggaaagactaaaaggaccagccagagaaagcaatag

SEQ ID NO: 313585 - protein, 1270 aa, Artificial Sequence
  derived and/or modified sequence
MDSLEEPQKKVFKARKTMRVSDRQQLEAVYKVKEELLKTDVKLLNGNHENGDLDPTSPLENMDYIKDKEEVNGIEEICFDPEGSKAEWKETPCILSVNVKNKQDDDLNCEPLSPHNITPEPVSKLPAEPVSGDPAPGDLDAGDPASGVLASGDSTSGDPTSSEPSSSDAASGDATSGDAPSGDVSPGDATSGDATADDLSSGDPTSSDPIPGEPVPVEPISGDCAADDIASSEITSVDLASGAPASTDPASDDLASGDLSSSELASDDLATGELASDELTSESTFDRTFEPKSVPVCEPVPEIDNIEPSSNKDDDFLEKNGADEKLEQIQSKDSLDEKNKADNNIDANEETLETDDTTICSDRPPENEKKVEEDIITELALGEDAISSSMEIDQGEKNEDETSADLVETINENVIEDNKSENILENTDSMETDEIIPILEKLAPSEDELTCFSKTSLLPIDETNPDLEEKMESSFGSPSKQESSESLPKEAFLVLSDEEDISGEKDESEVISQNETCSPAEVESNEKDNKPEEEEQVIHEDDERPSEKNEFSRRKRSKSEDMDNVQSKRRRYMEEEYEAEFQVKITAKGDINQKLQKVIQWLLEEKLCALQCAVFDKTLAELKTRVEKIECNKRHKTVLTELQAKIARLTKRFEAAKEDLKKRHEHPPNPPVSPGKTVNDVNSNNNMSYRNAGTVRQMLESKRNVSESAPPSFQTPVNTVSSTNLVTPPAVVSSQPKLQTPVTSGSLTATSVLPAPNTATVVATTQVPSGNPQPTISLQPLPVILHVPVAVSSQPQLLQSHPGTLVTNQPSGNVEFISVQSPPTVSGLTKNPVSLPSLPNPTKPNNVPSVPSPSIQRNPTASAAPLGTTLAVQAVPTAHSIVQATRTSLPTVGPSGLYSPSTNRGPIQMKIPISAFSTSSAAEQNSNTTPRIENQTNKTIDASVSKKAADSTSQCGKATGSDSSGVIDLTMDDEESGASQDPKKLNHTPVSTMSSSQPVSRPLQPIQPAPPLQPSGVPTSGPSQTTIHLLPTAPTTVNVTHRPVTQVTTRLPVPRAPANHQVVYTTLPAPPAQAPLRGTVMQAPAVRQVNPQNSVTVRVPQTTTYVVNNGLTLGSTGPQLTVHHRPPQVHTEPPRPVHPAPLPEAPQPQRLPPEAASTSLPQKPHLKLARVQSQNGIVLSWSVLEVDRSCATVDSYHLYAYHEEPSATVPSQWKKIGEVKALPLPMACTLTQFVSGSKYYFAVRAKDIYGRFGPFCDPQSTDVISSTQSS

SEQ ID NO: 313586 - protein, 515 aa, Artificial Sequence
  derived and/or modified sequence
MDSLEEPQKKVFKARKTMRVSDRQQLEAVYKVKEELLKTDVKLLNGNHENGDLDPTSPLENMDYIKDKEEVNGIEEICFDPEGSKAEWKETPCILSVNVKNKQDDDLNCEPLSPHNITPEPVSKLPAEPVSGDPAPGDLDAGDPASGVLASGDSTSGDPTSSEPSSSDAASGDATSGDAPSGDVSPGDATSGDATADDLSSGDPTSSDPIPGEPVPVEPISGDCAADDIASSEITSVDLASGAPASTDPASDDLASGDLSSSELASDDLATGELASDELTSESTFDRTFEPKSVPVCEPVPEIDNIEPSSNKDDDFLEKNGADEKLEQIQSKDSLDEKNKADNNIDANEETLETDDTTICSDRPPENEKKVEEDIITELALGEDAISSSMEIDQGEKNEDETSADLVETINENVIEDNKSENILENTDSMETDEIIPILEKLAPSEDELTCFSKTSLLPIDETNPDLEEKMESSFGSPSKQESSESLPKEAFLVLSDEEDISGEKDESEVISQNE

SEQ ID NO: 313587 - protein, 89 aa, Artificial Sequence
  derived and/or modified sequence
MDSLEEPQKKVFKARKTMRVSDRQQLEAVYKVKEELLKTDVKLLNGNHENGDLDPTSPLENMDYIKDKEEVNGIEEICFDPEGSKAEWK

SEQ ID NO: 313588 - protein, 32 aa, Artificial Sequence
  derived and/or modified sequence
MDSLEEPQKKVFKARKTMRVSDRQQLEAVYKV

SEQ ID NO: 313589 - DNA, 3813 bp, Artificial Sequence
  derived and/or modified sequence
atggatagcctagaagaacctcagaaaaaagtgttcaaggcgagaaaaaccatgcgagtatcagaccggcagcagcttgaggccgtctataaggtcaaggaagaacttttgaagacagatgttaagctgttgaatgggaaccatgaaaacggagacttagatccaacctccccactcgaaaacatggattatatcaaggataaagaggaggtaaacgggatcgaagaaatctgtttcgatcccgaagggtccaaggccgagtggaaagaaaccccatgcattctgtctgtgaatgtcaaaaacaaacaggacgacgaccttaattgcgagccgttatcgcctcacaacataaccccggagccagtgtcgaaattgcctgctgaaccagtctccggggatcccgcacccggagatttggacgcgggcgatccagcttctggtgtgctggcttctggggacagcacctccggcgatccaactagtagcgagccaagttccagcgacgctgcctccggggacgcaacgtccggggacgctcccagcggggatgtcagccccggagacgccacaagcggagatgctacagctgacgatttatcctcaggtgatcctacctcctccgatccaattccgggagaacccgtgcccgtcgagcctatttccggggactgtgcggctgacgatattgcttcttctgaaattacatcagtcgatctggcttccggtgcccccgcatcgaccgaccctgcttcggatgacttagcttcaggcgatctgagctcgagcgagctcgcttccgacgatcttgccactggcgaattagccagcgatgagctgactagtgaatccacgttcgatagaacatttgaaccaaagtccgtgcctgtttgtgaaccagtgcctgagatcgataatattgagccttcctcaaacaaagacgacgacttcttagaaaagaatggagccgacgagaagctcgagcagattcaaagtaaggacagcctggatgagaaaaataaggccgacaacaatattgatgccaacgaggaaactctcgagaccgacgacacaactatctgctcagacagacccccagagaatgaaaagaaggtcgaggaggatattataaccgagcttgccttaggcgaggatgcaatctcctcctctatggagatcgatcagggcgagaaaaacgaggacgagacatctgccgacctagtggaaaccatcaacgagaacgtaattgaagacaacaagtccgagaacatcctggagaacaccgactccatggagaccgacgagatcattccgatcctggaaaagctcgctccctccgaggacgagctcacctgtttttccaaaacgtcgttgctcccaatcgatgaaacgaaccccgatctggaggagaagatggagtcatcgtttggatccccgtctaaacaggagtcaagcgagagtcttcccaaggaggctttcttggtgctttcagatgaagaggacatatcaggagagaaagatgaaagcgaagtgatcagccagaacgagacttgttccccggccgaagtggaatctaacgaaaaggacaataagccagaggaggaggaacaggttattcacgaggacgacgaaaggccctccgagaaaaacgagttctcacgcagaaaaagatccaagtccgaagacatggacaacgtgcagtcaaagagaaggcggtatatggaagaggagtatgaagccgagttccaggtgaagatcactgcgaagggcgatattaatcagaagctccaaaaagtcattcaatggctgctggaagaaaaactctgtgcactccaatgtgcagtgttcgacaagaccctggccgaactgaaaactagagtcgagaaaatcgagtgtaataagaggcacaaaactgtgttgactgagttgcaagctaagatcgcacgtttgaccaagcgcttcgaagccgccaaggaggacctgaagaagaggcatgagcacccacccaacccaccagtgtccccgggaaagaccgtaaacgacgtcaattcaaataataacatgtcttaccggaacgcaggcactgtgagacaaatgcttgagagtaaacgaaacgtcagcgagtcagctcccccaagctttcaaaccccagtgaatacagtctcttctaccaacctggttactcccccagctgtagtgtcaagtcaaccaaagctgcaaactcctgtcacctctggctctctcaccgctaccagtgtgctgccagctccaaataccgctaccgtcgtggccacaacccaggttccatcgggaaaccctcagccgacgattagcctgcaacctctgccagttatcctgcacgttccggtcgccgtttcgagccagcctcaactcctccagagccaccccgggactcttgtcacaaaccagccaagcggcaatgtggaattcatttctgtgcagtctccccctaccgtttccggacttacaaaaaatcccgtcagtttaccgtcactgcccaaccctaccaagccgaacaatgttccatccgtgccaagcccaagcatccagcgaaatcccacagcatccgcagcgccattggggactaccttagccgtgcaagccgtccccaccgcccacagcatcgtgcaggctacgagaactagtttgcccaccgtgggaccttcaggactgtactctccctccaccaatcgagggccaattcagatgaaaatccctattagtgctttcagcaccagctccgccgccgaacagaacagcaataccactccacggatcgagaaccagacaaataagacgatcgacgctagcgtcagcaagaaagccgctgattccacttcgcagtgcgggaaagcaactggatccgactcctctggagtgatcgaccttactatggacgatgaggaatctggggcttcacaggatcctaaaaagctgaatcatacgcctgtgtccacgatgagttctagtcaacccgttagtcggccacttcagcccatccagccagctccacccctgcaaccctcaggagttccaacaagcggtcccagtcagactactatccacctgttgccaactgctcctaccactgttaacgtgacccacagaccggtgacacaggttacgactaggctaccagtgccccgtgccccagcaaaccaccaagttgtatacacaacactgccagcaccccccgcgcaggctccactgcggggaaccgttatgcaggcccccgccgtccgacaggtgaatccccagaacagcgtgacagtccgcgtgcctcagactacgacatatgtggtgaacaatggactcactctcggaagcaccggccctcaactcaccgtgcaccacagacctccacaagtacacacagaacccccccgccccgtgcatcccgcgcctttgcctgaggcgccccagccccaacgcctgcccccagaggctgcctctacctcactcccgcaaaagccacacctcaagttagctcgggtccagtcccagaacgggatagtgttgtcgtggagtgtcttggaggttgatcgttcttgcgccaccgttgattcttatcacctatatgcgtaccatgaagaaccctcagccacagtgccatcccagtggaaaaaaatcggagaggtgaaagctctaccactccccatggcatgtactcttactcagttcgtcagtggttcaaaatactactttgcagtcagggccaaggatatttatggccgctttgggccattttgtgacccccagtctactgacgtcatctcgagcacccagagttcatag

SEQ ID NO: 313590 - DNA, 3813 bp, Artificial Sequence
  derived and/or modified sequence
atggacagcctggaagagccacagaagaaagtgtttaaggcaagaaaaaccatgcgggtgtctgatagacaacagttagaggcagtgtacaaggtgaaggaggagcttttaaaaaccgacgtcaaacttctgaatgggaatcatgagaatggcgatctggatcctacgagccccctagaaaacatggattatattaaggataaggaggaggtgaatggtatcgaggagatctgcttcgatccggaaggatccaaggccgagtggaaggaaaccccttgcattctgagtgtaaacgtcaagaacaagcaggatgacgatctgaattgtgaacccttgtctcctcataatatcacacccgaacctgtcagcaagctgcccgcggagccagtcagtggagacccagcaccgggggatctggatgcgggtgaccctgcatccggcgtgctggcctccggagatagtacatcgggtgatccaactagctccgagccctcatcctcggacgctgcatccggcgatgcaacgtcgggagatgcccccagcggagatgttagtccaggggacgccacgtctggtgatgcgaccgctgacgacttgtcgagcggagacccaacctcctctgaccctatccccggagagcccgtgcctgtggaacccatttcaggggactgcgccgccgacgacatcgcttcatccgaaatcacgtcagtggatttggcctcgggtgcccccgcgtccaccgatcctgcctccgatgatttagccagcggggacctcagctctagcgagctggcctccgacgatctcgcaacaggggaactggcatctgatgagctaactagtgaatctacatttgatagaacctttgagcccaaaagtgtcccagtctgtgagccggtccctgagatcgacaacattgaaccctcctccaacaaggatgatgactttctcgagaaaaacggtgctgatgaaaagctggaacagattcaaagcaaggattccctcgatgagaaaaacaaggcggataacaatattgatgcaaacgaggagacgctggagaccgacgacactaccatctgttcagatcggccacccgagaacgagaaaaaggtagaggaggacattattactgagttggcactgggggaggatgccatcagctccagcatggaaatcgatcagggcgagaaaaatgaagatgaaacctccgcggacttggtagaaacaataaacgagaatgtgatcgaagacaataagtcagagaatattcttgagaataccgactctatggagaccgatgaaatcattcccatactcgaaaaattggctccaagcgaagatgagctgacttgttttagcaagacgtccctgctccccattgacgagactaaccctgacctggaagagaagatggagtcctcctttggctctccaagcaaacaagaatccagcgagtctcttcctaaggaagctttcttggtactcagtgacgaggaggatatctcaggggagaaagatgagtccgaagtcattagccagaatgagacatgctcccctgccgaagtggaatctaatgaaaaagataataaacccgaggaggaggaacaagttatccacgaggatgacgaacggccaagtgagaaaaatgagttttccaggaggaaacgcagtaagtccgaagacatggacaacgtacagagcaaacgccgtagatatatggaggaagaatatgaagcagaattccaggtgaaaattacggcaaagggagatattaatcagaagcttcaaaaagttattcagtggttgctggaagagaagctgtgcgccctccagtgcgcagtgttcgataaaacgctggccgagttaaagacacgcgttgagaagatagagtgtaacaagcgccacaaaacggttctgacagaactccaagcaaagattgctcggctcaccaagaggttcgaggccgctaaggaggatctgaaaaagagacatgagcaccctccgaacccaccggtctctccgggtaaaaccgtgaatgatgttaactcgaacaacaatatgagctaccgaaatgctggaaccgtgcggcagatgttggagagcaaacgcaacgtgtcagagtctgccccaccttctttccagacgccagtcaacacagtatcaagcactaacctcgtgacaccccccgccgtagtctcttcccagcccaagctgcagacccctgtgactagtgggagcctaactgctaccagcgtgcttcccgctccaaacacggctactgtggtcgccaccacacaggtgccctctggcaacccacagcccaccatttccctacagccccttccagtcattctgcatgtaccagtggcagtgtcaagtcaaccacaacttctgcaaagccaccccggtacactcgtcactaaccagccatctggaaacgtggaatttatcagtgtccaatctccccccacagtgtccgggctgacaaaaaaccctgtcagtctgccctcactgcctaacccaacaaaaccaaataatgtgccgtccgtcccatcgccgtccattcagcgcaatcctacggccagcgccgcgcccctgggaactacactggccgtacaggctgtaccaaccgctcattccattgtccaggccacaaggacatccctcccaaccgtgggcccttccggactatactcaccttctacaaacagaggtccgatccagatgaagatcccgatctcagccttctctaccagttcagccgcagaacagaacagtaacactacccctcggattgaaaaccagaccaacaagacgatcgatgcatctgttagcaaaaaggcagccgattcaaccagccaatgtggtaaagccactggctccgattccagcggagtgatcgacttgacgatggacgacgaggagagcggggcatcacaggaccctaagaaacttaaccataccccagtgtcaacaatgtctagctctcaacccgtaagtcggcccctgcaaccaatccagcccgctccaccactacagccgtctggtgtgccaactagtgggccgtctcaaacaacaatccatctgctgcctaccgcgcctactaccgttaatgttacccaccgtcccgtgacccaagtcacgacacgattgccggtgccaagagcccccgccaatcaccaggtggtttacacgaccctaccggctccgcctgcacaagcccccctccgcggtacagtcatgcaggccccggctgtcagacaagtaaacccccagaattcggtcacagtgcgggtccctcagaccaccacatatgtggttaataacggactcacattgggcagtaccgggccacagcttacagtgcaccaccgtccaccacaggtgcataccgaaccacctagacccgtgcacccagctcccctgccagaggcccctcagccacagcgcctgccccccgaggctgcatccacttcactacctcagaagccacacctgaagctcgcccgtgtacagagccaaaatgggatcgttctgagctggtccgtgctggaggttgacagaagttgtgccaccgtagattcgtaccatttgtacgcctatcatgaggagccctccgccaccgttcccagtcaatggaaaaaaatcggggaggtcaaggcactgcctttgccaatggcctgcactttaacccagttcgtcagtgggtccaaatactactttgcagtccgggcaaaagatatctatggcaggttcggcccattctgtgacccccaatcgacagacgtaatctctagtactcagtcttcgtag

SEQ ID NO: 313591 - DNA, 3813 bp, Artificial Sequence
  derived and/or modified sequence
atggacagcctggaggagccccagaagaaggtgttcaaggccaggaagaccatgagggtgtctgaccggcagcagctggaggccgtgtacaaggtgaaggaggagctgctgaagacagatgtgaagctgctgaatggaaatcatgaaaatggagacctggaccccaccagccccctggagaacatggactacatcaaggacaaggaggaggtgaatggcatcgaggagatctgctttgatcctgagggcagcaaggccgagtggaaggagaccccctgcatcctgtctgtgaatgtgaagaacaagcaggatgatgacctgaactgtgagcccctgagcccccacaacatcaccccagagcctgtgtccaagctgcctgctgagcctgtgtctggggaccctgcccctggggacctggatgctggggaccctgccagcggcgtgctggccagcggggacagcaccagcggggaccccaccagcagcgagcccagcagcagtgatgctgccagcggagatgccaccagcggagatgcccccagcggagatgtgtccccaggagatgccaccagcggagatgccacagcagatgacctgagcagcggggaccccaccagcagtgaccccatccctggagagcctgtgcctgtggagcccatcagcggggactgtgccgcagatgacatcgccagcagcgagatcacctctgtggacctggccagcggggccccagccagcacagatcctgccagtgatgacctggccagcggggacctgagcagcagcgagctggccagtgatgacctggccactggagagctggccagtgatgagctgaccagcgagagcacctttgacaggacctttgagcccaagtctgtgcctgtgtgtgagcctgtgcctgagattgacaacatcgagcccagcagcaacaaggatgatgacttcctggagaagaatggagcagatgagaagctggagcagatccagagcaaggacagcctggatgagaagaacaaggctgacaacaacattgatgccaatgaggagaccctggagacagatgacaccaccatctgcagcgaccggcccccagaaaatgagaagaaggtggaggaggacatcatcacagagctggccctgggagaagatgccatcagcagctccatggagattgaccagggcgagaagaatgaagatgagaccagcgctgacctggtggagaccatcaatgaaaatgtgattgaggacaacaagtctgagaacatcctggagaacacagacagcatggagacagatgagatcatccccatcctggagaagctggcccccagtgaagatgagctgacctgcttcagcaagaccagcctgctgcccattgatgagaccaacccagacctggaggagaagatggagagcagctttggcagccccagcaagcaggagagcagcgagagcctgcccaaggaggccttcctggtgctgagtgatgaggaggacatcagcggggagaaggatgagagcgaggtgatcagccagaatgagacctgcagccctgctgaggtggagagcaatgagaaggacaacaagccagaggaggaggagcaggtgattcatgaagatgatgagcggcccagcgagaagaatgagttcagcaggaggaagaggagcaagtctgaggacatggacaacgtgcagagcaagagaagacgctacatggaggaggagtatgaagctgagttccaggtgaagatcacagccaagggggacatcaaccagaagctgcagaaggtgatccagtggctgctggaggagaagctgtgtgccctgcagtgtgctgtgtttgacaagaccctggccgagctgaagaccagggtggagaagattgagtgcaacaagaggcacaagacagtgctgacagagctgcaggccaagatcgcccggctgaccaagagatttgaagctgccaaggaggacctgaagaagagacatgagcacccccccaacccccctgtgtcccctgggaagacagtgaatgatgtgaacagcaacaacaacatgagctacagaaatgccggcaccgtgcggcagatgctggagagcaagagaaatgtgtctgagagcgccccacccagcttccagacccctgtgaacacagtgagcagcaccaacctggtgaccccacctgctgtggtgagcagccagcccaagctgcagacccctgtgaccagcggcagcctgacagccacctctgtgctgcctgcccccaacacagccaccgtggtggccaccacccaggtgcccagcggcaacccccagcccaccatcagcctgcagcccctgcccgtcatcctgcacgtgcctgtggccgtgagcagccagccccagctgctgcagagccaccctggcaccctggtgaccaaccagcccagcggaaatgtggagttcatctctgtgcagagcccccccaccgtgtctggcctgaccaagaaccctgtgtccctgcccagcctgcccaaccccaccaagcccaacaacgtgcccagcgtgcccagccccagcatccagaggaaccccacagccagcgctgcccccctgggcaccaccctggccgtgcaggccgtgcccacagcccacagcatcgtgcaggccaccaggaccagcctgcccaccgtgggccccagcggcctgtacagccccagcaccaacagaggccccatccagatgaagatccccatcagcgccttcagcaccagcagcgctgctgagcagaacagcaacaccaccccaagaattgagaaccagaccaacaagaccattgatgcctctgtgtccaagaaggctgctgacagcaccagccagtgtgggaaggccactggaagtgacagcagcggcgtgattgacctgaccatggatgatgaggagagcggggccagccaggaccccaagaagctgaaccacacccctgtgtccaccatgagcagcagccagcctgtgtcccggcccctgcagcccatccagcctgccccacccctgcagcccagcggcgtgcccaccagcggccccagccagaccaccatccacctgctgcccacagcccccaccaccgtgaatgtgacccacaggcctgtgacccaggtgaccacccggctgcctgtgccccgggccccagccaaccaccaggtggtgtacaccaccctgcctgcccccccagcccaggcccccctgcggggcaccgtgatgcaggccccagctgtgcggcaggtgaacccccagaacagcgtgacagtgcgggtgccccagaccaccacctacgtggtgaacaacggcctgaccctgggcagcacaggcccccagctgactgtgcaccaccggcccccccaggtgcacacagagccccccaggcctgtgcacccagcccccctgcctgaggccccccagccccagaggctgcccccagaggccgccagcaccagcctgccccagaagccccacctgaagctggcccgggtgcagagccagaatggaattgtgctgtcctggagcgtgctggaggtggacaggagctgtgccaccgtggacagctaccacctgtatgcctaccacgaggagcccagcgccaccgtgcccagccagtggaagaagatcggggaggtgaaggccctgcccctgcccatggcctgcaccctgacccagtttgtgtctggcagcaagtactactttgctgtgcgggccaaggacatctacggccgcttcggccccttctgtgacccccagagcacagatgtgatcagcagcacccagagcagctag

SEQ ID NO: 313592 - DNA, 3813 bp, Artificial Sequence
  derived and/or modified sequence
atggacagcctggaggagccccagaagaaggtgttcaaggcccggaagacaatgcgcgtgagtgataggcagcagcttgaagcggtctacaaggtgaaggaggagcttctcaagacagatgtaaaactccttaatgggaatcacgaaaacggagacctggatcccacatcaccactggaaaacatggattatattaaagacaaggaagaagtgaatggtatcgaggaaatctgttttgatcccgagggcagcaaggctgagtggaaagagaccccatgtatcctctccgttaacgtaaagaacaaacaggatgacgacctgaactgcgaacccctgtctccccacaatatcacaccagaaccagtttctaaactgcctgcagagccagtttctggcgacccagctccaggcgacttggatgccggcgacccagctagcggcgttctggccagcggtgacagcacaagtggcgacccaacaagttctgaacccagctcttccgatgcagctagcggcgatgcaacttccggagacgctccaagcggagacgtgagtcctggcgacgccactagtggggacgcaacagcggacgatctttctagcggagaccccacttcctccgatccaatccccggggaaccagtgcccgtcgagcccatttctggagattgcgcagcagacgacattgcgtcatctgagattacctctgtggatcttgcatccggagctcctgcaagcacagatcctgccagcgatgacctagcctccggtgatctcagctctagtgagctggcatccgacgatctggcaaccggagagctggccagtgacgagctgacatcagaatccacttttgatagaacgtttgaacctaagtccgttcccgtttgtgaaccagtgcccgagatcgataacatcgagccctcctcgaataaagatgatgatttcctggagaagaatggtgcggacgaaaagctagaacagatccagtccaaagacagcctggatgagaagaacaaggctgataacaatattgatgcaaacgaagaaacgttagagacggatgacaccactatctgttctgacagaccgccggaaaatgaaaagaaggtcgaggaggatatcatcaccgagctcgccctgggggaagacgctatctctagttctatggaaatagaccagggggaaaagaacgaagatgagacatctgccgatctggtggaaaccattaatgaaaacgtgattgaagataataagtccgaaaacatcctggagaacacagattccatggaaaccgacgagatcattccgatcctggaaaaactcgctccttcagaagacgaattaacttgcttttcgaaaacctccctgcttcctatcgacgagactaacccagatttggaggaaaaaatggagtcttccttcgggtctccatctaaacaggagagctctgagtctctgccaaaagaggctttcctggtactatccgatgaagaagacatcagcggggaaaaagatgagagtgaagtgatctcacaaaatgagacctgcagtcctgctgaggttgagagtaatgaaaaagataataagcctgaggaggaagaacaggtcatccacgaggatgatgaaaggccctccgaaaagaatgaatttagccgtaggaaaaggtcaaaatctgaagacatggataacgttcagagcaagcggagacggtatatggaagaggaatacgaagctgaattccaggtgaaaatcacagccaagggtgatattaaccagaaactgcagaaggttatccagtggttgctggaggagaaactctgtgctctgcaatgtgcagtcttcgataaaacacttgctgagctgaagactcgggtcgagaagattgaatgtaataagcgccataaaacagtgctcaccgaacttcaagccaagatcgctcgcctgaccaagaggtttgaggcagctaaggaggacctgaagaagcgccacgagcacccaccaaacccccccgtatcccccggcaaaaccgtaaatgacgtgaacagcaataataacatgtcttacaggaacgccggcactgttagacagatgctggaatccaagcggaatgtctccgagtctgcccccccaagttttcagacccctgtaaacactgtgtctagtaccaacctggtcactccgccagcagtggttagttcccagcccaagctccagaccccagtcacatccggttctctgacagctacatcggtccttcctgccccgaatacagccactgtagtggctactacccaggtgccatctgggaatccccaacctacaatctctcttcaacccctccccgtgatccttcacgtgcccgtagccgtgtcgtcacagccacaattgctccagtcccatcccggtactcttgttaccaatcagccctccggcaacgtggagttcatctctgtgcaatctccccccactgtgagtggtctaacaaaaaaccctgtctctctgccgtccctaccaaatcccaccaaacctaataatgtcccatccgttccttcccctagcatccagagaaatccgaccgcaagcgctgctcctttgggtacaactctggctgtgcaggcagttcctaccgctcacagcattgtgcaggcaactcgtacatctttacctaccgtgggtccgagcggcttatactctccttcgacaaaccggggacctattcagatgaagattccaatctcagctttctcaacatcttcagcagcggagcaaaacagcaatactaccccccgaatcgagaatcaaactaataagacaatcgatgcatcagtcagcaagaaggcggccgattctaccagccagtgcggaaaagccactggttccgattcctcgggggtgatagaccttaccatggatgatgaagaaagcggcgcatcacaggatcccaagaagctgaatcacaccccagtgagcactatgagctcatctcagcccgtgagtagacctcttcagccaatccagcctgcaccacctctgcagcctagcggggtaccaaccagtggacctagtcagacaacgatccacctgctgcctaccgctcctacaacagtgaacgtgactcataggccggtgacgcaggtgaccacacgtctgcccgtgcctcgggctcccgcgaaccatcaagtggtgtacacaaccttgccggccccaccggcccaggcacctctccggggcaccgtgatgcaggctccagcagtgagacaagtgaatcctcagaatagcgtgactgttcgcgtcccccagaccaccacctatgtagtgaacaatggcctaaccctaggtagcacgggcccgcagctcacggtccatcatcggccaccccaggtacacaccgagccaccccggccagtacacccggcaccactgcccgaggcaccacaaccccagcgactgccgcctgaggccgcttccacatcccttccccagaaaccacacttaaaactggctcgggttcagagtcagaacgggatcgtcctgagttggtccgtgctggaggtggacaggagctgtgccactgtcgattcttatcatctctacgcctatcacgaggaaccgtctgccacggttccgtctcagtggaagaagatcggtgaggtgaaggccttacccctccctatggcatgcacgcttacacagttcgtgagtgggtccaagtactattttgccgtcagggccaaggatatttatgggcgtttcggccctttttgtgaccctcagagcaccgacgtcatcagcagtacccaatcctcttag

SEQ ID NO: 313593 - DNA, 3813 bp, Artificial Sequence
  derived and/or modified sequence
atggacagcctggaggagccccagaagaaggtgttcaaggcccggaagaccatgcgggtctccgacagacaacagcttgaagctgtgtacaaagttaaagaagagctcttgaaaacggacgtgaaattgttaaacgggaaccatgaaaacggggatcttgaccccacatcccccctcgagaatatggactatataaaagataaagaggaagtcaacgggattgaagaaatttgctttgatcctgagggaagcaaggccgagtggaaagaaacgccatgcattctgtctgtgaatgtaaaaaataagcaggatgacgatcttaactgtgaacccctgtctcctcacaatataacaccagagcctgtttccaagttgcctgctgaaccagtgtccggagaccccgccccaggggacctcgacgcaggcgaccccgctagcggagtgctggcatctggagactcgacctctggtgaccccacgagctcagaaccctcttcatccgatgccgcttcaggagacgctacctccggcgacgcccccagtggtgacgtgtcgcctggggatgctacttccggggacgccacagccgacgaccttagctcgggtgaccctacctcttccgatcctattccaggcgaacccgtccctgtagagcctatctcaggcgattgtgctgcagacgatattgccagttccgaaattacgagcgtcgatctggcctcaggcgcccccgccagcaccgaccccgccagtgacgatctagcatccggggacctcagctcaagcgaactggcaagcgatgacctagccacaggcgagctggcaagcgatgagctaactagcgagtctaccttcgataggaccttcgagcctaaatctgtgccagtgtgtgagccagtgccagaaatcgacaacattgaaccgagttccaacaaggatgacgatttcctggagaagaatggtgctgacgagaaactggaacagattcagtccaaggactctcttgacgagaaaaataaggctgacaacaacattgatgccaacgaggagacgttggagacagatgacacaacaatttgctctgaccggcctcctgaaaacgaaaagaaggtcgaggaggatatcatcacagaattggccctgggggaggatgcaatttcatcctcaatggagatagaccagggagaaaagaacgaagacgagacgagcgccgatctagtggagactattaacgagaacgttattgaagacaacaagagtgaaaacattctggaaaatacggatagcatggaaacagatgagatcatcccaattctcgaaaagctcgctccaagtgaggacgaactgacttgctttagtaaaacgagcctgcttccgattgatgaaacaaatccagatctagaagagaagatggagagctccttcgggtccccaagtaagcaggaatcctcagagagcctgccaaaagaggcttttctggtcctgagtgacgaggaagacatttcaggagagaaggatgaaagcgaggtcattagtcagaacgaaacatgtagtcctgcagaggtggagtcaaatgagaaagacaataagcccgaggaagaagagcaggtgattcacgaagacgatgaaagaccatcagaaaaaaatgaattctctagaagaaagaggtctaagagcgaagacatggacaacgtccaaagtaagcggagacgctatatggaagaggaatatgaggccgagttccaagtcaaaatcaccgcgaagggcgacatcaaccaaaagttgcaaaaggttatccagtggctgctcgaggagaagctttgtgctttgcagtgtgctgtgttcgataagacgctggcagagctcaaaacacgcgtggaaaaaattgagtgtaacaaacgtcacaaaaccgtacttacagagctgcaggcaaaaattgctaggctgacgaaaagatttgaagcggcaaaggaggaccttaagaaacggcatgaacaccctccgaatccgccagtgagccctggtaagacagtcaatgatgtgaattctaacaataacatgtcctatagaaatgccggcacagtccgccagatgctagaatcaaagagaaacgtttcggagtctgctcctccaagctttcagactcctgtcaatacggtttcctctacaaatctcgtaactcctccagccgtggtgtcttcccagcccaagctgcagacacccgttacttctggctctctaaccgcgacttcggtgctgcctgcgcccaacacagccactgtggtcgcgactactcaagtgccttcgggaaacccacagccaacgatctccctccagcccctccccgtcatccttcatgtcccagtggccgtgtcctcccagcctcaactgctgcagagccaccccgggaccctggtaactaaccagccctcagggaatgtagaattcatctcagtccagtccccgcctacagtttctggtcttactaaaaatccagtgagcctgccctctctgcccaatcctaccaaacccaacaacgtcccgagcgtaccaagtccgtctattcaacggaaccccactgcatccgccgcgccacttggtacaaccctcgccgtgcaggccgtccccaccgctcattctattgttcaggccacgagaacaagtctccccaccgtgggcccctcaggcctttactctccaagtacgaaccggggcccgatacagatgaagataccaatctcggcattctctacaagtagcgcggcggaacagaacagtaacacaacccctcggattgagaatcagacgaacaagacaattgacgcttccgtcagcaaaaaagctgcggactcgacatctcagtgtggcaaggcgactgggagtgacagcagcggcgtgattgacttaacaatggacgacgaggagagcggagcttcccaggatccaaagaaactgaaccataccccagtttcgactatgtcatcctcccagcctgtgtctaggcctctgcagcccatccagcctgccccgcccttgcagcctagcggcgtgcctaccagcggaccttctcaaaccactatccacctgctgcccacagccccaactactgtaaatgtcacccacaggcctgtgactcaagttacaacgcgcctgcctgtccccagggctccggctaaccatcaggtggtgtacaccaccttgccggctccaccggcccaggcccctctaaggggaacggttatgcaagcgccagcagtccgtcaggtcaatcctcagaactccgtgaccgtcagagtgccccaaaccactacttacgtcgtcaataatggacttaccctgggctccactggcccccagttaaccgtgcatcaccgtccgccccaggtgcacacagagccaccaaggccagtacatccagcccccctcccggaggctccacaaccccaaagactgccccccgaggcagcatctacgtctctgccacagaaaccacaccttaagctggcccgcgtccaaagccaaaatggcatcgtgctgtcatggtctgtgctcgaggtagacaggagttgcgccactgtggacagctaccacttgtacgcttaccatgaggaaccctccgcgacagtgccaagtcagtggaaaaaaatcggggaggtcaaagccctgcccttacccatggcctgtacactgactcaattcgtgtcaggcagcaagtactacttcgctgtgcgggccaaggacatttatgggcgtttcggccccttctgtgatccccagagtaccgacgtcatcagttcaacccaaagttcttag

SEQ ID NO: 313594 - DNA, 3813 bp, Artificial Sequence
  derived and/or modified sequence
atggatagtctcgaagagccccagaagaaggtctttaaagctaggaaaaccatgagagtctcggacagacagcaactggaagccgtttacaaggtgaaggaggaactactgaaaactgacgtcaaattgctgaacgggaaccacgaaaatggagacctggaccccacgagtcctctcgaaaacatggattacataaaggataaagaggaagttaacgggatcgaggagatctgcttcgatccggagggctcaaaggcagaatggaaagaaacgccttgcatcttgagcgtgaatgtcaagaataagcaggacgacgatctaaattgtgagcccctgtcaccccacaacatcacccctgagccggtctcaaagctccccgcagagcccgtatcaggggaccctgccccaggagatctagacgcaggtgacccggcatcaggcgtgctagcttcgggtgactcaacctccggggatccaacttcttcagagccttcctcttccgacgctgcttcaggggatgcaacctctggagatgctcccagcggcgacgtctcccccggtgatgcaacaagtggggacgctaccgcagatgatctatcatccggggacccgacttcgtctgaccctatccctggcgaaccagtgcccgtggaacctatcagcggcgactgtgccgcagacgatatcgcctcctcagaaatcacctcagtagacctagcctccggtgcacctgcatccacggatcctgcctctgacgacctcgcgagtggtgatctttcctccagcgaactagccagcgacgatctagccacaggggaactagcttcagacgagctcaccagtgaatcaacctttgacaggacatttgaaccgaagtccgttcctgtttgcgaaccagttcctgagatcgataacatcgagccatcaagtaataaagacgatgatttcttggagaaaaacggggcagatgaaaagctggaacagatacagtctaaggattcactggacgaaaaaaacaaggccgataacaatattgatgccaatgaggaaactctagaaacagatgatacaaccatctgttctgacaggcctcctgagaatgagaaaaaggtggaggaagacatcatcaccgagttggccctcggtgaggacgccatcagctcctccatggagattgaccagggagaaaaaaatgaggacgagaccagtgccgacctggtggagaccatcaatgaaaatgtcatcgaagacaacaaatccgagaatattctggagaatactgattccatggaaacagacgagattattcccatcttagaaaaactggctccatcggaggatgagctgacatgcttcagcaaaacctctctactgccaatcgacgagactaacccagacctggaggagaaaatggagtcctcgtttggttcaccgtcaaaacaggagtcgtccgagtcactgccgaaagaggcattcttggttctgagtgacgaagaggacatctctggagagaaagacgaaagcgaagtcatcagtcagaacgagacctgtagccccgcagaagtagaatccaatgaaaaagacaacaaaccagaagaggaagagcaagtcatccatgaagatgacgaacgcccttccgagaaaaatgagttctctaggagaaagcgatcaaagtcggaggatatggataatgtgcagtcaaagaggcgcagatacatggaggaagagtatgaagcagagtttcaggtgaagattaccgccaaaggcgacataaaccagaagttgcagaaggtgatacagtggctgctcgaagaaaaactctgtgccttacaatgtgcagtcttcgataaaactctggcggagctgaagacccgggtggagaagattgaatgtaacaaacgtcacaaaactgtactaacagagctgcaggccaagatagcacgactgacaaaaagattcgaggcagccaaggaagaccttaaaaagcgtcatgaacaccctcctaaccccccagtcagtccgggaaagacggtcaacgacgtgaacagcaacaataacatgtcctaccggaacgccggtacggtccgccagatgctggagtcgaaacgcaacgtctctgaaagtgcgccaccttcctttcagacacccgtgaataccgtcagttccacaaacctcgtgaccccacccgctgtcgtctcatctcagcctaagctgcagacccccgtgacgtcgggatcgctgaccgccacaagtgtgctgcccgcacccaacacagcgacagttgtcgccactacgcaggtcccaagtgggaacccgcagcctacaatctccttgcagccactaccagtcatcttgcacgttcccgtcgccgtctcctcccagcctcaactcttgcaaagtcatcctgggacactcgtgactaatcagccaagcgggaatgtcgaatttatatcggtacaatcgcccccaaccgtgtcgggtctcacgaaaaatccggtcagccttccttccctaccaaatcccacaaaacctaacaatgtgccaagtgtgccttctccctccatccagaggaatcctacagcaagcgcagcaccactcggcactacattggccgtgcaggccgttcccaccgcccactccatcgtccaggcaacaagaacctcgctgcccacggtgggcccttctggcctgtactctccttcgacaaaccggggtccaatccagatgaagatacctatcagcgctttctccacctcaagcgccgctgaacagaattccaatacaacaccccgaatcgagaatcagactaacaagactatagatgcaagtgtgtcgaaaaaagcggctgacagtaccagccagtgcggcaaagccacaggcagcgacagctctggcgtgattgacctgactatggacgacgaggagtccggtgcatcgcaggaccctaaaaaattaaaccacacaccagttagtacaatgagctcttcgcagcctgttagccggccattgcagcccatccagcccgcaccacctctccagccaagcggagttcctacatccggcccttcgcagactactattcatttactgccaactgcccctaccacagtgaacgtgacacatcgcccagtgacccaggtgacaacccggcttccagtgcctagagctcctgcaaatcaccaagtggtgtatactactttacccgctcctcccgcacaggcccctttaaggggaaccgtgatgcaagctcctgccgtgcgccaagtaaaccctcaaaactctgtaaccgtgagggtgcctcagacaaccacctacgtggtcaacaatggcctgacactaggctccaccggcccacagctgactgtgcaccatcggccaccacaggtgcacaccgagccccctagacccgtgcatcccgctccactgcctgaggcccctcagccccagcgcctgccaccagaggccgcttctacttctctcccacagaagcctcacttaaaattggcgcgagtgcagagccagaacggcatcgttctgtcttggagtgtactcgaggtagatcgatcctgcgcaaccgtggatagctaccacctttacgcatatcatgaagagccctctgcgaccgtgcccagccagtggaagaagataggcgaggttaaggccttgcctctgcccatggcttgcacactgacacagtttgtctcaggaagcaagtactacttcgcagtccgcgcaaaggatatttacgggcgttttggccctttctgtgatccccagtcaacggatgttatttcgtcaacacagtcgtcatag

SEQ ID NO: 313595 - DNA, 3813 bp, Artificial Sequence
  derived and/or modified sequence
atggactcacttgaggagccacagaagaaggtgtttaaagcaaggaagactatgcgagtgagtgataggcagcagctggaagccgtgtataaagtaaaagaggaactcttaaaaaccgatgtgaagcttctcaatgggaatcatgagaatggggacctggaccccactagccctctggagaatatggattacattaaagacaaagaggaggtgaatggcatagaagagatctgcttcgacccagagggctctaaggcggaatggaaggaaacaccttgtatactgtccgtcaacgtgaaaaataagcaggatgatgatctgaactgcgaacctctctctcctcataatatcacccccgagccagtttccaagcttccagccgagcccgtatcaggagacccggcacccggtgatcttgatgcaggtgatcctgctagtggcgtcctggccagcggcgattcaacgtctggagacccaacaagcagtgagccatccagcagtgatgcggcaagcggggacgccacgtccggcgacgcaccaagtggcgacgtcagtccgggtgacgccacctccggcgatgctaccgccgatgacctgagcagtggtgatcccacttccagcgaccccatccctggagagcctgtgcctgtcgagcctatctccggagactgcgctgccgatgatattgcctcctccgagattacttcagtagatctggcaagcggggctcctgccagcacggacccagcttcagacgaccttgcttcaggtgatttgagctcatctgagctggctagcgatgatctggcgaccggcgaactggcgagtgacgaattaacctctgagagtacatttgaccgaacattcgagcccaagagcgtacccgtgtgtgagccagtgcccgaaatcgataatatcgagcccagcagcaacaaagatgacgattttttagagaagaatggcgcagatgaaaaactggaacaaattcaatccaaagactcactggatgagaagaataaagcagacaataacattgatgcaaacgaagaaactctggagacagatgatacgaccatatgcagcgacagacctcccgaaaatgagaaaaaggttgaggaggatataattacggagctggctcttggggaggatgcaatcagcagtagtatggagatcgatcagggcgaaaagaatgaagacgagacgagtgcggatttggtcgagacgatcaatgagaatgttatcgaagacaacaagagcgaaaatatactcgagaatacagacagcatggagaccgacgagattatccccattcttgagaagctggcccctagtgaggatgaattgacatgtttttcaaagacgtctcttctaccaatcgatgagactaatcccgacctcgaagagaaaatggagtcttctttcggctccccctctaaacaggaatctagtgagagccttccgaaagaggccttcctcgtgctgagtgacgaggaggacatctccggcgaaaaagacgaaagcgaggtcataagccagaacgagacatgcagtccagccgaggtcgagagtaacgaaaaggacaataagcccgaggaagaggagcaggtgattcacgaagatgacgagaggccatccgagaaaaacgagttctcccgtcgcaagcggtcaaaatcggaggatatggacaatgtacagtcaaagaggcggaggtatatggaggaggaatatgaggccgagtttcaggttaagattacggcaaagggcgatatcaaccagaaacttcaaaaagttatacagtggctattagaggaaaagctctgcgcgctgcaatgcgctgtcttcgacaagacactggccgagctgaagaccagggtagagaagatagaatgtaacaagcgccacaagaccgtgctgactgagctccaggctaaaatcgctcggctgacaaaacggtttgaagctgctaaagaagacctgaagaaacgtcatgagcacccccctaatcctccagtgtcccctggtaagaccgtcaacgacgtgaattccaataataacatgtcctatcgtaatgctgggaccgtccgacagatgttggaatctaagcgcaatgtctctgagtctgctcctccctccttccagactccagtgaacaccgtgtcatccacaaacttggtcactccacctgcagtagtgagtagtcagccgaaattgcagacccctgtgacttctgggagtctgactgccacatccgtgttgcccgcaccaaatacagccacagtcgttgccactacccaggtgccgtcaggtaatcctcagcctactataagcctgcagccccttccggtaatcctgcacgtcccggtcgctgtctcttctcagccacagttgttgcagtcccatcctggtaccttggtcacgaaccagcctagcggcaatgtggagtttatttcagttcagagtcctcctaccgtctcaggcctgacaaagaaccctgttagtcttccctccctcccaaaccccacaaaacctaacaatgtgccttccgtgccttccccctcaattcaaaggaatcccaccgcatcggccgctccgctcggcaccaccttagccgtgcaggcggtgccgacagcccacagtatcgtgcaggcgacccggacatctctccctacagttggaccgagcgggctatattcgcccagcaccaatagggggcctatccaaatgaagatcccgataagcgccttttcaaccagtagcgctgctgagcagaattcaaacaccaccccgaggattgagaatcagaccaacaagactatcgatgcttcagtttcaaaaaaagccgcagattctacttctcagtgtggtaaagccactgggtctgactcgtcgggggtgattgatcttacaatggacgacgaggaatcaggtgccagtcaagaccctaaaaagctgaatcacacaccggtgtccaccatgagttcttcacagcctgtttccagaccactgcaaccaatccagccagcaccgcctctccaaccttctggagtgccgacctctggcccttcccagacaacgattcacctcctgcccacagcgcctacaacagttaacgtgacccatcgcccagttacccaggtgacaacaaggttgcctgttcccagggcccctgccaatcatcaggttgtttacactactctgcctgcgccacctgcccaagccccactcagaggaacagttatgcaagcccctgcagtccggcaagtgaacccacagaattcggtaactgttagggttcctcagaccacaacttacgtggtgaataatggactgaccctggggagcactggcccacaactcacagttcaccatcgtccccctcaggtgcatacagagcctccgcgacccgtgcacccagcgccactgcctgaggccccacagcctcagaggcttcccccagaagccgcatcaacgagcttgccacagaagccacaccttaaactggctcgcgtgcagagtcagaacgggatcgtcctgagctggagtgtcctcgaggtggaccggtcctgcgctaccgtggacagttatcatctgtacgcctatcacgaggagccttctgccacagtgccaagccagtggaagaagattggcgaggttaaggcactcccactgcccatggcttgcacactgacccagtttgtgtccgggtccaaatactacttcgctgtaagggcaaaagatatctacggccgtttcggtccattttgtgaccctcagagtaccgacgttatctcttctacgcagagtagctag

SEQ ID NO: 313596 - DNA, 3813 bp, Artificial Sequence
  derived and/or modified sequence
atggacagcctggaggagccccagaagaaggtgttcaaggccagaaagaccatgagagtgagcgacagacagcagctggaggccgtgtacaaggtgaaggaggagctgctgaagaccgacgtgaagctgctgaacggcaaccacgagaacggcgacctggaccccaccagccccctggagaacatggactacatcaaggacaaggaggaggtgaacggcatcgaggagatctgcttcgaccccgagggcagcaaggccgagtggaaggagaccccctgcatcctgagcgtgaacgtgaagaacaagcaggacgacgacctgaactgcgagcccctgagcccccacaacatcacccccgagcccgtgagcaagctgcccgccgagcccgtgagcggcgaccccgcccccggcgacctggacgccggcgaccccgccagcggcgtgctggccagcggcgacagcaccagcggcgaccccaccagcagcgagcccagcagcagcgacgccgccagcggcgacgccaccagcggcgacgcccccagcggcgacgtgagccccggcgacgccaccagcggcgacgccaccgccgacgacctgagcagcggcgaccccaccagcagcgaccccatccccggcgagcccgtgcccgtggagcccatcagcggcgactgcgccgccgacgacatcgccagcagcgagatcaccagcgtggacctggccagcggcgcccccgccagcaccgaccccgccagcgacgacctggccagcggcgacctgagcagcagcgagctggccagcgacgacctggccaccggcgagctggccagcgacgagctgaccagcgagagcaccttcgacagaaccttcgagcccaagagcgtgcccgtgtgcgagcccgtgcccgagatcgacaacatcgagcccagcagcaacaaggacgacgacttcctggagaagaacggcgccgacgagaagctggagcagatccagagcaaggacagcctggacgagaagaacaaggccgacaacaacatcgacgccaacgaggagaccctggagaccgacgacaccaccatctgcagcgacagaccccccgagaacgagaagaaggtggaggaggacatcatcaccgagctggccctgggcgaggacgccatcagcagcagcatggagatcgaccagggcgagaagaacgaggacgagaccagcgccgacctggtggagaccatcaacgagaacgtgatcgaggacaacaagagcgagaacatcctggagaacaccgacagcatggagaccgacgagatcatccccatcctggagaagctggcccccagcgaggacgagctgacctgcttcagcaagaccagcctgctgcccatcgacgagaccaaccccgacctggaggagaagatggagagcagcttcggcagccccagcaagcaggagagcagcgagagcctgcccaaggaggccttcctggtgctgagcgacgaggaggacatcagcggcgagaaggacgagagcgaggtgatcagccagaacgagacctgcagccccgccgaggtggagagcaacgagaaggacaacaagcccgaggaggaggagcaggtgatccacgaggacgacgagagacccagcgagaagaacgagttcagcagaagaaagagaagcaagagcgaggacatggacaacgtgcagagcaagagaagaagatacatggaggaggagtacgaggccgagttccaggtgaagatcaccgccaagggcgacatcaaccagaagctgcagaaggtgatccagtggctgctggaggagaagctgtgcgccctgcagtgcgccgtgttcgacaagaccctggccgagctgaagaccagagtggagaagatcgagtgcaacaagagacacaagaccgtgctgaccgagctgcaggccaagatcgccagactgaccaagagattcgaggccgccaaggaggacctgaagaagagacacgagcacccccccaacccccccgtgagccccggcaagaccgtgaacgacgtgaacagcaacaacaacatgagctacagaaacgccggcaccgtgagacagatgctggagagcaagagaaacgtgagcgagagcgccccccccagcttccagacccccgtgaacaccgtgagcagcaccaacctggtgaccccccccgccgtggtgagcagccagcccaagctgcagacccccgtgaccagcggcagcctgaccgccaccagcgtgctgcccgcccccaacaccgccaccgtggtggccaccacccaggtgcccagcggcaacccccagcccaccatcagcctgcagcccctgcccgtgatcctgcacgtgcccgtggccgtgagcagccagccccagctgctgcagagccaccccggcaccctggtgaccaaccagcccagcggcaacgtggagttcatcagcgtgcagagcccccccaccgtgagcggcctgaccaagaaccccgtgagcctgcccagcctgcccaaccccaccaagcccaacaacgtgcccagcgtgcccagccccagcatccagagaaaccccaccgccagcgccgcccccctgggcaccaccctggccgtgcaggccgtgcccaccgcccacagcatcgtgcaggccaccagaaccagcctgcccaccgtgggccccagcggcctgtacagccccagcaccaacagaggccccatccagatgaagatccccatcagcgccttcagcaccagcagcgccgccgagcagaacagcaacaccacccccagaatcgagaaccagaccaacaagaccatcgacgccagcgtgagcaagaaggccgccgacagcaccagccagtgcggcaaggccaccggcagcgacagcagcggcgtgatcgacctgaccatggacgacgaggagagcggcgccagccaggaccccaagaagctgaaccacacccccgtgagcaccatgagcagcagccagcccgtgagcagacccctgcagcccatccagcccgccccccccctgcagcccagcggcgtgcccaccagcggccccagccagaccaccatccacctgctgcccaccgcccccaccaccgtgaacgtgacccacagacccgtgacccaggtgaccaccagactgcccgtgcccagagcccccgccaaccaccaggtggtgtacaccaccctgcccgccccccccgcccaggcccccctgagaggcaccgtgatgcaggcccccgccgtgagacaggtgaacccccagaacagcgtgaccgtgagagtgccccagaccaccacctacgtggtgaacaacggcctgaccctgggcagcaccggcccccagctgaccgtgcaccacagacccccccaggtgcacaccgagccccccagacccgtgcaccccgcccccctgcccgaggccccccagccccagagactgccccccgaggccgccagcaccagcctgccccagaagccccacctgaagctggccagagtgcagagccagaacggcatcgtgctgagctggagcgtgctggaggtggacagaagctgcgccaccgtggacagctaccacctgtacgcctaccacgaggagcccagcgccaccgtgcccagccagtggaagaagatcggcgaggtgaaggccctgcccctgcccatggcctgcaccctgacccagttcgtgagcggcagcaagtactacttcgccgtgagagccaaggacatctacggcagattcggccccttctgcgacccccagagcaccgacgtgatcagcagcacccagagcagctag

SEQ ID NO: 313597 - DNA, 4142 bp, Artificial Sequence
  derived and/or modified sequence
tagtatacaacaagcagtaggttttctatgtcttaaacattacatgaaatgtgctgcttgcatctcttctaagatcaatttgtattaagtctacaattaggtggcttctgtttcagttattaaactctctttctcttttttcttaaagattcagaatggacagtttagaagaacctcagaaaaaagtctttaaggctcgaaaaacgatgagagtgagtgatcgtcagcaacttgaagcagtgtacaaggtcaaagaagaactgttgaaaactgatgtcaagctgttaaatggcaaccatgaaaatggagatttggacccaacctcacctttggaaaacatggattacattaaagacaaggaagaggtgaatggcattgaagagatttgttttgatcctgaaggaagtaaagcagaatggaaggaaacaccctgtatcctaagtgttaatgtaaaaaacaagcaggatgatgatttaaattgtgaacctttgtctccccataatataactccagaaccagtctctaaactgcctgctgaaccagtttctggtgatccagcccctggtgatctggatgccggagatccagcctccggagtactggcctctggtgattccacctctggtgatcccacctctagcgagccctcctctagtgatgctgcctctggtgatgcaacctctggtgatgccccttctggtgatgtgtcccctggtgatgccacctctggtgatgccactgctgatgatctctcctctggtgatcccacctctagtgatcccatcccaggtgaaccggtccctgttgaacccatttctggtgattgtgccgctgatgatatagcctctagtgaaataacttctgttgatctggcttctggagcaccagcttccactgatccagcctctgatgatctggcctctggtgatctatcctctagtgaactggcctctgatgatctggccactggtgaactggcctctgatgagctgacttctgaatcaacctttgatcgtacctttgaaccaaagtctgtaccagtttgtgaaccagttcctgaaattgacaatatagaaccaagtagcaataaagatgatgattttcttgaaaaaaatggagctgatgaaaaattagagcaaattcagagtaaagactcattggatgagaaaaataaagctgataataatattgatgctaatgaagaaactctagaaacagatgatacaactatttgttcagatcgacctcctgaaaatgaaaagaaggtagaggaagatattatcacagagcttgctcttggagaagatgctatatctagcagtatggaaattgaccaaggtgaaaagaatgaagatgaaacttctgcagatcttgtagaaacgattaatgaaaatgttattgaagataacaaaagtgagaatatcttagaaaatacagactctatggagacagatgaaatcattcctattttggaaaagcttgcaccttctgaggatgaacttacttgcttttctaaaacatctctccttccaatcgatgagacaaatccagatttggaagagaaaatggaaagttcttttggttcaccatctaaacaagaaagtagtgagagtttgccaaaagaagcctttctggtcctctctgatgaagaggatatttcgggtgaaaaagatgagtctgaagttatatcgcaaaatgaaacgtgctctccagcagaagtagaaagtaatgaaaaggacaacaaacctgaggaagaagagcaagtaatacatgaagatgatgaaagaccttctgagaaaaatgaattttctagacgaaaacgttctaaatcagaagacatggacaatgtacagtctaaacgtcgtcgatatatggaagaagaatatgaggcagaatttcaagtaaagattacagccaaaggagacattaaccagaaacttcaaaaggttatacagtggttgctggaagaaaaattgtgtgcgctgcagtgtgctgtatttgataagactttggcagaattgaaaacacgagtggaaaagattgaatgtaacaagaggcataaaacagttctcactgaactacaggccaagatagccaggttaaccaaacgctttgaagcagccaaagaagatcttaagaaaagacatgaacatccacccaacccaccagtatcaccaggaaaaactgtaaatgatgtcaacagcaataataacatgtcttacagaaatgcaggcacagtgagacagatgctggagtccaaaagaaatgtaagcgagagtgcaccaccatcctttcaaactcctgtgaatacagtatcttcaaccaatcttgtcactcctccagcagttgtcagtagtcaacctaaattgcagactccagtgacttcgggttccctcacagcaacgtcagttcttcctgcacccaatacagctactgtagttgctactactcaggtgcctagtggaaatccccagcctacaatctctttacagcctttgccagtgattttgcatgtacctgttgcagtatcctcccagcctcagcttctacagagccatccagggactttggtgactaatcaaccatctggcaatgttgaattcatttctgtgcaaagcccacctacagtgagtggtcttaccaaaaatccagtatccttgccatccttgccaaatcccactaaaccaaacaacgttccttctgtgcccagtcctagtattcaaaggaaccctactgccagtgctgcaccattgggaacaacacttgctgtgcaggctgttccaacagcacactctattgtacaagccacaaggacttctttacccacagtgggcccatcaggactctatagtccatcaactaatcgaggtcctatacagatgaaaattccaatttctgcatttagtacttcgtctgctgcagaacagaacagcaataccaccccaagaattgaaaaccagacaaacaaaacaatagatgcttctgtcagtaagaaagcagctgatagcacatcacagtgtggaaaagccactggcagtgattcaagtggtgtcattgatctcacaatggatgatgaagagagtggagcttcacaagaccccaaaaaactaaatcacactcctgtatcaaccatgagttcttctcagcctgtgtcacgaccattgcaacccatacaaccagcaccgcctcttcaaccatctggggtgccaacaagtggaccatctcagaccaccatacacttactacctacagctccaactaccgtgaatgtaacacatcgtccagtaactcaggtgaccacaagactccctgtaccaagagctcctgcaaaccaccaggtggtttatacaactcttcctgcaccaccagctcaggctcccttgcgaggaactgttatgcaggctcctgctgttcggcaggtcaatccccaaaatagtgttacagttcgagtgcctcaaacaaccacatatgttgtaaacaatggactaaccctgggatcaacaggacctcagctcacagtgcatcaccgaccaccacaagtgcatactgagcccccacgccccgtgcacccagcacccttaccagaagctccacaaccacagcgtctgcccccagaagctgccagcacatctctgcctcagaagccacacttgaagttagcacgcgttcagagtcaaaatggcatagtactgtcatggagtgtcctggaggtggatcgaagctgtgccactgttgatagctaccatctctatgcttaccatgaggaacccagtgccactgtgccctcacaatggaaaaagattggggaagtcaaggcacttcccttgcccatggcatgtactctcacccagtttgtatctggtagcaaatactactttgcagtacgagccaaggatatttatggacgttttgggcctttctgtgatcctcagtcaacagatgtgatctcttctacccagagcagttaaaccttggagcctttatattttcctcttttaaaatttccaccttttggtcttgtttttaatcttgtgcatgataccccatgtaaaatccaccttgtgcaagatttcttggacagatgtgtgtatacactacatttgtttataaccagaagcaaaataaactcagcccacaaagct

SEQ ID NO: 313598 - protein, 176 aa, Artificial Sequence
  derived and/or modified sequence
MDSLEEPQKKVFKARKTMRVSDRQQLEAVYKVKEELLKTDVKLLNGNHENGDLDPTSPLENMDYIKDKEEVNGIEEICFDPEGSKAEWKETPCILSVNVKNKQDDDLNCEPLSPHNITPEPVSKLPAEPVSGDPAPGDLDAGDPASGVLASGDSTSGDPTSSEPSSSDAASGDATS

SEQ ID NO: 313599 - DNA, 1727 bp, Artificial Sequence
  derived and/or modified sequence
aaggtaaccaaaactaagaaattgatgttaggtaatttgcccagtctcacacagtaggtttcctgggagagttggaattcaaatctgtgaatctgtctacagtctacagagttcatgttcttaattgggttattaaaagtgatgaatttttttaaaggaatgcttacttttaatattcagaatggacagtttagaagaacctcagaaaaaagtctttaaggctcgaaaaacgatgagagtgagtgatcgtcagcaacttgaagcagtgtacaaggtcaaagaagaactgttgaaaactgatgtcaagctgttaaatggcaaccatgaaaatggagatttggacccaacctcacctttggaaaacatggattacattaaagacaaggaagaggtgaatggcattgaagagatttgttttgatcctgaaggaagtaaagcagaatggaaggaaacaccctgtatcctaagtgttaatgtaaaaaacaagcaggatgatgatttaaattgtgaacctttgtctccccataatataactccagaaccagtctctaaactgcctgctgaaccagtttctggtgatccagcccctggtgatctggatgccggagatccagcctccggagtactggcctctggtgattccacctctggtgatcccacctctagcgagccctcctctagtgatgctgcctctggtgatgcaacctctggtgatgccccttctggtgatgtgtcccctggtgatgccacctctggtgatgccactgctgatgatctctcctctggtgatcccacctctagtgatcccatcccaggtgaaccggtccctgttgaacccatttctggtgattgtgccgctgatgatatagcctctagtgaaataacttctgttgatctggcttctggagcaccagcttccactgatccagcctctgatgatctggcctctggtgatctatcctctagtgaactggcctctgatgatctggccactggtgaactggcctctgatgagctgacttctgaatcaacctttgatcgtacctttgaaccaaagtctgtaccagtttgtgaaccagttcctgaaattgacaatatagaaccaagtagcaataaagatgatgattttcttgaaaaaaatggagctgatgaaaaattagagcaaattcagagtaaagactcattggatgagaaaaataaagctgataataatattgatgctaatgaagaaactctagaaacagatgatacaactatttgttcagatcgacctcctgaaaatgaaaagaaggtagaggaagatattatcacagagcttgctcttggagaagatgctatatctagcagtatggaaattgaccaaggtgaaaagaatgaagatgaaacttctgcagatcttgtagaaacgattaatgaaaatgttattgaagataacaaaagtgagaatatcttagaaaatacagactctatggagacagatgaaatcattcctattttggaaaagcttgcaccttctgaggatgaacttacttgcttttctaaaacatctctccttccaatcgatgagacaaatccagatttggaagagaaaatggaaagttcttttggttcaccatctaaacaagaaagtagtgagagtttgccaaaagaagcctttctggtcctctctgatgaagaggatatttcgggtgaaaaagatgagtctgaagttatatcgcaaaatgaaa

SEQ ID NO: 313600 - DNA, 555 bp, Artificial Sequence
  derived and/or modified sequence
aggtgttggtattagtccctttttaagggaggacagactattacaagataaagctgtaattgataaagaagttggcctggtgtggtggctcacacctgtaatcccagcactttgggaggccgaggcaggtggatcacgaggtcagaagatcaagaccatcctggctaacacgattcagaatggacagtttagaagaacctcagaaaaaagtctttaaggctcgaaaaacgatgagagtgagtgatcgtcagcaacttgaagcagtgtacaaggtcaaagaagaactgttgaaaactgatgtcaagctgttaaatggcaaccatgaaaatggagatttggacccaacctcacctttggaaaacatggattacattaaagacaaggaagaggtgaatggcattgaagagatttgttttgatcctgaaggaagtaaagcagaatggaaggaaacaccctgtatcctaagtgttaatgtaaaaaacaagcaggatgatgatttaaattgtgaacctttgtctccccataatataactccagaaccagtctctaaactgc

SEQ ID NO: 313601 - DNA, 550 bp, Artificial Sequence
  derived and/or modified sequence
ttcttctttttttctcaagagaatatttgacctgatgtaattcttggatctctgaggtcttctacacagaagtatatttagagagcaattcagaatggacagtttagaagaacctcagaaaaaagtctttaaggctcgaaaaacgatgagagtgagtgatcgtcagcaacttgaagcagtgtacaaggtcaaagaagaactgttgaaaactgatgtcaagctgttaaatggcaaccatgaaaatggagatttggacccaacctcacctttggaaaacatggattacattaaagacaaggaagaggtgaatggcattgaagagatttgttttgatcctgaaggaagtaaagcagaatggaaggaaacaccctgtatcctaagtgttaatgtaaaaaacaagcaggatgatgatttaaattgtgaacctttgtctccccataatataactccagaaccagtctctaaactgcctgctgaaccagtttctggtgatccagcccctggtgatctggatgccggagatccagcctccggagtactggcctctggt

SEQ ID NO: 313602 - DNA, 572 bp, Artificial Sequence
  derived and/or modified sequence
tttctcaagagaatatttgacctgatgtaattcttggatctctgaggtcttctacacagaagtatatttagagagcacctcattatgttgcccaggctggtcttgaactccaggggtcaagagagtttcccacttcagcctcccaaagtgctgagattacaagcatgagccaccatgtccagcctgtactgcctttcctttttcctttatgatttctacagcacttgtctgcccagaaaatattacctgttgtaagattcagaatggacagtttagaagaacctcagaaaaaagtctttaaggctcgaaaaacgatgagagtgagtgatcgtcagcaacttgaagcagtgtacaaggtcaaagaagaactgttgaaaactgatgtcaagctgttaaatggcaaccatgaaaatggagatttggacccaacctcacctttggaaaacatggattacattaaagacaaggaagaggtgaatggcattgaagagatttgttttgatcctgaaggaagtaaagcagaatggaaggaaacaccctgtatcctaagtgttaatgtaaaaaacaagcag

SEQ ID NO: 313603 - DNA, 571 bp, Artificial Sequence
  derived and/or modified sequence
gatgttaggtaatttgcccagtctcacacagtaggtttcctgggagagttggaattcaaatctgtgaatctgtctacagtctacagagttcatgttcttaattgggttattaaaagtgatgaatttttttaaaggaatgcttacttttaatggaggacagactattacaagataaagctgtaattgataaagaagttggcctggtgtggtggctcacacctgtaatcccagcactttgggaggccgaggcaggtggatcacgaggtcagaagatcaagaccatcctggctaacacgattcagaatggacagtttagaagaacctcagaaaaaagtctttaaggctcgaaaaacgatgagagtgagtgatcgtcagcaacttgaagcagtgtacaaggtcaaagaagaactgttgaaaactgatgtcaagctgttaaatggcaaccatgaaaatggagatttggacccaacctcacctttggaaaacatggattacattaaagacaaggaagaggtgaatggcattgaagagatttgttttgatcctgaaggaagtaaagcagaatggaagg

SEQ ID NO: 313604 - DNA, 573 bp, Artificial Sequence
  derived and/or modified sequence
aaactaagagtatggctgcagcaagctccctcttggattcagaatggacagtttagaagaacctcagaaaaaagtctttaaggctcgaaaaacgatgagagtgagtgatcgtcagcaacttgaagcagtgtacaaggtcaaagaagaactgttgaaaactgatgtcaagctgttaaatggcaaccatgaaaatggagatttggacccaacctcacctttggaaaacatggattacattaaagacaaggaagaggtgaatggcattgaagagatttgttttgatcctgaaggaagtaaagcagaatggaaggaaacaccctgtatcctaagtgttaatgtaaaaaacaagcaggatgatgatttaaattgtgaacctttgtctccccataatataactccagaaccagtctctaaactgcctgctgaaccagtttctggtgatccagcccctggtgatctggatgccggagatccagcctccggagtactggcctctggtgattccacctctggtgatcccacctctagcgagccctcctctagtgatgctgcctctggtgatgcaacctctgg

SEQ ID NO: 313605 - DNA, 570 bp, Artificial Sequence
  derived and/or modified sequence
agtttctgttgctgtgaaagaactgataagatggctgcagggggctccctttgggattcagaatggacagtttagaagaacctcagaaaaaagtctttaaggctcgaaaaacgatgagagtgagtgatcgtcagcaacttgaagcagtgtacaaggtcaaagaagaactgttgaaaactgatgtcaagctgttaaatggcaaccatgaaaatggagatttggacccaacctcacctttggaaaacatggattacattaaagacaaggaagaggtgaatggcattgaagagatttgttttgatcctgaaggaagtaaagcagaatggaaggaaacaccctgtatcctaagtgttaatgtaaaaaacaagcaggatgatgatttaaattgtgaacctttgtctccccataatataactccagaaccagtctctaaactgcctgctgaaccagtttctggtgatccagcccctggtgatctggatgccggagatccagcctccggagtactggcctctggtgattccacctctggtgatcccacctctagcgagccctcctctagtgatgctg

SEQ ID NO: 313606 - DNA, 580 bp, Artificial Sequence
  derived and/or modified sequence
agaatctcaagctgaattggcttccagcaagtaggctaggcttattattttatgcgcttcagccaaagaccagcaggaacacctttgtaattgaaaaagttaggtttactatttgctgcagggaggaaataatgttcactatggggaaactgtaaggcacatcaatcagtaagaggatgttagaaaaaacctagtataggatttgagtatagtataggttgggttattttggggagagattaaggaagtagatccttatcgtggattgggtgacatcagaaagtgggggcacttctattcttgggtatctcaataaattttatctatatagggaggacagactattacaagataaagctgtaattgataaagaagttggcctggtgtggtggctcacacctgtaatcccagcactttgggaggccgaggcaggtggatcacgaggtcagaagatcaagaccatcctggctaacacgattcagaatggacagtttagaagaacctcagaaaaaagtctttaaggctcgaaaaacgatgagagtgagtgatcgtcagcaacttgaagcagtgtacaaggtca

SEQ ID NO: 313607 - DNA, 575 bp, Artificial Sequence
  derived and/or modified sequence
aaccaaaactaagaaattgatgttagggaggacagactattacaagataaagctgtaattgataaagaagttggcctggtgtggtggctcacacctgtaatcccagcactttgggaggccgaggcaggtggatcacgaggtcagaagatcaagaccatcctggctaacacgattcagaatggacagtttagaagaacctcagaaaaaagtctttaaggctcgaaaaacgatgagagtgagtgatcgtcagcaacttgaagcagtgtacaaggtcaaagaagaactgttgaaaactgatgtcaagctgttaaatggcaaccatgaaaatggagatttggacccaacctcacctttggaaaacatggattacattaaagacaaggaagaggtgaatggcattgaagagatttgttttgatcctgaaggaagtaaagcagaatggaaggaaacaccctgtatcctaagtgttaatgtaaaaaacaagcaggatgatgatttaaattgtgaacctttgtctccccataatataactccagaaccagtctctaaactgcctgctgaaccagtttctggtg

SEQ ID NO: 313608 - DNA, 564 bp, Artificial Sequence
  derived and/or modified sequence
aatgacgtcacatatgagatagaatggagattcagaatggacagtttagaagaacctcagaaaaaagtctttaaggctcgaaaaacgatgagagtgagtgatcgtcagcaacttgaagcagtgtacaaggtcaaagaagaactgttgaaaactgatgtcaagctgttaaatggcaaccatgaaaatggagatttggacccaacctcacctttggaaaacatggattacattaaagacaaggaagaggtgaatggcattgaagagatttgttttgatcctgaaggaagtaaagcagaatggaaggaaacaccctgtatcctaagtgttaatgtaaaaaacaagcaggatgatgatttaaattgtgaacctttgtctccccataatataactccagaaccagtctctaaactgcctgctgaaccagtttctggtgatccagcccctggtgatctggatgccggagatccagcctccggagtactggcctctggtgattccacctctggtgatcccacctctagcgagccctcctctagtgatgctgcctctggtgatgcaacctct

SEQ ID NO: 313609 - DNA, 574 bp, Artificial Sequence
  derived and/or modified sequence
agacctaatagttggcagcatagaaagcagtacaaagaattctgattctaggcattttcactttgaaatagtcattttgaagatatactctgtgtgttctgtgagcttcattgacatattgtctgacgttttttggcttttgtggtaaatgggatgtatgctgcacaaactacccaacagatgtgaaccactatttgaaaggaattttaatatgtagccaacctactgtattcttgttttttttttaatgaatatgaatcaaacaagaaatttagactcgagaaggctgacctagaagtctgcattagcttttaatgtttatacaaatgaactaagtagcagtggtttacagaagaggaagtccttttcacagtgtcaagctgcccacagattcagaatggacagtttagaagaacctcagaaaaaagtctttaaggctcgaaaaacgatgagagtgagtgatcgtcagcaacttgaagcagtgtacaaggtcaaagaagaactgttgaaaactgatgtcaagctgttaaatggcaaccatgaaaatggagatttggacccaacctcacctttg

SEQ ID NO: 313610 - DNA, 568 bp, Artificial Sequence
  derived and/or modified sequence
atttagttctcatggcaacctttgtgacaggtgttggtattagtccctttttaagattcagaatggacagtttagaagaacctcagaaaaaagtctttaaggctcgaaaaacgatgagagtgagtgatcgtcagcaacttgaagcagtgtacaaggtcaaagaagaactgttgaaaactgatgtcaagctgttaaatggcaaccatgaaaatggagatttggacccaacctcacctttggaaaacatggattacattaaagacaaggaagaggtgaatggcattgaagagatttgttttgatcctgaaggaagtaaagcagaatggaaggaaacaccctgtatcctaagtgttaatgtaaaaaacaagcaggatgatgatttaaattgtgaacctttgtctccccataatataactccagaaccagtctctaaactgcctgctgaaccagtttctggtgatccagcccctggtgatctggatgccggagatccagcctccggagtactggcctctggtgattccacctctggtgatcccacctctagcgagccctcctctagtgatgc

SEQ ID NO: 313611 - DNA, 1548 bp, Artificial Sequence
  derived and/or modified sequence
atggacagtctcgaggaaccccagaaaaaggtgtttaaggctagaaagacaatgcgggtttcagatcgacagcaactcgaggccgtgtacaaggtaaaggaagagctcctgaaaacagacgttaagttgctcaacggcaatcatgaaaacggggatttagaccccacctcaccactggagaacatggactacatcaaggacaaagaggaggtgaacggaatagaagagatctgtttcgatcctgaggggtccaaagctgaatggaaagagacaccttgcattctgtccgttaacgtaaagaacaagcaggacgacgatctgaattgcgagcctctgtcgccacacaacatcactcctgagccagtatctaagctaccagcggaaccagtgagcggagatcccgctccaggggatctagacgctggcgaccctgcaagtggagtgctcgcttctggcgatagcacatccggggatcccacctcaagcgaaccctcttcctcagacgcagcgtcaggtgacgctaccagtggagatgcaccctcaggcgacgtgagtccgggagacgcgacttcaggcgatgctacagcagatgacctctcctccggcgatcctacgtctagcgatcctatccctggagaaccggttccagtcgagccgatctccggagactgcgccgccgacgatattgctagcagcgagattaccagcgtggacctggcaagtggcgctccagccagtaccgaccctgcgtctgacgacctagctagtggggatctgtcttcttccgaactcgcttccgatgatctggccacaggcgagctggcctctgacgaattaacgtcggaatctacgttcgataggacctttgaaccaaaatccgttcccgtgtgcgaaccagtcccggagatcgataacattgaaccatcctccaataaggatgacgacttcctggagaagaatggcgctgatgagaaactggagcaaattcagtctaaggattctctggatgaaaaaaacaaagccgataataatattgatgcaaacgaagaaacactggagactgacgatacaaccatttgctctgaccgccctcctgagaatgagaaaaaagtcgaggaggatatcataactgaactcgcgctaggcgaagatgctatcagctctagcatggagatagaccagggagaaaagaatgaagatgaaacctccgctgatcttgttgagacaattaacgagaatgttattgaggataacaaatccgagaatattctcgagaacaccgatagcatggagaccgacgaaatcataccaattttggagaaacttgcacctagcgaagatgaactcacctgtttttccaaaaccagcctgctccctatagacgagactaatccggacttagaggagaaaatggagtcctcctttgggagcccatctaagcaggagtccagcgagtctcttccgaaggaggcctttctggtcctgtcggacgaggaggacataagcggcgagaaggacgagagcgaggttatttctcagaatgagtag

SEQ ID NO: 313612 - DNA, 378 bp, Artificial Sequence
  derived and/or modified sequence
atggacagccttgaagaaccgcagaagaaggtgtttaaagcccgaaagactatgagagtgagtgaccggcagcaactagaggccgtatacaaggtgaaggaagaacttctaaagactgacgtcaagctgttgaacgggaatcacgaaaacggagacctcgaccccacctcccccctggagaacatggactatattaaggataaagaagaagtgaatggaatcgaggaaatctgcttcgaccccgaggggtcaaaagccgagtggaaggagacaccctgcattctgtccgtgaacgtcaagaacaagcaggacgatgatctaaattgcgagccactgagccctcacaacattacgccagaaccagtgtccaagttgtag

SEQ ID NO: 313613 - DNA, 459 bp, Artificial Sequence
  derived and/or modified sequence
atggatagcttggaagagccacagaaaaaggttttcaaggctagaaagaccatgcgggtatcagaccggcaacagctcgaggctgtgtataaagtaaaagaggaactgttaaagaccgatgtgaagctgctgaacggcaaccatgagaatggtgacctggaccctacttcaccactggaaaacatggactatatcaaagacaaggaagaagttaatggaatcgaagagatctgtttcgaccctgagggtagcaaagctgagtggaaggagaccccatgtattttatcggtcaacgtgaagaacaaacaggacgatgatctgaattgtgagccacttagccctcacaatatcacacccgagcccgtgtcaaagcttcctgcagaacccgtctcaggagatcctgcaccaggggacctggatgctggagaccccgcctccggagtgctagcatcaggttag

SEQ ID NO: 313614 - DNA, 312 bp, Artificial Sequence
  derived and/or modified sequence
atggactccctcgaggagccacagaagaaggtgtttaaagcacgaaagaccatgcgggtatccgacagacagcaactggaggcagtgtacaaagtaaaagaggagctgctgaagactgatgtgaaattgctgaacgggaatcacgagaatggtgacctggatccgacttcacccttggagaatatggactacatcaaagacaaggaggaagttaatggcattgaggagatctgcttcgaccctgaagggtcaaaagcagaatggaaggagaccccctgcattctgagcgtgaacgtgaagaacaagcaatag

SEQ ID NO: 313615 - DNA, 270 bp, Artificial Sequence
  derived and/or modified sequence
atggatagcttagaagagccacagaagaaagtgtttaaggcaaggaagaccatgcgcgtgagtgataggcagcagctggaggcggtttacaaggtgaaggaggagctcttaaaaactgacgtgaagctcctgaacgggaatcacgagaacggagacttggaccctacttccccactcgaaaacatggactatatcaaagacaaagaagaggtgaatggcatagaagaaatatgtttcgacccggaggggagcaaagccgagtggaaatag

SEQ ID NO: 313616 - DNA, 534 bp, Artificial Sequence
  derived and/or modified sequence
atggatagtttagaggaaccacagaagaaggtgtttaaggccaggaagaccatgcgggtgtcggaccgtcagcagctggaagctgtgtacaaggtcaaagaagaactccttaaaaccgatgtgaagctgcttaacggcaatcacgaaaatggcgatttggatcctacatctcccctcgaaaacatggactacattaaagacaaggaggaagtaaacgggattgaggaaatttgctttgaccctgagggttccaaagcggagtggaaagaaacaccttgtatactcagcgtaaacgtcaagaataaacaagatgacgaccttaattgtgaacccctttcaccccataacatcacacctgagccagtgtccaaacttccagctgaacccgtttctggggaccccgcgcctggtgatttagacgccggggatccggcctccggcgtcctggcctctggggacagcaccagtggagatccaacgtccagcgagccgtcttcctcagacgccgctagtggagatgcaacctcaggatag

SEQ ID NO: 313617 - DNA, 510 bp, Artificial Sequence
  derived and/or modified sequence
atggattcattagaggaaccccagaagaaagtctttaaagccaggaagaccatgagggtcagcgacagacagcagctcgaggcggtttataaggtcaaggaggaacttttgaaaaccgatgttaagctcctgaatgggaaccacgagaacggggatttagacccgactagccccttagaaaatatggattacatcaaagacaaggaggaagtgaatggaatcgaggaaatctgcttcgatcccgagggctccaaggccgaatggaaagagacaccatgcatcctctctgtcaacgttaagaacaagcaggatgacgatctgaactgcgagccactaagcccccacaatattacacccgaacctgtatccaagctgccagccgagccggtaagcggggaccctgcccctggggatctggatgctggcgatccagccagcggggtgctggcaagcggcgatagtacctcgggggatcccacttctagcgaacctagcagtagcgatgcttag

SEQ ID NO: 313618 - DNA, 399 bp, Artificial Sequence
  derived and/or modified sequence
atggactctttggaggagccccagaagaaggtgtttaaggcgcgaaagacaatgagggtgtccgaccggcagcaactggaggccgtgtacaaagtgaaggaggagcttctcaagacagacgttaagctgttaaacggcaaccacgaaaacggcgatctagacccaacctcccctttggagaatatggactatattaaagataaagaggaggtgaacggaattgaagagatatgctttgatcctgaggggagcaaagccgaatggaaagagacaccttgcatcctgagcgtcaatgtgaaaaacaaacaagatgacgatcttaactgcgagcccctgtcgccgcacaatattactccagaaccagtgagcaaactgcccgccgaaccagtcagcggctag

SEQ ID NO: 313619 - DNA, 531 bp, Artificial Sequence
  derived and/or modified sequence
atggatagccttgaggagccccagaagaaggtgttcaaggctcgaaagacaatgcgcgtatccgatcggcaacagcttgaagctgtctacaaagtaaaggaggagcttctgaaaaccgatgttaagctgctcaacggcaaccacgaaaatggggacctggaccccaccagccctctggagaatatggactatattaaggacaaagaggaggtcaacgggatagaagagatctgctttgatcctgagggatccaaggccgagtggaaggagacaccgtgtattttatctgtgaacgtgaaaaacaaacaagacgacgatcttaattgtgaacctctttctcctcataatattaccccagaacccgtgtctaaacttccagcggaaccggtttcaggagatcccgcccccggcgatttagatgctggagaccctgcttctggggtgcttgcttcaggagactctaccagcggggatccaacctcctctgagccatcttcttctgatgctgcctcaggcgacgctacaagttag

SEQ ID NO: 313620 - DNA, 180 bp, Artificial Sequence
  derived and/or modified sequence
atggattcattagaagagccccagaagaaagtcttcaaggctcggaagaccatgagggtttccgacaggcagcagcttgaggcagtatataaggttaaagaagagttgctgaaaactgatgttaagctgcttaatggaaatcacgagaacggagatttggatcccacttcgcccctctag

SEQ ID NO: 313621 - DNA, 510 bp, Artificial Sequence
  derived and/or modified sequence
atggacagtctcgaagagccccaaaagaaggtgtttaaggcgaggaaaactatgagagtctccgatcgccagcagcttgaggcggtctacaaagtgaaggaggaactactcaagacagatgtcaagttgctcaacggcaatcacgagaatggtgacctggaccccaccagcccgctcgaaaatatggactacattaaggataaagaagaggtgaatggcatcgaagaaatttgcttcgatcctgaaggaagcaaagcagagtggaaggaaaccccatgtatcctcagcgtgaacgtcaaaaataaacaggacgatgacctcaattgtgaacctctttccccccataatatcacccccgaacctgtatcaaaactgccggccgaacctgtgtccggcgaccccgcccctggcgatcttgatgcaggggatccagcttcgggagtgctggctagcggggattcaactagcggtgatccgacctccagcgaaccctcttcttccgacgcttag

SEQ ID NO: 313622 - DNA, 1548 bp, Artificial Sequence
  derived and/or modified sequence
atggacagcctggaggagccccagaagaaggtgttcaaggccaggaagaccatgagggtgtctgaccggcagcagctggaggccgtgtacaaggtgaaggaggagctgctgaagacagatgtgaagctgctgaatggaaatcatgaaaatggagacctggaccccaccagccccctggagaacatggactacatcaaggacaaggaggaggtgaatggcatcgaggagatctgctttgatcctgagggcagcaaggccgagtggaaggagaccccctgcatcctgtctgtgaatgtgaagaacaagcaggatgatgacctgaactgtgagcccctgagcccccacaacatcaccccagagcctgtgtccaagctgcctgctgagcctgtgtctggggaccctgcccctggggacctggatgctggggaccctgccagcggcgtgctggccagcggggacagcaccagcggggaccccaccagcagcgagcccagcagcagtgatgctgccagcggagatgccaccagcggagatgcccccagcggagatgtgtccccaggagatgccaccagcggagatgccacagcagatgacctgagcagcggggaccccaccagcagtgaccccatccctggagagcctgtgcctgtggagcccatcagcggggactgtgccgcagatgacatcgccagcagcgagatcacctctgtggacctggccagcggggccccagccagcacagatcctgccagtgatgacctggccagcggggacctgagcagcagcgagctggccagtgatgacctggccactggagagctggccagtgatgagctgaccagcgagagcacctttgacaggacctttgagcccaagtctgtgcctgtgtgtgagcctgtgcctgagattgacaacatcgagcccagcagcaacaaggatgatgacttcctggagaagaatggagcagatgagaagctggagcagatccagagcaaggacagcctggatgagaagaacaaggctgacaacaacattgatgccaatgaggagaccctggagacagatgacaccaccatctgcagcgaccggcccccagaaaatgagaagaaggtggaggaggacatcatcacagagctggccctgggagaagatgccatcagcagctccatggagattgaccagggcgagaagaatgaagatgagaccagcgctgacctggtggagaccatcaatgaaaatgtgattgaggacaacaagtctgagaacatcctggagaacacagacagcatggagacagatgagatcatccccatcctggagaagctggcccccagtgaagatgagctgacctgcttcagcaagaccagcctgctgcccattgatgagaccaacccagacctggaggagaagatggagagcagctttggcagccccagcaagcaggagagcagcgagagcctgcccaaggaggccttcctggtgctgagtgatgaggaggacatcagcggggagaaggatgagagcgaggtgatcagccagaatgaatag

SEQ ID NO: 313623 - DNA, 378 bp, Artificial Sequence
  derived and/or modified sequence
atggacagcctggaggagccccagaagaaggtgttcaaggccaggaagaccatgagggtgtctgaccggcagcagctggaggccgtgtacaaggtgaaggaggagctgctgaagacagatgtgaagctgctgaatggaaatcatgaaaatggagacctggaccccaccagccccctggagaacatggactacatcaaggacaaggaggaggtgaatggcatcgaggagatctgctttgatcctgagggcagcaaggccgagtggaaggagaccccctgcatcctgtctgtgaatgtgaagaacaagcaggatgatgacctgaactgtgagcccctgagcccccacaacatcaccccagagcctgtgtccaagctgtag

SEQ ID NO: 313624 - DNA, 459 bp, Artificial Sequence
  derived and/or modified sequence
atggacagcctggaggagccccagaagaaggtgttcaaggccaggaagaccatgagggtgtctgaccggcagcagctggaggccgtgtacaaggtgaaggaggagctgctgaagacagatgtgaagctgctgaatggaaatcatgaaaatggagacctggaccccaccagccccctggagaacatggactacatcaaggacaaggaggaggtgaatggcatcgaggagatctgctttgatcctgagggcagcaaggccgagtggaaggagaccccctgcatcctgtctgtgaatgtgaagaacaagcaggatgatgacctgaactgtgagcccctgagcccccacaacatcaccccagagcctgtgtccaagctgcctgctgagcctgtgtctggggaccctgcccctggggacctggatgctggggaccctgccagcggcgtgctggccagcggctag

SEQ ID NO: 313625 - DNA, 312 bp, Artificial Sequence
  derived and/or modified sequence
atggacagcctggaggagccccagaagaaggtgttcaaggccaggaagaccatgagggtgtctgaccggcagcagctggaggccgtgtacaaggtgaaggaggagctgctgaagacagatgtgaagctgctgaatggaaatcatgaaaatggagacctggaccccaccagccccctggagaacatggactacatcaaggacaaggaggaggtgaatggcatcgaggagatctgctttgatcctgagggcagcaaggccgagtggaaggagaccccctgcatcctgtctgtgaatgtgaagaacaagcagtag

SEQ ID NO: 313626 - DNA, 270 bp, Artificial Sequence
  derived and/or modified sequence
atggacagcctggaggagccccagaagaaggtgttcaaggccaggaagaccatgagggtgtctgaccggcagcagctggaggccgtgtacaaggtgaaggaggagctgctgaagacagatgtgaagctgctgaatggaaatcatgaaaatggagacctggaccccaccagccccctggagaacatggactacatcaaggacaaggaggaggtgaatggcatcgaggagatctgctttgatcctgagggcagcaaggccgagtggaagtag

SEQ ID NO: 313627 - DNA, 534 bp, Artificial Sequence
  derived and/or modified sequence
atggacagcctggaggagccccagaagaaggtgttcaaggccaggaagaccatgagggtgtctgaccggcagcagctggaggccgtgtacaaggtgaaggaggagctgctgaagacagatgtgaagctgctgaatggaaatcatgaaaatggagacctggaccccaccagccccctggagaacatggactacatcaaggacaaggaggaggtgaatggcatcgaggagatctgctttgatcctgagggcagcaaggccgagtggaaggagaccccctgcatcctgtctgtgaatgtgaagaacaagcaggatgatgacctgaactgtgagcccctgagcccccacaacatcaccccagagcctgtgtccaagctgcctgctgagcctgtgtctggggaccctgcccctggggacctggatgctggggaccctgccagcggcgtgctggccagcggggacagcaccagcggggaccccaccagcagcgagcccagcagcagtgatgctgccagcggagatgccaccagcggctag

SEQ ID NO: 313628 - DNA, 510 bp, Artificial Sequence
  derived and/or modified sequence
atggacagcctggaggagccccagaagaaggtgttcaaggccaggaagaccatgagggtgtctgaccggcagcagctggaggccgtgtacaaggtgaaggaggagctgctgaagacagatgtgaagctgctgaatggaaatcatgaaaatggagacctggaccccaccagccccctggagaacatggactacatcaaggacaaggaggaggtgaatggcatcgaggagatctgctttgatcctgagggcagcaaggccgagtggaaggagaccccctgcatcctgtctgtgaatgtgaagaacaagcaggatgatgacctgaactgtgagcccctgagcccccacaacatcaccccagagcctgtgtccaagctgcctgctgagcctgtgtctggggaccctgcccctggggacctggatgctggggaccctgccagcggcgtgctggccagcggggacagcaccagcggggaccccaccagcagcgagcccagcagcagtgatgcctag

SEQ ID NO: 313629 - DNA, 399 bp, Artificial Sequence
  derived and/or modified sequence
atggacagcctggaggagccccagaagaaggtgttcaaggccaggaagaccatgagggtgtctgaccggcagcagctggaggccgtgtacaaggtgaaggaggagctgctgaagacagatgtgaagctgctgaatggaaatcatgaaaatggagacctggaccccaccagccccctggagaacatggactacatcaaggacaaggaggaggtgaatggcatcgaggagatctgctttgatcctgagggcagcaaggccgagtggaaggagaccccctgcatcctgtctgtgaatgtgaagaacaagcaggatgatgacctgaactgtgagcccctgagcccccacaacatcaccccagagcctgtgtccaagctgcctgctgagcctgtgtctggatag

SEQ ID NO: 313630 - DNA, 531 bp, Artificial Sequence
  derived and/or modified sequence
atggacagcctggaggagccccagaagaaggtgttcaaggccaggaagaccatgagggtgtctgaccggcagcagctggaggccgtgtacaaggtgaaggaggagctgctgaagacagatgtgaagctgctgaatggaaatcatgaaaatggagacctggaccccaccagccccctggagaacatggactacatcaaggacaaggaggaggtgaatggcatcgaggagatctgctttgatcctgagggcagcaaggccgagtggaaggagaccccctgcatcctgtctgtgaatgtgaagaacaagcaggatgatgacctgaactgtgagcccctgagcccccacaacatcaccccagagcctgtgtccaagctgcctgctgagcctgtgtctggggaccctgcccctggggacctggatgctggggaccctgccagcggcgtgctggccagcggggacagcaccagcggggaccccaccagcagcgagcccagcagcagtgatgctgccagcggagatgccaccagctag

SEQ ID NO: 313631 - DNA, 180 bp, Artificial Sequence
  derived and/or modified sequence
atggacagcctggaggagccccagaagaaggtgttcaaggccaggaagaccatgagggtgtctgaccggcagcagctggaggccgtgtacaaggtgaaggaggagctgctgaagacagatgtgaagctgctgaatggaaatcatgaaaatggagacctggaccccaccagccccctgtag

SEQ ID NO: 313632 - DNA, 1548 bp, Artificial Sequence
  derived and/or modified sequence
atggacagcctggaggagccccagaagaaggtgttcaaggcccggaaaacaatgagagtgagcgacagacagcagctggaagccgtttacaaggttaaagaggagcttctcaagactgatgtgaagcttctgaatggaaaccatgagaacggcgacttagacccgactagtcctctggagaacatggattacattaaggacaaagaggaggtcaacgggatcgaagagatatgttttgatcccgagggctcaaaagccgagtggaaggagactccgtgtatccttagtgtcaatgttaagaacaaacaggacgacgacctgaactgtgaacccctctcgccccataacatcacacccgagcctgtgtccaagctgccggcggaaccagtgagtggggatccagcaccaggagatctcgatgccggagaccccgcctcaggcgtcctagcatccggtgactctactagtggagatcccacaagttctgaacccagctcttcagatgccgcgtcgggggatgctacaagtggagacgccccttctggtgacgtcagtcccggggacgccacatccggcgatgctacagctgatgatctaagttctggagacccgacctcatccgaccccattcccggcgagcccgtccctgtagagccaatcagtggtgactgcgccgccgatgacattgctagcagcgagatcacatcagtagatctagcttccggcgctccggcttcaacagatccagctagcgacgatttagcctccggtgacctttcctcctccgaactcgcctctgatgacctggcaacgggtgagctggcaagcgacgagctgacttccgaatcgaccttcgacaggacatttgagccgaagtccgtgccagtttgcgagcccgtgcccgaaatcgacaacatcgagccaagctctaataaagatgacgattttctcgagaagaacggcgccgacgagaagttggagcagatccagtccaaggacagccttgacgagaagaataaagccgacaacaacatcgacgccaacgaagaaacactggaaaccgacgacacaaccatctgtagcgaccgccctcctgagaacgagaaaaaggtggaggaggacatcattaccgagctcgctttgggagaggacgctatcagcagctccatggaaattgaccaaggggagaagaacgaggatgaaacatccgcggacctggtcgaaactatcaacgagaatgttatagaggataacaagtccgagaacatcctcgaaaatactgacagtatggagacagacgagattattcccattcttgaaaaactggctccgagtgaagacgagctgacttgctttagcaagacatctctcctaccaatagacgaaaccaaccctgaccttgaggagaaaatggaatcatcatttggctctccaagtaaacaggaaagcagtgaatccctgccaaaggaggcgttcttggtgctgagcgacgaagaggacatttccggcgagaaagacgagtctgaagtgatatctcagaatgagtag

SEQ ID NO: 313633 - DNA, 378 bp, Artificial Sequence
  derived and/or modified sequence
atggacagcctggaggagccccagaagaaggtgttcaaggcccggaagacaatgagggtctccgacagacagcagctcgaggcagtttacaaggtgaaagaggagttgctgaagactgatgtgaagctgctgaatggaaatcacgaaaatggggacctggaccccaccagcccattggaaaacatggattatatcaaagacaaagaagaggtcaacggaattgaagagatttgtttcgatcccgaagggtccaaagccgagtggaaggagactccctgtatattgagtgtgaatgttaaaaacaagcaagacgatgatctcaactgcgaacccctatccccacataacattactcccgagccggtgagtaaattgtag

SEQ ID NO: 313634 - DNA, 459 bp, Artificial Sequence
  derived and/or modified sequence
atggacagcctggaggagccccagaagaaggtgttcaaggcccggaaaaccatgcgagtgagcgaccgtcaacagttagaagcagtttataaagtgaaagaggaactcttgaaaacagacgtgaagcttttgaatggaaatcacgagaatggcgatctggatcctacaagtccactggagaacatggattacattaaggacaaggaggaagttaacggcattgaggagatctgctttgaccccgaggggagtaaggctgagtggaaggaaaccccgtgcatcctcagcgtcaacgtgaaaaataaacaggatgatgacctgaactgcgagcctctctcgccccacaatattacccctgaacccgtgtcgaaactacccgccgaacccgtgtcaggggaccccgctcctggggacctggacgcgggcgacccggctagtggcgtgctagcatctggctag

SEQ ID NO: 313635 - DNA, 312 bp, Artificial Sequence
  derived and/or modified sequence
atggacagcctggaggagccccagaagaaggtgttcaaggcccggaagacaatgagagttagcgacaggcagcagctggaggcagtgtataaagtcaaggaagaacttttaaagacagatgttaagctgctaaatgggaaccacgagaatggagatctagatccgacaagccccctggaaaacatggattatatcaaagacaaagaggaagtcaacgggattgaagagatttgctttgatcccgaaggcagtaaggcagaatggaaggagaccccatgcattctcagcgtcaatgtcaagaataagcagtag

SEQ ID NO: 313636 - DNA, 270 bp, Artificial Sequence
  derived and/or modified sequence
atggacagcctggaggagccccagaagaaggtgttcaaggcccggaaaacgatgcgagtgtctgatcgacagcagctggaggctgtgtacaaggtcaaagaggaactgctgaaaactgacgtgaagctcctgaatggcaatcatgagaacggagatcttgatccgacgagtcctctagagaacatggactacataaaggataaagaggaggtcaacggcatcgaagagatctgcttcgatccagaaggatctaaagccgagtggaagtag

SEQ ID NO: 313637 - DNA, 534 bp, Artificial Sequence
  derived and/or modified sequence
atggacagcctggaggagccccagaagaaggtgttcaaggcccggaagacgatgagggtctccgaccggcagcagctggaagccgtctataaggtgaaggaggagctcctgaaaacagatgtcaaactcctcaacggtaatcacgagaatggggatctcgatcccacctcccccctggaaaatatggactatatcaaagataaagaggaagttaatgggatcgaagaaatatgtttcgatcccgaggggtccaaggccgagtggaaggagaccccttgcatccttagtgtgaatgtaaagaacaaacaggacgacgatctgaactgtgagcccttgtccccgcacaacattacacccgaaccagtctctaaactgccagcagaacccgtgtctggggacccggctcctggcgatctggacgctggcgaccctgctagcggagtgctggcgagcggggactccaccagtggggatcccacctcctcagaaccatcttctagcgacgcagctagcggcgacgctacttccgggtag

SEQ ID NO: 313638 - DNA, 510 bp, Artificial Sequence
  derived and/or modified sequence
atggacagcctggaggagccccagaagaaggtgttcaaggcccggaaaaccatgagggtcagcgacaggcagcaattggaggccgtttacaaggtgaaggaggagctcctgaaaactgatgtgaagctgctgaacggaaatcacgaaaatggggatttagacccaacatccccactcgaaaatatggactatattaaagataaggaggaggtcaatgggatagaggagatttgctttgatcccgaaggatccaaagccgaatggaaagagaccccttgtatactgtcagtgaatgtcaaaaacaagcaggatgatgatctgaattgtgagcctctttcgccacataacattactcccgagcccgtctctaagttacccgccgaaccagtgagtggggatcctgcgcccggcgaccttgacgccggcgatccagcgtctggcgttttagcatcaggcgacagcacctcaggagacccaaccagcagcgagcccagcagctccgacgcttag

SEQ ID NO: 313639 - DNA, 399 bp, Artificial Sequence
  derived and/or modified sequence
atggacagcctggaggagccccagaagaaggtgttcaaggcccggaagactatgagagtatcagaccggcagcaattggaggctgtgtacaaagtcaaagaagaactgctgaaaaccgatgttaagcttctgaacggtaaccatgaaaatggcgatcttgaccccacatctcccttagagaacatggactacatcaaagacaaggaggaagtaaacgggatagaagaaatctgcttcgacccagagggctccaaagccgaatggaaggaaaccccttgcatcctgtctgtgaatgtgaagaataagcaggacgacgacctgaactgtgaacccctatccccccacaacataactccggaacctgttagcaaactgcctgctgagcccgtttccgggtag

SEQ ID NO: 313640 - DNA, 531 bp, Artificial Sequence
  derived and/or modified sequence
atggacagcctggaggagccccagaagaaggtgttcaaggcccggaagactatgagagtatcagatcgacagcaactggaagcagtatataaggttaaggaagagctcctgaagaccgatgttaaactgctcaacgggaaccacgagaatggggacctggacccaacctcacccctggaaaatatggactacatcaaggacaaggaagaagtgaacggaatcgaagagatttgctttgatccggaagggtccaaggctgaatggaaagaaactccttgtattctttccgttaatgtaaaaaataagcaggatgatgaccttaactgtgagccactctccccccacaacatcactcccgagcctgttagcaaactgccagctgagcccgtgagcggcgaccctgcccccggggatctggacgcgggagatccagcaagtggcgtgctggcgagtggggactctacttctggagaccctacgtccagtgaaccaagtagctccgacgcagcaagtggagatgctacaagttag

SEQ ID NO: 313641 - DNA, 180 bp, Artificial Sequence
  derived and/or modified sequence
atggacagcctggaggagccccagaagaaggtgttcaaggcccggaagaccatgagagtgtccgataggcagcagttagaagccgtgtacaaagtgaaggaggaactgctgaagacagatgtgaagctactgaatggtaaccacgagaacggcgatctcgaccctacatcacccctctag

SEQ ID NO: 313642 - DNA, 510 bp, Artificial Sequence
  derived and/or modified sequence
atggacagcctggaggagccccagaagaaggtgttcaaggcccggaagactatgagggtgagtgatcgacagcaacttgaagccgtgtacaaagtgaaggaagagcttttaaagactgatgtcaagctgctgaatgggaaccatgagaatggggacttggacccaacatcacccctggagaacatggattatatcaaagataaagaagaggtgaatggtatagaggagatatgttttgacccagaaggatccaaggccgaatggaaagagaccccatgcattctctctgttaatgttaagaataagcaggacgacgacttgaattgtgagcccctgagcccccacaacattacacctgagcccgtgagcaaactaccggctgagcccgtatcaggggatccggcacccggcgacctggacgctggagatccagcatccggcgtgctggccagtggcgacagcacgagcggagaccctaccagctctgaaccctcctcttcagatgcatag

SEQ ID NO: 313643 - DNA, 1548 bp, Artificial Sequence
  derived and/or modified sequence
atggatagcttagaggagccccagaagaaagtgtttaaagctaggaagacgatgcgggtgtccgaccgccagcagctcgaggcggtctacaaagtgaaggaagagctacttaagaccgacgttaagctattaaatggcaatcacgagaacggggaccttgacccaactagccccctggagaacatggactacattaaggacaaggaggaagttaacgggatcgaagaaatttgtttcgacccggaaggctcaaaggctgagtggaaagagactccttgcattctgagcgtcaatgtcaaaaacaaacaggatgacgatttgaactgtgaacccctgtcgccccataacatcactccagaaccagtgagcaagctccctgccgagcccgtatctggcgacccggctccgggtgacctggacgcaggcgaccccgctagcggggtcttggcttccggcgactctaccagcggggatcccacttcaagtgagcccagcagcagcgatgccgctagcggcgacgccacttcaggagacgcaccaagtggcgatgtatcccctggggacgcaactagcggagatgccacagccgatgacttaagcagcggagacccgaccagtagcgacccgatccctggagagccagtgccggtcgagccaatttccggcgattgtgcggctgacgacattgccagcagcgaaatcaccagcgtagatcttgcctccggggcacccgcttccaccgaccccgctagcgatgatctggcttctggcgacttgtcaagctcagaattggcctcggatgacttagccaccggggagctggcgtctgatgagttaacgtctgagtctactttcgatcggacattcgagcccaagtctgtcccagtgtgtgagcctgtgccggagatcgacaacattgagcccagttcaaacaaagatgatgacttccttgagaaaaatggcgctgacgagaagcttgaacaaatccagtcaaaggactcgttggatgaaaagaataaggctgacaataacattgacgccaatgaggaaactttggagacggacgatacaacaatttgcagcgatcggcctcccgaaaacgagaagaaggttgaggaagacattataactgagctagctttgggggaagacgcaatttcctctagcatggaaattgatcaaggagagaagaacgaagatgaaactagcgccgatctggtggaaacaattaatgagaatgtgattgaagacaacaagtccgaaaacatcctcgagaatacagacagcatggagaccgacgagattataccaattctcgaaaagctagctcccagtgaggacgagctcacatgtttctcgaaaacatccctgctccctatcgatgaaaccaaccctgacctcgaggagaaaatggaatcttctttcgggtcaccctccaaacaagagtctagcgaaagcctccccaaggaagcgtttctggtgctctctgatgaggaagacatcagcggggagaaagacgaatccgaagtcatcagtcagaacgaatag

SEQ ID NO: 313644 - DNA, 378 bp, Artificial Sequence
  derived and/or modified sequence
atggactcattggaggaaccccaaaagaaggtgtttaaagcccgaaaaacgatgcgcgtctcagatcggcagcagctagaggcagtgtacaaggtgaaggaagagctgcttaaaacagacgttaagttgctcaacgggaaccacgagaatggagatttagaccctacctcacctctggagaatatggattatataaaagacaaggaggaggttaatgggattgaagaaatatgtttcgatcccgagggcagtaaagcagagtggaaagagactccttgtattttgagtgtcaacgtcaaaaacaagcaggatgatgatctgaactgtgaaccactatcaccacacaacatcaccccagagcctgtgagcaagctgtag

SEQ ID NO: 313645 - DNA, 459 bp, Artificial Sequence
  derived and/or modified sequence
atggatagtctcgaggaacctcagaagaaggtgtttaaggccagaaaaacaatgagggtaagcgacagacaacagcttgaagcagtctataaggtgaaagaggagctgctgaaaaccgacgtgaaactgctgaatggcaaccacgagaacggtgacctggaccccacaagccccctggaaaatatggattacattaaagacaaagaggaagtcaatggtatcgaagagatctgcttcgaccccgaggggtcgaaggccgagtggaaggagaccccatgcatcctgagtgttaacgtaaagaataagcaggacgacgacctgaattgcgaacccctcagccctcataacatcactccggagcccgttagtaagctacccgcagagcccgtttccggagaccccgctccaggggacttagatgcgggagatcctgcttctggcgtgctagctagtggatag

SEQ ID NO: 313646 - DNA, 312 bp, Artificial Sequence
  derived and/or modified sequence
atggattctttggaagagcctcagaagaaagtgtttaaggccaggaaaactatgcgggtgtctgatcgtcagcaactggaggccgtttacaaggtgaaggaggagctcctgaagactgacgtcaaacttctgaacggtaaccacgagaacggtgatcttgacccaacctcccccctggaaaatatggactatattaaggataaggaggaggtcaatgggattgaggaaatttgcttcgaccccgaggggagcaaagcagaatggaaagaaaccccatgcattcttagcgtgaatgtaaaaaataaacagtag

SEQ ID NO: 313647 - DNA, 270 bp, Artificial Sequence
  derived and/or modified sequence
atggatagccttgaggagccacagaaaaaggtattcaaggcacggaaaacaatgagggtgagcgatcgtcaacagttagaggctgtgtacaaggtcaaagaagagcttttgaagacggacgtgaagctgctgaacggcaatcacgagaacggagatctggacccaaccagccctctggaaaacatggattatataaaggataaggaggaggtcaatggcatagaagaaatctgcttcgaccctgagggctctaaggccgaatggaaatag

SEQ ID NO: 313648 - DNA, 534 bp, Artificial Sequence
  derived and/or modified sequence
atggattctctggaggagcctcaaaaaaaggttttcaaagctcgaaaaacgatgagagtctctgataggcagcagttagaggcagtgtacaaagtcaaagaagaacttctgaaaacggatgtgaaactgctaaacgggaaccatgagaatggcgacctggaccctacatctcccctcgagaacatggattatattaaagataaggaagaagtgaacggaatcgaagagatctgctttgatccggagggcagtaaggctgagtggaaagaaacaccgtgtattttgagcgttaacgtgaaaaataaacaggacgacgacctgaattgcgagccactcagtccccataacatcacccctgagcctgtgagtaaactccctgctgagcctgtgtcgggtgatccagcgcctggcgatctagacgctggagatcctgccagcggtgtgttggcctccggcgattcaacgtcgggagatcccacgtctagcgaacccagttcatctgatgctgccagtggcgacgccacatccggatag

SEQ ID NO: 313649 - DNA, 510 bp, Artificial Sequence
  derived and/or modified sequence
atggactctctagaagagccacagaagaaagtttttaaagcgagaaaaaccatgcgcgtgagtgatcggcagcagctcgaggcagtgtacaaagtcaaggaggaactgctgaagacggacgtgaagttacttaacggcaatcacgagaacggggatcttgatcccacctctcccctcgaaaacatggattacatcaaggataaggaagaggtcaacggaatcgaggagatctgtttcgatccggagggcagcaaggccgagtggaaggagaccccctgtattctctccgtaaacgtgaagaataagcaggatgacgacctcaactgtgagccactgtccccgcacaacattacgcctgaacccgtgtcaaagctgcccgctgaacctgtgagcggcgatccagcgccaggtgatctcgacgccggtgatcctgcctctggcgttcttgcttctggggactccacgagcggagatcccacatcttctgagcctagctcatccgacgcgtag

SEQ ID NO: 313650 - DNA, 399 bp, Artificial Sequence
  derived and/or modified sequence
atggattctctcgaagagcctcagaagaaggtctttaaagccagaaagactatgcgggttagtgacaggcagcaactggaagctgtgtataaggtgaaggaggaactgctgaaaactgatgttaaactgctgaacggcaaccacgagaacggcgatctggaccccacttcccccctggagaacatggactatattaaagacaaagaggaggtcaatgggatcgaggagatctgttttgatcctgaagggtccaaggctgaatggaaggaaacaccttgtatcttgtctgtcaatgttaagaacaaacaggatgatgatctgaattgtgagcctctgtcaccacacaacattacaccagagccagtctctaagctgcccgcagagccggtttccggctag

SEQ ID NO: 313651 - DNA, 531 bp, Artificial Sequence
  derived and/or modified sequence
atggactccctggaggagccgcagaaaaaggtctttaaggctaggaagaccatgcgcgtgtccgacagacagcaactcgaagcagtctataaggtcaaagaagaattactcaagaccgatgtcaaacttctgaatgggaaccacgagaatggcgacttggatccaacatcccccctcgagaacatggattacattaaagataaggaagaggtcaacggcatcgaggagatctgtttcgacccggagggttccaaagccgagtggaaggagacaccctgtattcttagcgttaatgtgaaaaataagcaggatgacgacctcaactgcgagccattatcacctcataacatcactcctgagccagtctcaaaactgccggcagaaccagtgagcggcgaccctgcccctggagatcttgacgctggagatccggctagtggcgttttggcctcaggtgattctacttcaggcgaccccacatcttccgagcccagttccagcgatgctgcttccggcgatgcaacctcctag

SEQ ID NO: 313652 - DNA, 180 bp, Artificial Sequence
  derived and/or modified sequence
atggattcactcgaggaaccacagaaaaaggtgtttaaggcccgaaagaccatgagggtaagcgaccggcagcagttagaagcggtttacaaggtgaaggaagaactcctcaagacagatgtgaagttactgaatggtaaccatgagaatggggatttagacccgacgtcacctctgtag

SEQ ID NO: 313653 - DNA, 510 bp, Artificial Sequence
  derived and/or modified sequence
atggacagcctggaggagccacaaaagaaggtattcaaggctaggaaaacgatgcgcgtgtctgatcgacaacaattggaagctgtctataaggtgaaagaggagctgttgaagaccgatgtgaagctactgaatggcaaccacgaaaatggcgatctcgacccaaccagtcccctcgagaatatggactatataaaggataaagaggaggtaaatggcatagaggagatatgtttcgatcccgagggcagcaaggcagagtggaaggagaccccatgcatactaagtgtcaacgtaaaaaacaaacaggacgatgacttgaattgtgagcctctcagcccccacaacattacacctgagccagttagcaagttacccgcagaacccgtatcgggggatcccgcaccaggtgatttggacgccggagaccccgctagcggggttttagcctctggagatagtactagcggcgaccccacctcatctgagccgtcctcttctgatgcttag

SEQ ID NO: 313654 - DNA, 1548 bp, Artificial Sequence
  derived and/or modified sequence
atggacagcctggaggagccccagaagaaggtgttcaaggccagaaagaccatgagagtgagcgacagacagcagctggaggccgtgtacaaggtgaaggaggagctgctgaagaccgacgtgaagctgctgaacggcaaccacgagaacggcgacctggaccccaccagccccctggagaacatggactacatcaaggacaaggaggaggtgaacggcatcgaggagatctgcttcgaccccgagggcagcaaggccgagtggaaggagaccccctgcatcctgagcgtgaacgtgaagaacaagcaggacgacgacctgaactgcgagcccctgagcccccacaacatcacccccgagcccgtgagcaagctgcccgccgagcccgtgagcggcgaccccgcccccggcgacctggacgccggcgaccccgccagcggcgtgctggccagcggcgacagcaccagcggcgaccccaccagcagcgagcccagcagcagcgacgccgccagcggcgacgccaccagcggcgacgcccccagcggcgacgtgagccccggcgacgccaccagcggcgacgccaccgccgacgacctgagcagcggcgaccccaccagcagcgaccccatccccggcgagcccgtgcccgtggagcccatcagcggcgactgcgccgccgacgacatcgccagcagcgagatcaccagcgtggacctggccagcggcgcccccgccagcaccgaccccgccagcgacgacctggccagcggcgacctgagcagcagcgagctggccagcgacgacctggccaccggcgagctggccagcgacgagctgaccagcgagagcaccttcgacagaaccttcgagcccaagagcgtgcccgtgtgcgagcccgtgcccgagatcgacaacatcgagcccagcagcaacaaggacgacgacttcctggagaagaacggcgccgacgagaagctggagcagatccagagcaaggacagcctggacgagaagaacaaggccgacaacaacatcgacgccaacgaggagaccctggagaccgacgacaccaccatctgcagcgacagaccccccgagaacgagaagaaggtggaggaggacatcatcaccgagctggccctgggcgaggacgccatcagcagcagcatggagatcgaccagggcgagaagaacgaggacgagaccagcgccgacctggtggagaccatcaacgagaacgtgatcgaggacaacaagagcgagaacatcctggagaacaccgacagcatggagaccgacgagatcatccccatcctggagaagctggcccccagcgaggacgagctgacctgcttcagcaagaccagcctgctgcccatcgacgagaccaaccccgacctggaggagaagatggagagcagcttcggcagccccagcaagcaggagagcagcgagagcctgcccaaggaggccttcctggtgctgagcgacgaggaggacatcagcggcgagaaggacgagagcgaggtgatcagccagaacgagtag

SEQ ID NO: 313655 - DNA, 378 bp, Artificial Sequence
  derived and/or modified sequence
atggacagcctggaggagccccagaagaaggtgttcaaggccagaaagaccatgagagtgagcgacagacagcagctggaggccgtgtacaaggtgaaggaggagctgctgaagaccgacgtgaagctgctgaacggcaaccacgagaacggcgacctggaccccaccagccccctggagaacatggactacatcaaggacaaggaggaggtgaacggcatcgaggagatctgcttcgaccccgagggcagcaaggccgagtggaaggagaccccctgcatcctgagcgtgaacgtgaagaacaagcaggacgacgacctgaactgcgagcccctgagcccccacaacatcacccccgagcccgtgagcaagctgtag

SEQ ID NO: 313656 - DNA, 459 bp, Artificial Sequence
  derived and/or modified sequence
atggacagcctggaggagccccagaagaaggtgttcaaggccagaaagaccatgagagtgagcgacagacagcagctggaggccgtgtacaaggtgaaggaggagctgctgaagaccgacgtgaagctgctgaacggcaaccacgagaacggcgacctggaccccaccagccccctggagaacatggactacatcaaggacaaggaggaggtgaacggcatcgaggagatctgcttcgaccccgagggcagcaaggccgagtggaaggagaccccctgcatcctgagcgtgaacgtgaagaacaagcaggacgacgacctgaactgcgagcccctgagcccccacaacatcacccccgagcccgtgagcaagctgcccgccgagcccgtgagcggcgaccccgcccccggcgacctggacgccggcgaccccgccagcggcgtgctggccagcggctag

SEQ ID NO: 313657 - DNA, 312 bp, Artificial Sequence
  derived and/or modified sequence
atggacagcctggaggagccccagaagaaggtgttcaaggccagaaagaccatgagagtgagcgacagacagcagctggaggccgtgtacaaggtgaaggaggagctgctgaagaccgacgtgaagctgctgaacggcaaccacgagaacggcgacctggaccccaccagccccctggagaacatggactacatcaaggacaaggaggaggtgaacggcatcgaggagatctgcttcgaccccgagggcagcaaggccgagtggaaggagaccccctgcatcctgagcgtgaacgtgaagaacaagcagtag

SEQ ID NO: 313658 - DNA, 270 bp, Artificial Sequence
  derived and/or modified sequence
atggacagcctggaggagccccagaagaaggtgttcaaggccagaaagaccatgagagtgagcgacagacagcagctggaggccgtgtacaaggtgaaggaggagctgctgaagaccgacgtgaagctgctgaacggcaaccacgagaacggcgacctggaccccaccagccccctggagaacatggactacatcaaggacaaggaggaggtgaacggcatcgaggagatctgcttcgaccccgagggcagcaaggccgagtggaagtag

SEQ ID NO: 313659 - DNA, 534 bp, Artificial Sequence
  derived and/or modified sequence
atggacagcctggaggagccccagaagaaggtgttcaaggccagaaagaccatgagagtgagcgacagacagcagctggaggccgtgtacaaggtgaaggaggagctgctgaagaccgacgtgaagctgctgaacggcaaccacgagaacggcgacctggaccccaccagccccctggagaacatggactacatcaaggacaaggaggaggtgaacggcatcgaggagatctgcttcgaccccgagggcagcaaggccgagtggaaggagaccccctgcatcctgagcgtgaacgtgaagaacaagcaggacgacgacctgaactgcgagcccctgagcccccacaacatcacccccgagcccgtgagcaagctgcccgccgagcccgtgagcggcgaccccgcccccggcgacctggacgccggcgaccccgccagcggcgtgctggccagcggcgacagcaccagcggcgaccccaccagcagcgagcccagcagcagcgacgccgccagcggcgacgccaccagcggctag

SEQ ID NO: 313660 - DNA, 510 bp, Artificial Sequence
  derived and/or modified sequence
atggacagcctggaggagccccagaagaaggtgttcaaggccagaaagaccatgagagtgagcgacagacagcagctggaggccgtgtacaaggtgaaggaggagctgctgaagaccgacgtgaagctgctgaacggcaaccacgagaacggcgacctggaccccaccagccccctggagaacatggactacatcaaggacaaggaggaggtgaacggcatcgaggagatctgcttcgaccccgagggcagcaaggccgagtggaaggagaccccctgcatcctgagcgtgaacgtgaagaacaagcaggacgacgacctgaactgcgagcccctgagcccccacaacatcacccccgagcccgtgagcaagctgcccgccgagcccgtgagcggcgaccccgcccccggcgacctggacgccggcgaccccgccagcggcgtgctggccagcggcgacagcaccagcggcgaccccaccagcagcgagcccagcagcagcgacgcctag

SEQ ID NO: 313661 - DNA, 399 bp, Artificial Sequence
  derived and/or modified sequence
atggacagcctggaggagccccagaagaaggtgttcaaggccagaaagaccatgagagtgagcgacagacagcagctggaggccgtgtacaaggtgaaggaggagctgctgaagaccgacgtgaagctgctgaacggcaaccacgagaacggcgacctggaccccaccagccccctggagaacatggactacatcaaggacaaggaggaggtgaacggcatcgaggagatctgcttcgaccccgagggcagcaaggccgagtggaaggagaccccctgcatcctgagcgtgaacgtgaagaacaagcaggacgacgacctgaactgcgagcccctgagcccccacaacatcacccccgagcccgtgagcaagctgcccgccgagcccgtgagcggctag

SEQ ID NO: 313662 - DNA, 531 bp, Artificial Sequence
  derived and/or modified sequence
atggacagcctggaggagccccagaagaaggtgttcaaggccagaaagaccatgagagtgagcgacagacagcagctggaggccgtgtacaaggtgaaggaggagctgctgaagaccgacgtgaagctgctgaacggcaaccacgagaacggcgacctggaccccaccagccccctggagaacatggactacatcaaggacaaggaggaggtgaacggcatcgaggagatctgcttcgaccccgagggcagcaaggccgagtggaaggagaccccctgcatcctgagcgtgaacgtgaagaacaagcaggacgacgacctgaactgcgagcccctgagcccccacaacatcacccccgagcccgtgagcaagctgcccgccgagcccgtgagcggcgaccccgcccccggcgacctggacgccggcgaccccgccagcggcgtgctggccagcggcgacagcaccagcggcgaccccaccagcagcgagcccagcagcagcgacgccgccagcggcgacgccaccagctag

SEQ ID NO: 313663 - DNA, 180 bp, Artificial Sequence
  derived and/or modified sequence
atggacagcctggaggagccccagaagaaggtgttcaaggccagaaagaccatgagagtgagcgacagacagcagctggaggccgtgtacaaggtgaaggaggagctgctgaagaccgacgtgaagctgctgaacggcaaccacgagaacggcgacctggaccccaccagccccctgtag

SEQ ID NO: 313664 - protein, 526 aa, Artificial Sequence
  derived and/or modified sequence
MASDLESSLTSIDWLPQLTLRATIEKLGSASQAGPPGSSRKCSPGSPTDPNATLSKDEAAVHQDGKPRYSYATLITYAINSSPAKKMTLSEIYRWICDNFPYYKNAGIGWKNSIRHNLSLNKCFRKVPRPRDDPGKGSYWTIDTCPDISRKRRHPPDDDLSQDSPEQEASKSPRGGVAGSGEASLPPEGNPQMSLQSPTSIASYSQGTGSVDGGAVAAGASGRESAEGPPPLYNTNHDFKFSYSEINFQDLSWSFRNLYKSMLEKSSSSSQHGFSSLLGDIPPSNNYYMYQQQQPPPPQQQQQQQQPPQPPPQQSQPQQQQAPAQGPSAVGGAPPLHTPSTDGCTPPGGKQAGAEGYGPPPVMAMHPPPLQHGGYHPHQHHPHSHPAQQPPPPQPQAQGQAPINNTGFAFPSDWCSNIDSLKESFKMVNRLNWSSIEQSQFSELMESLRQAEQKNWTLDQHHIANLCDSLNHFLTQTGHVPPQGGTHRPPAPARIADSCALTSGKQESAMSQGTAPSQLPWRWRLC

SEQ ID NO: 313665 - protein, 602 aa, Artificial Sequence
  derived and/or modified sequence
MAAEEEAAAGGKVLREENQCIAPVVSSRVSPGTRPTAMGSFSSHMTEFPRKRKGSDSDPSQVEDGEHQVKMKAFREAHSQTEKRRRDKMNNLIEELSAMIPQCNPMARKLDKLTVLRMAVQHLRSLKGLTNSYVGSNYRPSFLQDNELRHLILKTAEGFLFVVGCERGKILFVSKSVSKILNYDQASLTGQSLFDFLHPKDVAKVKEQLSSFDISPREKLIDAKTGLQVHSNLHAGRTRVYSGSRRSFFCRIKSCKISVKEEHGCLPNSKKKEHRKFYTIHCTGYLRSWPPNIVGMEEERNSKKDNSNFTCLVAIGRLQPYIVPQNSGEINVKPTEFITRFAVNGKFVYVDQRATAILGYLPQELLGTSCYEYFHQDDHNNLTDKHKAVLQSKEKILTDSYKFRAKDGSFVTLKSQWFSFTNPWTKELEYIVSVNTLVLGHSEPGEASFLPCSSQSSEESSRQSCMSVPGMSTGTVLGAGSIGTDIANEILDLQRLQSSSYLDDSSPTGLMKDTHTVNCRSMSNKELFPPSPSEMGELEATRQNQSTVAVHSHEPLLSDGAQLDFDALCDNDDTAMAAFMNYLEAEGGLGDPGDFSDIQWTL

SEQ ID NO: 313666 - DNA, 1809 bp, Artificial Sequence
  derived and/or modified sequence
atggcagccgaggaggaagcagccgctggagggaaagtcctgagggaagaaaatcagtgcatcgcaccagtggttagcagccgcgtgtctcccggcacgaggccaacagcgatgggctctttttccagtcacatgactgagtttcccaggaagcgcaaggggtctgactctgacccaagtcaggtggaggacggggagcaccaggtcaagatgaaagccttcagagaggctcacagccaaactgagaagcgcagaagggacaagatgaataaccttattgaggaactgagtgcaatgatacctcagtgtaatccaatggcgcgaaagctggataagctaaccgtgctgagaatggctgtccagcacctgcgatccctcaagggcctgaccaacagctatgtgggatcaaactatcggccctcttttctgcaggataatgagcttcgccaccttatactgaagaccgctgaaggttttttattcgtggtgggctgcgagcgcggtaaaatcttattcgtttccaagagcgtgtctaaaatcctcaattatgaccaggcctccctgaccggacagtctctctttgacttcctccatcctaaagacgtggccaaggtgaaagagcaactgtcttcttttgatataagtccacgcgagaagctgatcgacgccaagacaggcctgcaggtgcactccaacctccacgcaggacgtacacgcgtatacagtggatcacggaggtcattcttttgtcgaataaagagctgtaaaatatccgtcaaggaggagcacgggtgtctgcccaatagcaaaaaaaaagagcaccgcaaattctataccatccactgtactggctacttgcgctcatggccgcctaacatagtgggcatggaggaagagcgtaatagcaaaaaggataacagtaactttacatgccttgttgcaattggccgtttacagccctacatcgtgcctcagaatagcggtgaaattaacgtcaaaccaacagagttcataacccgcttcgctgtaaacgggaaattcgtttatgttgatcagcgcgccacagccatcctgggatatctcccccaagaactccttggaacatcttgctacgagtatttccaccaggacgaccacaacaatcttacagataaacacaaagctgtgcttcagtcaaaggagaaaattttaaccgatagttacaagtttagagccaaagacggctcgttcgtgaccctcaaatctcagtggtttagctttacgaacccgtggaccaaggagctggagtatatcgtgagcgttaacaccctagtattaggacactctgagcctggtgaggccagctttctcccttgttcatctcagtccagcgaggagtctagcaggcagagttgtatgtcagttccgggcatgagcaccggcaccgtgctaggagccggctctattggcaccgacatcgccaatgagatcctggacttgcagagactgcagagcagctcttatctcgacgatagctcgcccacaggactgatgaaggacacccatacagtcaactgccggtctatgtccaacaaagaattgttcccaccatcccccagcgaaatgggcgaactggaagcaacacgacagaatcagtctacagtggccgtgcatagccatgaacccctgttgagtgacggagctcaattagatttcgatgcattatgtgacaacgacgacaccgcaatggctgcctttatgaattacctggaggccgaggggggcctgggggaccctggcgacttttcagatatccaatggaccctctag

SEQ ID NO: 313667 - DNA, 1809 bp, Artificial Sequence
  derived and/or modified sequence
atggctgctgaggaggaggccgctgctgggggcaaggtgctgcgggaggagaaccagtgcatcgcccctgtggtgagcagccgggtgtccccaggcacccggcccacagccatgggcagcttcagcagccacatgacagagttccccaggaagaggaaaggaagtgacagcgaccccagccaggtggaggatggagagcaccaggtgaagatgaaggccttccgggaggcccacagccagacagagaagagaagaagagacaagatgaacaacctgattgaggagctgagcgccatgatcccccagtgcaaccccatggccaggaagctggacaagctgactgtgctgaggatggctgtgcagcacctgcggagcctgaagggcctgaccaacagctatgtgggcagcaactaccggcccagcttcctgcaggacaatgagctgcggcacctgatcctgaagacagctgagggcttcctgtttgtggtgggctgtgagcggggcaagatcctgtttgtgtccaagtctgtgtccaagatcctgaactatgaccaggccagcctgaccggccagagcctgtttgacttcctgcaccccaaggatgtggccaaggtgaaggagcagctgagcagctttgacatcagcccccgggagaagctgattgatgccaagacaggcctgcaggtgcacagcaacctgcatgctggccgcaccagggtgtacagcggcagcagaagaagcttcttctgccgcatcaagagctgcaagatctctgtgaaggaggagcacggctgcctgcccaacagcaagaagaaggagcacaggaagttctacaccatccactgcaccggctacctgcgctcctggccacccaacatcgtgggcatggaggaggagaggaacagcaagaaggacaacagcaacttcacctgcctggtggccatcggccgcctgcagccctacatcgtgccccagaacagcggggagatcaacgtgaagcccacagagttcatcaccaggtttgctgtgaatggcaagtttgtgtatgtggaccagagggccacagccatcctgggctacctgccccaggagctgctgggcaccagctgctatgagtacttccaccaggatgaccacaacaacctgacagacaagcacaaggctgtgctgcagagcaaggagaagatcctgacagacagctacaagttccgggccaaggatggcagctttgtgaccctgaagagccagtggttctccttcaccaacccctggaccaaggagctggagtacatcgtgtctgtgaacaccctggtgctgggccacagcgagcccggggaggccagcttcctgccctgcagcagccagagcagcgaggagagcagccggcagagctgcatgtctgtgcccggcatgagcactggaacagtgctgggcgccggcagcatcggcacagacatcgccaatgagatcctggacctgcagaggctgcagagcagcagctacctggatgacagcagccccaccggcctgatgaaggacacccacacagtgaactgccgctccatgagcaacaaggagctgtttcctcccagccccagcgagatgggagagctggaggccacccggcagaaccagagcacagtggccgtgcacagccatgagcccctgctgagtgatggagcccagctggactttgatgccctgtgtgacaatgatgacacagccatggccgccttcatgaactacctggaggccgagggcggcctgggggaccccggggacttcagtgacatccagtggaccctgtag

SEQ ID NO: 313668 - DNA, 1809 bp, Artificial Sequence
  derived and/or modified sequence
atggccgccgaggaggaggccgccgccggcggcaaggtgctgcgggaggagaaccagtgcatcgcccccgtcgtgtcctcgcgggtgtcccccgggacacgcccgaccgccatggggagcttttcctctcacatgacagaatttcctcggaagcgaaaggggtccgactcagacccaagccaggtcgaggatggtgaacatcaggtcaagatgaaggcctttagggaagcccattcacagactgaaaaacgtcggcgggataaaatgaacaacctcatagaagaactctccgctatgatccctcagtgcaacccaatggcccgaaagctcgacaaactcactgtcctaaggatggccgttcaacatctgagaagtctcaagggcctcactaattcctatgtaggatcaaattaccgcccatcattcctgcaagataacgagctcagacatctcatcctgaagacagcagaagggtttctgttcgtggttggctgtgaaaggggaaagatcctttttgtgagcaagtcagttagcaaaattcttaactacgaccaggcttccctcacaggccagtccctgttcgactttctgcaccccaaggatgtcgctaaggtgaaggaacagctgtcatcttttgacatttctccaagggagaaactgatcgatgctaaaacagggctgcaggttcactcaaaccttcatgccggcagaacgcgggtatattcaggttctcggcgaagttttttctgcagaatcaagtcatgtaagatctccgtgaaggaggaacatggctgcctacccaactctaagaagaaagagcacagaaagttctacaccattcattgcaccggctatctgcggtcttggcctcccaatatcgtgggaatggaggaggagaggaattcaaagaaggataacagtaatttcacttgtctcgtggctatcgggagactacagccatacatcgttccccagaattctggggaaatcaacgttaagcctacagagtttatcacgcgcttcgccgtcaacggaaagttcgtgtacgtggaccaacgggcaacagccattctgggatacttgccacaagagttacttgggacctcatgctacgaatattttcatcaggacgatcacaacaacttgacagacaaacataaagcagtgctgcagagcaaggagaagattctcacggactcttataagttcagagcaaaagatggttccttcgtaacattgaaatctcagtggtttagtttcactaatccttggacgaaggagctggagtacattgtgtccgtcaacacactggtgttaggtcatagcgagccaggcgaggcttcattcctcccatgcagcagtcagagcagtgaggagtcaagcaggcaatcttgcatgagcgtgcccggaatgtctacaggaaccgttctgggtgcagggtcaattgggaccgacatcgctaacgaaatcttggatctgcagaggctgcagagtagttcttatttggacgattctagccctacgggccttatgaaagacacccacacagtgaattgtaggagtatgtccaacaaggagcttttccctccctctccatcagagatgggtgagttagaggctactcgccagaaccaatccacagtagccgttcacagtcacgagccactgctcagtgatggggcccagctcgactttgatgcactgtgtgacaacgatgacaccgccatggcagcatttatgaattacctggaagccgaggggggcttgggtgatcccggcgatttctcagatatccagtggactctctag

SEQ ID NO: 313669 - DNA, 4804 bp, Artificial Sequence
  derived and/or modified sequence
ctccagtccgcatgctcagtagctgctgccggccgggctgcggggcggcgtcccgtgcgcgcctacgggctgcggtggcggccgccgcggcacccggcagggcccgccagtccccgcttccctgctccagagccgccgcctgggccggggcagggcgggcccggggctcctccatgctgccagccgcggggctgcggagccgaccaagtggctcctgcgatggcggcggaagaggaggctgcggcgggaggtaaagtgttgagagaggagaaccagtgcattgctcctgtggtttccagccgcgtgagtccagggacaagaccaacagctatggggtctttcagctcacacatgacagagtttccacgaaaacgcaaaggaagtgattcagacccatcccaagtggaagatggtgaacaccaagttaaaatgaaggccttcagagaagctcatagccaaactgaaaagcggaggagagataaaatgaataacctgattgaagaactgtctgcaatgatccctcagtgcaaccccatggcgcgtaaactggacaaacttacagttttaagaatggctgttcaacacttgagatctttaaaaggcttgacaaattcttatgtgggaagtaattatagaccatcatttcttcaggataatgagctcagacatttaatccttaagactgcagaaggcttcttatttgtggttggatgtgaaagaggaaaaattctcttcgtttctaagtcagtctccaaaatacttaattatgatcaggctagtttgactggacaaagcttatttgacttcttacatccaaaagatgttgccaaagtaaaggaacaactttcttcttttgatatttcaccaagagaaaagctaatagatgccaaaactggtttgcaagttcacagtaatctccacgctggaaggacacgtgtgtattctggctcaagacgatcttttttctgtcggataaagagttgtaaaatctctgtcaaagaagagcatggatgcttacccaactcaaagaagaaagagcacagaaaattctatactatccattgcactggttacttgagaagctggcctccaaatattgttggaatggaagaagaaaggaacagtaagaaagacaacagtaattttacctgccttgtggccattggaagattacagccatatattgttccacagaacagtggagagattaatgtgaaaccaactgaatttataacccggtttgcagtgaatggaaaatttgtctatgtagatcaaagggcaacagcgattttaggatatctgcctcaggaacttttgggaacttcttgttatgaatattttcatcaagatgaccacaataatttgactgacaagcacaaagcagttctacagagtaaggagaaaatacttacagattcctacaaattcagagcaaaagatggctcttttgtaactttaaaaagccaatggtttagtttcacaaatccttggacaaaagaactggaatatattgtatctgtcaacactttagttttgggacatagtgagcctggagaagcatcatttttaccttgtagctctcaatcatcagaagaatcctctagacagtcctgtatgagtgtacctggaatgtctactggaacagtacttggtgctggtagtattggaacagatattgcaaatgaaattctggatttacagaggttacagtcttcttcataccttgatgattcgagtccaacaggtttaatgaaagatactcatactgtaaactgcaggagtatgtcaaataaggagttgtttccaccaagtccttctgaaatgggggagctagaggctaccaggcaaaaccagagtactgttgctgtccacagccatgagccactcctcagtgatggtgcacagttggatttcgatgccctatgtgacaatgatgacacagccatggctgcatttatgaattacttagaagcagaggggggcctgggagaccctggggacttcagtgacatccagtggaccctctagcctttgatttttaactccaaaaatgagaaacattttaaagcatttcatttacgaaaaactgtctcaactattcttaagtactgtattgatattgtttgtatcttttattaatgttctaccactttttatagatttgcatcttcctgtcacagggatgtggggaaatacgttttcctcccaagagaaccaagtttattatagactcctttattcagtgaaatggcttataatccactagttgccatatttttgctaaaatatttctaaccaagaatactacttacatattgttttggctttgttttatttttgatgcagttttttttagttgaggtaatgtaatatattgatgttttcctttgtgtctaagattcatttataatagtaggtttgtataatttggaacattttccattccttgcgaatttccttaattgaggatagggcttacacactttaagaaaacagtgagtacttgaacatttaaagggacagtgcaatttatagtcataatcacattgaatactgtatttgatctttggagacttaggcaagcacagagctgggatatttatgctcagttgagcactttaagatgaattttaagtgagatgatttcttgcttaaaactcagaaagtcaaaagagtttcagctttccttacagaaaaggaaggatcttgggccctagatcttggggattaacctctgcatataagatttactcttaataggccagacgtggtggctcacgcctgtaatcccagtactttgggaggctgagacgggcagatcacttgaggtcaggagttcaagaccagcctggccaatatggtgaaaccccgtttctactaaaaatacaaaaaaaattacccaggcactcactcttgaggtaactaaccaactcccacgataatgacagtccattcatgagcgcaaaggcctcatgacctaatggcacacacctgtaatcccaactgcttgggaggctgaggcgagaggattgcttgaacctgggaggcagaggttgcagtgagccgagatcgcaccactgcactccagtctgggcaacagagtgagacttcatctcaaaaaaagtaaaaaaaaagatttaatataatcactgaagatctctattatagatagattaggtttttgacattggaaacatacttagggatagatttgtcctaaaggaaaaaagtaggcccgggcagattaaatgtcttgtgtaaagtcacacattaaattcagtcacacattaaattcatagagttttaaatgtttaatgtatataaaccagtttctttatacacatttgggaaaacattggtctcacagattaaatgattaactaactgacccaggaactagttgtagctttctaagtaattaggcaattacagttattgcctgtaaccaaaggtaataaaacaaaatgacaagtacatgtttaaaattatgaggcaatgagaaataatttaaaaaccaattttctagttataatttaaaatttggagagcatttttaacagtaattaatccagaggtggctcaaattgagtataagaattaagattatttaaaatactgcatgtctaccttctcggggatcatactttataacactttctgcttcagtagctcttcatagcttgccaagtatgctcccatattttctctctcgtgcctcgcaaatgaaagtcagataggctgggaactcatggggcagccctcagacttcaatgtgggcttcaaatccagtttcctgttctatatggtgctacatctttccagaaaatttccctcagagcccctcgccaaaacaaagcattattttgaccctgcatgctatttctttagctgtaggtgatagattagaacttctgtcagacatgttaatgacaaacataccaacagacaataaccaaaagcaaatgtttccttcaagtgtgaaatgtgcaggggcttcgtgggcaaggatgtattggcacactgtcctcttgaactgatagtgtcccagcaatgttggagggttggcaccattcctggtccgacacttgaggacctgagagacatcaggtttagaatgagccaaagaaatcctacaagatggggagaattggtgtgcagcagcctaagtgttatagttaagtctaaagaagtatgaaagatcccctgtgttctctaaattgagcagaggggcctgcctaccaatatcactttttaggggactgaaccattgcaggttagacttggcttccaaagagtctgcctaagccaggggtggcagggtaggccatcatagctggatggcctcaaaagcagatgggggcagacttgccctcgtgatgccaggatttgagaggcagagtttctagagggagaccagtgctgcctctcacagtggcagttttttctctttgcaagaggaggggctgttcaattccatagaccagtgggcagatagccagttgaatactctgtgcatggtttgatcctttattagttcgctctaatatttttctgtagatccttttgtcctggactcaaaatctaatccatgcattgtatgataccgtagctctcctaaggtttgtgtttccttcaaaatgttttagttttcttcaactaaatttgatttttgctgttagaagtgacatatttttatggtatacactatgttccttttttctactgcgagtcaattttttgaattttcgtgagaaagaatatatctacaaattgcacgaaagtatcataaaaacagtactctaga

SEQ ID NO: 313670 - DNA, 1809 bp, Artificial Sequence
  derived and/or modified sequence
atggctgccgaagaagaggctgcggcaggtgggaaggttcttcgcgaagaaaaccaatgcatcgcgccagtcgtgtcttctcgcgtcagcccaggaacccgcccaaccgcaatgggatccttttccagccatatgaccgaatttccacggaagcgaaaaggtagcgacagcgacccatcgcaggtggaagacggggagcatcaggtgaaaatgaaagccttccgggaggcacactcacagaccgaaaaacggaggcgcgataaaatgaataatctgatcgaggagctgtcagccatgataccccagtgtaacccgatggccaggaagctggacaaactcacggtcctgcggatggcagtccagcatcttaggtctctgaagggtctaactaattcgtacgtgggcagcaactatcggccttcctttctgcaagacaacgaacttcggcacctgattctgaaaacagccgaggggttcttattcgtggtgggctgcgaacgcggaaagatactgttcgtgagtaagtccgtctccaaaattctgaactatgaccaagcctccttgacagggcagtctttgtttgacttcttgcaccccaaagatgtcgccaaagtgaaggaacagctctcgtcatttgacatatccccgagggagaaactgatcgacgctaagaccgggttgcaggttcacagtaacttgcatgcgggtaggacacgtgtgtacagtggctcccgtagaagcttcttttgccgcataaagtcctgtaagatatcggtgaaagaggaacacggctgtctgcccaactctaagaagaaagagcaccgtaaattctatacaatccattgcacgggatacttaagatcatggcctccaaatattgtgggcatggaggaagagaggaattctaagaaagacaactctaattttacctgcttagttgccatcggcaggttgcagccttatatcgtgccccaaaatagcggcgaaatcaatgtcaaacccaccgagtttattaccaggtttgccgtgaacggcaaattcgtgtatgtggatcagagagcaaccgccattctgggctacctgccccaggagttgctgggtacatcatgctacgagtactttcaccaggacgatcataataatctgactgacaagcacaaagctgtcttacagtcaaaggaaaagattctgactgatagctacaagtttcgagcaaaagacgggtccttcgtgaccttaaagagccaatggttcagctttacaaacccttggaccaaggagctggagtacatcgtgtctgtcaacacattagtattaggccactctgaacctggcgaggcatcatttctgccctgctcatctcaatccagtgaagagtcaagtagacagagctgtatgagcgtaccgggaatgtcaaccgggactgtccttggagccggttcaatcggtacagatattgccaacgaaatcctggacctccagcgactgcaaagcagcagttatcttgatgattccagcccaacgggactgatgaaggacacccatacagttaactgtcgctctatgtctaacaaagagttatttcccccttcccccagcgagatgggcgaactggaagccacacgtcagaaccagagcacagtagctgtccattcccatgagcctcttctctccgacggtgctcagctcgattttgatgctctctgcgacaatgatgatactgctatggctgctttcatgaattatctggaggcagagggcggattaggagaccctggggattttagcgacatacagtggacactgtag

SEQ ID NO: 313671 - DNA, 1809 bp, Artificial Sequence
  derived and/or modified sequence
atggccgccgaggaggaggccgccgccggcggcaaggtgctgagagaggagaaccagtgcatcgcccccgtggtgagcagcagagtgagccccggcaccagacccaccgccatgggcagcttcagcagccacatgaccgagttccccagaaagagaaagggcagcgacagcgaccccagccaggtggaggacggcgagcaccaggtgaagatgaaggccttcagagaggcccacagccagaccgagaagagaagaagagacaagatgaacaacctgatcgaggagctgagcgccatgatcccccagtgcaaccccatggccagaaagctggacaagctgaccgtgctgagaatggccgtgcagcacctgagaagcctgaagggcctgaccaacagctacgtgggcagcaactacagacccagcttcctgcaggacaacgagctgagacacctgatcctgaagaccgccgagggcttcctgttcgtggtgggctgcgagagaggcaagatcctgttcgtgagcaagagcgtgagcaagatcctgaactacgaccaggccagcctgaccggccagagcctgttcgacttcctgcaccccaaggacgtggccaaggtgaaggagcagctgagcagcttcgacatcagccccagagagaagctgatcgacgccaagaccggcctgcaggtgcacagcaacctgcacgccggcagaaccagagtgtacagcggcagcagaagaagcttcttctgcagaatcaagagctgcaagatcagcgtgaaggaggagcacggctgcctgcccaacagcaagaagaaggagcacagaaagttctacaccatccactgcaccggctacctgagaagctggccccccaacatcgtgggcatggaggaggagagaaacagcaagaaggacaacagcaacttcacctgcctggtggccatcggcagactgcagccctacatcgtgccccagaacagcggcgagatcaacgtgaagcccaccgagttcatcaccagattcgccgtgaacggcaagttcgtgtacgtggaccagagagccaccgccatcctgggctacctgccccaggagctgctgggcaccagctgctacgagtacttccaccaggacgaccacaacaacctgaccgacaagcacaaggccgtgctgcagagcaaggagaagatcctgaccgacagctacaagttcagagccaaggacggcagcttcgtgaccctgaagagccagtggttcagcttcaccaacccctggaccaaggagctggagtacatcgtgagcgtgaacaccctggtgctgggccacagcgagcccggcgaggccagcttcctgccctgcagcagccagagcagcgaggagagcagcagacagagctgcatgagcgtgcccggcatgagcaccggcaccgtgctgggcgccggcagcatcggcaccgacatcgccaacgagatcctggacctgcagagactgcagagcagcagctacctggacgacagcagccccaccggcctgatgaaggacacccacaccgtgaactgcagaagcatgagcaacaaggagctgttcccccccagccccagcgagatgggcgagctggaggccaccagacagaaccagagcaccgtggccgtgcacagccacgagcccctgctgagcgacggcgcccagctggacttcgacgccctgtgcgacaacgacgacaccgccatggccgccttcatgaactacctggaggccgagggcggcctgggcgaccccggcgacttcagcgacatccagtggaccctgtag

SEQ ID NO: 313672 - protein, 177 aa, Artificial Sequence
  derived and/or modified sequence
MQRRLVQQWSVAVFLLSYAVPSCGRSVEGLSRRLKRAVSEHQLLHDKGKSIQDLRRRFFLHHLIAEIHTAEIRATSEVSPNSKPSPNTKNHPVRFGSDDEGRYLTQETNKVETYKEQPLKTPGKKKKGKPGKRKEQEKKKRRTRSAWLDSGVTGSGLEGDHLSDTSTTSLELDSRRH

SEQ ID NO: 313673 - DNA, 534 bp, Artificial Sequence
  derived and/or modified sequence
atgcagaggaggctagtgcagcaatggagcgtcgccgtcttcctgctgagctacgctgtcccatcctgcggccggtctgtcgagggcctgagccgccggttgaagcgcgccgtgtcggagcaccagttactgcatgacaaaggcaagtctatccaggaccttagacgacgcttcttcctccatcacttgattgcagagattcacaccgccgaaatcagagctactagcgaggttagtcctaactccaaaccaagcccaaacactaagaaccaccctgtgcgattcggaagtgatgacgaaggtaggtatctcacccaagagacaaataaagtcgaaacttataaggagcagcctctgaagaccccaggcaaaaagaagaagggaaagccaggaaagagaaaagagcaggagaagaagaaaaggagaacgcgcagtgcatggcttgactccggcgtgaccgggtcaggactggaaggtgatcacctgtcagataccagcacgaccagcctcgagctcgatagtagaagacactag

SEQ ID NO: 313674 - DNA, 534 bp, Artificial Sequence
  derived and/or modified sequence
atgcagcgtagactcgtgcaacagtggagtgttgccgtgtttctactgagctatgcggtgccaagctgcggtcggtctgtggaaggcctctctagacgtctgaagagagccgtgtccgaacatcaactgttgcacgataaaggaaagtcaattcaggacctgcggcgccggttcttcctgcatcacctgatcgcagagattcacacagcagaaattcgagcgacttctgaggtctcacccaatagcaaaccttcacccaacacaaaaaatcacccagttaggtttgggtcagatgatgagggacggtatctgacccaagagacaaataaagtcgaaacatacaaggagcagcccctgaagacgcctggaaaaaaaaagaaaggcaaacccggcaagagaaaagagcaagaaaagaagaagaggaggacgcgttccgcctggttagacagcggcgtgacaggctctgggctggagggggatcatctctcagatacatctaccacctcccttgagttagacagcaggagacactag

SEQ ID NO: 313675 - DNA, 534 bp, Artificial Sequence
  derived and/or modified sequence
atgcaacgcagacttgtccaacaatggtccgtagctgtattcctgctcagttatgcagtccctagttgcggacgttcggtggaaggtctgtcccgcagactgaaacgcgctgtgagcgagcaccaattgctacacgacaaaggcaaaagcattcaggacctcaggagacggttctttcttcaccatctgattgcagagatacataccgctgagataagggctacttccgaggtctctcctaacagtaaacccagtcccaacaccaagaaccatccagtcagatttggatctgacgacgagggacgctacctgacacaggagactaataaggtcgagacctacaaagaacaacccctaaaaaccccagggaagaaaaagaaggggaagcctggtaaacgaaaagagcaagaaaagaagaagcggaggacgcggtcagcatggctggactctggggtgacaggctccggcctggagggcgaccacctgtcagacacttctacaacctccctcgaactcgactctaggcgacactag

SEQ ID NO: 313676 - DNA, 534 bp, Artificial Sequence
  derived and/or modified sequence
atgcagaggcggctggtgcagcagtggagcgtggccgtgttcctgctgtcctatgctgtgcccagctgtggccgctctgtggagggcctgagccggcggctgaagagagctgtgtctgagcaccagctgctgcatgacaagggcaagagcatccaggacctgcggcggcgcttcttcctgcaccacctgattgctgagatccacacagctgagatccgggccaccagcgaggtgagccccaacagcaagcccagccccaacaccaagaaccaccctgtgcgctttggaagtgatgatgagggccgctacctgacccaggagaccaacaaggtggagacctacaaggagcagcccctgaagacccctgggaagaagaagaagggcaagccaggcaagaggaaggagcaggagaagaagaagaggaggaccaggtctgcctggctggacagcggcgtgactggaagtggcctggagggggaccacctgagtgacaccagcaccaccagcctggagctggacagcagaagacactag

SEQ ID NO: 313677 - DNA, 534 bp, Artificial Sequence
  derived and/or modified sequence
atgcagcggcggctggtgcagcagtggagcgtggccgtgttcctgttgtcctacgcagtcccgtcttgcggacgctccgtggaaggcctgagtcgccgcttgaaacgggccgtgagcgaacaccagctgctgcacgacaaagggaaatccatccaggatctccgccggcgttttttcttgcaccatttgatcgctgagatccacaccgctgagattcgggcaaccagcgaggtgtcgccgaattcaaaaccctccccaaataccaagaaccacccagtgaggttcggctccgatgacgaaggaagataccttacacaggagacgaacaaagtggagacatacaaagagcaacccttgaaaacacccggaaaaaagaaaaaggggaaacccggaaagcgaaaggaacaggagaaaaagaagcgccggacaagatcagcttggctagattccggagttactggctccgggctggaaggcgaccacttaagtgatacgtctactacaagcctcgagctcgattcccgccgccattag

SEQ ID NO: 313678 - DNA, 534 bp, Artificial Sequence
  derived and/or modified sequence
atgcagcggcggctggtgcagcagtggagcgtggccgtgttcctgttgtcttatgcagtaccaagctgtggccgctccgtggagggcctgtcccggcggttgaagcgtgccgtgtccgaacaccagctactgcacgataaggggaagtcaatacaggacctacgccgcaggttctttctccaccatctcattgccgaaatccatacagccgagatcagggctaccagcgaggtctcccccaattccaagccaagtcccaacaccaaaaaccacccagttcggttcggctctgatgatgaggggcgttacctgactcaagagaccaataaggtggagacttacaaggaacagcccttgaaaactccgggcaagaaaaaaaaaggcaagcctggcaaacgcaaagaacaggaaaaaaaaaaacgccgcacccgtagtgcctggctggacagtggcgtcacaggttctggactggaaggggatcacctctccgacacatcgacaacaagcttagagctggactcgaggagacactag

SEQ ID NO: 313679 - DNA, 534 bp, Artificial Sequence
  derived and/or modified sequence
atgcagcggcggctggtgcagcagtggagcgtggccgtgttcctgttgtcttacgctgtacctagttgcggccgctctgtggaaggcttatccaggagactaaaaagggccgtgtccgaacatcagctgctgcacgacaaggggaagtccatccaggacctgaggaggagattcttcttgcaccaccttatcgctgaaatccacaccgcagagatccgcgctacctcagaggtctcccccaactccaagccgagtccaaatacaaagaatcaccccgtcaggttcggatccgatgacgaggggcggtatctgactcaggagactaataaggtggagacttacaaagaacagccattaaagacacccggaaaaaaaaagaagggaaaaccaggaaaacggaaagaacaggagaaaaagaaacgacgaactcgttcggcctggttggattcaggcgtgactggatctggactagagggagaccacctgagtgacacatctacaacatctctggaactagactctcgacgccactag

SEQ ID NO: 313680 - DNA, 1318 bp, Artificial Sequence
  derived and/or modified sequence
ggaaggattctttttataaatcagaaagtgttcgaggttcaaaggtttgcctcggagcgtgtgaacattcctccgctcggttttcaactcgcctccaacctgcgccgcccggccagcatgtctccccgcccgtgaagcggggctgccgcctccctgccgctccggctgccactaacgacccgccctcgccgccacctggccctcctgatcgacgacacacgcacttgaaacttgttctcagggtgtgtggaatcaactttccggaagcaaccagcccaccagaggaggtcccgagcgcgagcggagacgatgcagcggagactggttcagcagtggagcgtcgcggtgttcctgctgagctacgcggtgccctcctgcgggcgctcggtggagggtctcagccgccgcctcaaaagagctgtgtctgaacatcagctcctccatgacaaggggaagtccatccaagatttacggcgacgattcttccttcaccatctgatcgcagaaatccacacagctgaaatcagagctacctcggaggtgtcccctaactccaagccctctcccaacacaaagaaccaccccgtccgatttgggtctgatgatgagggcagatacctaactcaggaaactaacaaggtggagacgtacaaagagcagccgctcaagacacctgggaagaaaaagaaaggcaagcccgggaaacgcaaggagcaggaaaagaaaaaacggcgaactcgctctgcctggttagactctggagtgactgggagtgggctagaaggggaccacctgtctgacacctccacaacgtcgctggagctcgattcacggaggcattgaaattttcagcagagaccttccaaggacatattgcaggattctgtaatagtgaacatatggaaagtattagaaatatttattgtctgtaaatactgtaaatgcattggaataaaactgtctcccccattgctctatgaaactgcacattggtcattgtgaatattttttttttgccaaggctaatccaattattattatcacatttaccataatttattttgtccattgatgtatttattttgtaaatgtatcttggtgctgctgaatttctatattttttgtaacataatgcactttagatatacatatcaagtatgttgataaatgacacaatgaagtgtctctattttgtggttgattttaatgaatgcctaaatataattatccaaattgattttcctttgtgcatgtaaaaataacagtattttaaatttgtaaagaatgtctaataaaatataatctaattacatcatga

SEQ ID NO: 313681 - DNA, 890 bp, Artificial Sequence
  derived and/or modified sequence
ggagagtccagactgacactcgggtcccattcccttctgttgcaggtcccgagcgcgagcggagacgatgcagcggagactggttcagcagtggagcgtcgcggtgttcctgctgagctacgcggtgccctcctgcgggcgctcggtggagggtctcagccgccgcctcaaaagagctgtgtctgaacatcagctcctccatgacaaggggaagtccatccaagatttacggcgacgattcttccttcaccatctgatcgcagaaatccacacagctgaaatcagagctacctcggaggtgtcccctaactccaagccctctcccaacacaaagaaccaccccgtccgatttgggtctgatgatgagggcagatacctaactcaggaaactaacaaggtggagacgtacaaagagcagccgctcaagacacctgggaagaaaaagaaaggcaagcccgggaaacgcaaggagcaggaaaagaaaaaacggcgaactcgctctgcctggttagactctggagtgactgggagtgggctagaaggggaccacctgtctgacacctccacaacgtcgctggagctcgattcacggaggcattgaaattttcagcagagaccttccaaggacatattgcaggattctgtaatagtgaacatatggaaagtattagaaatatttattgtctgtaaatactgtaaatgcattggaataaaactgtctcccccattgctctatgaaactgcacattggtcattgtgaatattttttttttgccaaggctaatccaattattattatcacatttaccataatttattttgtccattgatgtatttattttgtaaatgtatcttggtgctgctgaatttctatattttttgtaacataa

SEQ ID NO: 313682 - DNA, 1214 bp, Artificial Sequence
  derived and/or modified sequence
ctgctttctaataattgcctttagtgggaacagaagtctcctttcaagaagcttttaattcattttaagatttaattttatgttttctgaagaacaacaaaaaatatttctggaaaagactgctgagaagatttccctctttcagccagaagagcagagagaagattgtaaatcaaggaaaagatttcccccttcagatctaacgattacattagggctcctgcatctttttggaaggattctttttataaatcagaaagtgttcgaggttcaaaggtttgcctcggagcgtgtgaacattcctccgctcggttttcaactcgcctccaacctgcgccgcccggccagcatgtctccccgcccgtgaagcggggctgccgcctccctgccgctccggctgccactaacgacccgccctcgccgccacctggccctcctgatcgacgacacacgcacttgaaacttgttctcagggtgtgtggaatcaactttccggaagcaaccagcccaccagaggaggtcccgagcgcgagcggagacgatgcagcggagactggttcagcagtggagcgtcgcggtgttcctgctgagctacgcggtgccctcctgcgggcgctcggtggagggtctcagccgccgcctcaaaagagctgtgtctgaacatcagctcctccatgacaaggggaagtccatccaagatttacggcgacgattcttccttcaccatctgatcgcagaaatccacacagctgaaatcagagctacctcggaggtgtcccctaactccaagccctctcccaacacaaagaaccaccccgtccgatttgggtctgatgatgagggcagatacctaactcaggaaactaacaaggtggagacgtacaaagagcagccgctcaagacacctgggaagaaaaagaaaggcaagcccgggaaacgcaaggagcaggaaaagaaaaaacggcgaactcgctctgcctggttagactctggagtgactgggagtgggctagaaggggaccacctgtctgacacctccacaacgtcgctggagctcgattcacggaggcattgaaattttcagcagagaccttccaaggacatattgcaggattctgtaatagtgaacatatggaaagtattagaaatatttattgtctgtaaatactgtaaatgcattggaataaaactgtctcccccattgctctatgaaa

SEQ ID NO: 313683 - DNA, 534 bp, Artificial Sequence
  derived and/or modified sequence
atgcaacggaggctggttcagcagtggtccgttgccgtttttttactgtcatacgcagtgcctagctgtgggaggagtgttgaaggattgtccaggcgattgaagcgtgcagtgtcagaacaccagctgctccacgacaagggcaaatcaatccaagacttgcgcagacgcttctttcttcaccacctcattgcagaaattcacacagcagagatcagggccaccagcgaggtgagtccaaatagcaagccaagtcccaatacaaaaaaccaccccgtacgctttggatctgacgacgagggtaggtaccttacacaggaaacaaataaggtcgaaacctacaaagagcagccactcaagactcctggaaagaagaagaaagggaaacccggaaaacggaaggagcaggagaaaaagaagagacggacacgcagtgcctggctcgatagtggcgttacgggatccggtctggagggcgaccacctatccgacaccagcaccacatccctggaactggactcccggcgacattag

SEQ ID NO: 313684 - DNA, 534 bp, Artificial Sequence
  derived and/or modified sequence
atgcaaaggcgactggtgcagcaatggagcgtagcagtgttcctcttgtcttatgctgtcccaagctgtggaagaagtgtggaaggactgtcccgccgactgaagcgcgcagtgtcagagcatcagctgcttcatgataagggcaagagcatccaggatctccggagacgctttttccttcaccaccttatcgccgagatccacacagccgaaattcgggcaacatctgaggtttctcccaactccaaaccttccccaaatactaagaatcatcccgtccggtttggcagcgacgatgagggacgatatctcacccaggagacaaataaggtggagacatacaaggagcagccccttaaaaccccaggtaaaaagaaaaaaggaaagccagggaaacgaaaagaacaagaaaagaagaagagacgtaccaggagtgcatggttggattctggtgtcacaggatctggccttgagggtgaccacctttccgacactagtacgacaagtcttgagctcgattccagacgacactag

SEQ ID NO: 313685 - DNA, 534 bp, Artificial Sequence
  derived and/or modified sequence
atgcagagacgtctggttcaacagtggtctgtcgctgtcttcctgctaagctacgctgttccttcgtgtggtcgaagtgttgagggactgtctcgaagactgaaacgtgccgtatcagaacaccagctgctgcacgataagggcaagagcatccaggatcttagaaggaggttcttcctgcatcacctcatcgcagagatccatactgctgagattcgcgcaacatcagaggtctcccccaattctaaacccagccctaacacaaagaaccaccctgtgcgttttggctcagatgacgagggaagatacctgacccaggaaactaataaggtggagacctataaggaacagcccctgaaaacgccaggcaaaaaaaaaaaagggaagccgggaaaaagaaaggagcaggagaaaaaaaaacgcaggaccagatctgcttggctggatagcggagtcacaggctccggtcttgagggggaccatctgagcgacacttctactacaagtctggaattggactcacgcagacactag

SEQ ID NO: 313686 - DNA, 534 bp, Artificial Sequence
  derived and/or modified sequence
atgcagagaagactggtgcagcagtggagcgtggccgtgttcctgctgagctacgccgtgcccagctgcggcagaagcgtggagggcctgagcagaagactgaagagagccgtgagcgagcaccagctgctgcacgacaagggcaagagcatccaggacctgagaagaagattcttcctgcaccacctgatcgccgagatccacaccgccgagatcagagccaccagcgaggtgagccccaacagcaagcccagccccaacaccaagaaccaccccgtgagattcggcagcgacgacgagggcagatacctgacccaggagaccaacaaggtggagacctacaaggagcagcccctgaagacccccggcaagaagaagaagggcaagcccggcaagagaaaggagcaggagaagaagaagagaagaaccagaagcgcctggctggacagcggcgtgaccggcagcggcctggagggcgaccacctgagcgacaccagcaccaccagcctggagctggacagcagaagacactag

SEQ ID NO: 313687 - protein, 405 aa, Artificial Sequence
  derived and/or modified sequence
MVTEMNPNVVVISVLAILSTLLIGLLLVTLIILRKKHLQMARECGAGTFVNFASLERDGKLPYNWRRSIFAFLTLLPSCLWTDYLLAFYINPWSKNGLKKRKLTNPVQLDDFDAYIKDMAKDSDYKFSLQFEELKLIGLDIPHFAADLPLNRCKNRYTNILPYDFSRVRLVSMNEEEGADYINANYIPGYNSPQEYIATQGPLPETRNDFWKMVLQQKSQIIVMLTQCNEKRRVKCDHYWPFTEEPIAYGDITVEMISEEEQDDWACRHFRINYADEMQDVMHFNYTAWPDHGVPTANAAESILQFVHMVRQQATKSKGPMIIHCSAGVGRTGTFIALDRLLQHIRDHEFVDILGLVSEMRSYRMSMVQTEEQYIFIHQCVQLMWMKKKQQFCISDVIYENVSKS

SEQ ID NO: 313688 - protein, 654 aa, Artificial Sequence
  derived and/or modified sequence
MAMRELVEAECGGANPLMKLAGHFTQDKALRQEGLRPGPWPPGAPASEAVSVLEVESPGAASEAASKPLGVASEDELVAEFLQDQNAPLVSRAPQTFKMDDLLAEMQQIEQSNFRQAPQRAPGVADLALSENWAQEFLAAGDAVDVTQDYNETDWSQEFISEVTDPLSVSPARWAEEYLEQSEEKLWLGEPEGTATDRWYDEYHPEEDLQHTASDFVAKVDDPKLANSEFLKFVRQIGEGQVSLESGAGSGRAQAEQWAAEFIQQQGTSDAWVDQFTRPVNTSALDMEFERAKSAIESDVDFWDKLQAELEEMAKRDAEAHPWLSDYDDLTSATYDKGYQFEEENPLRDHPQPFEEGLRRLQEGDLPNAVLLFEAAVQQDPKHMEAWQYLGTTQAENEQELLAISALRRCLELKPDNQTALMALAVSFTNESLQRQACETLRDWLRYTPAYAHLVTPAEEGAGGAGLGPSKRILGSLLSDSLFLEVKELFLAAVRLDPTSIDPDVQCGLGVLFNLSGEYDKAVDCFTAALSVRPNDYLLWNKLGATLANGNQSEEAVAAYRRALELQPGYIRSRYNLGISCINLGAHREAVEHFLEALNMQRKSRGPRGEGGAMSENIWSTLRLALSMLGQSDAYGAADARDLSTLLTMFGLPQ

SEQ ID NO: 313689 - DNA, 2253 bp, Artificial Sequence
  derived and/or modified sequence
tcttctcccctcccccaagccagcacctggtgccccggcgggtcgtgcggcgcggcgctccgcgagagctggcggtcaccatggcaatgcgggagctggtggaggccgaatgcgggggtgccaacccgctcatgaagctcgccgggcacttcacccaggacaaggcccttcggcaggagggattgaggcctggcccctggccccccggagccccggcctctgaggcagtgagtgttcttgaggtggaaagcccaggtgcagcctctgaggcagcctccaagcctttgggagtagcttctgaagatgagttggtggctgaattcctgcaggaccagaatgcaccccttgtgtcccgtgcccctcagaccttcaagatggatgacctcctggctgagatgcagcagattgagcagtcaaacttccgccaggctccccagagagcccctggtgtggcagacttggccttgtctgagaactgggcccaggagtttcttgcagctggagatgctgtggatgtaactcaggattataatgagactgactggtcccaagaattcatctctgaagttacagaccccttgtctgtgtcccctgcccgctgggctgaggaatatttggagcaatcagaggagaagctgtggctgggagaacctgagggaacagccaccgatcgctggtatgatgaatatcatcctgaggaggatctgcagcacacggccagtgactttgtggccaaagtggatgaccccaaattggctaattctgagttcctgaaattcgtgcggcagattggcgaagggcaggtgtccctggagtccggtgcagggtcgggccgagctcaggcagaacagtgggcagcagagtttatacagcagcagggtacatcagatgcctgggttgaccagttcacaagaccagtaaacacatctgcccttgatatggagtttgaacgagccaagtcagctatagagtctgatgtcgatttctgggacaagttgcaggcagagttggaggagatggcaaaacgggatgctgaggcccacccctggctttctgactatgatgaccttacgtcagctacctatgataaggggtaccagtttgaggaggagaaccccttgcgtgatcaccctcagccttttgaagaagggctgcggcgccttcaggagggggacctgccaaatgctgtgctgctttttgaggcagctgtgcagcaggatcctaagcacatggaagcttggcagtatctgggtaccacccaggcagagaatgaacaagaactattagccatcagtgcattgcggaggtgtctggagctaaagccagataaccagacagcactgatggcgctggctgtgagcttcaccaacgagtccctgcagcgacaggcctgtgaaaccctacgagactggctgcggtacacaccagcctatgcccatctggtgacacctgctgaagaaggggctggtggggcaggactgggccccagcaagcgtatcctgggatctctcttgtctgactccctgtttcttgaagtgaaagagctcttcctggcagctgtgcggctggaccctacctccattgaccctgatgtgcagtgtggcttgggagtccttttcaacctgagtggggagtatgacaaggccgtggactgcttcacagctgccctcagcgttcgtcccaatgactatttgctgtggaataagctaggcgccaccctggccaatggaaaccagagtgaagaagcagtagctgcgtaccgccgggccctcgagctccagcctggctatatccggtcccgctataacctgggcatcagctgcatcaacctcggggctcaccgggaggctgtggagcactttctggaggccctgaacatgcagaggaaaagccggggcccccggggtgaaggaggtgccatgtcggagaacatctggagcaccctgcgtttggcattgtctatgttaggccagagcgatgcctatggggcagccgacgcgcgggatctgtccaccctcctaactatgtttggcctgccccagtgacagtgggacgggctgccctgtgagtgtccacctggagggatccccgctttggatgtgattccctctccccaaatgggcctaccaagggggcgggctgatgaccataagcggtacggcctttcaggagctgcctcaacgtaggggtgggtagtctgtgttctagttcctacataattgtaggaaaatgagctgtgtcatctctgagtcc

SEQ ID NO: 313690 - DNA, 1965 bp, Artificial Sequence
  derived and/or modified sequence
atggcaatgagggagctggtggaggctgagtgcggaggtgcgaatccgttaatgaaactggcaggccacttcacacaagataaggctctgcgccaggaaggcctgcgccctggcccatggccgcccggcgccccggcgtccgaggccgtgagcgtgctagaagtcgaatcacctggagcggccagcgaggcagcaagcaagcccctgggagtcgcgtccgaagacgaattagtggctgagttcctgcaggaccagaacgctcccttggtgtcccgcgcaccacaaacgttcaagatggacgacttactggccgaaatgcagcagattgagcagtctaattttaggcaagctccacagagggcccccggagtagccgatctggccctatccgagaactgggcgcaggaatttcttgcagcaggggacgcggtcgacgttacccaagattataacgaaacagattggtctcaggagtttatttccgaggtcacagatccattgtccgtctcacccgctcggtgggcagaggagtatctcgaacaaagtgaggagaaactgtggcttggcgagcccgaaggtacggcaacagacaggtggtatgatgagtaccatcccgaggaagatttacagcacactgcttctgacttcgtggcaaaggttgatgatccaaaactggccaacagcgagtttctgaaatttgttagacagattggcgaagggcaagtgtcactggagtccggagcaggatcgggccgtgcccaggctgaacagtgggcggctgaatttatacagcaacaggggaccagtgatgcgtgggtagaccagttcacaaggcctgttaatacttcggccttggacatggagttcgagcgtgctaagtccgctatagaatctgacgtcgacttttgggacaagttacaggctgagctggaggagatggctaagagagacgcggaggcgcatccttggctgagcgactatgatgatttgacatccgctacctacgataaaggatatcagttcgaagaagagaatcctctgcgggaccatcctcagcctttcgaggagggtctgagacgcctacaggaaggagatttgcctaatgctgtcttgcttttcgaagctgccgtccagcaggatcctaaacacatggaggcctggcagtacttgggtaccacgcaggccgaaaatgaacaggaactgctcgctatatctgccctgcgaaggtgtctggagctcaaacccgataatcagacagccctgatggcccttgccgtgagctttacgaacgagagcctccagagacaggcatgcgagaccctgcgtgattggttgagatacactcctgcctatgcccacctggttacgccagccgaagaaggtgctgggggggccggcctgggccctagtaaaaggattctaggatcactgctctccgattctttatttttagaagttaaagagctgtttttagcagccgtgaggctggatccaacctccattgatccagacgttcaatgcggccttggagtgttattcaatctcagcggtgagtacgataaggcggtcgattgcttcaccgcagcactgagcgtgaggcccaatgattaccttttgtggaacaagctcggtgctactcttgccaacggcaaccagtcggaggaggctgtggccgcctaccgcagggctctggagctccagccgggctatatacgttctaggtacaatttagggatcagctgcattaaccttggtgcccatcgcgaggccgtggaacactttctggaggctctgaacatgcagcggaaatcaagaggccctaggggggaggggggcgccatgtcagaaaacatctggtcaaccttaagactggccttatccatgctgggccagtctgacgcctatggcgcagccgacgcgagagacttatctactctgttgaccatgttcgggctgccccagtag

SEQ ID NO: 313691 - DNA, 1965 bp, Artificial Sequence
  derived and/or modified sequence
atggccatgagggagctggtggaggccgagtgtggcggggccaaccccctgatgaagctggccggccacttcacccaggacaaggccctgcggcaggagggcctgcggcccggcccctggcccccaggggccccagccagcgaggccgtgtctgtgctggaggtggagagccctggggccgccagcgaggccgccagcaagcccctgggcgtggcctctgaagatgagctggtggccgagttcctgcaggaccagaatgcccccctggtgtcccgggccccccagaccttcaagatggatgacctgctggccgagatgcagcagatcgagcagagcaacttccggcaggccccccagagggcccctggggtggccgacctggccctgtctgagaactgggcccaggagttcctggccgctggagatgctgtggatgtgacccaggactacaatgaaacagactggagccaggagttcatcagcgaggtgacagaccccctgtctgtgtccccagcccgctgggccgaggagtacctggagcagagcgaggagaagctgtggctgggggagcctgagggcacagccacagaccgctggtatgatgagtaccaccctgaggaggacctgcagcacacagccagtgactttgtggccaaggtggatgaccccaagctggccaacagcgagttcctgaagtttgtgcggcagattggagagggccaggtgtccctggagagcggggccggcagcggccgggcccaggccgagcagtgggccgctgagttcatccagcagcagggcaccagtgatgcctgggtggaccagttcaccaggcctgtgaacaccagcgccctggacatggagtttgagcgggccaagagcgccatcgagagtgatgtggacttctgggacaagctgcaggccgagctggaggagatggccaagagagatgctgaggcccacccctggctgagtgactatgatgacctgaccagcgccacctatgacaagggctaccagtttgaggaggagaaccccctgcgggaccacccccagccctttgaggagggcctgcggcggctgcaggagggggacctgcccaatgctgtgctgctgtttgaagctgctgtgcagcaggaccccaagcacatggaggcctggcagtacctgggcaccacccaggccgagaatgagcaggagctgctggccatcagcgccctgcggcgctgcctggagctgaagccagacaaccagacagccctgatggccctggccgtgtccttcaccaatgaaagcctgcagaggcaggcctgtgagaccctgcgggactggctgcgctacaccccagcctatgcccacctggtgaccccagctgaggagggcgctgggggcgccggcctgggccccagcaagaggatcctgggcagcctgctgagtgacagcctcttcctggaggtgaaggagctgttcctggccgctgtgcggctggaccccaccagcattgatcctgatgtgcagtgtggcctgggcgtgctcttcaacctgagcggggagtatgacaaggctgtggactgcttcaccgctgccctgtctgtgcggcccaatgactacctgctgtggaacaagctgggcgccaccctggccaatggaaaccagagcgaggaggccgtggccgcctacagaagagccctggagctgcagcccggctacatccgcagccgctacaacctgggcatcagctgcatcaacctgggcgcccaccgggaggccgtggagcacttcctggaggccctgaacatgcagaggaagagccggggccccagaggagagggcggggccatgtctgagaacatctggagcaccctgcggctggccctgtccatgctgggccagagtgatgcctatggagctgctgatgcccgggacctgagcaccctgctgaccatgtttggcctgccccagtag

SEQ ID NO: 313692 - DNA, 1965 bp, Artificial Sequence
  derived and/or modified sequence
atggccatgcgggagctggtggaggccgagtgcggcggcgccaacccactgatgaaactggctgggcatttcacacaagacaaagccctgaggcaagaaggccttaggcccggcccttggcctcccggtgcccctgctagcgaagccgtaagcgtcctggaggttgaatcgccaggcgcggcgagtgaagccgcatccaaaccgctcggggtcgcctctgaagacgaactggttgctgagttcctccaagaccaaaacgccccactcgtgtctagggccccacaaacattcaagatggacgacttgctggctgaaatgcagcagattgaacaatccaattttcgccaagctccgcagagagctcctggagtggccgatctggccctaagcgagaactgggcccaggagtttctggcagccggggatgcggtggacgtgacccaggactataatgaaactgattggagccaggaattcatcagtgaagtaactgaccccctttctgtgtcccccgcacggtgggccgaagagtacctcgagcagtccgaagaaaaattatggctcggtgaacctgaaggaaccgctaccgatagatggtatgacgaataccatcccgaggaagacctccagcatactgcgtcggattttgtggctaaggttgatgatcccaaacttgccaactccgagtttttgaaattcgttaggcagatcggtgaaggccaggtgtctctggagtcaggggccgggagcggacgcgctcaggcggaacagtgggctgccgaattcatccaacaacaggggacttctgacgcatgggttgatcaatttactaggcctgtgaatacctctgcactggacatggagttcgagcgcgcgaagtctgctatcgaaagcgacgtggacttctgggacaagttgcaggccgaactggaggagatggcaaagagggatgccgaggcacacccatggctgagcgactacgatgatctgacgagtgcgacttatgacaaagggtatcaatttgaggaagaaaacccgctgcgggaccatcctcagcccttcgaggaggggctccgccgtctacaggaaggtgatctccccaacgcggtcctcttgttcgaggcagctgtccaacaggatcccaagcacatggaggcgtggcaatatttgggcacaacgcaggccgagaacgagcaggagcttctggcaatcagcgctctgagacgctgtttagagttgaagcccgataaccagacggccctgatggctttagcggtaagtttcactaatgaaagccttcagaggcaagcatgcgagacactgcgagattggctcagatatactcctgcctatgcacacttagtaacacctgctgaggaaggggctgggggcgcaggcttgggaccttccaaaagaatcctgggaagcttactctcagactctctgtttttggaagttaaggagctcttccttgctgccgtaagattggaccccacatcaatcgacccagacgttcaatgtgggctgggcgtgctctttaatctgtctggagagtatgataaagctgttgattgcttcactgctgctttgtctgtgaggccaaatgattatcttctgtggaataagcttggagcaacactggcaaatgggaaccagagtgaggaagcagtagccgcctacaggagagccctggaactgcaacccggctacatcaggagccggtataacctcgggatctcatgtatcaatctgggtgctcatagggaagccgtcgaacacttcctcgaagctctgaacatgcagcgaaagtcaaggggccccaggggcgagggaggggctatgtctgagaatatttggtccactctccgactggcgctgagcatgctcggtcagagcgatgcctatggcgccgccgacgcgcgcgacctctccactctgttaacgatgtttggactgccacaatag

SEQ ID NO: 313693 - DNA, 1965 bp, Artificial Sequence
  derived and/or modified sequence
atggcgatgagggaactcgtggaagctgagtgcgggggagccaacccactcatgaagctcgctggccacttcacacaagataaagccctgcgacaggaggggctgcgcccaggtccctggcctccaggagcacctgcatctgaagcagtgagtgtgcttgaagtcgagagccccggagctgctagcgaggccgcaagtaaacccttaggcgtggcctcagaagacgagctggtggccgaattcctgcaggatcaaaatgcacccctcgtaagccgggcaccgcagactttcaagatggacgatctccttgcggaaatgcagcagatagagcagtcgaatttcaggcaggcaccacagagagcccctggggtcgccgatctggccctgtcagagaactgggctcaggagtttctggcggcaggtgacgcggttgacgttactcaagactataacgaaaccgattggagccaggagttcatcagcgaggtaactgatccactctcagtgtcacccgctcgatgggccgaggagtatctggagcaaagtgaggaaaaactttggctgggtgaaccagagggtaccgcgaccgataggtggtatgacgagtaccacccagaggaggacttacagcatactgcgagcgattttgttgccaaggtggacgaccccaagctggccaattccgaattcctgaagttcgtgcgccagatcggggagggccaagttagcctcgagagtggagccggaagtggacgtgctcaagccgagcaatgggctgccgaattcatccagcagcagggcacttcggacgcttgggtcgatcaattcaccaggccagtgaatacctccgctctagacatggaatttgagcgggcaaagagcgccattgaatcagatgtggacttttgggacaagctgcaagcagaattggaggagatggcgaaaagggacgcagaggcccatccctggcttagcgattacgatgacctgacctctgctacctacgacaagggctaccagttcgaagaagagaaccccttgagggaccaccctcaacccttcgaggaagggctgagaaggctccaggaaggtgatctgccaaatgctgttctcctgtttgaggccgcagtgcagcaggatcctaagcatatggaggcgtggcagtacctaggaaccacccaggccgaaaacgaacaggagttgctcgccataagcgctttgcggagatgtttggagctcaaacctgataaccagacagcacttatggcgctggctgtctcgtttaccaacgagtctctacaacgacaagcttgtgagaccctgcgtgactggctcaggtatacgcctgcctatgcccacttagtgacacccgcagaggagggagcagggggtgccggacttggcccttccaagcgcatcctaggatccttgctctccgatagcctgtttctggaggttaaggagctgtttcttgccgctgtcaggttagaccccacaagcatcgatccagacgttcagtgtggactgggcgtgttgtttaatttgtctggggagtatgataaggccgtagactgcttcaccgccgctttatccgttagaccgaacgactatctgctttggaataagctaggtgcgaccctggctaatgggaatcagtccgaggaagccgttgccgcatacaggcgcgcactggagctccagcccggatacatcagaagcaggtacaacctagggatttcttgtattaatctaggcgcacacagggaggctgtggagcattttctggaggccttaaacatgcagaggaagagtagggggcctagaggagagggcggtgccatgtctgagaatatctggtcgacccttagacttgcactgtctatgctcggtcagtccgacgcttacggggctgccgacgctagggacctgtccactctgcttaccatgtttggcctgccccagtag

SEQ ID NO: 313694 - DNA, 1965 bp, Artificial Sequence
  derived and/or modified sequence
atggccatgagagagctggtggaggccgagtgcggcggcgccaaccccctgatgaagctggccggccacttcacccaggacaaggccctgagacaggagggcctgagacccggcccctggccccccggcgcccccgccagcgaggccgtgagcgtgctggaggtggagagccccggcgccgccagcgaggccgccagcaagcccctgggcgtggccagcgaggacgagctggtggccgagttcctgcaggaccagaacgcccccctggtgagcagagccccccagaccttcaagatggacgacctgctggccgagatgcagcagatcgagcagagcaacttcagacaggccccccagagagcccccggcgtggccgacctggccctgagcgagaactgggcccaggagttcctggccgccggcgacgccgtggacgtgacccaggactacaacgagaccgactggagccaggagttcatcagcgaggtgaccgaccccctgagcgtgagccccgccagatgggccgaggagtacctggagcagagcgaggagaagctgtggctgggcgagcccgagggcaccgccaccgacagatggtacgacgagtaccaccccgaggaggacctgcagcacaccgccagcgacttcgtggccaaggtggacgaccccaagctggccaacagcgagttcctgaagttcgtgagacagatcggcgagggccaggtgagcctggagagcggcgccggcagcggcagagcccaggccgagcagtgggccgccgagttcatccagcagcagggcaccagcgacgcctgggtggaccagttcaccagacccgtgaacaccagcgccctggacatggagttcgagagagccaagagcgccatcgagagcgacgtggacttctgggacaagctgcaggccgagctggaggagatggccaagagagacgccgaggcccacccctggctgagcgactacgacgacctgaccagcgccacctacgacaagggctaccagttcgaggaggagaaccccctgagagaccacccccagcccttcgaggagggcctgagaagactgcaggagggcgacctgcccaacgccgtgctgctgttcgaggccgccgtgcagcaggaccccaagcacatggaggcctggcagtacctgggcaccacccaggccgagaacgagcaggagctgctggccatcagcgccctgagaagatgcctggagctgaagcccgacaaccagaccgccctgatggccctggccgtgagcttcaccaacgagagcctgcagagacaggcctgcgagaccctgagagactggctgagatacacccccgcctacgcccacctggtgacccccgccgaggagggcgccggcggcgccggcctgggccccagcaagagaatcctgggcagcctgctgagcgacagcctgttcctggaggtgaaggagctgttcctggccgccgtgagactggaccccaccagcatcgaccccgacgtgcagtgcggcctgggcgtgctgttcaacctgagcggcgagtacgacaaggccgtggactgcttcaccgccgccctgagcgtgagacccaacgactacctgctgtggaacaagctgggcgccaccctggccaacggcaaccagagcgaggaggccgtggccgcctacagaagagccctggagctgcagcccggctacatcagaagcagatacaacctgggcatcagctgcatcaacctgggcgcccacagagaggccgtggagcacttcctggaggccctgaacatgcagagaaagagcagaggccccagaggcgagggcggcgccatgagcgagaacatctggagcaccctgagactggccctgagcatgctgggccagagcgacgcctacggcgccgccgacgccagagacctgagcaccctgctgaccatgttcggcctgccccagtag

SEQ ID NO: 313695 - protein, 102 aa, Artificial Sequence
  derived and/or modified sequence
MAMRELVEAECGGANPLMKLAGHFTQDKALRQEGLRPGPWPPGAPASEAASKPLGVASEDELVAEFLQDQNAPLVSRAPQTFKMDDLLAEMQQIEQSNFRQA

SEQ ID NO: 313696 - DNA, 1920 bp, Artificial Sequence
  derived and/or modified sequence
atggctatgagagaactggtggaagccgaatgcggtggcgctaatcccctcatgaagctggccgggcatttcacacaggacaaggccctgcggcaagagggcttgcgccctggaccctggcctccaggagcgccggcctctgaggctgcgtccaagccactgggggtggcgtctgaggacgagttggttgccgaatttctgcaggatcagaatgctcctctggtaagcagagcacctcaaaccttcaaaatggatgatctgctcgccgagatgcaacagatagaacagtccaattttcgccaagccccacagcgcgccccaggggtggcagacttggctctgagcgaaaattgggcacaggagttcttggcagctggggacgctgttgatgtgacacaagactacaacgaaacagattggagtcaggagttcattagcgaggtaaccgacccgctatccgtgtccccagccaggtgggctgaggaatacttagagcagagcgaggaaaagctttggctgggtgaacccgagggcacggccaccgatcgttggtatgacgaataccatcccgaagaggacctgcaacatacagcctccgacttcgtagcaaaggtcgacgaccctaagctggctaacagtgaattcctgaagttcgtgcggcaaatcggagaaggacaagttagcttggaatccggcgccggaagcgggcgggcccaagcagagcagtgggcggccgagtttatccagcagcagggaacttcggatgcatgggtggaccagttcacgagacccgttaacacttccgcgttggatatggaatttgagagagccaagtcagccatcgagtccgacgtggatttttgggataaactacaagccgagctcgaggaaatggcaaagcgggacgcagaggcccacccatggcttagtgattacgatgatctgacatctgcaacttacgataagggctatcagtttgaggaagagaacccccttcgggatcatcctcagccctttgaggagggcctgcggagactacaagagggagacttgcctaacgcggtcctcctcttcgaagctgccgtgcagcaggaccccaagcatatggaagcctggcagtacttgggaaccacccaagctgagaatgagcaggagctgctggccatctctgcactgagacggtgcctggagctcaaacccgataaccagaccgccctgatggcccttgctgtgagttttacaaatgagagccttcagcgccaagcgtgtgagaccctacgggattggctcagatatacaccagcctatgctcatctcgtgacaccagccgaggagggtgccggcggcgccggcttgggcccatctaagcggatcctgggctcactcctaagcgattccctctttttggaggtgaaggaactctttctggccgcagtgaggcttgatcccacctccatcgaccctgacgtccagtgcgggctgggcgtcttgtttaacttatctggcgaatatgataaggctgtcgactgctttacagctgcgctttctgttcggcccaatgattacttattgtggaacaaattgggtgcgaccctggccaacggcaaccagagtgaagaggccgtagccgcctaccgacgcgctctggaacttcagccgggttacattcgaagtcggtacaatctcgggatttcctgtattaatttgggggcccatagggaagccgtggaacacttcctggaagccttgaatatgcaacgcaaatcccgcggcccgcgtggtgaaggaggtgctatgagcgaaaacatctggagcaccctgcgtctcgcattgtccatgctggggcagtccgatgcctatggggcagccgacgcccgggatctgagtaccttactcacgatgtttggattgcctcaatag

SEQ ID NO: 313697 - DNA, 1920 bp, Artificial Sequence
  derived and/or modified sequence
atggctatgcgggaactagtggaggcggagtgcggaggtgctaatccattaatgaagctcgccgggcatttcacccaagataaggccctccgtcaggagggcctgagaccaggcccgtggcctcctggggctccagctagtgaggcagcatctaaaccgctgggcgtcgcgtccgaggatgagctagtcgcggagtttttgcaagatcaaaacgcgcctttagtgagtagggcgccccagaccttcaaaatggacgacctccttgctgaaatgcagcagatcgaacagtctaacttcagacaggcgccacagcgggcccctggggtagccgatctagctctgtcagaaaattgggcacaggaattcctcgccgcaggcgatgcagtggacgtcacccaggactataacgagactgactggtcccaggagttcatctccgaagtcaccgatcccttatctgtgagtccggctcgctgggccgaggagtatctcgagcagtccgaggagaagctatggttgggcgaacctgaaggcaccgccaccgataggtggtatgatgagtaccatccagaggaagatctccaacatacggcgtcagacttcgtggccaaagtcgatgatcccaaactggctaacagcgaattcttgaagtttgtaaggcaaatcggcgagggtcaggtgtcgctggagtctggcgctggctcaggccgagcgcaggccgaacagtgggccgcggaattcatacagcagcagggaacctcggacgcttgggtggatcagtttacaagaccagtgaacacctctgcgctggacatggaattcgagcgagctaaatctgccattgagtccgacgtggatttttgggataagctgcaagccgagctggaagagatggccaagcgagacgccgaagctcacccgtggcttagcgactacgacgatctgacatccgctacgtacgataagggctaccagttcgaggaggagaatccactccgggaccacccacagccatttgaagagggcttaagaagactgcaggaaggcgacctgcccaatgctgtgttactgttcgaggctgccgtacagcaggaccctaagcacatggaggcttggcaatatttggggactactcaagcagaaaatgaacaggaactgctggcaattagtgccctgcggcgctgtctcgaattaaagcccgacaatcagacagcactcatggccctggcagtgtcctttacaaatgagtcccttcagagacaggcttgtgagacgctacgcgactggctgcgctatacgcctgcctacgcccacctggtaacacccgctgaggaaggggccggcggagcaggcttgggcccaagcaagaggatactgggttccctgctgtccgattccctgttcctcgaggtgaaggagctgtttctagcagccgtaaggctggatcctacaagcatcgacccggacgtgcagtgcggcctgggggtgctgttcaatttgagcggggagtatgacaaggctgtggactgctttaccgctgctctgtccgtccggcccaatgattatctcctgtggaacaaattgggcgctactctcgcaaacggaaaccagtctgaggaagccgtggccgcttaccgtagagcgctggagttacaaccaggttatatcagatcccgctacaaccttggcatctcctgtattaacctaggagctcacagggaagccgtcgaacacttcttggaagctttgaatatgcaacgaaagtcccgcggtccgcggggcgaaggtggagcaatgtcagagaacatttggtccacgctccggttagccctctcaatgctgggtcagtccgacgcttacggcgctgctgatgcccgtgatctttccaccttgctgacaatgtttggcctgccgcagtag

SEQ ID NO: 313698 - DNA, 1920 bp, Artificial Sequence
  derived and/or modified sequence
atggccatgagggagctggtggaggccgagtgtggcggggccaaccccctgatgaagctggccggccacttcacccaggacaaggccctgcggcaggagggcctgcggcccggcccctggcccccaggggccccagccagcgaggccgccagcaagcccctgggcgtggcctctgaagatgagctggtggccgagttcctgcaggaccagaatgcccccctggtgtcccgggccccccagaccttcaagatggatgacctgctggccgagatgcagcagatcgagcagagcaacttccggcaggccccccagagggcccctggggtggccgacctggccctgtctgagaactgggcccaggagttcctggccgctggagatgctgtggatgtgacccaggactacaatgaaacagactggagccaggagttcatcagcgaggtgacagaccccctgtctgtgtccccagcccgctgggccgaggagtacctggagcagagcgaggagaagctgtggctgggggagcctgagggcacagccacagaccgctggtatgatgagtaccaccctgaggaggacctgcagcacacagccagtgactttgtggccaaggtggatgaccccaagctggccaacagcgagttcctgaagtttgtgcggcagatcggggagggccaggtgtccctggagagcggggccggcagcggccgggcccaggccgagcagtgggccgctgagttcatccagcagcagggcaccagtgatgcctgggtggaccagttcaccaggcctgtgaacaccagcgccctggacatggagtttgagcgggccaagagcgccattgaaagtgatgtggacttctgggacaagctgcaggccgagctggaggagatggccaagagagatgctgaggcccacccctggctgagtgactatgatgacctgaccagcgccacctatgacaagggctaccagtttgaggaggagaaccccctgcgggaccacccccagccctttgaggagggcctgcggcggctgcaggagggggacctgcccaatgctgtgctgctgtttgaggccgctgtgcagcaggaccccaagcacatggaggcctggcagtacctgggcaccacccaggctgaaaatgagcaggagctgctggccatcagcgccctgcggcgctgcctggagctgaagccagacaaccagacagccctgatggccctggccgtgtccttcaccaatgaaagcctgcagaggcaggcctgtgagaccctgcgggactggctgcgctacaccccagcctatgcccacctggtgaccccagctgaggagggcgccggcggggccggcctgggccccagcaagaggatcctgggcagcctgctgagtgacagcctcttcctggaggtgaaggagctgttcctggccgctgtgcggctggaccccaccagcattgatcctgatgtgcagtgtggcctgggcgtgctcttcaacctgtctggagaatatgacaaggctgtggactgcttcaccgctgccctgtctgtgcggcccaatgactacctgctgtggaacaagctgggcgccaccctggccaacggcaaccagagcgaggaggccgtggccgcctaccgccgggccctggagctgcagcccggctacatccgcagccgctacaacctgggcatcagctgcatcaacctgggcgcccaccgggaggccgtggagcacttcctggaggccctgaacatgcagaggaagagccggggccccagaggagagggcggggccatgtctgagaacatctggagcaccctgcggctggccctgtccatgctgggccagagtgatgcctacggggctgctgatgcccgggacctgagcaccctgctgaccatgtttggcctgccccagtag

SEQ ID NO: 313699 - DNA, 1920 bp, Artificial Sequence
  derived and/or modified sequence
atggccatgcgggagctggtggaggccgagtgcggcggcgccaaccccctgatgaaactcgccggacactttacacaggataaagcccttcggcaggaaggcctgcgccccgggccttggcctcctggcgccccagccagcgaagccgctagcaagcctttaggggtggcctctgaagacgagctcgtagcggaatttctccaagaccagaatgcccctctcgtctcacgcgcacctcagaccttcaagatggatgatttgctggccgaaatgcaacagatcgagcagtccaacttcagacaagcaccacaaagagccccaggtgtggcagatctggccttgagtgagaattgggcacaagagtttttggccgcaggagatgctgtagatgtaacacaggattataacgaaaccgactggagtcaggaatttatctcagaagtgaccgaccctctgtccgtttcccctgccaggtgggccgaggaatacctggagcagagcgaggaaaagctctggctgggcgaaccagaaggcactgccacagatcggtggtatgacgagtaccatcccgaggaagatctccagcatacagcatctgacttcgtggctaaggtcgatgatcccaagctagccaactcagagtttctgaaattcgtacggcagatcggcgaaggacaagtgtcactggagtccggagcgggtagcggtcgcgctcaggcggagcaatgggccgccgaattcatccaacagcaggggacatcagacgcctgggtcgaccagtttacccgtcccgtaaatacatcagctctagatatggagtttgaacgggctaagagtgcaatcgaatctgatgtggatttttgggataaacttcaggcagaactggaagagatggcgaaacgtgatgctgaggcccacccgtggctcagtgattacgacgatttaacatccgctacgtatgacaagggatatcagttcgaagaggagaaccctttacgtgaccaccctcagcctttcgaggaggggttacgccggttacaggaaggcgacctgcccaatgcagttctcttgtttgaggctgcggtgcaacaggatcccaagcacatggaagcctggcagtatcttgggacaacacaggccgaaaacgagcaagagttgctggccatcagcgctctcagaagatgcctggagctgaagcccgataaccagacagccctcatggctctggccgtgagtttcacaaacgagagtcttcaacgacaggcctgtgaaacgctgagagattggctccgttataccccagcatacgcccacttagtgactcctgccgaagagggcgcaggcggcgcaggattaggacctagtaaaaggattctgggctccctgctgagcgactcactattcctggaggtcaaggagttgtttcttgcagcagttaggctggatcctacaagcatagatccggatgtccagtgtggtctaggagtgcttttcaatctgagtggcgagtatgacaaagccgtggactgctttacggccgctctgagcgtcaggcctaacgactacctgctgtggaacaaattgggcgcgacgctggcaaacggcaatcagtctgaggaggctgtcgcagcatacaggcgcgccctggagcttcagcctggatacataaggagcaggtataacctgggcatcagctgcataaacctgggagctcaccgggaggctgtggagcactttctggaagcactcaacatgcagaggaaaagtagaggccctcgcggagagggcggcgctatgtcggagaatatttggtccacgcttagattggcgctgagcatgctgggacagagcgatgcttacggcgctgctgatgcaagagatctgtctaccctacttacaatgttcggccttccccaatag

SEQ ID NO: 313700 - DNA, 1920 bp, Artificial Sequence
  derived and/or modified sequence
atggccatgcgggagctggtggaggccgagtgcggcggcgccaaccctctcatgaaactggcaggacatttcacacaagataaggcactgcggcaggagggactgcggccgggcccctggcctcccggcgcgccagccagcgaggccgctagtaaacccctgggggtcgcttctgaagatgaactggtcgcagagttcctccaggatcagaacgcacctttggtgtcgcgggccccacaaacattcaagatggacgatctcctggcggaaatgcagcagatcgagcagtctaattttaggcaggccccgcagagagccccaggagtcgccgatctggctttgtcggaaaattgggcccaggagtttctggccgcaggcgatgctgtcgacgtgacccaagactataatgagacagactggagccaagagtttatctccgaggtgaccgatccgctgtccgtaagccctgcccgatgggccgaagagtacctcgagcaaagtgaggaaaagctatggttgggggagcccgaaggcacggccaccgaccgctggtatgacgagtatcaccctgaggaggacctacagcacacagctagcgatttcgttgccaaagtggatgatccaaagctagctaactctgagttcctcaagttcgtgagacagatcggtgagggtcaggttagtttagaaagtggtgcaggaagtggcagggctcaggcagagcagtgggcagctgagttcattcagcagcagggaacttcagatgcatgggtagaccaattcacgcggccagtcaatacctccgccctggatatggagttcgagcgagctaaatctgcaatcgagtccgacgtcgatttttgggacaaattgcaggcagaactggaggaaatggccaaacgtgacgccgaggcacacccttggctgtcagactacgacgacctgacaagtgccacatacgataagggctatcagtttgaggaggagaacccacttcgggaccatccccagccttttgaagagggactgcggcggctgcaggaaggcgatctcccaaacgccgtcttactatttgaagccgcggtgcagcaggatccaaagcacatggaggcctggcaatacctgggaacaacacaagctgaaaatgagcaagagctgctggcaatatcagctctgcggagatgcttggaactgaaacccgataatcaaaccgctttaatggcgctcgctgtctccttcaccaatgaatctcttcaacgtcaggcctgtgagacgctccgggattggcttcggtataccccagcatacgctcatctcgtcactccagcggaggaaggagccgggggcgcagggctgggtcccagcaaaaggattttaggaagcctgctgtccgattccttgtttctggaggttaaagagctcttcttggcagccgtgcggctggaccctacatctattgaccctgacgtccagtgcggtctgggcgtcttgtttaacctctccggggaatatgacaaggcagtcgattgtttcactgctgccttatctgtcagacctaacgactacctgttgtggaataagctgggtgcaaccctggccaacggaaatcaatctgaagaagccgtcgctgcctaccgcagagccctcgaattacagcctggatatatccgaagtcgttacaacctgggcatttcttgtattaacttaggcgctcaccgcgaagctgtagagcatttcctcgaagccctgaatatgcagaggaaatcgagaggtcccaggggggagggcggcgctatgtctgaaaatatctggtcaaccctgagactggcactgtctatgttgggccaatctgacgcctacggagctgccgacgcccgtgacctttcaacgctgctgaccatgttcggccttccccagtag

SEQ ID NO: 313701 - DNA, 1920 bp, Artificial Sequence
  derived and/or modified sequence
atggccatgcgggaactggtcgaggcggagtgtggcggtgccaaccccctgatgaaactggcaggacacttcactcaggacaaagcactgaggcaggaaggtttgagacccggaccctggccacccggtgcccctgccagcgaagctgccagcaagccgctcggcgtcgcttcagaggacgagctagtggccgaattcttacaggatcagaatgcacccctcgtatcccgggctcctcaaacttttaagatggacgacctcctggctgagatgcagcagatcgaacaaagcaatttccggcaggccccacagagggcccctggggttgcagacttggccctcagtgaaaattgggcacaggaattccttgcggcaggtgacgcggtggacgtgacccaggactataatgaaactgattggtcacaggagttcatatcagaggtgacagatcccctcagcgtgagtcccgctagatgggccgaggaatatctggagcagtccgaggaaaaactgtggctgggagagccagaagggacagccacggaccgatggtacgatgagtatcatcccgaggaagacctgcagcacactgcctctgactttgttgccaaggtcgatgatcccaaactggctaactccgaattcctcaagtttgtccgccaaatcggcgagggccaggtcagcctcgaaagtggagcaggaagcgggagggcccaggccgagcagtgggctgcggagtttattcagcaacaggggaccagcgatgcttgggtggatcaatttaccaggcctgtgaacacatcggctcttgacatggagttcgagagagccaaaagcgcaatcgaaagtgatgtcgatttctgggataagctgcaggcagagctggaagagatggccaagagggatgccgaagcccatccttggctgagcgactacgacgacctcacatctgctacatacgataagggctaccagtttgaagaggagaatccactgcgtgatcacccacagccgtttgaggagggccttagacgcctgcaggagggcgacctgccaaacgccgtgctcttgtttgaagctgcagtgcagcaggatccgaagcacatggaagcctggcagtacttgggcaccacccaggctgaaaacgagcaggagctgctcgccattagcgctctacgaagatgtctggagctgaagcctgataatcagaccgctctcatggcgttagcggtgtcttttacgaatgagtcattgcagcgccaggcttgtgagaccttacgcgactggctgaggtacacgccagcctacgctcacctggtcacacccgcagaggaaggagccggaggcgctgggttgggcccttctaagcgcatccttggttctttattgagtgactccctgttcctggaggtgaaggagcttttcctcgccgctgttcgcctcgatcctaccagcatcgaccccgatgtgcagtgcgggttaggggtgctattcaacttaagtggtgagtacgataaagctgtagactgctttacagccgctctgtccgtgcggccaaatgattacctcctctggaataagctcggggctacgctggccaatgggaaccagtccgaggaagccgtagcagcataccggagagcgctggaactccaacctggatacatccgcagcagatacaatcttggcatttcttgcatcaaccttggggctcatagagaggcggtcgagcactttctggaggctcttaatatgcagagaaaaagccgagggcctaggggggagggcggagcaatgagcgagaatatctggagcacattgagattggcgctgtctatgttaggtcagtcagacgcttatggcgctgctgacgccagagacctatccactctgctcaccatgttcggtttgccccagtag

SEQ ID NO: 313702 - DNA, 1920 bp, Artificial Sequence
  derived and/or modified sequence
atggctatgcgagaattagtagaagccgaatgcggaggcgcaaacccactaatgaaattggcaggccacttcacccaggacaaagccctgcgacaggagggtctccgacccggaccatggccccctggcgcacccgctagcgaggcagcttcaaaaccactcggtgtcgcttcggaggacgagttagtggctgagttcctgcaggaccaaaacgctccactcgtgagccgcgctcctcagaccttcaaaatggacgatttgctggctgaaatgcaacagatcgaacagagcaatttccgccaggcacctcagcgggcaccaggagttgcggatctcgccctgtccgaaaattgggcccaggaattcctggctgcgggagatgcggtggatgtcactcaggattacaatgagactgactggtcccaggagtttatctcagaagtcaccgatccgttgagtgtatcccccgcaaggtgggccgaggagtacctggagcaatcagaggaaaaactctggcttggtgaaccagagggaaccgccaccgataggtggtacgacgaatatcatcccgaagaagaccttcagcatactgcctcagatttcgtggcaaaagtggacgaccctaaattggcaaatagcgagttcctgaaatttgtacgccagattggtgagggtcaggtgtctcttgaaagcggggcaggcagcggcagggctcaggcagagcagtgggctgccgagttcatacagcagcaagggaccagcgatgcatgggtggaccaattcactaggcccgtcaatacaagtgctttggacatggagtttgaacgtgccaagtcagcgatcgaatccgacgtcgacttctgggataagctgcaagctgaactcgaggagatggccaaaagagacgcagaagcccacccctggctcagcgattacgacgatcttacttctgccacgtatgataaagggtaccaattcgaggaagagaaccccctccgggatcatcctcagccctttgaggagggcctgcggcgtctgcaggagggtgacctgccaaacgctgtactgctttttgaggccgcagtacagcaggacccaaagcatatggaggcgtggcagtacttaggcacaacacaggccgaaaacgagcaggaactgttagctatcagcgcactccggcgatgccttgaattgaagcccgacaaccagaccgccctgatggctctcgcagtgtctttcacaaacgagtccctacagcggcaggcctgcgagaccttgagagactggttgagatacaccccagcttatgcccatctcgttacaccggctgaggagggtgccggaggtgccggattggggcctagcaagcgcatacttggaagtctgctttccgactccctgtttttggaggtgaaagaacttttcctcgcagcagttaggctcgaccctaccagcattgatccagatgtccagtgtggcttaggagtcctcttcaacctgtctggcgaatatgacaaggccgtagattgcttcacagctgccctgtccgtgcggccaaatgactatctgctgtggaataagttgggagccaccctggcaaacggcaatcagtctgaggaagctgtcgccgcatacaggcgggcacttgaactgcagccgggttacatccgatcacgatataatttgggcatttcatgtattaacttaggagctcaccgagaggctgtggaacacttcctcgaggctctgaacatgcaacgcaagagcaggggacccaggggagagggcggagcgatgagtgagaacatctggagtacattacgcctagccttatccatgttggggcagagcgacgcatacggcgcagctgacgctcgggatctctcaaccctcctaactatgttcgggctgccccagtag

SEQ ID NO: 313703 - DNA, 1920 bp, Artificial Sequence
  derived and/or modified sequence
atggccatgagagagctggtggaggccgagtgcggcggcgccaaccccctgatgaagctggccggccacttcacccaggacaaggccctgagacaggagggcctgagacccggcccctggccccccggcgcccccgccagcgaggccgccagcaagcccctgggcgtggccagcgaggacgagctggtggccgagttcctgcaggaccagaacgcccccctggtgagcagagccccccagaccttcaagatggacgacctgctggccgagatgcagcagatcgagcagagcaacttcagacaggccccccagagagcccccggcgtggccgacctggccctgagcgagaactgggcccaggagttcctggccgccggcgacgccgtggacgtgacccaggactacaacgagaccgactggagccaggagttcatcagcgaggtgaccgaccccctgagcgtgagccccgccagatgggccgaggagtacctggagcagagcgaggagaagctgtggctgggcgagcccgagggcaccgccaccgacagatggtacgacgagtaccaccccgaggaggacctgcagcacaccgccagcgacttcgtggccaaggtggacgaccccaagctggccaacagcgagttcctgaagttcgtgagacagatcggcgagggccaggtgagcctggagagcggcgccggcagcggcagagcccaggccgagcagtgggccgccgagttcatccagcagcagggcaccagcgacgcctgggtggaccagttcaccagacccgtgaacaccagcgccctggacatggagttcgagagagccaagagcgccatcgagagcgacgtggacttctgggacaagctgcaggccgagctggaggagatggccaagagagacgccgaggcccacccctggctgagcgactacgacgacctgaccagcgccacctacgacaagggctaccagttcgaggaggagaaccccctgagagaccacccccagcccttcgaggagggcctgagaagactgcaggagggcgacctgcccaacgccgtgctgctgttcgaggccgccgtgcagcaggaccccaagcacatggaggcctggcagtacctgggcaccacccaggccgagaacgagcaggagctgctggccatcagcgccctgagaagatgcctggagctgaagcccgacaaccagaccgccctgatggccctggccgtgagcttcaccaacgagagcctgcagagacaggcctgcgagaccctgagagactggctgagatacacccccgcctacgcccacctggtgacccccgccgaggagggcgccggcggcgccggcctgggccccagcaagagaatcctgggcagcctgctgagcgacagcctgttcctggaggtgaaggagctgttcctggccgccgtgagactggaccccaccagcatcgaccccgacgtgcagtgcggcctgggcgtgctgttcaacctgagcggcgagtacgacaaggccgtggactgcttcaccgccgccctgagcgtgagacccaacgactacctgctgtggaacaagctgggcgccaccctggccaacggcaaccagagcgaggaggccgtggccgcctacagaagagccctggagctgcagcccggctacatcagaagcagatacaacctgggcatcagctgcatcaacctgggcgcccacagagaggccgtggagcacttcctggaggccctgaacatgcagagaaagagcagaggccccagaggcgagggcggcgccatgagcgagaacatctggagcaccctgagactggccctgagcatgctgggccagagcgacgcctacggcgccgccgacgccagagacctgagcaccctgctgaccatgttcggcctgccccagtag

SEQ ID NO: 313704 - protein, 410 aa, Artificial Sequence
  derived and/or modified sequence
MAMRELVEAECGGANPLMKLAGHFTQDKALRQEGLRPGPWPPGAPASEAVSVLEVESPGAASEAASKPLGVASEDELVAEFLQDQNAPLVSRAPQTFKMDDLLAEMQQIEQSNFRQAPQRAPGVADLALSENWAQEFLAAGDAVDVTQDYNETDWSQEFISEVTDPLSVSPARWAEEYLEQSEEKLWLGEPEGTATDRWYDEYHPEEDLQHTASDFVAKVDDPKLANSEGTSDAWVDQFTRPVNTSALDMEFERAKSAIELQAELEEMAKRDAEAHPWLSDYDDLTSATYDKGYQFEEENPLRDHPQPFEEGLRRLQEGDLPNAVLLFEAAVQQDPKHMEAWQYLGTTQAENEQELLAISALRRCLELKPDNQTALMALAVSFTNESLQRQACETLRDWLRYTPAYAHLV

SEQ ID NO: 313705 - DNA, 1233 bp, Artificial Sequence
  derived and/or modified sequence
atggcgatgcgagagcttgtggaagccgaatgtgggggagccaatccccttatgaagttagcaggtcacttcacccaagataaagcactcagacaggagggactgcgcccaggaccatggcccccaggcgccccggccagcgaagccgtgtctgtccttgaagtggaatctcctggcgccgcctcggaggcggcgtctaagccgctaggcgtcgcgtccgaagatgagttagttgccgagtttttacaggatcaaaacgcgcctctggtgtcaagagccccccagacatttaaaatggatgacctgttggccgaaatgcagcagatcgaacaatcaaactttaggcaagctccccagcgcgcgcccggtgtcgccgatctggctttgtcagagaactgggcacaagaatttcttgccgcaggcgacgccgtggatgtgacgcaagattataacgagactgactggtcccaagaatttattagcgaggtgacagaccccctgtccgttagccctgccaggtgggccgaagaatatttagaacagagcgaagagaagctctggctgggggagcccgaggggactgcgaccgacaggtggtatgatgaataccaccccgaagaagaccttcagcataccgccagtgattttgtggccaaagtggatgatcccaagttggccaactctgaagggacatcggatgcatgggtcgaccaatttacaagacccgtgaatacgagtgcgctcgatatggaatttgaacgcgcgaagagtgcgatcgagctgcaggcagaattagaggagatggccaaaagggatgctgaggctcatccctggctctccgattatgatgatcttacgagcgcgacatacgacaaaggataccagtttgaggaggaaaacccactgagagatcacccccagccctttgaagaaggcctgaggagactccaagaaggagacctccccaatgctgttctgttatttgaggctgcagtgcagcaggatccgaagcacatggaggcctggcagtatctcggtaccacccaggcagaaaatgagcaggagctgctagctattagcgcactaaggcgttgtcttgagctaaagccagataatcagacggctctaatggctctcgctgtctcatttactaacgagagcctgcaaaggcaggcttgcgagacgttacgagattggttgagatacactcccgcgtatgcacatctcgtatag

SEQ ID NO: 313706 - DNA, 1233 bp, Artificial Sequence
  derived and/or modified sequence
atggccatgagggagctggtggaggccgagtgtggcggggccaaccccctgatgaagctggccggccacttcacccaggacaaggccctgcggcaggagggcctgcggcccggcccctggcccccaggggccccagccagcgaggccgtgtctgtgctggaggtggagagccctggggccgccagcgaggccgccagcaagcccctgggcgtggcctctgaagatgagctggtggccgagttcctgcaggaccagaatgcccccctggtgtcccgggccccccagaccttcaagatggatgacctgctggccgagatgcagcagatcgagcagagcaacttccggcaggccccccagagggcccctggggtggccgacctggccctgtctgagaactgggcccaggagttcctggccgctggagatgctgtggatgtgacccaggactacaatgaaacagactggagccaggagttcatcagcgaggtgacagaccccctgtctgtgtccccagcccgctgggccgaggagtacctggagcagagcgaggagaagctgtggctgggggagcctgagggcacagccacagaccgctggtatgatgagtaccaccctgaggaggacctgcagcacacagccagtgactttgtggccaaggtggatgaccccaagctggccaacagcgagggcaccagtgatgcctgggtggaccagttcaccaggcctgtgaacaccagcgccctggacatggagtttgagcgggccaagagcgccatcgagctgcaggccgagctggaggagatggccaagagagatgctgaggcccacccctggctgagtgactatgatgacctgaccagcgccacctatgacaagggctaccagtttgaggaggagaaccccctgcgggaccacccccagccctttgaggagggcctgcggcggctgcaggagggggacctgcccaatgctgtgctgctgtttgaggccgctgtgcagcaggaccccaagcacatggaggcctggcagtacctgggcaccacccaggctgaaaatgagcaggagctgctggccatcagcgccctgcggcgctgcctggagctgaagccagacaaccagacagccctgatggccctggccgtgtccttcaccaatgaaagcctgcagaggcaggcctgtgagaccctgcgggactggctgcgctacaccccagcctatgcccacctggtgtag

SEQ ID NO: 313707 - DNA, 1233 bp, Artificial Sequence
  derived and/or modified sequence
atggccatgcgggagctggtggaggccgagtgcggcggcgccaacccacttatgaagcttgcagggcactttacccaagataaagcgttaaggcaagaggggttgcgaccaggaccttggccccctggggctccagcctccgaggctgttagcgtactggaagttgagtcacccggcgccgctagtgaagctgcctccaagcccctaggcgtggcgagcgaagacgagttagtggccgagtttctccaggatcaaaatgctcccctggtgtcaagggctccccaaacttttaagatggacgacctgctagccgagatgcagcagatagagcagtctaacttcagacaagctccacagcgtgcacctggggttgccgacctcgctctgtccgaaaattgggctcaggagttcctggccgccggtgacgctgttgatgttacacaggactataatgagacagactggagccaggaatttatcagtgaggtcacggatcccctctcagtttcaccagcaagatgggccgaagaatacctggaacagtcagaggagaagctttggttgggggaaccagagggtacagccactgacagatggtacgacgagtaccaccctgaggaggatctgcagcatacggccagcgattttgtggcaaaagtggatgaccctaagctggctaactcagaaggcacctccgacgcttgggtagaccaatttactcggcctgttaatacctcagcactcgacatggaattcgaaagagccaaatctgctatcgaacttcaagcagaattggaggagatggccaagcgagatgcagaggcccacccctggctaagtgactacgacgatctgacctccgccacctacgacaaaggataccagtttgaggaagaaaaccctctgcgagaccaccctcagccgttcgaagaaggcttaaggcgcctccaagaaggggacctgccgaacgcagtcctcttatttgaggccgctgtccagcaggatcctaagcatatggaagcatggcagtacttaggcacaactcaggcagagaatgagcaggagttacttgccatttccgccttgaggaggtgcctcgagctcaagccagataatcagaccgctcttatggcactggccgtctctttcacaaatgaatctctgcagagacaggcttgcgaaacactgagagattggctcaggtatacccccgcgtatgcacacctcgtatag

SEQ ID NO: 313708 - DNA, 1508 bp, Artificial Sequence
  derived and/or modified sequence
gcgtgctggggctgcgcggggctaggtatggtcgggctgttttcccactgtcccttcttcgggcagtgtcgccgtccagcctggttgttgaagcgtccccgtggtcccccggggtccaggcccctttgtggaggcagctgctggcccccagcccatgggaccgtagtcgcggaggcctctgcagaggcgcaggctggaagcggtggcctttgaggggggcggcaggagagagtaccgacctccctcgaactcctggcagagagagctggcggtcaccatggcaatgcgggagctggtggaggccgaatgcgggggtgccaacccgctcatgaagctcgccgggcacttcacccaggacaaggcccttcggcaggagggattgaggcctggcccctggccccccggagccccggcctctgaggcagtgagtgttcttgaggtggaaagcccaggtgcagcctctgaggcagcctccaagcctttgggagtagcttctgaagatgagttggtggctgaattcctgcaggaccagaatgcaccccttgtgtcccgtgcccctcagaccttcaagatggatgacctcctggctgagatgcagcagattgagcagtcaaacttccgccaggctccccagagagcccctggtgtggcagacttggccttgtctgagaactgggcccaggagtttcttgcagctggagatgctgtggatgtaactcaggattataatgagactgactggtcccaagaattcatctctgaagttacagaccccttgtctgtgtcccctgcccgctgggctgaggaatatttggagcaatcagaggagaagctgtggctgggagaacctgagggaacagccaccgatcgctggtatgatgaatatcatcctgaggaggatctgcagcacacggccagtgactttgtggccaaagtggatgaccccaaattggctaattctgagggtacatcagatgcctgggttgaccagttcacaagaccagtaaacacatctgcccttgatatggagtttgaacgagccaagtcagctatagagttgcaggcagagttggaggagatggcaaaacgggatgctgaggcccacccctggctttctgactatgatgaccttacgtcagctacctatgataaggggtaccagtttgaggaggagaaccccttgcgtgatcaccctcagccttttgaagaagggctgcggcgccttcaggagggggacctgccaaatgctgtgctgctttttgaggcagctgtgcagcaggatcctaagcacatggaagcttggcagtatctgggtaccacccaggcagagaatgaacaagaactattagccatcagtgcattgcggaggtgtctggagctaaagccagataaccagacagcactgatggcgctggctgtgagcttcaccaacgagtccctgcagcgacaggcctgtgaaaccctacgagactggctgcggtacacaccagcctatgcccatctggtga

SEQ ID NO: 313709 - DNA, 1233 bp, Artificial Sequence
  derived and/or modified sequence
atggccatgagagagctggtcgaggcggaatgtggtggcgcaaatccattgatgaagctggccggacacttcacccaggacaaagctcttcgccaggaaggtcttcgcccaggtccgtggccgccaggcgctccggctagtgaggcagtgtcagtattggaggtcgaatcccccggtgccgcttccgaagccgcatcaaagcccctgggtgtggctagtgaggatgaactcgtggctgagttcctgcaggaccaaaacgcacctctggtgtcccgcgcaccacagaccttcaagatggacgatctgctggcggagatgcagcagatagagcagtctaactttagacaggcacctcaacgcgctcccggagtcgccgacctagcattgtccgaaaactgggcacaggagtttctggcggcaggagatgctgtggatgttacccaggattataacgagaccgattggtcccaggagtttatttcagaagtcacagatcccttgtcagtatccccggcacgatgggcagaggagtaccttgagcagtctgaggagaaattgtggctaggtgagcccgagggcactgctacggacaggtggtacgatgaataccaccctgaggaggatctgcagcacaccgccagtgactttgtggcgaaagtggatgacccaaagctggcaaattctgaaggcaccagtgacgcgtgggtggaccaatttactcgcccagtgaacacaagcgccctcgacatggaattcgaaagggccaagtcagcgattgaactgcaggcggagctcgaggagatggcaaagcgcgacgcagaagcacacccctggctctctgactacgacgatttaacaagtgccacatacgacaaagggtatcagtttgaggaagagaatcctcttcgggaccacccgcaaccgtttgaggagggcctaaggcgtctgcaggagggagacttgcctaatgcagtgctgctgttcgaggcagccgtccagcaagacccgaaacacatggaagcctggcagtatctggggacgacccaggccgagaacgaacaggagctactggccatctccgctcttaggcgctgccttgagcttaaaccagataatcaaacggcattgatggctctggctgtgagctttacgaatgaatctctccaaaggcaggcctgcgagaccctgagggactggctgcgctataccccagcatatgctcacctggtgtag

SEQ ID NO: 313710 - DNA, 1233 bp, Artificial Sequence
  derived and/or modified sequence
atggccatgagagagctggtggaggccgagtgcggcggcgccaaccccctgatgaagctggccggccacttcacccaggacaaggccctgagacaggagggcctgagacccggcccctggccccccggcgcccccgccagcgaggccgtgagcgtgctggaggtggagagccccggcgccgccagcgaggccgccagcaagcccctgggcgtggccagcgaggacgagctggtggccgagttcctgcaggaccagaacgcccccctggtgagcagagccccccagaccttcaagatggacgacctgctggccgagatgcagcagatcgagcagagcaacttcagacaggccccccagagagcccccggcgtggccgacctggccctgagcgagaactgggcccaggagttcctggccgccggcgacgccgtggacgtgacccaggactacaacgagaccgactggagccaggagttcatcagcgaggtgaccgaccccctgagcgtgagccccgccagatgggccgaggagtacctggagcagagcgaggagaagctgtggctgggcgagcccgagggcaccgccaccgacagatggtacgacgagtaccaccccgaggaggacctgcagcacaccgccagcgacttcgtggccaaggtggacgaccccaagctggccaacagcgagggcaccagcgacgcctgggtggaccagttcaccagacccgtgaacaccagcgccctggacatggagttcgagagagccaagagcgccatcgagctgcaggccgagctggaggagatggccaagagagacgccgaggcccacccctggctgagcgactacgacgacctgaccagcgccacctacgacaagggctaccagttcgaggaggagaaccccctgagagaccacccccagcccttcgaggagggcctgagaagactgcaggagggcgacctgcccaacgccgtgctgctgttcgaggccgccgtgcagcaggaccccaagcacatggaggcctggcagtacctgggcaccacccaggccgagaacgagcaggagctgctggccatcagcgccctgagaagatgcctggagctgaagcccgacaaccagaccgccctgatggccctggccgtgagcttcaccaacgagagcctgcagagacaggcctgcgagaccctgagagactggctgagatacacccccgcctacgcccacctggtgtag

SEQ ID NO: 313711 - DNA, 3807 bp, Artificial Sequence
  derived and/or modified sequence
atgtctgaaagctaccgcagaacaacattcccagtcaggtttcgtgtcgtcagcgtggatgagaacttcaggccacggaacgaactgatcccgctgatttatcttgagaacccaaggagaaaccggattgctcagtggcagtccctgaaattggaggctggcatcaaccagcttagttttcccctgagctctgaacctatccaaggtagttaccgcgttgtggtccaaaccgagtcaggtggtagaatccagcacccattcactgtggaagagttcgttctgcccaagtttgaggtgaaagttcaggtgccgaaaattatcagtattatggatgaaaaggtgaacatcaccgtctgcggcgagtatacctacgggaagcccgtgcccggtctggcaaccgtgagcctgtgccgcaaactgtcccgggtcctgaactgcgacaagcaggaggtatgtgaggagttcagtcagcagcttaacagcaatggatgtattacacagcaggttcacactaagatgttgcagatcactaacaccggctttgagatgaagttgcgcgtcgaggccagaataagggaggagggaaccgacctcgaggtgacagcaaatagaatatctgagatcaccaatatcgtgtccaaactcaagttcgtcaaggtggatagtcacttcaggcaaggcattcctttcttcgcacaggtgctccttgttgatgggaagggagttccaattccaaacaagttgttttttatttcggttaacgatgcaaactactacagtaacgctaccacgaacgaacaaggcctggcccagttttctatcaacaccacaagcatttcggtgaataagctcttcgtgcgggtcttcactgtccaccccaacctgtgcttccattattcatgggtcgcagaagaccaccagggcgctcagcacacagccaatagggttttctccctgagtggaagttacatacacctggagcccgtagcaggtactcttccttgcggacataccgagaccataaccgcgcactatactctgaacagacaggctatgggagagctctctgagttatcctttcattatctgattatggctaagggcgtgatcgtccgctctgggacccatacactgcctgtggagtctggcgacatgaaagggtcctttgccctgagttttccggtggagtcagatgtcgctcccatagccaggatgtttatcttcgcaatcctgcccgatggggaggtggttggggacagcgaaaagtttgaaatcgagaattgcctggccaacaaagttgacctgtccttttcccctgcccagagcccccccgccagccacgcccacctgcaggtggcagccgcaccccaatccctctgcgctttgcgtgccgtggaccaatctgtcctgttgatgaagcccgaagccgagctgtcagtgtcatctgtatacaacctcctgacggtgaaggatctcaccaacttcccggataacgtggaccagcaggaggaagaacagggacactgcccaagaccgttttttatacataatggagcaatttacgtgcctctttcttcgaatgaagcagacatttactcattcctcaagggaatgggactgaaggtctttaccaattccaaaatccggaagcccaagagctgtagcgtgattccctccgtgagtgccggggccgtcggccagggatattacggagctggcctgggtgtcgtcgaaaggccatacgtcccgcaattaggcacctacaatgtcatcccgctaaacaatgaacagtcgtccggacctgtgcctgaaaccgtgagatcttacttcccagagacctggatatgggaactggttgcggtcaattcatcgggggtggctgaggtgggggtgaccgtgcccgacacgatcaccgaatggaaggctggcgccttctgcctttcagaagacgctggcctcggaattagctccactgcttccttacgcgccttccaaccctttttcgtggagctgacgatgccgtactcggtaatccgaggcgaggtctttaccctcaaagccacagtgttaaattacctgcccaagtgcataagggccgagggaattgaacaagaaaagactttttcctcaatgacatgcgcctctggggccaatgttagtgaacagctgagcctgaagctaccctctaatgtggtgaaagagtcagctagagcgagcttttctgtgctaggcgacattttggggtccgctatgcaaaacatccaaaacctgctgcaaatgccctacggctgtggggaacagaacatggtactgttcgcacctaatatttatgttctgaactacttaaatgagacccaacaactaacacaggagataaaggcgaaagctgttggatatctcataactggataccagcggcagcttaattacaaacatcaagatggctcctactccacattcggagagaggtacggcaggaaccagggcaacacttggttgaccgcctttgtgctgaaaactttcgcacaggccagaagttatatatttattgacgaagcccacattacccagagcctgacctggctcagccagatgcagaaggacaacggctgctttagatcctccggatctcttttaaataacgcaataaagggcggcgtggaggatgaggccaccctctcagcgtatgtgactatcgctctgctggaaatccctctccccgtgactaatcctatcgttcggaatgctctcttttgtcttgaaagtgcgtggaatgttgccaaggaggggacccacggctcacatgtgtatactaaagcacttttggcctacgccttttccctccttgggaaacagaaccagaacagagagatcctaaattctctggataaggaggccgtaaaggaggataatttggtacattgggagcgcccacagagacctaaggcgcccgtaggtcatctataccaaacacaggctccatcagccgaagtggaaatgacgtcttatgtcctgctcgcgtatctgacagctcagccagcaccaacaagcggtgacctgacaagtgctactaacatcgtgaagtggataatgaagcaacagaacgctcagggtggatttagcagcacacaagacactgtcgtggcactccatgcattgtctagatacggcgccgccacatttactagaacagagaaaactgcacaagtgacagtgcaagattcacaaacattcagcacaaactttcaggtggataataataaccttctgctgttgcagcagatcagcctacctgagctccccggcgagtatgtgattactgttaccggtgagaggtgcgtgtacctccagaccagcatgaagtataatattcttccagagaaagaggacagcccctttgcgcttaaagtgcaaaccgtaccccaaacttgtgatggccacaaagcccacacatcctttcaaatctcgttgactatatcatacaccggcaacaggccagcttctaacatggtgatcgtcgacgtaaaaatggtgtctgggtttataccgctgaaacccacagtgaagatgttagagcggtcttcatctgtgtcgcgcactgaggtgtctaacaatcacgtgctaatctacgtcgagcaggtgaccaatcaaaccctcagcttctcctttatggtgctgcaagacatccccgttggggatctgaaacctgccatagttaaggtgtacgactactacgaaacagacgaaagcgtggttgcagagtacatcgccccatgtagcaccgacaccgagcacggcaacgtctag

SEQ ID NO: 313712 - DNA, 3807 bp, Artificial Sequence
  derived and/or modified sequence
atgtctgagagctacagaaggaccaccttccctgtgcgcttccgggtggtgtctgtggatgagaacttccggcccagaaatgaactcatccccctcatctacctggagaaccccaggaggaacagaattgcccagtggcagagcctgaagctggaggccggcatcaaccagctgtccttccccctgagcagcgagcccatccagggcagctacagagtggtggtgcagacagaaagtggcggccgcatccagcaccccttcaccgtggaggagtttgtgctgcccaagtttgaggtgaaggtgcaggtgcccaagatcatcagcatcatggatgagaaggtgaacatcaccgtgtgtggggagtacacctacggcaagcctgtgcccggcctggccaccgtgtccctgtgcaggaagctgagccgggtgctgaactgtgacaagcaggaggtgtgtgaggagttcagccagcagctgaacagcaatggctgcatcacccagcaggtgcacaccaagatgctgcagatcaccaacacaggctttgagatgaagctgcgggtggaggcccgcatccgggaggagggcacagacctggaggtgacagccaaccgcatcagcgagatcaccaacatcgtgtccaagctgaagtttgtgaaggtggacagccacttccggcagggcatccccttctttgcccaggtgctgctggtggatggcaagggcgtgcccatccccaacaagctgttcttcatctctgtgaatgatgccaactactacagcaatgccaccaccaatgagcagggcctggcccagttcagcatcaacaccaccagcatctctgtgaacaagctgtttgtgcgggtcttcaccgtgcaccccaacctgtgcttccactacagctgggtggccgaggaccaccagggcgcccagcacacagccaacagagtcttcagcctgagcggcagctacatccacctggagcctgtggccggcaccctgccctgtggccacacagagaccatcacagcccactacaccctgaaccggcaggccatgggagagctgtctgagctgtccttccactacctgatcatggccaagggcgtcatcgtgcgcagcggcacccacaccctgcctgtggagagcggggacatgaagggcagctttgccctgtccttccctgtggagagtgatgtggcccccatcgccaggatgttcatctttgccatcctgcctgatggagaggtggtgggggacagcgagaagtttgaaattgagaactgcctggccaacaaggtggacctgtccttctccccagcccagagccccccagccagccacgcccacctgcaggtggccgccgccccccagagcctgtgtgccctgcgggctgtggaccagagcgtgctgctgatgaagccagaggccgagctgtctgtgtcctctgtgtacaacctgctgactgtgaaggacctgaccaacttcccagacaacgtggaccagcaggaggaggagcagggccactgcccccggcccttcttcatccacaatggagccatctacgtgcccctgagcagcaatgaagctgacatctacagcttcctgaagggcatgggcctgaaggtgttcaccaacagcaagatcaggaagcccaagagctgcagcgtcatccccagcgtgtctgctggagctgtgggccagggctactacggggccggcctgggcgtggtggagcggccctacgtgccccagctgggcacctacaacgtcatccccctgaacaatgagcagagcagcggccctgtgcctgagaccgtgcgcagctacttccctgagacctggatctgggagctggtggccgtgaacagcagcggcgtggccgaggtgggcgtgacagtgcctgacaccatcacagagtggaaggccggggccttctgcctgtctgaagatgctggcctgggcatcagcagcacagccagcctgcgggccttccagcccttctttgtggagctgaccatgccctacagcgtcatccggggggaggtgttcaccctgaaggccaccgtgctgaactacctgcccaagtgcatccgggcagagggcatcgagcaggagaagaccttcagctccatgacctgtgccagcggggccaacgtgtctgagcagctgagcctgaagctgcccagcaatgtggtgaaggagagcgcccgggccagcttctctgtgctgggggacatcctgggcagcgccatgcagaacatccagaacctgctgcagatgccctacggctgtggggagcagaacatggtgctgtttgcccccaacatctacgtgctgaactacctgaatgagacccagcagctgacccaggagatcaaggccaaggctgtgggctacctgatcaccggctaccagaggcagctgaactacaagcaccaggacggcagctacagcaccttcggggagagatatggcaggaaccagggcaacacctggctgacagcctttgtgctgaagacctttgcccaggcccggagctacatcttcattgatgaggcccacatcacccagagcctgacctggctgagccagatgcagaaggacaatggctgcttccgcagcagcggcagcctgctgaacaatgccatcaagggcggcgtggaggatgaggccaccctgagcgcctacgtgaccatcgccctgctggagatccccctgcctgtgaccaaccccatcgtgagaaatgccctcttctgcctggagagcgcctggaatgtggccaaggagggcacccacggcagccacgtgtacaccaaggccctgctggcctatgccttcagcctgctgggcaagcagaaccagaaccgggagatcctgaacagcctggacaaggaggccgtgaaggaggacaacctggtgcactgggagcggccccagaggcccaaggcccctgtgggccacctgtaccagacccaggcccccagcgctgaggtggagatgaccagctatgtgctgctggcctacctgacagcccagcctgcccccaccagcggggacctgaccagcgccaccaacatcgtgaagtggatcatgaagcagcagaatgcccagggcggcttcagcagcacccaggacacagtggtggccctgcacgccctgagccgctacggggccgccaccttcaccaggacagagaagacagcccaggtgacagtgcaggacagccagaccttcagcaccaacttccaggtggacaacaacaacctgctgctgctgcagcagatcagcctgcctgagctgcctggagaatatgtgatcaccgtgactggagagcgctgtgtgtacctgcagacctccatgaagtacaacatcctgcctgagaaggaggacagcccctttgccctgaaggtgcagacagtgccccagacctgtgatggccacaaggcccacaccagcttccagatcagcctgaccatctcctacacaggcaacagacctgccagcaacatggtgattgtggatgtgaagatggtgtctggcttcatccccctgaagcccaccgtgaagatgctggagaggagcagctctgtgtccaggacagaggtgagcaacaaccacgtgctgatctacgtggagcaggtgaccaaccagaccctgtccttctccttcatggtgctgcaggacatccctgtgggggacctgaagccagccatcgtgaaggtgtatgactactatgaaacagatgagagcgtggtggccgagtacatcgccccctgcagcacagacacagaacatggaaatgtgtag

SEQ ID NO: 313713 - DNA, 3807 bp, Artificial Sequence
  derived and/or modified sequence
atgagcgagagctaccggcggaccaccttccccgtgcggttccgggtcgtgtctgtggacgaaaacttccggcccaggaacgagctgattcctctaatctacttggaaaaccccaggcgaaaccggattgcacaatggcagagcttaaagctggaagctggaattaatcagttatcattcccgttgtcatcggagcccatacagggaagttaccgggtagtggtccagaccgaaagtgggggccgcatccagcacccattcacggttgaagagtttgtcctgcctaaattcgaggtgaaagtccaggtccctaagatcatttctattatggacgagaaagtcaacattaccgtttgtggagaatacacctatggcaagcccgttccagggctggcaacagtaagcctttgccgaaagttgtcccgggtgctcaactgcgacaaacaggaagtttgcgaggagtttagccagcagctcaactctaacgggtgcataacacagcaagtgcatacaaagatgctgcagattacaaacaccgggtttgaaatgaagctgagggtggaagcccgcattagggaggagggcactgatctggaggtgaccgctaatagaattagtgaaatcaccaatatcgtgagtaaattgaagtttgtgaaagtggactcacacttccgacagggtatcccgttctttgcacaggtcctgctagtcgacggaaagggtgttcccatccctaataaactcttcttcatttcggtcaacgatgctaactattacagcaacgctaccactaatgaacagggtctggcacagttcagtatcaatactacctccataagcgttaataagttattcgtcagagttttcacagtgcaccccaacctatgctttcactactcctgggtggctgaagatcaccagggagcgcagcacacagccaaccgcgtgtttagcctctctggatcctacattcaccttgagcctgttgccgggacactgccttgcggacacactgaaaccatcaccgctcactacaccctgaatcgccaggccatgggcgaactgtccgagctcagtttccactacctgataatggccaagggagtcatcgttagatctggaacacacactctccccgtcgaaagcggcgacatgaagggctctttcgccctgtccttcccagtggaaagtgatgtcgcccctatagcaaggatgtttatttttgcaatcttgcctgatggggaggttgtcggggactccgaaaagttcgagatcgaaaactgcctcgcgaacaaagtggatttatcatttagccctgctcagtctcccccagcatcccacgcccacctccaagtagctgctgctccccagtcactctgcgccctccgtgctgtggaccagagcgtgctgttgatgaagcctgaggcagagttgtctgtcagctccgtctacaatctcctgaccgtgaaggatctgacgaatttccctgacaacgtcgatcaacaggaggaggaacagggacattgccccagacccttcttcatccataatggtgcaatttatgtccccctctcttcaaacgaggcggatatatacagctttctcaaagggatgggcctcaaggtctttaccaattcaaaaatacggaaaccaaaaagctgttcagtgatcccatccgtgtccgccggcgcagtcggtcagggctactacggtgctgggctgggcgttgtggagagaccttatgtcccgcagctcggaacgtataatgtcattccgctcaacaacgaacaatctagcggcccagtgcccgagacagtcagaagctattttccagaaacctggatctgggaacttgtagctgtcaacagctctggcgttgcggaagttggcgtcactgtgccagacacaatcacagaatggaaggccggcgctttttgtttgtctgaggatgccggactgggaatcagtagcacggctagtctaagagcctttcaacccttttttgtcgaattaaccatgccgtacagcgtgatacgaggcgaagtgtttacccttaaagcaacagttctgaattatctaccgaagtgtatcagggctgagggcatcgagcaggaaaaaacattctctagtatgacctgtgcatcaggggcaaacgtgagcgagcagcttagccttaaactcccttccaacgtggtaaaggaaagcgctcgtgcgagcttcagcgtgctgggggacattctagggtcagccatgcagaatatccaaaatctgctccagatgccttatggctgcggggaacagaatatggttctctttgcacctaatatctatgtgctgaattatttaaacgagactcagcagcttacccaggagataaaggcaaaggcggtgggataccttattaccgggtatcaacgacagctcaattacaaacaccaggacggtagttattcaaccttcggagagcggtatggccgtaaccaagggaatacatggctgacagcctttgtgcttaagactttcgctcaggctaggtcttacatttttattgacgaagcccatataacgcagtccctgacttggttgtcccagatgcaaaaggataatgggtgcttcagatcctctggatctttgctaaacaatgctattaagggaggcgttgaggacgaggccacactctctgcatatgtgacaattgccctgttggagatcccgctgccagtcaccaatcccattgtccggaacgcgctcttttgccttgagtcagcctggaacgtagcaaaggagggaacacatggttctcacgtgtatacaaaggcattgttggcgtatgcgttctcattgctcggcaagcagaatcaaaacagagagatcctgaatagcttggataaagaagccgtcaaggaggacaatcttgtccactgggagagaccacaacgcccgaaagctccggtggggcatctctaccagactcaagcgcctagcgccgaggtcgagatgaccagctacgtgctgctcgcctatctgaccgcgcaacccgcccccaccagtggtgatctgacatcagccacaaacatagtgaagtggatcatgaaacagcagaacgctcagggcggattcagctcaacacaagataccgtggtagccctgcatgcgctgtcccggtatggggcggcgacattcaccagaaccgaaaaaaccgcccaggttacagtgcaagattctcaaacgttcagtacgaacttccaggtcgataataataatctcctgcttctccagcagatctcgctcccagaactgccaggggagtatgtcataacggtcaccggcgagcgatgcgtgtatctgcagacgagtatgaagtacaacattctgcctgaaaaggaagacagcccttttgctttaaaagtccagaccgtgcctcagacatgtgatggccataaggctcatacatccttccaaatttcactaaccatcagttacacaggaaatagaccggcatcaaatatggtcattgtggatgttaaaatggtgagtgggtttattcctctcaagccaacagttaaaatgctcgagcgctcttcttcagtgtcgcggactgaagtcagtaataaccatgtgcttatttatgtggagcaagttacgaaccagaccctgagctttagctttatggttctccaggatatcccagtgggtgacttgaaaccggcaatcgtgaaggtgtacgactactatgaaaccgatgaaagcgtggtcgccgagtacattgccccgtgttcaaccgacaccgagcacggcaatgtgtag

SEQ ID NO: 313714 - DNA, 3938 bp, Artificial Sequence
  derived and/or modified sequence
atgtctgaatcttatcggagaactacttttccagtaagattccgtgttgtctccgtggatgaaaattttcgccctcgaaatgaactgattccactgatataccttgagaacccaagaagaaatcgaattgcacaatggcagagtctcaagctagaagctggcatcaatcagttgtcctttcccctctcatcagagcccattcagggctcctacagggtggtggtacagacagaatcaggtggaaggatacagcaccccttcaccgtggaggaatttgtgcttcccaagtttgaggtcaaagttcaggtgccaaagataatcagtatcatggatgaaaaagtgaacataacagtctgtggagaatacacttatgggaagcctgtcccaggacttgcaactgtgagcctgtgtagaaaattatctcgtgttcttaattgtgacaagcaggaggtctgtgaggaattcagtcaacagcttaacagcaatggctgcatcacccaacaagtacacaccaaaatgctccagattacaaatacgggctttgaaatgaagcttagagtggaagccaggatcagagaagaggggacagacctggaagtcactgcaaacaggatcagtgaaatcacaaacattgtatccaaactcaaattcgtgaaagtggattcacactttagacaaggaatccccttttttgcacaggtgcttctggtggatggaaaaggtgtgcccatccccaataaactcttcttcatctctgtgaatgacgccaattattactccaatgcaaccaccaatgagcagggtcttgcacagttttcaatcaatactaccagtatctcggttaataaactttttgtccgggttttcactgtgcatcccaacttgtgttttcactattcatgggtagcagaagaccaccagggtgctcagcacactgcaaatcgtgttttctccttaagtggaagttacattcacctggagcctgtggctggtaccctgccctgtggccacacggagactatcacggcacactatacactgaatagacaggccatgggagagttatcggagctcagtttccattacctgatcatggctaagggagtcatcgtcagatctggaacccacactctgcctgtggagtcaggagacatgaaaggcagttttgccttatccttccctgtggagtcagacgttgcccccattgcacgaatgttcatctttgccattttaccagatggagaagttgttggagactctgaaaaatttgagattgaaaactgtctagccaacaaggtggatttgagcttcagcccagcacaaagtcccccagcctcacatgcccacctgcaagtagcagctgctccgcagtccctctgtgcccttcgtgctgtggaccaaagtgtgctgctcatgaagcctgaggctgagctctctgtgtcctcagtatataatctgctaactgtgaaggatctcaccaattttcctgacaatgtggaccagcaggaggaagaacaaggacactgtccccgtcctttcttcattcataatggagccatctatgttcccttatcaagtaatgaagcagatatttatagcttcctcaaggggatgggattgaaggtgttcactaactcaaaaatccgaaaaccaaagtcgtgttcagtcatcccttccgtgtctgcaggagcagtaggtcaaggatactatggagcaggtctaggagtagtagagagaccatatgttcctcaattaggcacatataatgtgatacccttaaataatgaacaaagttcagggccagtccctgaaacggtgcgaagctattttcctgagacttggatctgggagttggtggcagtgaactcatcaggtgtggctgaggtaggagtaacagtccctgacaccatcaccgagtggaaggcaggggccttctgcctgtccgaagatgctggacttggtatctcttccactgcctctctccgagccttccagcccttctttgtggagctcacaatgccttactctgtgattcgtggagaggtcttcacactcaaggccacggtcctaaactaccttcccaaatgcatccgggctgaaggtattgagcaagaaaagactttcagttctatgacctgtgcctcaggtgctaatgtgtctgagcagttgtccttgaagctcccatcaaatgtggtcaaagaatctgccagagcttctttctcagttctgggtgacatattaggttctgctatgcaaaatatacaaaatctcctccagatgccatatggctgtggagaacagaacatggtcctatttgctcctaacatctatgtcttgaactatctgaatgaaacccagcagctgacgcaggagatcaaggccaaggccgttggctatctcatcactggttaccagagacagctgaactacaaacaccaagatggctcctacagcacctttggggaacgatatggcaggaaccagggcaacacttggctcacagcttttgtactgaagactttcgcccaggctcgatcctacatcttcattgatgaagcacacattacccaatctctcacgtggctctcccagatgcagaaggacaatggctgtttcaggagctctgggtcactgctcaacaatgccataaagggaggtgtagaagatgaagcgaccctctccgcctatgttactattgcccttctggaaattcctctcccagtcactaaccctattgttcgcaatgccctgttctgcctggagtcagcctggaatgtagcaaaggaggggacccatgggagccatgtctacaccaaggcattgctggcctatgctttttccctactgggaaagcaaaatcagaatagagaaatactgaactcacttgataaggaagctgtgaaagaagacaacctcgtccattgggagcgccctcagagacccaaggcaccagtggggcatctttaccaaacccaggctccctctgctgaggtggagatgacatcctatgtgctcctcgcttatctcacggcccagccagcccccacctcaggggacctgacctctgcaactaacattgtgaagtggatcatgaagcagcagaacgcccaaggtggtttctcctccacccaggacacagtggtggctctccatgccctgtccaggtatggagcagccactttcaccagaactgagaaaactgcacaggtcaccgttcaggattcacagaccttttctacaaatttccaagtagacaacaacaacctcctattactgcagcagatctcattgccagagctccctggagaatatgtcataacagtaactggggaaagatgtgtgtatcttcagacatccatgaaatacaatattcttccagagaaagaggactccccatttgctttaaaagtgcagactgtgccccaaacttgcgatggacacaaagcccacaccagctttcagatctcactgaccatcagttacacaggaaaccgtcctgcttccaatatggtgattgttgatgtaaagatggtatctggttttattcccctgaaaccaacagtaaaaatgcttgaaagatctagctctgtgagccggacagaagtgagcaacaaccatgtcctcatttatgtggaacaggtgacaaatcagacgctaagtttttccttcatggttctgcaagacatcccagtaggagacttgaagccagcaattgttaaagtctatgattactatgagacagatgagtctgtggttgctgagtatatcgccccctgcagcacagatacagagcatggaaatgtttgaggaccatacaggctgtatattttggtggattctctgtcctatacatttacttagaaggaatggagttatttgtctctataaaatagacactaaaaatatttgctgaataaatatgtacttctggtcaaact

SEQ ID NO: 313715 - DNA, 3807 bp, Artificial Sequence
  derived and/or modified sequence
atgagcgagagctaccgtcgcacaactttccccgtacggtttagggttgtgagcgtcgatgagaacttccgccctcgaaatgaactgatccctctgatttacttggagaaccccaggagaaatcgtatagctcagtggcaaagcctgaaactggaagctggtatcaaccagttgtctttccccctgtcttctgagcctatccagggctcttatagggtggtcgtgcagacggaatccggtggacgtattcagcacccatttacagtggaagaattcgttctgccgaagttcgaggtgaaagttcaagtgcctaaaatcatcagtattatggacgagaaggtgaacatcactgtgtgtggagaatatacctacgggaagcccgtccccggactggcaactgtgtccctatgccgcaagctctccagggttttgaactgcgataagcaggaagtatgcgaggagttcagtcagcagttgaatagtaatggatgtattacgcaacaagtgcacactaagatgctgcaaatcacaaacaccggatttgagatgaagcttagagtggaggctagaatccgggaggagggaacagatttagaagtcaccgccaatcgtatttctgagatcacaaatattgtgagcaagttgaagttcgtaaaggtagatagtcactttcggcaaggtatacctttctttgcacaagtgctgctagtggatggaaaaggagtcccaatacccaacaagctcttttttatatccgtgaatgatgctaactactactccaacgccaccacaaatgaacagggcctggcccagtttagtatcaacaccactagtatatccgtgaataaactgttcgtccgcgtattcacggtgcatcccaatctgtgttttcactattcgtgggtggccgaagaccaccagggtgcgcagcacactgccaatcgtgtgttctcactgagcgggtcctacatccatttggagccagtcgctggtaccctcccctgcggccacaccgagactattaccgcacattataccttaaacaggcaggcaatgggagagctgtccgaactgtcatttcattacctcatcatggctaagggggtgatagtgcggagtggcactcacacactgcctgttgagtcaggagacatgaagggtagtttcgctctttccttccctgtggagtccgatgttgcacctatagccagaatgttcatttttgcaattttgcccgatggtgaagtggtcggagatagcgagaagttcgaaattgagaactgcctggccaacaaggtggacctttctttcagcccagctcagtccccacccgctagtcacgcccacctgcaggtggccgctgcccctcaatctctgtgtgccctgcgtgcagtcgatcagagcgtccttctgatgaagccagaggccgagctctcagtcagtagcgtctataacctgctcacggtcaaggacctgaccaactttccagataacgtggaccaacaggaggaggagcagggtcactgcccacggccatttttcatacataatggtgccatctatgtgcctctttcctcgaatgaagcggatatttactcctttttaaaaggcatgggactcaaggtttttactaattctaagattagaaagccgaaatcctgctctgtgatcccaagcgtgtctgccggtgctgttgggcagggttactacggagcaggtctgggcgtagtggagagaccatatgtgccacaactgggcacctataacgttattcccctgaacaatgaacagtctagcggccctgtcccggagacagtacgctcttacttccccgagacctggatctgggagttggtggccgtcaatagctctggtgtggctgaggtgggcgtgacggtacccgatactatcactgagtggaaagccggagccttctgcctctctgaagatgcgggactcggcatctcgtcaacggccagcctccgtgcctttcagccttttttcgtggagttgacaatgccttattcggtgattcggggagaagtgtttacgttgaaggcgacagttctgaactacctgccgaaatgtattcgcgcagaaggcattgaacaggaaaaaaccttcagttctatgacttgtgcgagtggggcaaatgtgagcgagcagctcagcctgaagttacctagcaacgtcgttaaagagagcgcacgagccagcttttctgttctgggcgacatcctgggatccgctatgcaaaatatacagaatcttctgcagatgccttacggatgtggagaacagaacatggtgctgtttgccccaaatatctacgtactcaattatctcaacgaaactcagcaattgacccaggagattaaggcaaaagccgtaggataccttatcactggctaccaaaggcagcttaattacaagcaccaggatgggtcttatagcacattcggcgagcgatatgggaggaaccagggtaatacttggctcaccgcctttgtgctaaagacatttgcgcaggccaggagttacatcttcattgacgaggcacacattactcagagcctcacatggctgagtcagatgcagaaggacaatggctgctttagaagttcaggcagcttgctgaataacgcaattaagggcggtgtagaagacgaagccaccctcagtgcgtatgtgactatcgctctcttggagataccgctgccagttacaaatccaatcgtacggaacgctctcttctgcctggagagcgcatggaacgtggccaaagagggtacccacggtagtcatgtgtatactaaagcactgctggcttatgcatttagcctccttggcaagcagaatcagaaccgggagatcctgaattcgctggataaggaggccgtcaaggaagacaacctggttcactgggaacgtcctcagcggcctaaggccccagtgggtcatctatatcagactcaggccccttccgccgaggtagagatgacttcatacgtactgctggcctatctgactgctcaacccgctcccacgagcggggatctgacctctgccaccaatatcgttaaatggatcatgaagcagcagaacgcccagggcggattcagctcaactcaggatacagttgttgccctccatgccctcagccggtatggtgccgctacttttactcgcaccgaaaagaccgcgcaggtcaccgtgcaggactcccagaccttcagcactaacttccaagtggataataataatctcttactccttcagcagatctccctgccggaattgcctggggagtacgtgattacagtgacaggcgagagatgtgtttacctgcaaacttcaatgaaatacaacatactccccgagaaagaggatagcccctttgctctgaaagtccagaccgtgccacagacctgcgacgggcataaggcccacacttcttttcagatctcactcaccattagctacacgggaaatagacccgcttctaatatggtgatcgtcgacgttaagatggtctccggattcatccctctgaaacctaccgtgaagatgctggagcgctcgtcaagcgttagcaggaccgaggtttccaataaccacgtactgatttacgtggagcaggtgacaaaccaaacactctctttttctttcatggtcctccaggacatccctgtgggagacctaaaaccagctattgttaaggtctacgattactacgagacagacgagagtgttgtggcagaatacatcgccccttgttctaccgacacagagcatggcaacgtgtag

SEQ ID NO: 313716 - DNA, 3807 bp, Artificial Sequence
  derived and/or modified sequence
atgagcgagagctacagaagaaccaccttccccgtgagattcagagtggtgagcgtggacgagaacttcagacccagaaacgagctgatccccctgatctacctggagaaccccagaagaaacagaatcgcccagtggcagagcctgaagctggaggccggcatcaaccagctgagcttccccctgagcagcgagcccatccagggcagctacagagtggtggtgcagaccgagagcggcggcagaatccagcaccccttcaccgtggaggagttcgtgctgcccaagttcgaggtgaaggtgcaggtgcccaagatcatcagcatcatggacgagaaggtgaacatcaccgtgtgcggcgagtacacctacggcaagcccgtgcccggcctggccaccgtgagcctgtgcagaaagctgagcagagtgctgaactgcgacaagcaggaggtgtgcgaggagttcagccagcagctgaacagcaacggctgcatcacccagcaggtgcacaccaagatgctgcagatcaccaacaccggcttcgagatgaagctgagagtggaggccagaatcagagaggagggcaccgacctggaggtgaccgccaacagaatcagcgagatcaccaacatcgtgagcaagctgaagttcgtgaaggtggacagccacttcagacagggcatccccttcttcgcccaggtgctgctggtggacggcaagggcgtgcccatccccaacaagctgttcttcatcagcgtgaacgacgccaactactacagcaacgccaccaccaacgagcagggcctggcccagttcagcatcaacaccaccagcatcagcgtgaacaagctgttcgtgagagtgttcaccgtgcaccccaacctgtgcttccactacagctgggtggccgaggaccaccagggcgcccagcacaccgccaacagagtgttcagcctgagcggcagctacatccacctggagcccgtggccggcaccctgccctgcggccacaccgagaccatcaccgcccactacaccctgaacagacaggccatgggcgagctgagcgagctgagcttccactacctgatcatggccaagggcgtgatcgtgagaagcggcacccacaccctgcccgtggagagcggcgacatgaagggcagcttcgccctgagcttccccgtggagagcgacgtggcccccatcgccagaatgttcatcttcgccatcctgcccgacggcgaggtggtgggcgacagcgagaagttcgagatcgagaactgcctggccaacaaggtggacctgagcttcagccccgcccagagcccccccgccagccacgcccacctgcaggtggccgccgccccccagagcctgtgcgccctgagagccgtggaccagagcgtgctgctgatgaagcccgaggccgagctgagcgtgagcagcgtgtacaacctgctgaccgtgaaggacctgaccaacttccccgacaacgtggaccagcaggaggaggagcagggccactgccccagacccttcttcatccacaacggcgccatctacgtgcccctgagcagcaacgaggccgacatctacagcttcctgaagggcatgggcctgaaggtgttcaccaacagcaagatcagaaagcccaagagctgcagcgtgatccccagcgtgagcgccggcgccgtgggccagggctactacggcgccggcctgggcgtggtggagagaccctacgtgccccagctgggcacctacaacgtgatccccctgaacaacgagcagagcagcggccccgtgcccgagaccgtgagaagctacttccccgagacctggatctgggagctggtggccgtgaacagcagcggcgtggccgaggtgggcgtgaccgtgcccgacaccatcaccgagtggaaggccggcgccttctgcctgagcgaggacgccggcctgggcatcagcagcaccgccagcctgagagccttccagcccttcttcgtggagctgaccatgccctacagcgtgatcagaggcgaggtgttcaccctgaaggccaccgtgctgaactacctgcccaagtgcatcagagccgagggcatcgagcaggagaagaccttcagcagcatgacctgcgccagcggcgccaacgtgagcgagcagctgagcctgaagctgcccagcaacgtggtgaaggagagcgccagagccagcttcagcgtgctgggcgacatcctgggcagcgccatgcagaacatccagaacctgctgcagatgccctacggctgcggcgagcagaacatggtgctgttcgcccccaacatctacgtgctgaactacctgaacgagacccagcagctgacccaggagatcaaggccaaggccgtgggctacctgatcaccggctaccagagacagctgaactacaagcaccaggacggcagctacagcaccttcggcgagagatacggcagaaaccagggcaacacctggctgaccgccttcgtgctgaagaccttcgcccaggccagaagctacatcttcatcgacgaggcccacatcacccagagcctgacctggctgagccagatgcagaaggacaacggctgcttcagaagcagcggcagcctgctgaacaacgccatcaagggcggcgtggaggacgaggccaccctgagcgcctacgtgaccatcgccctgctggagatccccctgcccgtgaccaaccccatcgtgagaaacgccctgttctgcctggagagcgcctggaacgtggccaaggagggcacccacggcagccacgtgtacaccaaggccctgctggcctacgccttcagcctgctgggcaagcagaaccagaacagagagatcctgaacagcctggacaaggaggccgtgaaggaggacaacctggtgcactgggagagaccccagagacccaaggcccccgtgggccacctgtaccagacccaggcccccagcgccgaggtggagatgaccagctacgtgctgctggcctacctgaccgcccagcccgcccccaccagcggcgacctgaccagcgccaccaacatcgtgaagtggatcatgaagcagcagaacgcccagggcggcttcagcagcacccaggacaccgtggtggccctgcacgccctgagcagatacggcgccgccaccttcaccagaaccgagaagaccgcccaggtgaccgtgcaggacagccagaccttcagcaccaacttccaggtggacaacaacaacctgctgctgctgcagcagatcagcctgcccgagctgcccggcgagtacgtgatcaccgtgaccggcgagagatgcgtgtacctgcagaccagcatgaagtacaacatcctgcccgagaaggaggacagccccttcgccctgaaggtgcagaccgtgccccagacctgcgacggccacaaggcccacaccagcttccagatcagcctgaccatcagctacaccggcaacagacccgccagcaacatggtgatcgtggacgtgaagatggtgagcggcttcatccccctgaagcccaccgtgaagatgctggagagaagcagcagcgtgagcagaaccgaggtgagcaacaaccacgtgctgatctacgtggagcaggtgaccaaccagaccctgagcttcagcttcatggtgctgcaggacatccccgtgggcgacctgaagcccgccatcgtgaaggtgtacgactactacgagaccgacgagagcgtggtggccgagtacatcgccccctgcagcaccgacaccgagcacggcaacgtgtag

SEQ ID NO: 313717 - protein, 398 aa, Artificial Sequence
  derived and/or modified sequence
MASPLRSAAALARQDCSNGCSAECTGEGGSKEVVGTFKAKDLIVTPATILKEKPDPNNLVFGTVFTDHMLTVEWSSEFGWEKPHIKPLQNLSLHPGSSALHYAVELFEGLKAFRGVDNKIRLFQPNLNMDRMYRSAVRATLPVFDKEELLECIQQLVKLDQEWVPYSTSASLYIRPTFIGTEPSLGVKKPTKALLFVLLSPVGPYFSSGTFNPVSLWANPKYVRAWKGGTGDCKMGGNYGSSLFAQCEAVDNGCQQVLWLYGEDHQITEVGTMNLFLYWINEDGEEELATPPLDGIILPGVTRRCILDLAHQWGEFKVSERYLTMDDLTTALEGNRVREMFGSGTACVVCPVSDILYKGETIHIPTMENGPKLASRILSKLTDIQYGREESDWTIVLS

SEQ ID NO: 313718 - DNA, 1197 bp, Artificial Sequence
  derived and/or modified sequence
atggccagccccctaagaagtgccgcagcacttgcgcgccaggactgtagtaatggctgcagcgctgaatgtacgggcgaagggggctcaaaggaagttgtcggcactttcaaagccaaggacctgattgttaccccagccactatcctgaaagaaaaacccgaccctaataatctcgttttcggtaccgtcttcacagaccatatgctgaccgttgagtggtcttccgagtttggatgggagaagcctcatatcaaacctcttcagaatctctctctgcacccgggaagcagcgccttgcactacgcggtggaactcttcgaggggctgaaagcattccggggggttgacaacaaaatacgcctgttccagccaaatttaaacatggaccggatgtatagatcagccgtgagagcgaccctccccgtgttcgataaggaggagctgctcgagtgtatccaacaactggtgaagcttgatcaagagtgggtgccttactccacatcagcatccttatatatcaggccaacttttatagggacagaaccttccctcggcgtcaagaagccgacaaaggccctgttatttgtgttgctgtcacccgtcggtccctacttttcgtctggaaccttcaatcccgtgtctctgtgggcgaatccgaaatacgtgcgggcgtggaagggcgggactggggattgcaaaatgggcggaaactacgggtctagcctgtttgctcagtgcgaagcggttgataacggctgccagcaggtcttgtggctatatggcgaagaccatcagatcacggaagtggggacgatgaatttatttttgtactggatcaatgaagatggcgaagaggagctagcaacaccccccctagatggaatcattctccccggagtcacaaggcggtgcattctcgatctggctcaccagtggggcgaattcaaggtcagtgagaggtatctgacaatggatgacctgacaacagcgctggaaggaaatcgggttcgggaaatgttcggcagtgggactgcctgcgtagtgtgtcctgtctcagatatcctgtacaaaggagagactatacatattccgacaatggagaacggtcctaagctggcaagtagaatcctatcaaaactgacagatatacagtatgggcgtgaggagagcgactggaccattgtcctctcttag

SEQ ID NO: 313719 - DNA, 1197 bp, Artificial Sequence
  derived and/or modified sequence
atggccagccccctgcggtctgctgctgccctggcccggcaggactgcagcaatggctgcagcgcagaatgtactggagagggcggcagcaaggaggtggtgggcaccttcaaggccaaggacctgattgtgaccccagccaccatcctgaaggagaagccagaccccaacaacctggtgtttggaacagtgttcacagaccacatgctgactgtggagtggagcagcgagtttggctgggagaagccccacatcaagcccctgcagaacctgagcctgcaccctggcagcagcgccctgcactatgctgtggagctgtttgagggcctgaaggccttccggggcgtggacaacaagatccgcctcttccagcccaacctgaacatggacaggatgtacagatctgctgtgcgggccaccctgcctgtgtttgacaaggaggagctgctggagtgcatccagcagctggtgaagctggaccaggagtgggtgccctacagcaccagcgccagcctgtacatccggcccaccttcatcggcacagagcccagcctgggcgtgaagaagcccaccaaggccctgctgtttgtgctgctgagccctgtgggcccctacttcagcagcggcaccttcaaccctgtgtccctgtgggccaaccccaagtatgtgcgggcctggaagggcggcaccggggactgcaagatgggcggcaactacggcagcagcctgtttgcccagtgtgaggccgtggacaatggctgccagcaggtgctgtggctgtatggagaggaccaccagatcacagaggtgggcaccatgaacctcttcctgtactggatcaatgaagatggagaggaggagctggccaccccacccctggatggcatcatcctgcccggggtgacccggcgctgcatcctggacctggcccaccagtggggcgagttcaaggtgtctgagcgctacctgaccatggatgacctgaccacagccctggagggcaacagagtgcgggagatgtttggaagtggcacagcctgtgtggtgtgccctgtgtctgacatcctgtacaagggggagaccatccacatccccaccatggagaatggccccaagctggccagccgcatcctgagcaagctgacagacatccagtatggccgggaggagagtgactggaccatcgtgctgtcctag

SEQ ID NO: 313720 - DNA, 1197 bp, Artificial Sequence
  derived and/or modified sequence
atggccagccccctgcggagcgccgccgccctggcccggcaggactgttcaaatggatgctctgccgaatgtaccggggagggcggatctaaagaggtggtcggcaccttcaaggctaaggatctaatcgtaacccccgcaacaatcctcaaggagaaacccgatcctaataatttagtgtttgggacagttttcaccgaccatatgctgacagtagagtggagctctgaattcggctgggaaaagccccatattaagcccctgcagaatttgagtctgcaccctggatctagcgctcttcactatgccgttgagttgttcgaaggcctgaaggcttttcgaggagttgataacaagattaggctgttccagcccaacctaaatatggatcgtatgtatcggagcgcggtgcgtgctactctccccgttttcgataaagaggaactgctggagtgcatccagcagctcgtcaagctcgaccaggaatgggtcccatatagcactagtgcctcgctttacataaggcccactttcatcgggaccgaaccctctcttggcgtcaaaaagcctacaaaggccctcctgttcgtcctgctgagccctgtcggcccttatttcagttccgggacatttaatccggtctccctgtgggctaacccaaagtacgtgcgagcctggaaaggcggaacgggcgactgcaaaatgggagggaactacggtagcagtctctttgctcaatgcgaggccgttgacaacggctgccagcaggtgctttggctgtatggggaagaccatcagattacggaagtggggacgatgaacctcttcttatactggattaatgaggatggggaagaggaattggccacccctccactcgatggcattatattgccgggtgtaacaagacggtgcattttggatctggcccaccagtggggggagttcaaagttagtgagcgctacttaactatggatgatctgactacagcactggaagggaaccgggtacgggaaatgtttggctcaggaacagcttgtgtggtgtgccccgtctcggatatcctgtacaagggggagactatccacattcccacaatggaaaacgggcctaaactcgctagtagaatcctcagtaaacttaccgacattcagtatggccgggaggagtctgactggactattgttcttagctag

SEQ ID NO: 313721 - DNA, 1197 bp, Artificial Sequence
  derived and/or modified sequence
atggcctcccccctcaggtccgctgctgctctggctcgtcaggactgttcgaatggatgcagcgcggaatgcactggagaggggggatctaaagaggttgtgggcacctttaaggctaaagatctcatcgtcacccctgcaaccatcctgaaagaaaaacccgatccgaataatctggtgtttggtacagtattcacagaccatatgcttacagtcgagtggtcgtcggaatttgggtgggagaaaccccacatcaagccattgcagaatctgagcctgcatcctggctcctctgctctccactacgcagtcgaattatttgaaggccttaaagcattcagaggagttgacaacaaaatacggctgttccagccaaacctgaacatggacaggatgtatcggagcgccgtccgagccacactgcctgtgttcgacaaggaagaactcctggagtgtatccagcaactagtcaaattggaccaggagtgggtgccatattctacttctgcttccctgtatattcggccaacattcatcggaacagaaccaagtctaggtgttaagaaacccactaaagctttgctgtttgtcctcctttctcctgttggcccatattttagtagcggaacatttaatcctgtttcgttgtgggccaacccgaaatacgtacgggcttggaaaggtgggactggggactgtaagatgggaggaaactatggctcttctttatttgcacagtgtgaggcagtggacaatggctgccaacaggtactgtggttatacggtgaggatcaccaaatcacggaagtcggaaccatgaatcttttcttgtactggataaatgaagacggcgaagaggagttggcaaccccacctttggacggaattattctgcctggggtgacacggcgttgcatcttggatcttgcacaccaatggggagagtttaaagtgtccgaaaggtacctgacgatggatgatctgactacggcgcttgaggggaaccgggttagggaaatgtttggttctgggaccgcttgcgttgtttgtccggtgtccgacatcctgtataagggcgaaactattcatattccaacaatggaaaacgggccaaagttagcctcccgaattctctccaagcttaccgatattcaatatggtcgggaggaatccgactggaccattgtcctgtcctag

SEQ ID NO: 313722 - DNA, 1811 bp, Artificial Sequence
  derived and/or modified sequence
gcttggccacaccgcctgctttcgcttccagccgcgcgctccgtgccactgccgctctctgcagccccgcgtccccgcagcctccccatggccagcccgcttcgctccgctgcggcccttgcccgccaggattgcagtaacggatgctccgcagagtgtaccggagaaggaggatcaaaagaggtggtggggacttttaaggctaaagacctaatagtcacaccagctaccattttaaaggaaaaaccagaccccaataatctggtttttggaactgtgttcacggatcatatgctgacggtggagtggtcctcagagtttggatgggagaaacctcatatcaagcctcttcagaacctgtcattgcaccctggctcatcagctttgcactatgcagtggaattatttgaaggattgaaggcatttcgaggagtagataataaaattcgactgtttcagccaaacctcaacatggatagaatgtatcgctctgctgtgagggcaactctgccggtatttgacaaagaagagctcttagagtgtattcaacagcttgtgaaattggatcaagaatgggtcccatattcaacatctgctagtctgtatattcgtcctacattcattggaactgagccttctcttggagtcaagaagcctaccaaagccctgctctttgtactcttgagcccagtgggaccttatttttcaagtggaacctttaatccagtgtccctgtgggccaatcccaagtatgtaagagcctggaaaggtggaactggggactgcaagatgggagggaattacggctcatctctttttgcccaatgtgaagcagtagataatgggtgtcagcaggtcctgtggctctatggagaggaccatcagatcactgaagtgggaactatgaatctttttctttactggataaatgaagatggagaagaagaactggcaactcctccactagatggcatcattcttccaggagtgacaaggcggtgcattctggacctggcacatcagtggggtgaatttaaggtgtcagagagatacctcaccatggatgacttgacaacagccctggaggggaacagagtgagagagatgtttggctctggtacagcctgtgttgtttgcccagtttctgatatactgtacaaaggcgagacaatacacattccaactatggagaatggtcctaagctggcaagccgcatcttgagcaaattaactgatatccagtatggaagagaagagagcgactggacaattgtgctatcctgaatggaaaatagaggatacaatggaaaatagaggataccaactgtatgctactgggacagactgttgcatttgaattgtgatagatttctttggctacctgtgcataatgtagtttgtagtatcaatgtgttacaagagtgattgtttcttcatgccagagaaaatgaattgcaatcatcaaatggtgtttcataacttggtagtagtaacttaccttaccttacctagaaaaacattaatgtaagccatataacatgggattttcctcaatgattttagtgcctccttttgtacttcactcagatactaaatagtagtttattctttaatataagttacattctgctcctcaaacaaatgcaattttttgtgtgtgtttgaaagctaatttgagaaaatttcataggttacatttcctgcagcctatctttatccacagaaagtgttttcttttttttaaatcaagacttttaaaactggatttcctcccatcactgttttttgaaggtcctccaagtccgtgttaa

SEQ ID NO: 313723 - DNA, 1197 bp, Artificial Sequence
  derived and/or modified sequence
atggccagccccctgagaagcgccgccgccctggccagacaggactgcagcaacggctgcagcgccgagtgcaccggcgagggcggcagcaaggaggtggtgggcaccttcaaggccaaggacctgatcgtgacccccgccaccatcctgaaggagaagcccgaccccaacaacctggtgttcggcaccgtgttcaccgaccacatgctgaccgtggagtggagcagcgagttcggctgggagaagccccacatcaagcccctgcagaacctgagcctgcaccccggcagcagcgccctgcactacgccgtggagctgttcgagggcctgaaggccttcagaggcgtggacaacaagatcagactgttccagcccaacctgaacatggacagaatgtacagaagcgccgtgagagccaccctgcccgtgttcgacaaggaggagctgctggagtgcatccagcagctggtgaagctggaccaggagtgggtgccctacagcaccagcgccagcctgtacatcagacccaccttcatcggcaccgagcccagcctgggcgtgaagaagcccaccaaggccctgctgttcgtgctgctgagccccgtgggcccctacttcagcagcggcaccttcaaccccgtgagcctgtgggccaaccccaagtacgtgagagcctggaagggcggcaccggcgactgcaagatgggcggcaactacggcagcagcctgttcgcccagtgcgaggccgtggacaacggctgccagcaggtgctgtggctgtacggcgaggaccaccagatcaccgaggtgggcaccatgaacctgttcctgtactggatcaacgaggacggcgaggaggagctggccaccccccccctggacggcatcatcctgcccggcgtgaccagaagatgcatcctggacctggcccaccagtggggcgagttcaaggtgagcgagagatacctgaccatggacgacctgaccaccgccctggagggcaacagagtgagagagatgttcggcagcggcaccgcctgcgtggtgtgccccgtgagcgacatcctgtacaagggcgagaccatccacatccccaccatggagaacggccccaagctggccagcagaatcctgagcaagctgaccgacatccagtacggcagagaggagagcgactggaccatcgtgctgagctag

SEQ ID NO: 313724 - DNA, 3194 bp, Artificial Sequence
  derived and/or modified sequence
tttccttctccctttccccgccagcttcgcatccatctcccccaccccgtaaccccctcctgcctccatccaccggggctatggccgcagaagaggtattgcagacggtggaccattataagactgagatagagaggctaaccaaggagctcacggagaccacccacgagaagatccaggctgccgagtacgggctggtggtgctggaggagaagctgaccctcaaacagcagtatgatgaactggaggctgagtacgacagcctcaaacaggagctggagcagctcaaagaggcatttgggcagtccttctccatccaccggaaggttgctgaagatggagagactcgggaggaaacgcttctgcaggagtcagcatcgaaggaggcttactatctggggaagatcttggagatgcagaacgagctgaaacagagccgggctgtggtcactaatgtacaggcagaaaacgagaggctcaccgcagtcgtgcaggatctgaaggagaacaatgagatggtggagctacagagaatacggatgaaggatgaaatccgagaatataagttccgggaggcacggctccttcaggactatactgaattggaagaagaaaatatcacattgcagaaactagtgtccacgttgaagcagaaccaggttgaatacgaaggcttaaagcatgagattaagcgatttgaggaggagacggtactgctgaacagccagctggaagatgccatccgattgaaagagattgctgagcaccaactggaagaagccctcgagactttaaaaaatgaaagagagcaaaagaacaacctgcggaaggagctctcccagtatatcagcctcaatgataaccatatcagcatctcagtagatggactcaaatttgccgaggatgggagtgaaccaaacaatgatgacaaaatgaacggtcatatccatgggcctcttgtgaaactgaatggagactatcggactcccaccttaaggaaaggagagtctctgaaccctgtctctgacttattcagtgagctgaacatttcagaaatacagaagttgaagcagcagcttatgcaggtagagcgggaaaaggccattcttttggccaacctacaggagtcacagacacagctggaacacaccaagggggcactgacggagcagcatgagcgggtgcaccggctcacagagcacgtcaatgccatgaggggcctgcaaagcagcaaggagctcaaggctgagctggacggggagaagggccgggactcaggggaggaggcccatgactatgaggtggacatcaatggtttagagatccttgaatgcaaatacagggtggcagtaactgaggtgattgatctgaaagctgaaattaaggccttaaaggagaaatataataaatctgtagaaaactacactgatgagaaggccaagtatgagagtaaaatccagatgtatgatgagcaggtgacaagccttgagaagaccaccaaggagagtggtgagaagatggcccacatggagaaggagttgcaaaagatgaccagcatagccaacgaaaatcacagtacccttaatacggcccaggatgagttagtgacattcagtgaggagttagctcagctttaccaccatgtgtgtctatgtaataatgaaactcccaacagggtcatgctggattactataggcagagcagagtcacccgcagtggcagcctgaaagggcccgatgatcccagaggacttttgtccccacgattagccaggcggggtgtgtcatccccggtagaaacaaggacctcatctgaaccagttgcaaaagaaagcacagaggccagcaaagaaccaagtccaactaagacccccacaatctctcctgttattactgccccaccgtcatctccagtattggatacaagtgacatccgcaaagagccaatgaatatctacaaccttaatgccataatccgggaccaaatcaagcatctgcagaaagctgtggaccggtccttgcaactgtctcgtcaaagagcagcggctcgggagctagcccccatgattgataaagacaaggaagccttaatggaagagatcctcaagctaaagtccctgctgagcaccaaacgggagcagatcgccacattgagggcggtgttgaaagccaacaagcagacagctgaggtggcgctagctaatctcaagaacaaatatgaaaatgaaaaagcaatggtgactgaaaccatgacgaagcttagaaatgaactgaaggctttgaaagaagatgctgcaaccttctcatccctgagagcaatgtttgcaacaagatgtgatgaatatgtcacccagttggatgagatgcagagacagttagcagctgcagaggatgagaagaagactctgaacactttgttacgaatggctatccagcaaaaactcgccctgacccagaggctggaggacttagagtttgaccatgagcagtcccgacgcagcaaaggcaaacttggaaagagcaagatcggcagccctaaaacaattttcaccttccctttgtgatcagagccgtcccaggacttcaggggcttcctacctacagaatttattaagagttccccctgatcccacctccacagaatcatttcttctgaagggccccccttccatgagtgaattcatccaagggcaccggctcagcaaggaaaaaaggttaaccgtggctccaccagattgtcagcagcctgctgcctccgtaccgccacagtgctcacaactagccgggaggcaagactgcccaactgtcagtcctgacacagctctccctgaggagcagccacattccagctcccagtgcgcccctctccactgtctctccaagcctcctcacccctagtcttcatctcctgtggacgaacatctggggtggaagttttgtagccacacacaggatactgcccaagatccagcgggtgttttcttctcggttgttagatgtacaattggattaatgtccatcgttttggaagacgagagaaagttgagaagaacacgaagcacagaccctgatgtgataaaacattttgtggtttctctgagtcacagataaacttctgccatcaaatggctacagttcatttaaatttaaaaaaaagaaaaaagaaacagaaaacgtgtctcagatggctggct

SEQ ID NO: 313725 - protein, 579 aa, Artificial Sequence
  derived and/or modified sequence
MFLTKNCKQEQERVESAKMFLLAITCAFVSKTLSGSYMNSMLTQIERQFNIPTSLVGFINGSFEIGNLLLIIFVSYFGTKLHRPIMIGIGCVVMGLGCFLKSLPHFLMNQYEYESTVSVSGNLSSNSFLCMENGTQILRPTQDPSECTKEVKSLMWVYVLVGNIVRGMGETPILPLGISYIEDFAKFENSPLYIGLVETGAIIGPLIGLLLASFCANVYVDTGFVNTDDLIITPTDTRWVGAWWFGFLICAGVNVLTAIPFFFLPNTLPKEGLETNADIIKNENEDKQKEEVKKEKYGITKDFLPFMKSLSCNPIYMLFILVSVIQFNAFVNMISFMPKYLEQQYGISSSDAIFLMGIYNLPPICIGYIIGGLIMKKFKITVKQAAHIGCWLSLLEYLLYFLSFLMTCENSSVVGINTSYEGIPQDLYVENDIFADCNVDCNCPSKIWDPVCGNNGLSYLSACLAGCETSIGTGINMVFQNCSCIQTSGNSSAVLGLCDKGPDCSLMLQYFLILSAMSSFIYSLAAIPGYMVLLRCMKSEEKSLGVGLHTFCTRVFGKNSYFFPHPIRTILLLLFFITL

SEQ ID NO: 313726 - DNA, 1740 bp, Artificial Sequence
  derived and/or modified sequence
atgttcctgaccaagaactgcaagcaggagcaggagagagtggagagcgccaagatgttcctgctggccatcacctgcgccttcgtgagcaagaccctgagcggcagctacatgaacagcatgctgacccagatcgagagacagttcaacatccccaccagcctggtgggcttcatcaacggcagcttcgagatcggcaacctgctgctgatcatcttcgtgagctacttcggcaccaagctgcacagacccatcatgatcggcatcggctgcgtggtgatgggcctgggctgcttcctgaagagcctgccccacttcctgatgaaccagtacgagtacgagagcaccgtgagcgtgagcggcaacctgagcagcaacagcttcctgtgcatggagaacggcacccagatcctgagacccacccaggaccccagcgagtgcaccaaggaggtgaagagcctgatgtgggtgtacgtgctggtgggcaacatcgtgagaggcatgggcgagacccccatcctgcccctgggcatcagctacatcgaggacttcgccaagttcgagaacagccccctgtacatcggcctggtggagaccggcgccatcatcggccccctgatcggcctgctgctggccagcttctgcgccaacgtgtacgtggacaccggcttcgtgaacaccgacgacctgatcatcacccccaccgacaccagatgggtgggcgcctggtggttcggcttcctgatctgcgccggcgtgaacgtgctgaccgccatccccttcttcttcctgcccaacaccctgcccaaggagggcctggagaccaacgccgacatcatcaagaacgagaacgaggacaagcagaaggaggaggtgaagaaggagaagtacggcatcaccaaggacttcctgcccttcatgaagagcctgagctgcaaccccatctacatgctgttcatcctggtgagcgtgatccagttcaacgccttcgtgaacatgatcagcttcatgcccaagtacctggagcagcagtacggcatcagcagcagcgacgccatcttcctgatgggcatctacaacctgccccccatctgcatcggctacatcatcggcggcctgatcatgaagaagttcaagatcaccgtgaagcaggccgcccacatcggctgctggctgagcctgctggagtacctgctgtacttcctgagcttcctgatgacctgcgagaacagcagcgtggtgggcatcaacaccagctacgagggcatcccccaggacctgtacgtggagaacgacatcttcgccgactgcaacgtggactgcaactgccccagcaagatctgggaccccgtgtgcggcaacaacggcctgagctacctgagcgcctgcctggccggctgcgagaccagcatcggcaccggcatcaacatggtgttccagaactgcagctgcatccagaccagcggcaacagcagcgccgtgctgggcctgtgcgacaagggccccgactgcagcctgatgctgcagtacttcctgatcctgagcgccatgagcagcttcatctacagcctggccgccatccccggctacatggtgctgctgagatgcatgaagagcgaggagaagagcctgggcgtgggcctgcacaccttctgcaccagagtgttcggcaagaacagctacttcttcccccaccccatcagaaccatcctgctgctgctgttcttcatcaccctgtag

SEQ ID NO: 313727 - DNA, 1740 bp, Artificial Sequence
  derived and/or modified sequence
atgttcttaacgaaaaattgtaagcaagagcaggaacgcgtggaatctgccaaaatgtttctgttggcaatcacatgtgcgtttgtgagtaagaccctgtccggctcgtacatgaatagtatgctgacccagatcgagcggcagttcaacattcccacgtctcttgttggctttattaatggaagtttcgaaataggcaacttactccttatcatatttgtttcatattttggcaccaagctacataggcctattatgatcggaatcggttgcgtcgtgatgggattgggctgtttcctcaaatctctgccccattttttaatgaaccagtacgaatacgagagcactgtctcagtgagtggaaacctgtcaagtaattccttcttgtgcatggagaatggaactcagatcctgcggcctacccaggaccctagtgaatgcacaaaggaggttaaaagtcttatgtgggtgtacgtactggtagggaatatagtgaggggaatgggggagacgcctatcctcccgttagggatctcttatatagaggacttcgccaagttcgagaactcaccactatacatcggccttgtcgagaccggcgcaataatcggccctctgataggcctcctgctcgccagtttttgtgctaatgtgtacgtagataccggttttgtcaacaccgacgacttaatcatcacccccaccgatacccgctgggtgggagcttggtggttcggcttcctcatctgtgccggagtcaatgtcctgaccgctatccccttcttcttcttacctaacaccttgcccaaggagggcctggaaactaatgccgatatcatcaaaaatgagaacgaggataagcagaaggaagaggtcaagaaggagaagtatggtattaccaaagacttcttacccttcatgaagtcgctctcttgtaatcctatatatatgctctttatcctagttagtgtgatccagttcaatgcgtttgtcaatatgatctcatttatgccaaagtatctcgaacagcaatatgggatcagttccagcgacgccatcttcctgatggggatatacaacctgccacctatatgcataggctatatcatcgggggactgattatgaaaaagttcaagattacagtaaagcaggctgctcacatcggttgctggctgtcccttttagagtatctcctttatttcctctccttcctaatgacctgcgaaaacagctctgtcgttggaatcaacacctcctacgaaggcatacctcaggacctgtacgtcgagaacgatatatttgccgactgtaacgtggattgtaattgcccctccaaaatttgggacccggtgtgtggcaataatggtctgagctacctgagtgcctgtctggccggttgcgaaacctccatcggcacagggattaacatggtgtttcaaaactgcagctgcatccagacctcaggaaacagtagcgccgtgctcggcctttgtgataaaggtccagattgcagtttaatgttgcagtacttcctgatattgtccgccatgtcgtcattcatatacagtctggccgctatcccaggatacatggtgcttctcaggtgcatgaagtccgaggagaaatccctcggcgtgggactgcatactttctgcacacgtgtatttggcaagaactcttacttctttccccatccgattcgcactatcttacttctgcttttcttcattaccctctag

SEQ ID NO: 313728 - DNA, 1740 bp, Artificial Sequence
  derived and/or modified sequence
atgttcctgaccaagaactgcaagcaggagcaggagcgggtggagagcgccaagatgttcctgctggccatcacctgtgcctttgtgtccaagaccctgagcggcagctacatgaacagcatgctgacccagatcgagcggcagttcaacatccccaccagcctggtgggcttcatcaatggcagctttgaaattggcaacctgctgctgatcatctttgtgtcctacttcggcaccaagctgcaccggcccatcatgattggaattggctgtgtggtgatgggcctgggctgcttcctgaagagcctgccccacttcctgatgaaccagtatgaatatgagagcacagtgtctgtgtctggcaacctgagcagcaacagcttcctgtgcatggagaatggcacccagatcctgcggcccacccaggaccccagcgagtgcaccaaggaggtgaagagcctgatgtgggtgtatgtgctggtgggcaacatcgtgcggggcatgggagagacccccatcctgcccctgggcatctcctacatcgaggactttgccaagtttgagaacagccccctgtacatcggcctggtggagactggagccatcatcggccccctgattggcctgctgctggccagcttctgtgccaacgtgtatgtggacaccggctttgtgaacacagatgacctgatcatcacccccacagacacccgctgggtgggcgcctggtggtttggcttcctgatctgtgccggcgtgaatgtgctgacagccatccccttcttcttcctgcccaacaccctgcccaaggagggcctggagaccaatgctgacatcatcaagaatgaaaatgaagacaagcagaaggaggaggtgaagaaggagaagtatggcatcaccaaggacttcctgcccttcatgaagagcctgagctgcaaccccatctacatgctgttcatcctggtgtctgtcatccagttcaatgcctttgtgaacatgatctccttcatgcccaagtacctggagcagcagtatggcatcagcagcagtgatgccatcttcctgatgggcatctacaacctgccccccatctgcatcggctacatcatcggcggcctcatcatgaagaagttcaagatcaccgtgaagcaggccgcccacatcggctgctggctgagcctgctggagtacctgctgtacttcctgtccttcctgatgacctgtgagaacagctctgtggtgggcatcaacaccagctatgagggcatcccccaggacctgtatgtggagaatgacatctttgctgactgcaatgtggactgcaactgccccagcaagatctgggaccctgtgtgtggcaacaacggcctgagctacctgagcgcctgcctggccggctgtgagaccagcattggaacaggcatcaacatggtgttccagaactgcagctgcatccagaccagcggcaacagcagcgctgtgctgggcctgtgtgacaagggccctgactgcagcctgatgctgcagtacttcctgatcctgagcgccatgagcagcttcatctacagcctggccgccatccctggctacatggtgctgctgcgctgcatgaagtctgaggagaagagcctgggcgtgggcctgcacaccttctgcaccagggtgtttgggaagaacagctacttcttcccccaccccatccgcaccatcctgctgctgctcttcttcatcaccctgtag

SEQ ID NO: 313729 - DNA, 1740 bp, Artificial Sequence
  derived and/or modified sequence
atgttcctgaccaagaactgcaagcaggagcaggagcgggtggagagcgcaaagatgtttctgctcgcaatcacttgtgctttcgttagtaaaacgttgtccggcagttatatgaacagcatgctgacccaaattgaacgccagttcaacatccccacatcactggtgggctttattaacggttcgttcgaaattgggaatctgctacttatcatatttgtgagctactttggaaccaagcttcacagaccaattatgatcgggatcggttgcgtcgttatgggcttaggatgcttcctcaagagcctgccacacttcttgatgaatcagtacgagtatgaatccaccgtgagtgtttcagggaacctgagctcaaacagctttctgtgtatggagaatggaacacagatcctgcgacctacgcaggacccgtcagagtgcacgaaggaggtgaaaagtctcatgtgggtttatgtgctcgtcggaaatattgtgagaggaatgggggagactcctatactgcccctcggcatctcctatattgaggacttcgccaagtttgaaaattctcccctgtacatcggtttggtcgaaactggtgccatcatcggccctctgattgggcttctgctggccagcttttgcgccaatgtatacgtggacactggattcgttaatacagatgatcttataattacgccaaccgatacccgttgggtgggagcttggtggttcggcttcttgatatgcgccggcgtgaacgtgctgaccgctattccattcttctttttaccaaatacactgccaaaggaaggtttagaaaccaacgcagatatcattaaaaatgaaaacgaagacaaacaaaaggaagaggtgaagaaggagaagtacggcattacaaaagatttcctgccgttcatgaaatcactgtcttgcaaccccatctacatgctgttcattttggtgtccgtgatacagtttaatgctttcgtcaatatgatcagcttcatgccaaagtacctagagcaacagtatggaattagttcaagcgacgcaattttcctgatgggtatttacaatctcccgcctatttgcattggatatataattggaggcctgattatgaaaaaattcaagatcaccgtcaagcaagccgcccacataggctgttggctttccttgctcgagtaccttttatatttccttagctttctgatgacttgcgaaaactcttctgtagtagggatcaacaccagttatgaaggtattccccaggatctatacgtagaaaatgacatttttgctgactgcaatgtcgactgtaattgccctagcaagatctgggatccggtctgcgggaacaacggtctgtcctatctaagcgcctgtctggccggctgcgaaacctctatcgggactggcataaatatggtgtttcagaactgtagctgcatccagacctctggcaattcgtctgctgtgctgggcctgtgcgataagggtcccgactgttctcttatgctccaatacttcctgatcctgtctgccatgtcctcctttatctattcgcttgcagccatccctgggtacatggtccttctgaggtgtatgaaatcagaggagaagagtctcggagtgggtctccacactttttgcacgagagttttcggcaagaactcatactttttcccgcatcccatccgcaccattctgctgttacttttctttattaccctttag

SEQ ID NO: 313730 - DNA, 1740 bp, Artificial Sequence
  derived and/or modified sequence
atgtttcttacaaagaactgcaagcaggagcaggagcgtgtcgagtctgctaagatgttcctgcttgctattacctgcgcctttgtgtctaaaaccctttctggaagctacatgaactctatgcttactcagatcgagaggcagtttaatatccctacttccttggtaggtttcattaacgggtcttttgagatcggaaatctcctgctgataatcttcgtaagttattttggcacgaaacttcaccggccaattatgattggcataggatgtgtggtaatgggactaggctgttttttgaagagtctgccacacttcttaatgaaccaatatgaatatgagtccactgtaagcgtttcgggcaatttgtctagcaattcttttttgtgcatggagaatgggacccagatcctgagacctacgcaggacccttctgagtgtactaaggaggtgaagtcgttgatgtgggtctatgtccttgtcggcaatatcgtccgcggaatgggcgagacccctatcctccccctcggcatctcttacatcgaagattttgccaagtttgaaaactcccccctctatatcggcctggtcgagaccggtgcgataataggtcccctgataggcctcctgctggcgagcttctgcgccaatgtgtacgtcgataccgggtttgtgaatactgacgatctcatcatcactcccacagacacccgctgggtcggtgcctggtggtttggattcttgatatgcgccggtgtgaacgtgctgacagctatcccttttttttttctccctaacactctccctaaggaaggcctggaaactaatgcggacataatcaagaatgaaaatgaggacaaacagaaagaagaggtcaaaaaagagaagtatggcatcactaaagatttcctaccttttatgaaatcactgagctgtaatcctatctatatgttattcattcttgtgtccgtgattcagttcaatgcgtttgttaacatgatttcattcatgcccaaatatctggagcaacaatacggcatctcctcttccgatgctatctttttgatgggcatttataatctcccacccatctgcattggctatattattggcggtctgatcatgaagaagtttaagatcaccgtgaaacaggctgctcatatcggatgttggcttagtcttttggagtacctcctgtacttcctctcattcctgatgacctgcgaaaatagctctgtggtcggcataaacacgagctatgagggaattccccaggacctttacgtggagaacgacatatttgctgattgtaacgtcgactgcaattgtccatccaaaatatgggacccagtgtgtggaaacaacgggttgtcctaccttagtgcttgtctggccggatgcgaaacttccattgggacaggtataaacatggttttccaaaactgtagttgtattcagaccagcggcaatagttctgccgtgcttggcttgtgtgataaaggtcccgattgcagtctgatgttacaatactttctcattctgtccgctatgtcctcattcatctacagcctggccgctattcccggatatatggttctgctccgttgtatgaagagcgaggaaaaatcactcggggtgggactgcatacattctgcaccagagtgttcgggaagaacagctacttttttccgcaccccattaggacgattttgctgttattgttcttcatcacactttag

SEQ ID NO: 313731 - DNA, 1978 bp, Artificial Sequence
  derived and/or modified sequence
gcttggaacaccctgaagagcaacatgggagaaactgagaaaagaattgaaacccatagaataagatgtctttccaagttgaagctgagaaaccctgaaaatactctgtcctgggcttatatgccttagacacaactgggattgctgagctcaagggttgcagagcatcctactatgggaagaatgaggacataactcagattgttctggatatttccctcattgctgagaatgcagaatgtttctgaccaagaattgcaagcaagaacaggaaagagtggagtcggccaagatgtttctgttggcaataacatgtgcatttgtatccaaaacactgtctggatcttatatgaattccatgctcacacaaatagagagacaattcaacatcccaacatctctagttggattcattaatggaagctttgagattggaaatcttttgttgattatatttgtgagttattttggaaccaaactgcatagacctataatgattggcattggatgtgtggttatgggcttaggctgtttcttaaaatcactacctcatttcctcatgaaccaatatgaatatgaatctacagtttcagtttcaggcaacttgtcctcaaacagtttcttgtgtatggaaaatggaacccagattttaagaccaacgcaggatccatcagagtgtacaaaggaagttaaatcattaatgtgggtgtacgtcctagtaggcaatattgtacgtggaatgggtgaaactcccatcctgcctttgggtatttcctatatagaagattttgccaaatttgaaaattctcctttatatattgggcttgtagaaacaggagctattattggtcctttgattggacttttgttggcatcattctgtgcaaatgtttatgttgacactggatttgtgaacacagatgatctgatcataactcccactgacactcgttgggtcggtgcatggtggtttggctttctgatttgtgcaggagttaacgtgctcactgccattccttttttctttttgcccaacacacttccaaaggaaggactagagactaatgctgacatcattaaaaatgaaaatgaagacaaacaaaaagaagaggtcaagaaggaaaaatatggaatcactaaagattttctacctttcatgaaaagtctttcctgcaatccaatttatatgcttttcatacttgtaagtgtgatacagttcaatgcattcgttaacatgatctccttcatgcctaaatacctagaacagcaatatggaatatcatcttcagatgcaatctttctaatgggtatttataacttacctccaatatgtattggatatataattggtggtttaattatgaagaagttcaagattactgtcaaacaagctgcccacataggatgttggttatccttacttgagtatcttctctattttttatcttttctcatgacttgtgaaaattcttcagttgttggaataaatacctcttatgaaggaattccacaagatttatatgtggaaaatgacatctttgctgattgcaatgtggattgcaactgtccatctaaaatatgggatcctgtgtgtggaaacaatggcttgtcatatctgtcagcttgtcttgctggttgtgagacatccattggaacgggaataaacatggtgttccaaaattgcagctgtattcaaacatcaggaaattcatctgcagttcttgggctgtgcgacaaaggacctgactgttccttgatgctccagtacttcctaatcttgtcagcgatgagcagtttcatttattctttggctgccatacctggatatatggttctcttgaggtgtatgaaatctgaagagaagtcccttggtgtgggattacatacattttgcacaagagtatttggtaaaaatagttattttttcccacatcctatcagaacaatattattattattattttttattacactttaa

SEQ ID NO: 313732 - protein, 521 aa, Artificial Sequence
  derived and/or modified sequence
MEQSSLYFWDLLEGSEKAVVGTTYKHLKDLLSKLLNSGYFESIPVPKNAKEKEVPLEEEMLIQSEKKTQLSKTESVKESESLMEFAQPEIQPQEFLNRRYMTEVDYSNKQGEEQPWEADYARKPNLPKRWDMLTEPDGQEKKQESFKSWEASGKHQEVSKPAVSLEQRKQDTSKLRSTLPEEQKKQEISKSKPSPSQWKQDTPKSKAGYVQEEQKKQETPKLWPVQLQKEQDPKKQTPKSWTPSMQSEQNTTKSWTTPMCEEQDSKQPETPKSWENNVESQKHSLTSQSQISPKSWGVATASLIPNDQLLPRKLNTEPKDVPKPVHQPVGSSSTLPKDPVLRKEKLQDLMTQIQGTCNFMQESVLDFDKPSSAIPTSQPPSATPGSPVASKEQNLSSQSDFLQEPLQAAIPPGKQPSSLASPNPPMAKGSEQGFQSPPASSSSVTINTAPFQAMQTVFNVNAPLPPRKEQEIKESPYSPGYNQSFTTASTQTPPQCQLPSIHVEQTVHSQETAPGNHHSTF

SEQ ID NO: 313733 - protein, 377 aa, Artificial Sequence
  derived and/or modified sequence
MHDEVAQPLNLSAKPKTSDGKSPTSPTSPHMPALRINSGAGPLKASVPAALASPSARVSTIGYLNDHDAVTKAIQEARQMKEQLRREQQVLDGKVAVVNSLGLNNCRTEKEKTTLESLTQQLAVKQNEEGKFSHAMMDFNLSGDSDGSAGVSESRIYRESRGRGSNEPHIKRPMNAFMVWAKDERRKILQAFPDMHNSNISKILGSRWKAMTNLEKQPYYEEQARLSKQHLEKYPDYKYKPRPKRTCLVDGKKLRIGEYKAIMRNRRQEMRQYFNVGQQAQIPIATAGVVYPGAIAMAGMPSPHLPSEHSSVSSSPEPGMPVIQSTYGVKGEEPHIKEEIQAEDINGEIYDEYDEEEDDPDVDYGSDSENHIAGQAN

SEQ ID NO: 313734 - protein, 587 aa, Artificial Sequence
  derived and/or modified sequence
MSSKRPASPYGEADGEVAMVTSRQKVEEEESDGLPAFHLPLHEVDGNKVMSSFAPHNSSTSPQKAEEGGRQSGESLSSTALGTPERRKGSLADVVDTLKQRKMEELIKNEPEETPSIEKLLSKDWKDKLLAMGSGNFGEIKGTPESLAEKERQLMGMINQLTSLREQLLAAHDEQKKLAASQIEKQRQQMELAKQQQEQIARQQQQLLQQQHKINLLQQQIQVQGQLPPLMIPVFPPDQRTLAAAAQQGFLLPPGFSYKAGCSDPYPVQLIPTTMAAAAAATPGLGPLQLQQLYAAQLAAMQVSPGGKLPGIPQGNLGAAVSPTSIHTDKSTNSPPPKSKDEVAQPLNLSAKPKTSDGKSPTSPTSPHMPALRINSGAGPLKASVPAALASPSARVSTIGYLNDHDAVTKAIQEARQMKEQLRREQQVLDGKVAVVNSLGLNNCRTEKEKTTLESLTQQLAVKQNEEGKFSHAMMDFNLSGDSDGSAGVSESRIYRESRGRGSNEPHIKRPMNAFMVWAKDERRKILQAFPDLGFLCVCMYVIMVLIIGITLDHCELNPHLGMKSHILPSDWSRNNLDLDFALQMTT

SEQ ID NO: 313735 - DNA, 1764 bp, Artificial Sequence
  derived and/or modified sequence
atgagcagcaagagacccgccagcccctacggcgaggccgacggcgaggtggccatggtgaccagcagacagaaggtggaggaggaggagagcgacggcctgcccgccttccacctgcccctgcacgaggtggacggcaacaaggtgatgagcagcttcgccccccacaacagcagcaccagcccccagaaggccgaggagggcggcagacagagcggcgagagcctgagcagcaccgccctgggcacccccgagagaagaaagggcagcctggccgacgtggtggacaccctgaagcagagaaagatggaggagctgatcaagaacgagcccgaggagacccccagcatcgagaagctgctgagcaaggactggaaggacaagctgctggccatgggcagcggcaacttcggcgagatcaagggcacccccgagagcctggccgagaaggagagacagctgatgggcatgatcaaccagctgaccagcctgagagagcagctgctggccgcccacgacgagcagaagaagctggccgccagccagatcgagaagcagagacagcagatggagctggccaagcagcagcaggagcagatcgccagacagcagcagcagctgctgcagcagcagcacaagatcaacctgctgcagcagcagatccaggtgcagggccagctgccccccctgatgatccccgtgttcccccccgaccagagaaccctggccgccgccgcccagcagggcttcctgctgccccccggcttcagctacaaggccggctgcagcgacccctaccccgtgcagctgatccccaccaccatggccgccgccgccgccgccacccccggcctgggccccctgcagctgcagcagctgtacgccgcccagctggccgccatgcaggtgagccccggcggcaagctgcccggcatcccccagggcaacctgggcgccgccgtgagccccaccagcatccacaccgacaagagcaccaacagccccccccccaagagcaaggacgaggtggcccagcccctgaacctgagcgccaagcccaagaccagcgacggcaagagccccaccagccccaccagcccccacatgcccgccctgagaatcaacagcggcgccggccccctgaaggccagcgtgcccgccgccctggccagccccagcgccagagtgagcaccatcggctacctgaacgaccacgacgccgtgaccaaggccatccaggaggccagacagatgaaggagcagctgagaagagagcagcaggtgctggacggcaaggtggccgtggtgaacagcctgggcctgaacaactgcagaaccgagaaggagaagaccaccctggagagcctgacccagcagctggccgtgaagcagaacgaggagggcaagttcagccacgccatgatggacttcaacctgagcggcgacagcgacggcagcgccggcgtgagcgagagcagaatctacagagagagcagaggcagaggcagcaacgagccccacatcaagagacccatgaacgccttcatggtgtgggccaaggacgagagaagaaagatcctgcaggccttccccgacctgggcttcctgtgcgtgtgcatgtacgtgatcatggtgctgatcatcggcatcaccctggaccactgcgagctgaacccccacctgggcatgaagagccacatcctgcccagcgactggagcagaaacaacctggacctggacttcgccctgcagatgaccacctag

SEQ ID NO: 313736 - DNA, 1764 bp, Artificial Sequence
  derived and/or modified sequence
atgagcagcaaacgtcccgcatccccttacggagaggcagacggtgaagttgcaatggtgacaagcagacaaaaagtcgaagaagaggagagcgatggattaccagcgtttcacttgcctttacacgaagtcgatgggaataaggtgatgtcatcattcgcccctcacaatagctccacatcccctcagaaggccgaggaaggtggccggcagtcaggagaaagcctatcctccaccgccctgggaacccctgaacgaagaaagggcagcctggccgacgttgtagacaccctgaagcagcgcaagatggaggaactaattaaaaacgaacctgaagaaacaccgtcgatcgaaaaactgctgtcaaaagattggaaagacaagcttcttgcgatgggaagcgggaacttcggggagatcaaaggaactcctgagtccctggccgagaaggaacggcaactcatgggcatgataaatcaactgacttctctgcgggagcagctgctggcagcccacgatgagcaaaagaaactggctgcaagccagatcgagaaacagcgccagcaaatggagttagctaagcaacagcaggagcagatagctcgccagcagcagcaactccttcagcagcagcacaaaattaacctgctgcagcagcagatccaagtgcagggccagctccccccccttatgatccctgtctttccaccggatcagaggaccctggctgccgcggcacagcagggcttccttctgccacccggcttttcatataaggcaggctgttctgatccataccctgtgcagctgattcctaccacgatggcggctgctgcggcagccacccctggcctcggacccctacagttgcagcagctgtatgcagcgcaactggcagctatgcaagtgtcacccggagggaaacttccaggaatcccccagggcaatctgggcgctgctgtctctccgacctcaattcatactgacaagagcaccaatagcccccctccaaaaagtaaagacgaagttgctcaaccgctcaacttgagcgctaaaccaaaaacatccgacggtaaaagccctactagccctacatctccccacatgcccgctctgaggatcaatagtggggccggaccactgaaagcctcggtgccagccgcattggcctctccttccgccagggtcagcacgattggctatttgaatgaccacgatgcagtgactaaggcaatccaggaggctagacaaatgaaagaacagctcagacgcgaacagcaggtattggatggcaaggtggctgtcgtcaattcactgggcttgaacaattgcaggacggagaaggagaaaacgaccctggagtcactaacacagcagctcgcggtgaaacagaacgaagaaggtaagttcagccacgctatgatggactttaatctgtcaggggatagtgatggttcagccggggtgtcagagagccgcatctatcgcgagtcccgtgggcgcggaagcaacgaaccacatatcaagcgccctatgaacgcatttatggtgtgggcaaaggatgagaggcggaagatcctccaggcgttccccgaccttggcttcctgtgtgtctgcatgtatgttatcatggtgctgatcatcggcattacccttgatcactgtgaactgaacccgcatctgggcatgaagagccatatcttgcccagcgactggagccgcaacaatttggatcttgacttcgctctgcaaatgacgacatag

SEQ ID NO: 313737 - DNA, 1764 bp, Artificial Sequence
  derived and/or modified sequence
atgagcagcaagaggcctgccagcccctacggggaggctgatggagaggtggccatggtgaccagccggcagaaggtggaggaggaggagagtgatggcctgcctgccttccacctgcccctgcacgaggtggatggcaacaaggtgatgagcagctttgccccccacaacagcagcaccagcccccagaaggccgaggagggcggccggcagagcggggagagcctgagcagcacagccctgggcaccccagagaggaggaagggcagcctggctgatgtggtggacaccctgaagcagaggaagatggaggagctgatcaagaatgaacctgaggagacccccagcattgagaagctgctgagcaaggactggaaggacaagctgctggccatgggcagcggcaactttggagagatcaagggcaccccagagagcctggccgagaaggagcggcagctgatgggcatgatcaaccagctgaccagcctgcgggagcagctgctggccgcccatgatgagcagaagaagctggccgccagccagatcgagaagcagaggcagcagatggagctggccaagcagcagcaggagcagatcgcccggcagcagcagcagctgctgcagcagcagcacaagatcaacctgctgcagcagcagatccaggtgcagggccagctgccccccctgatgatccctgtgttccccccagaccagaggaccctggccgctgctgcccagcagggcttcctgctgcccccaggcttctcctacaaggccggctgcagcgacccctaccctgtgcagctgatccccaccaccatggctgctgctgctgctgccaccccaggcctgggccccctgcagctgcagcagctgtatgctgcccagctggccgccatgcaggtgtccccaggcggcaagctgcccggcatcccccagggcaacctgggcgctgctgtgagccccaccagcatccacacagacaagagcaccaacagccccccacccaagagcaaggatgaggtggcccagcccctgaacctgagcgccaagcccaagaccagtgatggcaagagccccaccagccccaccagcccccacatgcctgccctgcgcatcaacagcggggccggccccctgaaggcctctgtgcctgctgccctggccagccccagcgcccgggtgtccaccatcggctacctgaatgaccatgatgctgtgaccaaggccatccaggaggcccggcagatgaaggagcagctgcggcgggagcagcaggtgctggatggcaaggtggccgtggtgaacagcctgggcctgaacaactgcaggacagagaaggagaagaccaccctggagagcctgacccagcagctggccgtgaagcagaatgaggagggcaagttcagccacgccatgatggacttcaacctgagcggggacagtgatggcagcgctggggtgtctgagagccgcatctaccgggagagccggggccggggcagcaatgagccccacatcaagaggcccatgaatgccttcatggtgtgggccaaggatgaaagaaggaagatcctgcaggccttcccagacctgggcttcctgtgtgtgtgcatgtatgtgatcatggtgctgatcatcggcatcaccctggaccactgtgagctgaacccccacctgggcatgaagagccacatcctgcccagcgactggagcaggaacaacctggacctggactttgccctgcagatgaccacctag

SEQ ID NO: 313738 - DNA, 1764 bp, Artificial Sequence
  derived and/or modified sequence
atgagcagcaagcggcccgccagcccctacggcgaggccgacggcgaggtggctatggtgaccagtcgccagaaagttgaggaggaggagagtgacgggcttcctgccttccacttacccctgcatgaggttgatgggaacaaggtaatgagtagcttcgctccccacaacagctcaacctcaccacagaaggcagaagagggagggcggcagtccggagagtccttgtccagtacagcccttggaacccctgagagaaggaagggctcccttgctgatgtggtcgacactttaaagcagcgaaagatggaagagctgatcaaaaacgaacctgaggagaccccaagcatcgagaaactgctgtctaaggactggaaggataagctgctcgctatgggcagcggaaacttcggcgaaattaaaggcacgccagaaagcttggccgaaaaggagagacagttaatgggcatgatcaatcagctcacttcccttagggagcagcttctggcagcccatgatgagcaaaaaaaactcgcggcttcccagattgaaaaacaaaggcagcagatggaacttgccaaacaacagcaggagcagatcgcccgtcagcaacagcagttgctgcagcaacagcataagataaacttgcttcaacagcagatccaagtgcagggacaactgccacccctgatgatcccagtcttccccccagatcagcggactctagccgccgccgcgcagcagggctttcttctgcctcccggattctcctataaggcggggtgcagcgacccttaccctgttcagttaatccctacaacaatggctgccgccgcagcagcaacgcccgggctcggaccgttgcagctccaacagctctacgccgctcagctcgccgcaatgcaagtatcaccgggcggcaagctgcccggaattcctcagggtaacctgggagcagcagtaagcccaactagtatccatacagacaagtcaactaactctccaccccctaagtcaaaggacgaggtagcccaacccttgaatctctctgccaaacctaaaaccagcgacggcaagtcaccgaccagccccacgagcccacatatgcctgcgctgcgcatcaattcgggcgctgggcccttgaaagcatccgtgcccgccgccctcgcttcacccagtgctcgggtttcaaccatcggatacctgaatgatcacgatgccgtcactaaggcaattcaggaggctcgccaaatgaaagaacaactgcggcgcgaacagcaggtgcttgacggtaaggtggccgtagtaaactcccttggcctcaataactgccggactgagaaagagaaaactaccttggagtccctcacccagcagttggcggtgaaacagaacgaggagggcaagttctcccacgccatgatggatttcaacctcagcggggactctgatgggagcgcaggggtgtccgagtcccgcatctaccgcgaaagccgtggccgcggctcgaatgaaccccatataaagagacccatgaacgccttcatggtttgggcgaaagatgaacgccgcaagatcctacaagcttttccggacctgggatttctgtgcgtttgtatgtacgttatcatggttcttatcatagggataacgctcgatcattgcgagctaaatccacatttgggaatgaaatcacacatcctgccctccgactggtctaggaataacctggatcttgatttcgcacttcagatgactacctag

SEQ ID NO: 313739 - DNA, 1764 bp, Artificial Sequence
  derived and/or modified sequence
atgtcaagtaaacgcccagcatcaccttatggggaggccgatggagaagtcgccatggtaacctcaaggcaaaaggtcgaagaagaagaaagcgatggattgccagcattccatctccctctgcatgaagttgacggcaacaaagtgatgtcctcctttgcgcctcacaactcatcaactagcccccagaaggccgaggagggtggcagacagtccggcgagagtctaagctccaccgccctgggaactccggaaaggcggaagggaagtcttgcagatgtcgtggacactctcaaacagagaaagatggaagagcttatcaagaacgagccggaggagacaccctcgatagagaagctgttatccaaagattggaaggacaagctactcgctatgggtagcgggaactttggggaaataaaggggacgccagagtcgctagcagaaaaagagaggcagttgatgggaatgataaaccagctgacaagtttaagagagcaactgctggcagcccatgatgagcagaaaaaactggcggctagccagatcgagaagcagagacaacaaatggaactggccaaacagcagcaagagcaaatcgccagacagcaacaacagcttctgcagcagcaacacaagatcaatcttttgcagcaacagatccaggtacagggccagttgcctcccctcatgatcccagtgtttccaccggatcagagaactctcgctgctgctgcccagcaggggttcctcttgccgccagggttcagctataaggccggatgcagtgatccatatcctgtgcagctgataccaacgacaatggccgcagctgctgctgccactccaggcctcggtccgctgcagcttcagcaactgtatgcagcacagctggccgctatgcaggtttcaccgggtgggaagctccccggaattccacaggggaatctaggggctgctgttagtccaacctcaatccacacagataaaagcaccaacagccccccaccaaaatccaaggatgaggtggcccaaccattgaacctgtctgctaaaccgaagacctcagacggaaagtccccaacatcccctactagcccacacatgccagcactgagaatcaacagcggagcgggacccctaaaggcatcagtcccggcagcccttgcctctcccagcgctagggtcagcaccatagggtaccttaatgaccatgacgccgtgacgaaggccatccaggaggctagacaaatgaaggagcagctcaggagagaacagcaggtgttggacggaaaagtcgccgtcgtgaatagcctgggcctcaacaattgccggactgaaaaggagaaaactaccctagaaagcctgacccagcagctcgccgtaaagcagaatgaggagggtaagttctcccacgccatgatggattttaacctgtcgggcgacagcgacggcagtgccggagtctccgaatctcgtatctatcgcgaatctcggggtcgaggctccaacgaacctcacattaaaaggccaatgaatgcttttatggtttgggccaaagacgaaagaagaaagatattgcaggcctttccagacttgggattcctgtgcgtatgtatgtatgtaataatggtgcttattataggaatcaccctcgatcactgtgagctcaatccccatctcgggatgaaatctcacatcttaccatctgactggagccggaacaacctggacctggattttgcgctgcagatgacaacttag

SEQ ID NO: 313740 - DNA, 2942 bp, Artificial Sequence
  derived and/or modified sequence
gcttactccctgaccagatgctgcggtgcacggggcagccaccatctctgcatgcatgtctgtgtaagtgtctctctctctgtgtgtatgtgcctctgtcatttcgtgtcaaaggtacattacctgattacctttctcggctgccagatttttatctagataattggaactgctatggaggctgtgccttgccagccagcttagaatctgtaaagccatagtttgtccaccttgttatctgtggctgcctgggcagaggaaattaaagagatccacagccaggggggcgcttcctactcctgacctccccagcgatcccaaacaggacagtttgttagtaccgtctttttgtttttatgttttgatttcgttttgggtttttgttcgctcgtgtatgttattttggcatgtggatacctattcccctccacatcgcacatcgtgttttatggagtttagagctgaggaaactttggtcgggttgccaggacgttcgcaccactttgcggaaagcacgagctaacagtgagaccgacagagatgtcttccaagcgaccagcctctccgtatggggaagcagatggagaggtagccatggtgacaagcagacagaaagtggaagaagaggagagtgacgggctcccagcctttcaccttcccttgcatgaagttgatggcaataaagttatgtcttcatttgccccacacaactcatctacctcacctcagaaggcagaagaaggtgggcgacagagtggcgagtccttgtctagtacagccctgggaactcctgaacggcgcaagggcagtttagctgatgttgttgacaccttgaagcagaggaaaatggaagagctcatcaaaaacgagccggaagaaacccccagtattgaaaaactactctcaaaggactggaaagacaagcttcttgcaatgggatcggggaactttggcgaaataaaagggactcccgagagcttagctgagaaagaaaggcaactcatgggtatgatcaaccagctgaccagcctccgagagcagctgttggctgcccacgatgagcagaagaaactagctgcctctcagattgagaaacagcgtcagcaaatggagctggccaagcagcaacaagaacaaattgcaagacagcagcagcagcttctacagcaacaacacaaaatcaatttgctccagcaacagatccaggttcaaggtcagctgccgccattaatgattcccgtattccctcctgatcaacggacactggctgcagctgcccagcaaggattcctcctccctccaggcttcagctataaggctggatgtagtgacccttaccctgttcagctgatcccaactaccatggcagctgctgccgcagcaacaccaggcttaggcccactccaactgcagcagttatatgctgcccagctagctgcaatgcaggtatctccaggagggaagctgccaggcataccccaaggcaaccttggtgctgctgtatctcctaccagcattcacacagacaagagcacaaacagcccaccacccaaaagcaaggatgaagtggcacagccactgaacctatcagctaaacccaagacctctgatggcaaatcacccacatcacccacctctccccatatgccagctctgagaataaacagtggggcaggccccctcaaagcctctgtcccagcagcgttagctagtccttcagccagagttagcacaataggttacttaaatgaccatgatgctgtcaccaaggcaatccaagaagctcggcaaatgaaggagcaactccgacgggaacaacaggtgcttgatgggaaggtggctgttgtgaatagtctgggtctcaataactgccgaacagaaaaggaaaaaacaacactggagagtctgactcagcaactggcagttaaacagaatgaagaaggaaaatttagccatgcaatgatggatttcaatctgagtggagattctgatggaagtgctggagtctcagagtcaagaatttatagggaatcccgagggcgtggtagcaatgaaccccacataaagcgtccaatgaatgccttcatggtgtgggctaaagatgaacggagaaagatccttcaagcctttcctgatcttggatttttgtgtgtatgtatgtatgtgattatggtactaataataggaataacgttggaccattgtgagttaaacccacatctggggatgaaatcccacatcctcccaagtgactggtctagaaataatcttgaccttgactttgcacttcaaatgacaacttaaccaagtatagggctcagaaattatatttttaaatgtctgattattattggatggatcaggtggccctgtgtaatagaggtgtgcatgtataacatggaagctactagcaaactgctcccagatgtcctttctccctggtcagttggttccattaacgtttgctacttagtgatttttgtttttcctgttgatattttgagcaaaacaatcattgttttcattgaatatatttggccattttttcagacaaatagaattagcttatttcttcaacattccatcctttcccgatcaggaaatgaaactgatgattttataaggtatttttcacccctccatgaagtgaggtggaggcctttagcatttcagaagtgtgggccatatgtagttcatgccataaaaagtaggatttaattaaaagtcattgcagcccaataaaatggagcctggctgcacccagggatccttgccactgctcttcccttgctgtcagattaatccactgaagtccaactttggttcaagcagagtatttgcaaagagcaacaactgaatgtgatgggactgcttatgtagattttgccagccaaatgccaaggcagttgtagggcctgtacaaataaatgcaaaatcatttc

SEQ ID NO: 313741 - protein, 327 aa, Artificial Sequence
  derived and/or modified sequence
MCSTSGCDLEEIPLDDDDLNTIEFKILAYYTRHHVFKSTPALFSPKLLRTRSLSQRGLGNCSANESWTEVSWPCRNSQSSEKAINLGKKKSSWKAFFGVVEKEDSQSTPAKVSAQGQRTLEYQDSHSQQWSRCLSNVEQCLEHEAVDPKVISIANRVAEIVYSWPPPQATQAGGFKSKEIFVTEGLSFQLQGHVPVASSSKKDEEEQILAKIVELLKYSGDQLERKLKKDKALMGHFQDGLSYSVFKTITDQVLMGVDPRGESEVKAQGFKAALVIDVTAKLTAIDNHPMNRVLGFGTKYLKENFSPWIQQHGGWEKILGISHEEVD

SEQ ID NO: 313742 - protein, 276 aa, Artificial Sequence
  derived and/or modified sequence
MCSTSGCDLEEIPLDDDDLNTIEFKILAYYTRHHVFKSTPALFSPKLLRTRSLSQRGLGNCSANESWTEVSWPCRNSQSSEKAINLGKKKSSWKAFFGVVEKEDSQSTPAKVSAQGQRTLEYQDSHSQQWSRCLSNVEQCLEHEAVDPKVISIANRVAEIVYSWPPPQATQAGGFKSKEIFVTEGLSFQLQGHVPVASSSKKDEEEQILAKIVELLKYSGDQLERKEKEWEESAKTKIKMALLWRSSGGGPRVLSIPEAFMKNSFTLTPPGFSEHN

SEQ ID NO: 313743 - protein, 50 aa, Artificial Sequence
  derived and/or modified sequence
MCSTSGCDLEEIPLDDDDLNTIEFKILAYYTRHHVFKSTPALFSPKLLRT

SEQ ID NO: 313744 - DNA, 984 bp, Artificial Sequence
  derived and/or modified sequence
atgtgcagcacttcaggctgcgatctggaggagatcccactggatgacgacgatctaaacaccatcgagttcaaaatattagcctactacaccagacaccatgtgttcaagtcaacgcctgccctgttttcccccaagctgttgaggactcgatcactcagtcagagaggactcggcaactgctctgcaaacgagagttggacggaagtaagttggccttgtcggaattcacaaagctctgagaaggcaatcaatctcggcaaaaagaagtcctcgtggaaggcattttttggagtggtcgaaaaggaggactcacagagtacgccggcgaaggtcagtgcacagggccaacggacactcgaataccaggacagtcactctcagcagtggtcgcgttgcttgtccaatgttgaacaatgcctggagcacgaggcggtggatccaaaggttatcagcattgcgaaccgcgtcgcggagatcgtgtactcctggcccccgcctcaggccacacaggccggaggctttaaaagcaaggagatttttgttacagaagggttaagttttcagctgcagggacacgtcccagtcgcctcctcctcaaagaaagatgaggaggagcagatattagcaaagatcgttgagctcctgaagtacagcggagaccaactggagcgcaaactgaagaaagacaaggctctcatgggccatttccaggatgggctctcatattctgtgttcaaaacaatcacggaccaggtgctcatgggcgtggatccccgaggagagagcgaggtgaaagcacagggctttaaggcagccctagttatcgacgtaacagccaaactgaccgccatcgacaatcaccccatgaatcgcgtgctcggcttcggaaccaaatacctgaaagagaacttcagcccttggatccaacagcacggcggttgggagaaaattctgggtatttcacatgaggaggtcgattag

SEQ ID NO: 313745 - DNA, 984 bp, Artificial Sequence
  derived and/or modified sequence
atgtgctctacaagcggctgcgacctcgaggagattccgctcgatgacgacgacctcaatactattgaattcaagatcctggcctattatacacgtcaccatgtcttcaagtcaaccccagcactgttcagcccaaaactattaagaacgcgtagtctgagccagagaggcctcggcaactgctccgcgaatgagtcatggaccgaagttagttggccctgtcgtaactcacagtctagtgagaaagcaataaacctggggaagaagaagtcctcctggaaggctttttttggcgtcgtggaaaaagaagactcacagtctacgcctgcgaaggtgtccgcccaggggcaaagaaccctggaataccaggacagccattcccagcagtggagtcgatgtctgtctaatgttgagcagtgtttggagcatgaagccgtggacccgaaggtgattagcattgccaaccgtgtggcagagatcgtctactcctggccgcccccccaggccacccaggccggcgggttcaagagcaaggaaatcttcgtgacagaggggctctccttccagctccagggccatgttccggtcgcatctagctcgaaaaaggatgaagaagaacagatccttgccaagattgtagagctcttgaagtactcaggcgaccagcttgagaggaagcttaaaaaggataaagccttgatgggccactttcaggatggactttcatacagtgttttcaagacaataaccgaccaggtgttgatgggcgtagatcctaggggcgaaagcgaggtgaaagcacagggctttaaggccgccttggtgatagacgtgacagccaagttgaccgccatcgataaccaccccatgaatagagtcttggggtttgggaccaaatacttaaaagagaatttctcgccatggattcagcagcatggtggatgggagaaaatcctcggaatctctcacgaagaagtagattag

SEQ ID NO: 313746 - DNA, 984 bp, Artificial Sequence
  derived and/or modified sequence
atgtgcagcaccagcggctgtgacctggaggagatccccctggatgatgatgacctgaacaccatcgagttcaagatcctggcctactacaccaggcaccacgtgttcaagagcaccccagccctcttcagccccaagctgctgcggaccaggagcctgagccagaggggcctgggcaactgcagcgccaatgaatcctggacagaggtgtcctggccctgcaggaacagccagagcagcgagaaggccatcaacctgggcaagaagaagagctcctggaaggccttctttggagtggtggagaaggaggacagccagagcaccccagccaaggtgtctgcccagggccagaggaccctggagtaccaggacagccacagccagcagtggagccgctgcctgagcaatgtggagcagtgcctggagcatgaagctgtggaccccaaggtgatcagcatcgccaacagagtggccgagatcgtgtacagctggcccccaccccaggccacccaggccggcggcttcaagagcaaggagatctttgtgacagagggcctgtccttccagctgcagggccacgtgcctgtggccagcagcagcaagaaggatgaggaggagcagatcctggccaagatcgtggagctgctgaagtacagcggggaccagctggagaggaagctgaagaaggacaaggccctgatgggccacttccaggacggcctgagctacagcgtcttcaagaccatcacagaccaggtgctgatgggcgtggaccccagaggagagagcgaggtgaaggcccagggcttcaaggccgccctggtgattgatgtgacagccaagctgacagccatcgacaaccaccccatgaacagagtgctgggcttcggcaccaagtacctgaaggagaacttcagcccctggatccagcagcacggcggctgggagaagatcctgggcatcagccatgaggaggtggactag

SEQ ID NO: 313747 - DNA, 984 bp, Artificial Sequence
  derived and/or modified sequence
atgtgcagcaccagcggctgcgacctggaggagatccccctggacgacgacgacctgaataccattgagtttaaaattctggcttattacaccaggcatcacgtgttcaaaagtactcccgcactcttttctcccaagttactgaggaccagatcactgagccagcgaggactcggtaattgtagtgcgaacgaatcttggacagaagtttcttggccatgtagaaactcccagtccagtgagaaggccattaatttgggtaaaaaaaagagttcatggaaagccttctttggagttgttgagaaggaagactctcaatccacccctgcaaaagtctcggcgcagggccagagaactttggaataccaggattcacattcccagcagtggtcccgctgtttgagcaacgtggagcagtgcctggagcatgaagccgtagatccgaaagtgatcagcatcgctaatcgcgtggcagaaatcgtctatagttggccgcctcctcaggccactcaggctggtggctttaagagcaaagaaatatttgtcaccgaggggctcagcttccagctgcagggtcacgtgccagtggcatcatctagtaaaaaagatgaagaggagcagatcctggccaaaatcgtagaactgctcaagtactcaggcgaccaattggagaggaagctgaaaaaggacaaggccttaatggggcatttccaagacggactgtcgtactccgtttttaagacgatcaccgaccaggtacttatgggcgttgatcccagaggagaaagcgaagtcaaagcccagggattcaaagcggccctggttatcgatgtcaccgccaaactgactgctattgataatcatcctatgaaccgtgtgttgggctttgggaccaagtacttaaaggagaatttctcaccgtggattcagcagcatggcggatgggagaaaattttagggatctcccacgaagaagttgattag

SEQ ID NO: 313748 - DNA, 1886 bp, Artificial Sequence
  derived and/or modified sequence
aatgacatgacagccattccgtggccagggacaccactgcccaagctggagaccacgaggattcagggactgaagccagcatgggaattcctggtttgagatcagagtcctgagtacctcgtgggaacttgggcactcatccgcaggaggtctagacccccagagaattccttgagtctaaggcacaggcccaacatgtgtagcaccagtgggtgtgacctggaagaaatccccctagatgatgatgacctaaacaccatagaattcaaaatcctcgcctactacaccagacatcatgtcttcaagagcacccctgctctcttctcaccaaagctgctgagaacaagaagtttgtcccagaggggcctggggaattgttcagcaaatgagtcatggacagaggtgtcatggccttgcagaaattcccaatccagtgagaaggccataaaccttggcaagaaaaagtcttcttggaaagcattctttggagtagtggagaaggaagattcgcagagcacgcctgccaaggtctctgctcagggtcaaaggacgttggaataccaagattcgcacagccagcagtggtccaggtgtctttctaacgtggagcagtgcttggagcatgaagctgtggaccccaaagtcatttccattgccaaccgagtagctgaaattgtttactcctggccaccaccacaagcgacccaggcaggaggcttcaagtccaaagagatttttgtaactgagggtctctccttccagctccaaggccacgtgcctgtagcttcaagttctaagaaagatgaagaagaacaaatactagccaaaattgttgagctgctgaaatattcaggagatcagttggaaagaaagctgaagaaagataaggctttgatgggccacttccaggatgggctgtcctactctgttttcaagaccatcacagaccaggtcctaatgggtgtggaccccaggggagaatcagaggtcaaagctcagggctttaaggctgcccttgtaatagacgtcacggccaagctcacagctattgacaaccacccgatgaacagggtcctgggctttggcaccaagtacctgaaagagaacttctcgccatggatccagcagcacggtggatgggaaaaaatacttgggatatcacatgaagaagtagactgaaatatcagatttgtcatcaggaatactctttgtctactgtggtcctgtgcacgttggcctcagatggactacaggagattacaacgtacaaggcagatggagcattgacgttttcaaaaccattattcctgtgactggagaggcatcaggagaggtctcgttcgtctccagctcataaaatgtagcagcatcatccttgacagtgatgtttttcaggccctccattgagaacctgaggaaatctgtaaagataagtggtgatgttgtttcaaacgttcagaacagataccatcatcctgcctttgttagctgctgtagggaaagtgcgttacagatgtctgctgacctcacaagagtgaaaagataaactgtgcatgtgtttccacttccgtttctagtactatttatttttaaactacacttggggtggcctaatacctaggaagatgttgctattcacgttagtaaacagcctaaagaaactcttaggtttactgctacatccatttgtttggagaggtaactgttgtctgtgcctttttgaaaaacttccatttggtacaaaatttttactccaacaccccctcaacccttttctcagggaccacacctcttcttcccaaggtccctgggacttcctcattctttgtggtagtacaatgattggtagcaggtaaaataaatacatagaaagactactgtcaaaa

SEQ ID NO: 313749 - DNA, 984 bp, Artificial Sequence
  derived and/or modified sequence
atgtgcagcaccagcggctgcgacctggaggagatccccctggacgacgacgacctgaacaccatcgaattcaagatactggcttactacacgcgtcatcacgtgtttaagagtacaccagcactcttctctcccaaactgctgagaactaggtccctttcccagcgtggcttgggcaattgctccgccaacgaatcctggaccgaggtgtcatggccttgcagaaacagtcagtcctcagaaaaggctatcaacttgggaaagaagaaaagcagctggaaagcattcttcggcgtagttgagaaggaagattctcagagcacaccagcgaaagtctctgcgcaggggcagcgcacactggagtaccaggactctcactcccagcagtggagcaggtgtctctccaatgtggaacagtgcctggagcatgaagctgtcgatccaaaggtgatcagcatcgctaacagagttgccgagatcgtttacagttggcccccaccacaggccacccaggccggaggcttcaagagtaaggagatcttcgtcactgaagggctgtccttccaacttcaaggccatgtccccgtggccagttcatctaagaaggatgaagaagagcagatcttggccaagatcgtcgaactactgaagtactccggggaccaactggaaagaaagctgaagaaggataaagccctgatggggcacttccaggatggcctctcttattctgtgttcaaaacaatcactgatcaggtcctgatgggtgtcgatccaaggggcgagagcgaagttaaagcgcagggtttcaaggctgctcttgtgatcgatgtgaccgccaaactcacagccattgacaaccaccctatgaatcgggtgctcggctttggcaccaagtatcttaaagagaatttttccccatggatccagcaacacggcgggtgggagaagatcctcgggatctcacatgaagaggttgactag

SEQ ID NO: 313750 - DNA, 984 bp, Artificial Sequence
  derived and/or modified sequence
atgtgtagtacttcagggtgcgacttagaggagatacctctggatgacgacgatctaaataccatagaattcaaaattctcgcatactatacgcgacaccatgtctttaagtctacgcccgcattattcagtccaaagctcctaaggacgagatcactaagtcagcgcggactgggtaattgtagcgccaacgagtcttggaccgaggtgtcttggccctgccgcaactcccagagtagcgaaaaagcgatcaatctggggaaaaagaaaagctcttggaaagcttttttcggcgtggtcgaaaaggaagactcccagtccactcctgcgaaagtcagtgcccagggtcagcgcactctagaataccaggacagccatagccagcagtggtcacgatgcctttctaacgtagaacagtgtcttgaacacgaggctgttgacccgaaagtgatcagcatcgctaatagggtcgcagagatagtctacagctggccccctccgcaggctacccaggcgggaggattcaagagcaaagagatctttgtaactgaagggctgtctttccagctgcagggacatgtcccagtggcctcaagtagcaagaaggatgaggaggagcagatcctcgctaagatcgtggaactgctgaagtacagcggagaccagctggaacgaaagctcaaaaaggacaaagcccttatgggacactttcaggatggtctaagttacagcgtcttcaagactataacggaccaagtgctgatgggtgtggatccacgtggggaatctgaggtaaaggctcagggctttaaagctgctctcgtgatcgacgtgaccgccaagcttactgcaatagacaatcatcctatgaatcgggtactgggtttcggaacaaaatacctcaaagagaatttctccccgtggattcagcagcacgggggttgggagaagatactcggcatttcccacgaggaagtggattag

SEQ ID NO: 313751 - DNA, 984 bp, Artificial Sequence
  derived and/or modified sequence
atgtgctccacttcagggtgcgacttggaggagattcccttggacgacgacgacctcaacaccattgagttcaaaatcctggcttattacactcgtcatcacgtctttaagtcaaccccagcactgtttagcccgaaactgttgcgtacaagaagcctcagtcagagaggattggggaactgcagtgcaaatgaatcatggacagaagtgagctggccgtgtcggaactcacaatcctctgagaaagcaattaatctggggaagaaaaagagcagttggaaagcgtttttcggagtcgtggagaaggaagatagtcaaagcacccccgcaaaggtttctgcgcaagggcagcgcacacttgaatatcaagactctcattcacaacagtggagtaggtgtctctccaatgttgagcagtgtttagagcacgaggccgtggaccctaaagtgataagcattgctaacagggtggcggagatagtttatagctggccaccccctcaagccacacaggcaggcggattcaaatccaaggaaatattcgtgaccgagggtttgtcctttcaactgcagggccacgtgccagtggcctcatctagcaagaaagatgaagaggaacaaatcctggcaaagatcgttgagctgctcaaatatagtggcgaccagctggagcgaaagctaaagaaagacaaggctttaatgggtcactttcaggacggcctcagctatagcgtctttaaaacgatcacagaccaggttctgatgggagtggatcccaggggggagtcagaagtaaaggcacagggcttcaaagctgctctggtgattgacgtgaccgctaaactgacggccattgacaatcaccctatgaatcgggtactgggattcggcaccaaatacctcaaggaaaatttctccccatggattcagcaacacggcggatgggagaagatactgggaatcagtcacgaagaggtagattag

SEQ ID NO: 313752 - DNA, 2039 bp, Artificial Sequence
  derived and/or modified sequence
aatgacatgacagccattccgtggccagggacaccactgcccaagctggagaccacgaggattcagggactgaagccagcatgggaattcctggtttgagatcagagtcctgagtacctcgtgggaacttgggcactcatccgcaggaggtctagacccccagagaattccttgagtctaaggcacaggcccaacatgtgtagcaccagtgggtgtgacctggaagaaatccccctagatgatgatgacctaaacaccatagaattcaaaatcctcgcctactacaccagacatcatgtcttcaagagcacccctgctctcttctcaccaaagctgctgagaacaagaagtttgtcccagaggggcctggggaattgttcagcaaatgagtcatggacagaggtgtcatggccttgcagaaattcccaatccagtgagaaggccataaaccttggcaagaaaaagtcttcttggaaagcattctttggagtagtggagaaggaagattcgcagagcacgcctgccaaggtctctgctcagggtcaaaggacgttggaataccaagattcgcacagccagcagtggtccaggtgtctttctaacgtggagcagtgcttggagcatgaagctgtggaccccaaagtcatttccattgccaaccgagtagctgaaattgtttactcctggccaccaccacaagcgacccaggcaggaggcttcaagtccaaagagatttttgtaactgagggtctctccttccagctccaaggccacgtgcctgtagcttcaagttctaagaaagatgaagaagaacaaatactagccaaaattgttgagctgctgaaatattcaggagatcagttggaaagaaaggacactgccttcatccccattcccttggttgacaccagcatccagggttttccacaggatggtttgatggcctgcatttgagctaaagaatgaacttctgtctgcctcgtggagccaagctactgtactgagtgcttattcttttgtacacagctgaagaaagataaggctttgatgggccacttccaggatgggctgtcctactctgttttcaagaccatcacagaccaggtcctaatgggtgtggaccccaggggagaatcagaggtcaaagctcagggctttaaggctgcccttgtaatagacgtcacggccaagctcacagctattgacaaccacccgatgaacagggtcctgggctttggcaccaagtacctgaaagagaacttctcgccatggatccagcagcacggtggatgggaaaaaatacttgggatatcacatgaagaagtagactgaaatatcagatttgtcatcaggaatactctttgtctactgtggtcctgtgcacgttggcctcagatggactacaggagattacaacgtacaaggcagatggagcattgacgttttcaaaaccattattcctgtgactggagaggcatcaggagaggtctcgttcgtctccagctcataaaatgtagcagcatcatccttgacagtgatgtttttcaggccctccattgagaacctgaggaaatctgtaaagataagtggtgatgttgtttcaaacgttcagaacagataccatcatcctgcctttgttagctgctgtagggaaagtgcgttacagatgtctgctgacctcacaagagtgaaaagataaactgtgcatgtgtttccacttccgtttctagtactatttatttttaaactacacttggggtggcctaatacctaggaagatgttgctattcacgttagtaaacagcctaaagaaactcttaggtttactgctacatccatttgtttggagaggtaactgttgtctgtgcctttttgaaaaacttccatttggtacaaaatttttactccaacaccccctcaacccttttctcagggaccacacctcttcttcccaaggtccctgggacttcctcattctttgtggtagtacaatgattggtagcaggtaaaataaatacatagaaagactactgtcaaaa

SEQ ID NO: 313753 - DNA, 1665 bp, Artificial Sequence
  derived and/or modified sequence
ctcttttcaggctgagtcctaaacctgaagaaagtttagagcctggggctctaaactacctgagtctttccaaacgacaagccaagaagacctgttgaaagtttcctcttaagtttcgtggagagagactcaggtatagaaatatccttactgccacctgacctgaagcagaagaaatcacagacagcttccagaccaggcccaacatgtgtagcaccagtgggtgtgacctggaagaaatccccctagatgatgatgacctaaacaccatagaattcaaaatcctcgcctactacaccagacatcatgtcttcaagagcacccctgctctcttctcaccaaagctgctgagaacaagaagtttgtcccagaggggcctggggaattgttcagcaaatgagtcatggacagaggtgtcatggccttgcagaaattcccaatccagtgagaaggccataaaccttggcaagaaaaagtcttcttggaaagcattctttggagtagtggagaaggaagattcgcagagcacgcctgccaaggtctctgctcagggtcaaaggacgttggaataccaagattcgcacagccagcagtggtccaggtgtctttctaacgtggagcagtgcttggagcatgaagctgtggaccccaaagtcatttccattgccaaccgagtagctgaaattgtttactcctggccaccaccacaagcgacccaggcaggaggcttcaagtccaaagagatttttgtaactgagggtctctccttccagctccaaggccacgtgcctgtagcttcaagttctaagaaagatgaagaagaacaaatactagccaaaattgttgagctgctgaaatattcaggagatcagttggaaagaaagctgaagaaagataaggctttgatgggccacttccaggatgggctgtcctactctgttttcaagaccatcacagaccaggtcctaatgggtgtggaccccaggggagaatcagaggtcaaagctcagggctttaaggctgcccttgtaatagacgtcacggccaagctcacagctattgacaaccacccgatgaacagggtcctgggctttggcaccaagtacctgaaagagaacttctcgccatggatccagcagcacggtggatgggaaaaaatacttgggatatcacatgaagaagtagactgaaatatcagatttgtcatcaggaatactctttgtctactgtggtcctgtgcacgttggcctcagatggactacaggagattacaacgtacaaggcagatggagcattgacgttttcaaaaccattattcctgtgactggagaggcatcaggagaggtctcgttcgtctccagctcataaaatgtagcagcatcatccttgacagtgatgtttttcaggccctccattgagaacctgaggaaatctgtaaagataagtggtgatgttgtttcaaacgttcagaacagataccatcatcctgcctttgttagctgctgtagggaaagtgcgttacagatgtctgctgacctcacaagagtgaaaagataaactgtgcatgtgtttccacttccgtttctagtactatttatttttaaactacacttggggtggcctaatacctaggaagatgttgctattcacgttagtaaacagcct

SEQ ID NO: 313754 - DNA, 984 bp, Artificial Sequence
  derived and/or modified sequence
atgtgcagcaccagcggctgcgacctggaggagatccccctggacgacgacgacctgaacaccatcgagttcaagatcctggcctactacaccagacaccacgtgttcaagagcacccccgccctgttcagccccaagctgctgagaaccagaagcctgagccagagaggcctgggcaactgcagcgccaacgagagctggaccgaggtgagctggccctgcagaaacagccagagcagcgagaaggccatcaacctgggcaagaagaagagcagctggaaggccttcttcggcgtggtggagaaggaggacagccagagcacccccgccaaggtgagcgcccagggccagagaaccctggagtaccaggacagccacagccagcagtggagcagatgcctgagcaacgtggagcagtgcctggagcacgaggccgtggaccccaaggtgatcagcatcgccaacagagtggccgagatcgtgtacagctggccccccccccaggccacccaggccggcggcttcaagagcaaggagatcttcgtgaccgagggcctgagcttccagctgcagggccacgtgcccgtggccagcagcagcaagaaggacgaggaggagcagatcctggccaagatcgtggagctgctgaagtacagcggcgaccagctggagagaaagctgaagaaggacaaggccctgatgggccacttccaggacggcctgagctacagcgtgttcaagaccatcaccgaccaggtgctgatgggcgtggaccccagaggcgagagcgaggtgaaggcccagggcttcaaggccgccctggtgatcgacgtgaccgccaagctgaccgccatcgacaaccaccccatgaacagagtgctgggcttcggcaccaagtacctgaaggagaacttcagcccctggatccagcagcacggcggctgggagaagatcctgggcatcagccacgaggaggtggactag

SEQ ID NO: 313755 - DNA, 85 bp, Artificial Sequence
  derived and/or modified sequence
aaaccgaatggaatggaatggacgcaaaatgaatggaatggaagtcaatggactcgaaatgaatggaatggaatggaatggaatg

SEQ ID NO: 313756 - DNA, 423 bp, Artificial Sequence
  derived and/or modified sequence
atgctgtgcgtgtcttatcaggtcgacgagcgaacctgcatacagttctctatgaaactactgtactttcttctttccgccctgggcttaactgtatgcgttctagctgtcgcctttgccgcacatcactattcccagttgacgcagtttacctgtgagactacactggatagctgccagtgcaagctgccgtcaagcgagcccctcagtcggacattcgtctaccgcgacgttacagactgcactagcgtgacaggaacattcaagctgtttctactgatccagatgatcctaaacctagtttgtggccttgtctgtcttcttgcatgctttgtcatgtggaaacatcgctaccaggtattctatgtgggagtgaggatttgctctcttacggcgagcgagggacctcaacagaagatttag

SEQ ID NO: 313757 - DNA, 363 bp, Artificial Sequence
  derived and/or modified sequence
atgctgtgtgtgtcttaccaggtggacgaaagaacttgcattcaattctcaatgaaactgctctatttcctcctctcagcgttaggccttaccgtctgcgtgctcgcagtcgctttcgctgctcatcactatagccagcttacccaatttacttgtgaaactactctcgatagctgccagtgtaagttaccttccagcgagccactgtcaagaacctttgtataccgcgacgtgaccgattgtacaagtgtgaccgggacattcaagcttttcttgcttatccagatgattcttaatctggtttgtggcctggtgtgcctgctggcttgtttcgtgatgtggaaacatagataccaggtgtag

SEQ ID NO: 313758 - DNA, 423 bp, Artificial Sequence
  derived and/or modified sequence
atgttgtgcgtttcataccaggtggatgagcgtacatgtatccagttcagcatgaagctcctgtacttccttctgtcggccctcggccttaccgtctgcgtgttagccgtcgcctttgccgcccaccattattcacagcttacacagttcacatgcgagactacacttgattcttgtcagtgcaagctgccaagctctgaacctctctcccggacctttgtgtatcgggacgtcactgactgtacctcggtaaccggtactttcaagctgttcctgctgatccagatgatactcaatttagtctgtgggctcgtatgccttcttgcgtgcttcgtcatgtggaaacatcgataccaggtgttctatgtgggcgtcagaatctgtagcctcacggctagtgaagggccacagcagaaaatctag

SEQ ID NO: 313759 - DNA, 423 bp, Artificial Sequence
  derived and/or modified sequence
atgctgtgtgtgtcctaccaggtggatgagaggacctgcatccagttctccatgaagctgctgtacttcctgctgagcgccctgggcctgactgtgtgtgtgctggccgtggcctttgctgcccaccactacagccagctgacccagttcacctgtgagaccaccctggacagctgccagtgcaagctgcccagcagcgagcccctgagcaggacctttgtgtacagagatgtgacagactgcacctctgtgacaggcaccttcaagctgttcctgctgatccagatgatcctgaacctggtgtgtggcctggtgtgcctgctggcctgctttgtgatgtggaagcaccgctaccaggtgttctacgtgggcgtgcgcatctgcagcctgacagccagcgagggcccccagcagaagatctag

SEQ ID NO: 313760 - DNA, 363 bp, Artificial Sequence
  derived and/or modified sequence
atgctgtgtgtgtcctaccaggtggatgagaggacctgcatccagttctccatgaagctgctgtacttcctgctgagcgccctgggcctgactgtgtgtgtgctggccgtggcctttgctgcccaccactacagccagctgacccagttcacctgtgagaccaccctggacagctgccagtgcaagctgcccagcagcgagcccctgagcaggacctttgtgtacagagatgtgacagactgcacctctgtgacaggcaccttcaagctgttcctgctgatccagatgatcctgaacctggtgtgtggcctggtgtgcctgctggcctgctttgtgatgtggaagcaccgctaccaggtgtag

SEQ ID NO: 313761 - DNA, 423 bp, Artificial Sequence
  derived and/or modified sequence
atgctgtgcgtgagctaccaggtggacgagcggacctgcatccagttcagcatgaagctgctttacttcctgttatccgctctggggcttaccgtctgtgtcctggcagtggcatttgccgcccaccactactcgcagctgacacaattcacatgtgaaacgacactcgactcgtgtcagtgcaaactcccctcttccgagcccctctctaggacgtttgtgtatcgtgatgtcacagattgtacctcagtaaccggtacttttaaactgtttttgctgattcagatgattttgaatctggtatgcggcttggtgtgtctgctagcctgtttcgtaatgtggaaacatagatatcaagtattctacgttggcgttaggatctgcagtcttaccgcttccgaaggacctcagcagaagatttag

SEQ ID NO: 313762 - DNA, 363 bp, Artificial Sequence
  derived and/or modified sequence
atgctgtgcgtgagctaccaggtggacgagcggacctgcatccagttctcaatgaagcttctgtatttcctcctgtcagctctcggcctgactgtatgtgtgctagcagtggccttcgctgcgcaccattatagccagctgactcaatttacctgtgaaaccacgctggattcttgccagtgcaagctgccctcttcagagccactatctcggacattcgtttaccgggatgtgactgattgtacaagcgtgactggcacgtttaagctgttcctattaatacagatgattctgaacctagtttgcggtctggtgtgtttactggcgtgctttgttatgtggaaacatcgctatcaggtttag

SEQ ID NO: 313763 - DNA, 423 bp, Artificial Sequence
  derived and/or modified sequence
atgctgtgcgtgagctaccaggtggacgagcggacctgcatccagttttcaatgaagcttctgtacttccttctgagcgccctgggcctcacagtctgtgtgctggctgtggcctttgccgctcatcactactctcagctgacccagtttacttgtgagacaacactggattcctgccaatgtaaattgccaagcagcgagccactctctaggaccttcgtgtatcgggacgttacagactgtacttctgtcaccgggaccttcaagctgttcttgctgatccagatgattctgaacctagtgtgcgggctagtttgtcttcttgcctgtttcgttatgtggaaacaccgctatcaggttttttacgtcggagttcggatatgctccttaaccgcgtctgaaggccctcagcaaaaaatttag

SEQ ID NO: 313764 - DNA, 423 bp, Artificial Sequence
  derived and/or modified sequence
atgctgtgcgtatcttatcaagttgacgagcgcacctgtatacaattctcgatgaaactgctttattttttattaagtgccctggggctgacagtgtgcgtgctggcggttgcctttgcagcgcaccactattcccaattaacccagttcacatgtgagaccacacttgattcctgtcagtgcaagcttccatcctcggagcctctgtctcgcacttttgtgtacagagacgtgactgattgtaccagcgtcaccggaacattcaaactgtttctgctgatccagatgattttgaacttggtctgtgggcttgtgtgtctgctcgcttgttttgttatgtggaaacatcgttaccaagtgttctacgtgggagtgagaatttgtagtttaacggctagtgaaggaccccagcaaaagatttag

SEQ ID NO: 313765 - DNA, 363 bp, Artificial Sequence
  derived and/or modified sequence
atgctgtgcgtatcataccaggtcgatgagagaacatgtatccaattttccatgaaattactgtactttttactgagcgccctgggccttacggtatgcgtgttggctgtggctttcgcagcacaccactacagccagctgacgcagttcacttgcgaaacaaccctggatagttgccagtgtaagctgcctagctcagaaccgcttagccgtaccttcgtgtaccgggatgttacagattgcacctccgtcactggaacttttaaattgttcctattaattcagatgatcttgaacttggtttgcggtctcgtctgtctcctggcatgtttcgttatgtggaaacatcgctaccaggtttag

SEQ ID NO: 313766 - DNA, 423 bp, Artificial Sequence
  derived and/or modified sequence
atgctctgcgtaagctaccaagtggacgaaagaacatgcatacaatttagtatgaagctgttgtactttttactcagcgccctgggtctgacagtctgcgtacttgccgtggcgttcgcagcccatcactattctcagcttacacagtttacctgcgagacgaccctggattcatgtcagtgtaagctgcccagttcagagcctctgtccaggacattcgtttaccgagatgtgaccgactgcacctcggtgactggcacatttaagttgtttctattaattcagatgatcctcaatctggtgtgcggcctggtctgtctgttggcctgcttcgtgatgtggaagcacaggtaccaggtcttttacgttggggttcggatctgctctctcacagcatcagaaggcccacaacagaagatctag

SEQ ID NO: 313767 - DNA, 587 bp, Artificial Sequence
  derived and/or modified sequence
attgtaccaggattgatgtgctcggtgcccagaaggcagtaagctctgctccctagcagccttggtctgcttagtggcctatcttggcttgtttatgctttgtgtctcatatcaggttgacgaacggacatgtattcaattttctatgaaactgttatactttctgctgagtgccctgggcctgacggtctgtgtgctggccgtggcctttgccgcccaccactattcgcagctcacacagtttacctgtgagaccacactcgactcttgccagtgcaaactgccctcctcggagccgctcagcaggacctttgtttaccgggatgtgacggactgtaccagcgtcactggcactttcaaactgttcttactcatccagatgattcttaatttggtctgcggccttgtgtgcttgttggcctgctttgtgatgtggaaacataggtaccaggtcttctatgtgggtgtcaggatatgctccctcacggcttccgaaggcccccagcaaaagatctaacattcttgctcaaagttgcgagagaaagtagcacatggagtagctgaggttaaacaaacaaaaaaaaatt

SEQ ID NO: 313768 - DNA, 423 bp, Artificial Sequence
  derived and/or modified sequence
atgctgtgcgtgagctaccaggtggacgagagaacctgcatccagttcagcatgaagctgctgtacttcctgctgagcgccctgggcctgaccgtgtgcgtgctggccgtggccttcgccgcccaccactacagccagctgacccagttcacctgcgagaccaccctggacagctgccagtgcaagctgcccagcagcgagcccctgagcagaaccttcgtgtacagagacgtgaccgactgcaccagcgtgaccggcaccttcaagctgttcctgctgatccagatgatcctgaacctggtgtgcggcctggtgtgcctgctggcctgcttcgtgatgtggaagcacagataccaggtgttctacgtgggcgtgagaatctgcagcctgaccgccagcgagggcccccagcagaagatctag

SEQ ID NO: 313769 - DNA, 363 bp, Artificial Sequence
  derived and/or modified sequence
atgctgtgcgtgagctaccaggtggacgagagaacctgcatccagttcagcatgaagctgctgtacttcctgctgagcgccctgggcctgaccgtgtgcgtgctggccgtggccttcgccgcccaccactacagccagctgacccagttcacctgcgagaccaccctggacagctgccagtgcaagctgcccagcagcgagcccctgagcagaaccttcgtgtacagagacgtgaccgactgcaccagcgtgaccggcaccttcaagctgttcctgctgatccagatgatcctgaacctggtgtgcggcctggtgtgcctgctggcctgcttcgtgatgtggaagcacagataccaggtgtag

SEQ ID NO: 313770 - protein, 170 aa, Artificial Sequence
  derived and/or modified sequence
MMSDASDMLAAALEQMDGIIAGSKALEYSNGIFDCQSPTSPFMGSLRALHLVEDLRGLLEMMETDEKEGLRCQIPDSTAETLVEWLQSQMTNGHLPGNGDVYQERLARLENDKESLVLQVSVLTDQVEAQGEKIRDLEFCLEEHREKVNATEEMLQQVCAEARTKMGFPC

SEQ ID NO: 313771 - DNA, 57 bp, Artificial Sequence
  derived and/or modified sequence
atgctgcagcaggagctgctgagcagaaccagcctggagacccagaagctggactag

SEQ ID NO: 313772 - DNA, 57 bp, Artificial Sequence
  derived and/or modified sequence
atgctgcagcaagagctcctttcacgcacatccctagaaacccagaagctcgattag

SEQ ID NO: 313773 - DNA, 57 bp, Artificial Sequence
  derived and/or modified sequence
atgctgcagcaggagctgctgagcaggaccagcctggagacccagaagctggactag

SEQ ID NO: 313774 - DNA, 57 bp, Artificial Sequence
  derived and/or modified sequence
atgctgcagcaggagctgctgagccggaccagcctggagacccagaaactcgattag

SEQ ID NO: 313775 - DNA, 57 bp, Artificial Sequence
  derived and/or modified sequence
atgctacagcaggagctactatctaggacatcactcgaaacacagaagctagattag

SEQ ID NO: 313776 - protein, 413 aa, Artificial Sequence
  derived and/or modified sequence
MRWFLSKIQDDFRGGKINLEKTQRLLEKLDIRCSYIHVKQIFKTSDYPVVLSLENHCSTAQQEVMADNLQATFGESLLSDMLDDFPDTLPSPEALKFKILVKNKKIGTLKETHERKGSDKRGDNQDKETGVKKLPGVMLFKKKKTRKLKIALALSDLVIYTKAEKFKSFQHSRLYQQFNENNSIGETQARKLSKLRVHEFIFHTRKFITRIYPKATRADSSNFNPQEFWNIGCQMVALNFQTPGLPMDLQNGKFLDNGGSGYILKPHFLRESKSYFNPSNIKEGMPITLTIRLISGIQLPLTHSSSNKGDSLVIIEVFGVPNDQMKQQTRVIKKNAFSPRWNETFTFIIHVPELALIRFVVEGQGLIAGNEFLGQYTLPLLCMNKGYRRIPLFSRMGESLEPASLFVYVWYVR

SEQ ID NO: 313777 - protein, 415 aa, Artificial Sequence
  derived and/or modified sequence
MEMRWFLSKIQDDFRGGKINLEKTQRLLEKLDIRCSYIHVKQIFKTSDYPVVLSLENHCSTAQQEVMADNLQATFGESLLSDMLDDFPDTLPSPEALKFKILVKNKKIGTLKETHERKGSDKRGDNQDKETGVKKLPGVMLFKKKKTRKLKIALALSDLVIYTKAEKFKSFQHSRLYQQFNENNSIGETQARKLSKLRVHEFIFHTRKFITRIYPKATRADSSNFNPQEFWNIGCQMVALNFQTPGLPMDLQNGKFLDNGGSGYILKPHFLRESKSYFNPSNIKEGMPITLTIRLISGIQLPLTHSSSNKGDSLVIIEVFGVPNDQMKQQTRVIKKNAFSPRWNETFTFIIHVPELALIRFVVEGQGLIAGNEFLGQYTLPLLCMNKGYRRIPLFSRMGESLEPASLFVYVWYVR

SEQ ID NO: 313778 - DNA, 1242 bp, Artificial Sequence
  derived and/or modified sequence
atgcggtggtttttaagtaaaattcaggacgatttccgcggcggcaaaatcaacttggaaaaaacccagcgtctgctggagaagcttgacatacggtgcagttatattcacgtcaaacagatctttaagacaagcgactatcctgtcgtgctttctctcgaaaaccattgcagcacggctcagcaggaggttatggccgacaacctccaggccaccttcggagaatcactgctgtccgatatgctagacgattttcccgacacgcttcccagccccgaggctttaaaatttaagatattggtgaaaaacaaaaagatcggaaccctcaaagaaactcatgaacggaagggatctgacaaaagaggtgacaaccaggataaggaaactggagtgaagaaactgcctggggtgatgttgttcaaaaaaaagaagactaggaaactcaaaattgctcttgccctgagcgatctggtcatatatactaaagcagaaaagtttaaaagtttccaacattcacggctgtaccagcaattcaacgaaaataacagtattggtgaaactcaagcacgaaagctgagcaagttgagggttcatgagttcatcttccatacacggaagtttataacccggatttaccctaaggccacacgggctgacagttccaatttcaatccccaagagttctggaatatagggtgccagatggtcgcattaaacttccaaaccccaggcttacctatggacctgcaaaacggcaagttcttagataatggaggttcggggtatatcctcaagccccacttcctccgggagagtaagtcttacttcaacccaagcaatattaaggagggaatgcctattactctaacaatacgccttattagcggaatccagctcccactgacacacagttctagcaacaaaggtgatagccttgtgatcattgaagtcttcggggtgcccaacgatcagatgaagcaacaaacacgggtaattaagaaaaatgccttctcgccacgatggaatgaaacgtttacgtttattatccacgtgccagaactggcactcatcagattcgtcgttgagggacagggactcattgcaggtaacgagttcttaggccagtataccctgcccctgttatgtatgaacaagggctatcggcgtattcccctgtttagcagaatgggagagtcactcgaacctgcaagcctgtttgtttatgtttggtacgttcgatag

SEQ ID NO: 313779 - DNA, 1248 bp, Artificial Sequence
  derived and/or modified sequence
atggagatgcggtggttcttgtctaagattcaggacgatttccgcgggggaaagatcaacctcgaaaagacgcagcgactcctggagaaattagacatccggtgttcctacattcacgtcaaacaaatattcaagacttctgattatcccgtcgtcctcagcctggagaatcattgttccacagcccagcaagaagttatggccgataatcttcaagcgaccttcggggagagcctgctgtcggacatgctagatgattttcctgacactcttccaagccctgaggccctgaagttcaagattttggtcaaaaacaagaaaataggcacactcaaggagactcacgagcggaaaggctccgacaagcggggcgataaccaggataaggaaacaggcgtcaagaagctcccaggcgttatgctcttcaaaaagaagaagacacgaaagctaaagattgccctggccctctcagacctcgtaatctacacgaaggctgaaaagtttaaatccttccagcattcccgactttatcagcagtttaatgagaataacagcattggcgagactcaggcgcgtaaactgagcaaactgcgagtccatgagttcatctttcatactagaaagttcatcacccggatctacccgaaagccacacgggccgattcttctaacttcaatccacaagagttctggaatatcgggtgccagatggtggcacttaactttcagacccctggattaccaatggacttgcagaatggaaaattcttggacaacgggggaagcgggtatatcctgaaaccacacttcctacgcgaaagcaagtcatactttaacccaagtaacatcaaagaggggatgcctatcacactcactataagattgatttctggcatccagctgccactgactcacagcagttcaaataagggggactccctagtgatcatcgaggtgtttggcgtgcccaacgatcagatgaaacagcagaccagagttatcaagaagaacgcatttagccctagatggaacgaaactttcacctttattattcatgtgcccgaactcgctcttatccggtttgttgtcgaggggcaggggctcattgctggtaacgagtttctcggacagtatactctccctttactgtgtatgaacaagggctacagacgaattcctctcttctcccgaatgggggagtctttggaacccgcatcacttttcgtatacgtgtggtatgtccggtag

SEQ ID NO: 313780 - DNA, 1242 bp, Artificial Sequence
  derived and/or modified sequence
atgcgctggttcctgagcaagatccaggatgacttccggggcggcaagatcaacctggagaagacccagaggctgctggagaagctggacatccgctgcagctacatccacgtgaagcagatcttcaagaccagtgactaccctgtggtgctgagcctggagaaccactgcagcacagcccagcaggaggtgatggctgacaacctgcaggccacctttggagagagcctgctgagtgacatgctggatgacttcccagacaccctgcccagccctgaggccctgaagttcaagatcctggtgaagaacaagaagattggcaccctgaaggagacccatgagaggaagggcagtgacaagagaggagacaaccaggacaaggagactggagtgaagaagctgcccggggtgatgctgttcaagaagaagaagaccaggaagctgaagatcgccctggccctgagtgacctggtgatctacaccaaggccgagaagttcaagagcttccagcacagccggctgtaccagcagttcaatgaaaacaacagcatcggggagacccaggccaggaagctgagcaagctgcgggtgcatgagttcatcttccacaccaggaagttcatcacccgcatctaccccaaggccaccagggctgacagcagcaacttcaacccccaggagttctggaacatcggctgccagatggtggccctgaacttccagaccccaggcctgcccatggacctgcagaatggcaagttcctggacaatggaggcagcggctacatcctgaagccccacttcctgcgggagagcaagagctacttcaaccccagcaacatcaaggagggcatgcccatcaccctgaccatccgcctcatcagcggcatccagctgcccctgacccacagcagcagcaacaagggggacagcctggtgatcatcgaggtgtttggagtgcccaatgaccagatgaagcagcagaccagggtcatcaagaagaatgccttcagcccccgctggaatgagaccttcaccttcatcatccacgtgcctgagctggccctgatccgctttgtggtggagggccagggcctgattgctggaaatgagttcctgggccagtacaccctgcccctgctgtgcatgaacaagggctaccgccgcatccccctcttcagcaggatgggagagagcctggagcccgccagcctgtttgtgtatgtgtggtacgtgaggtag

SEQ ID NO: 313781 - DNA, 1248 bp, Artificial Sequence
  derived and/or modified sequence
atggagatgcgctggttcctgagcaagatccaggatgacttccggggcggcaagatcaacctggagaagacccagaggctgctggagaagctggacatccgctgcagctacatccacgtgaagcagatcttcaagaccagtgactaccctgtggtgctgagcctggagaaccactgcagcacagcccagcaggaggtgatggctgacaacctgcaggccacctttggagagagcctgctgagtgacatgctggatgacttcccagacaccctgcccagccctgaggccctgaagttcaagatcctggtgaagaacaagaagattggcaccctgaaggagacccatgagaggaagggcagtgacaagagaggagacaaccaggacaaggagactggagtgaagaagctgcccggggtgatgctgttcaagaagaagaagaccaggaagctgaagatcgccctggccctgagtgacctggtgatctacaccaaggccgagaagttcaagagcttccagcacagccggctgtaccagcagttcaatgaaaacaacagcatcggggagacccaggccaggaagctgagcaagctgcgggtgcatgagttcatcttccacaccaggaagttcatcacccgcatctaccccaaggccaccagggctgacagcagcaacttcaacccccaggagttctggaacatcggctgccagatggtggccctgaacttccagaccccaggcctgcccatggacctgcagaatggcaagttcctggacaatggaggcagcggctacatcctgaagccccacttcctgcgggagagcaagagctacttcaaccccagcaacatcaaggagggcatgcccatcaccctgaccatccgcctcatcagcggcatccagctgcccctgacccacagcagcagcaacaagggggacagcctggtgatcatcgaggtgtttggagtgcccaatgaccagatgaagcagcagaccagggtcatcaagaagaatgccttcagcccccgctggaatgagaccttcaccttcatcatccacgtgcctgagctggccctgatccgctttgtggtggagggccagggcctgattgctggaaatgagttcctgggccagtacaccctgcccctgctgtgcatgaacaagggctaccgccgcatccccctcttcagcaggatgggagagagcctggagcccgccagcctgtttgtgtatgtgtggtacgtgaggtag

SEQ ID NO: 313782 - DNA, 1242 bp, Artificial Sequence
  derived and/or modified sequence
atgcggtggttcctgagcaagatccaggacgacttccggggcggcaaaataaacctcgaaaaaacacagcgtctcctggagaaattggatattcgatgcagttatattcatgtgaaacaaatctttaagaccagtgattaccccgtggttctgagcttggaaaatcactgctccaccgcgcagcaggaagtgatggccgacaacttgcaggcaacattcggagagagtctgctcagcgatatgctggacgattttcctgacacactgccgagtcctgaggctctgaaattcaaaattctggttaagaacaagaaaattggtaccttgaaagagacacacgagcggaaaggatctgacaaaagaggcgataatcaggataaggaaacgggggtgaaaaagctgcccggggtaatgcttttcaagaagaagaagactcgaaagttgaagatagcgctcgctctgagcgaccttgtgatttacacaaaagccgagaagttcaaaagcttccagcatagcaggttataccagcaattcaatgaaaacaactccataggcgagacccaggcgcgcaaactgtccaaactacgggtgcacgagttcatctttcacacccgaaagtttataacacgtatctatccgaaagccactagggcagattccagcaattttaatccccaagaattttggaatattgggtgccaaatggtggcgctgaacttccaaacgccaggattgccaatggacctgcaaaatggcaagtttcttgacaatggcggtagcggatacattctgaagcctcactttttgcgagagagcaagagctacttcaaccctagcaatataaaggagggcatgccaattacgcttaccattagactcatttcagggatccagctccctctgacccattcatccagcaacaaaggtgactccttggtgataatcgaggtcttcggcgttcctaatgaccagatgaaacaacaaactcgtgtcattaagaagaacgccttttctccaaggtggaatgagacctttacattcatcatccatgtgcctgaacttgcattaattaggtttgtggtagaaggacagggcctgatagcagggaatgagtttctcggccagtatacccttcctctgttatgtatgaacaaagggtaccgcaggatcccactgttctctagaatgggtgagtcactggagccagcctccctttttgtctacgtgtggtatgtccgatag

SEQ ID NO: 313783 - DNA, 1248 bp, Artificial Sequence
  derived and/or modified sequence
atggagatgcggtggttcctgagcaagatccaggacgacttccggggtggaaaaataaatcttgagaagacacagcggctgctcgagaagctggatatcagatgctcatacatacatgtgaaacagatcttcaaaaccagcgattaccccgtagtgctgagccttgaaaaccattgtagcaccgcgcaacaggaggtgatggccgacaacctgcaagccaccttcggggagtccctgctgtcagatatgttagatgattttcccgacacactccctagtccagaagccctgaaattcaagatcctggtgaaaaacaaaaaaatcgggactctgaaggaaacccatgagcgcaagggaagtgataaaagaggggataatcaggacaaagaaactggcgtgaagaaactgccaggggtgatgttgttcaagaagaaaaagacccgcaagctgaagatcgcgctggccctcagtgatctcgtaatctacaccaaggccgaaaagtttaaatcttttcagcatagcagactgtaccagcaatttaacgagaataatagcatcggggaaacccaggctcggaaactttccaagctaagagtgcatgaattcatctttcacacccggaaattcataacccgcatttaccctaaagcaacaagagcagactcctccaacttcaatccccaagagttctggaacatcggttgtcagatggtagccctaaactttcagaccccagggttgccaatggacctgcaaaacggaaaattcctggataatggtggatcaggatatattctgaagccccactttctacgagagtctaaaagttacttcaatccatcgaacataaaagagggcatgccgattacattgaccatcaggctgatctccggcatccagctgccactgacacactctagttctaacaagggcgatagtctggtaattatcgaagtgttcggcgttcctaatgaccagatgaagcagcagacacgcgtgatcaagaaaaatgcattcagccccagatggaacgaaaccttcacgtttattattcacgtacctgaactcgccctcattcgttttgtggtggagggacagggacttatcgctggcaatgaattcctggggcaatatactttaccgctcctctgcatgaataaaggctatcgacgcataccgcttttttctagaatgggggagtctctggagcccgcctcacttttcgtatacgtatggtacgtgcgatag

SEQ ID NO: 313784 - DNA, 1569 bp, Artificial Sequence
  derived and/or modified sequence
acaatgggaattcagaccaaaaggaaaaaatgacagtcacctgacagtgtggtgcccagccaaccagctatacctcttttgaagattttaagaacttagcctcctgaacagtcttcttcgaaagtgaaaagtggtaacagctgatgagtatcaagaaattattttctgcaaaggggcagagttaattgtatttggaacccatgacagcacctactggggaaagacttctaagtgaggagaaacggctctacaggtcatgaaactatggaaatgagatggtttttgtcaaagattcaggatgacttcagaggtggaaaaattaacctagaaaaaactcagaggttacttgaaaaattagatattcggtgcagttatattcatgtgaaacagatttttaagacatctgactacccagtggtgctctctttagaaaatcactgctccactgcccaacaagaagtaatggcagacaatttgcaggctacttttggagagtccttgctttctgatatgcttgatgattttcctgatactctaccatcaccagaggcactaaaattcaaaatattagttaaaaataagaaaataggaaccttaaaggaaacccatgaaagaaaaggttctgataagcgtggagacaatcaagacaaggaaacaggggtaaaaaagttacctggagtaatgcttttcaagaaaaagaagaccaggaagctaaaaattgctctggccttatctgatcttgtcatttatacgaaagctgagaaattcaaaagctttcaacattcaagattatatcagcaatttaatgaaaataattctattggggagacacaagcccgaaaactttcaaaattgcgagtccatgagtttatttttcacaccaggaagttcattaccagaatatatcccaaagcaacaagagcagactcttctaattttaatccccaagaattttggaatataggttgtcaaatggtggctttaaatttccagacccctggtctgcccatggatctgcaaaatgggaaatttttggataatggtggttctggatatattttgaaaccacatttcttaagagagagtaaatcatactttaacccaagtaacataaaagagggtatgccaattacacttacaataaggctcatcagtggtatccagttgcctcttactcattcatcatctaacaaaggtgattcattagtaattatagaagtttttggtgttccaaatgatcaaatgaagcagcagactcgtgtaattaaaaaaaatgcttttagtccaagatggaatgaaacattcacatttattattcatgtcccagaattggcattgatacgttttgttgttgaaggtcaaggtttaatagcaggaaatgaatttcttgggcaatatactttgccacttctatgcatgaacaaaggttatcgtcgtattcctctgttttccagaatgggtgagagccttgagcctgcttcactgtttgtttatgtttggtacgtcagataacagctaatgataaatgacatatcattagctatgcatcgcaataaaacagccaaaatg

SEQ ID NO: 313785 - DNA, 1398 bp, Artificial Sequence
  derived and/or modified sequence
tgcaaaggggcagagttaattgtatttggaacccatgacagcacctactggggaaagacttctaagtgaggagaaacggctctacaggtcatgaaactatggaaatgagatggtttttgtcaaagattcaggatgacttcagaggtggaaaaattaacctagaaaaaactcagaggttacttgaaaaattagatattcggtgcagttatattcatgtgaaacagatttttaagacatctgactacccagtggtgctctctttagaaaatcactgctccactgcccaacaagaagtaatggcagacaatttgcaggctacttttggagagtccttgctttctgatatgcttgatgattttcctgatactctaccatcaccagaggcactaaaattcaaaatattagttaaaaataagaaaataggaaccttaaaggaaacccatgaaagaaaaggttctgataagcgtggagacaatcaagacaaggaaacaggggtaaaaaagttacctggagtaatgcttttcaagaaaaagaagaccaggaagctaaaaattgctctggccttatctgatcttgtcatttatacgaaagctgagaaattcaaaagctttcaacattcaagattatatcagcaatttaatgaaaataattctattggggagacacaagcccgaaaactttcaaaattgcgagtccatgagtttatttttcacaccaggaagttcattaccagaatatatcccaaagcaacaagagcagactcttctaattttaatccccaagaattttggaatataggttgtcaaatggtggctttaaatttccagacccctggtctgcccatggatctgcaaaatgggaaatttttggataatggtggttctggatatattttgaaaccacatttcttaagagagagtaaatcatactttaacccaagtaacataaaagagggtatgccaattacacttacaataaggctcatcagtggtatccagttgcctcttactcattcatcatctaacaaaggtgattcattagtaattatagaagtttttggtgttccaaatgatcaaatgaagcagcagactcgtgtaattaaaaaaaatgcttttagtccaagatggaatgaaacattcacatttattattcatgtcccagaattggcattgatacgttttgttgttgaaggtcaaggtttaatagcaggaaatgaatttcttgggcaatatactttgccacttctatgcatgaacaaaggttatcgtcgtattcctctgttttccagaatgggtgagagccttgagcctgcttcactgtttgtttatgtttggtacgtcagataacagctaatgataaatgacatatcattagctatgcatcgcaataaaacagcca

SEQ ID NO: 313786 - DNA, 1242 bp, Artificial Sequence
  derived and/or modified sequence
atgcggtggtttctatccaaaattcaggatgatttccgcggaggtaaaattaacctcgaaaagacccagaggttattggagaaactggacataagatgttcttatatccacgtgaagcagatcttcaaaacaagcgattacccagtcgttctatcccttgagaaccattgttctacggctcagcaggaggttatggcagacaatctgcaagcaaccttcggggaatcattactctctgatatgctggacgattttcctgacacactgccatctccagaggctctgaagttcaaaattctcgttaaaaataagaagatcgggacactgaaggaaacgcatgaaaggaagggctccgacaagaggggggacaaccaggataaggagacaggagtgaagaaacttcccggtgtgatgctttttaaaaagaagaagacacgcaaattgaagattgctctggcacttagcgacttggtgatatatacaaaggctgaaaaattcaagagctttcagcactcaagattatatcaacagttcaacgaaaataactccatcggggaaactcaggccaggaaactgagcaagctgagggtccatgagtttatcttccatacgaggaagttcattacacgaatataccccaaagctacaagagcggattcctcgaatttcaacccccaggagttttggaatattggatgccagatggtggcgctgaatttccagacacccggactgcctatggatctccagaatgggaagttcttggacaacgggggatcgggctatatcctgaagccacacttcttaagggaaagcaaatcctactttaatcccagtaatatcaaggagggaatgcctatcaccctgacaattagactcatttccggtatccagctgcccttaactcacagcagttccaataaaggcgatagcctagtcatcatcgaggtgtttggggttcccaacgaccaaatgaaacagcagacaagagttataaaaaaaaacgcttttagtccacgctggaatgaaactttcacctttataatacacgttcccgagctggcattgattagattcgttgtggagggccaggggcttatagcaggaaatgagtttcttggccagtataccttgcccttgttgtgtatgaataaaggataccgacgaatccctttgtttagtcgaatgggcgagtcattggagcctgcatccctgtttgtctacgtttggtatgttcggtag

SEQ ID NO: 313787 - DNA, 1248 bp, Artificial Sequence
  derived and/or modified sequence
atggagatgcgctggtttctctcaaagatccaggacgatttcagggggggaaagattaatctggaaaaaacacagcgtctattggaaaagctggacatcaggtgcagctacattcacgttaagcagatcttcaaaaccagcgattatccagtggtgttgagccttgaaaaccactgctccactgcacagcaagaggttatggcggacaacctccaggctaccttcggcgagtcgttactgtccgatatgctagacgacttccccgatactcttcccagccccgaagccctgaaatttaagatcctggttaagaacaagaagatcggcaccctgaaggaaactcacgaaaggaaggggagcgacaaaaggggggacaatcaggacaaagagaccggcgtgaagaagctcccaggcgtgatgctcttcaaaaagaagaaaacccgtaaactgaagatcgcactggcactctcagatttggttatctataccaaggcagagaagtttaaaagtttccagcacagcaggttgtatcaacaattcaacgagaacaattctatcggggagacccaagcacgaaaactaagcaaactgcgagtgcatgagtttatattccacacacgtaagttcatcacaagaatttatcccaaagcaacaagggccgactccagcaatttcaatccacaagagttctggaacatcggatgtcagatggtggcgcttaactttcagacccccggtcttcccatggatctgcagaacggaaagttcctcgacaacggcggatcaggctatatcctaaaacctcactttcttagggagtctaagagttattttaacccttcaaacattaaggagggcatgcccatcacacttaccattcgcctgatctcaggaatccagctgcctctcacccactcttcctccaataagggtgactctttggtcattatcgaggtttttggagtgccaaacgatcagatgaagcagcagaccagagtgatcaaaaagaacgccttctctcccaggtggaacgaaacattcacgttcatcatacatgttccagaactggctctgatacggttcgtggtcgagggtcagggcttgatcgctggcaatgagttcttgggccaatacacgctgccactcttgtgtatgaacaaagggtatagacgtatacctctgttttcaaggatgggtgagtctcttgagccagcaagcttgtttgtgtatgtgtggtacgtgcgttag

SEQ ID NO: 313788 - DNA, 1242 bp, Artificial Sequence
  derived and/or modified sequence
atgagatggttcctgagcaagatccaggacgacttcagaggcggcaagatcaacctggagaagacccagagactgctggagaagctggacatcagatgcagctacatccacgtgaagcagatcttcaagaccagcgactaccccgtggtgctgagcctggagaaccactgcagcaccgcccagcaggaggtgatggccgacaacctgcaggccaccttcggcgagagcctgctgagcgacatgctggacgacttccccgacaccctgcccagccccgaggccctgaagttcaagatcctggtgaagaacaagaagatcggcaccctgaaggagacccacgagagaaagggcagcgacaagagaggcgacaaccaggacaaggagaccggcgtgaagaagctgcccggcgtgatgctgttcaagaagaagaagaccagaaagctgaagatcgccctggccctgagcgacctggtgatctacaccaaggccgagaagttcaagagcttccagcacagcagactgtaccagcagttcaacgagaacaacagcatcggcgagacccaggccagaaagctgagcaagctgagagtgcacgagttcatcttccacaccagaaagttcatcaccagaatctaccccaaggccaccagagccgacagcagcaacttcaacccccaggagttctggaacatcggctgccagatggtggccctgaacttccagacccccggcctgcccatggacctgcagaacggcaagttcctggacaacggcggcagcggctacatcctgaagccccacttcctgagagagagcaagagctacttcaaccccagcaacatcaaggagggcatgcccatcaccctgaccatcagactgatcagcggcatccagctgcccctgacccacagcagcagcaacaagggcgacagcctggtgatcatcgaggtgttcggcgtgcccaacgaccagatgaagcagcagaccagagtgatcaagaagaacgccttcagccccagatggaacgagaccttcaccttcatcatccacgtgcccgagctggccctgatcagattcgtggtggagggccagggcctgatcgccggcaacgagttcctgggccagtacaccctgcccctgctgtgcatgaacaagggctacagaagaatccccctgttcagcagaatgggcgagagcctggagcccgccagcctgttcgtgtacgtgtggtacgtgagatag

SEQ ID NO: 313789 - DNA, 1248 bp, Artificial Sequence
  derived and/or modified sequence
atggagatgagatggttcctgagcaagatccaggacgacttcagaggcggcaagatcaacctggagaagacccagagactgctggagaagctggacatcagatgcagctacatccacgtgaagcagatcttcaagaccagcgactaccccgtggtgctgagcctggagaaccactgcagcaccgcccagcaggaggtgatggccgacaacctgcaggccaccttcggcgagagcctgctgagcgacatgctggacgacttccccgacaccctgcccagccccgaggccctgaagttcaagatcctggtgaagaacaagaagatcggcaccctgaaggagacccacgagagaaagggcagcgacaagagaggcgacaaccaggacaaggagaccggcgtgaagaagctgcccggcgtgatgctgttcaagaagaagaagaccagaaagctgaagatcgccctggccctgagcgacctggtgatctacaccaaggccgagaagttcaagagcttccagcacagcagactgtaccagcagttcaacgagaacaacagcatcggcgagacccaggccagaaagctgagcaagctgagagtgcacgagttcatcttccacaccagaaagttcatcaccagaatctaccccaaggccaccagagccgacagcagcaacttcaacccccaggagttctggaacatcggctgccagatggtggccctgaacttccagacccccggcctgcccatggacctgcagaacggcaagttcctggacaacggcggcagcggctacatcctgaagccccacttcctgagagagagcaagagctacttcaaccccagcaacatcaaggagggcatgcccatcaccctgaccatcagactgatcagcggcatccagctgcccctgacccacagcagcagcaacaagggcgacagcctggtgatcatcgaggtgttcggcgtgcccaacgaccagatgaagcagcagaccagagtgatcaagaagaacgccttcagccccagatggaacgagaccttcaccttcatcatccacgtgcccgagctggccctgatcagattcgtggtggagggccagggcctgatcgccggcaacgagttcctgggccagtacaccctgcccctgctgtgcatgaacaagggctacagaagaatccccctgttcagcagaatgggcgagagcctggagcccgccagcctgttcgtgtacgtgtggtacgtgagatag

SEQ ID NO: 313790 - DNA, 759 bp, Artificial Sequence
  derived and/or modified sequence
ggagaggcttatcacttccctgagaagaaaaacacattttcagttttgcctgcatcataagagtgagcactccattgctttctttcctggccacactgctacaatccagcactaactatccatgtccagggtaaggatcgagatcgagaagcccacactgccagtgaaaaagctacgtctttactgcataaattagaggaagcaatttcggaacaacggaaccttcaaactataaatactgaattatcgaacacttgccaggcacttcagcagaagacaaggaaactgaagacaacaattgagtcacttcaaaaggagttcattgaaggggaacaccatggcttgctgtttcagagctttttagatgaggaatttcctcactatgattccctgtcctgcgcagatgcaattcaacaacctcttcaagaaaaattgcagtgttgccacaaactatatggtggtcaagaagcaagaatacatcagacacccctgaccttgaaacatacgtgctggtacacacctctgctggatgccttatctctggatagttttacagcagttccaaccctggaatcaacacctttctcaggtgtagccaaccaaatccacactctgtgtgaaaggcccacatatggagaagtaaaggatggtgctttggatgtaaaaagacaacacaagtgcccaggccccacaagtggccccagcccaggaacgaatctctcaggctgcatcaggatgaatgatgacccaagtatggaa

SEQ ID NO: 313791 - protein, 853 aa, Artificial Sequence
  derived and/or modified sequence
MSEKVDWLQSQNGVCKVDVYSPGDNQAQDWKMDTSTDPVRVLSWLRRDLEKSTAEFQDVRFKPGESFGGETSNSGDPHKGFSVDYYNTTTKGTPERLHFEMTHKEIPCQGPRAQLGNGSSVDEVSFYANRLTNLVIAMARKEINEKIDGSENKCVYQSLYMGNEPTPTKSLSKIASELVNETVSACSRNAAPDKAPGSGDRVSGSSQSPPNLKYKSTLKIKESTKERQGPDDKPPSKKSFFYKEVFESRNGDYAREGGRFFPRERKRFRGQERPDDFTASVSEGIMTYANSVVSDMMVSIMKTLKIQVKDTTIATILLKKVLLKHAKEVVSDLIDSFLRNLHSVTGTLMTDTQFVSAVKRTVFSHGSQKATDIMDAMLRKLYNVMFAKKVPEHVRKAQDKAESYSLISMKGMGDPKNRNVNFAMKSETKLREKMYSEPKSEEETCAKTLGEHIIKEGLTLWHKTQQKECKSLGFQHAAFEAPNTQRKPASDISFEYPEDIGNLSLPPYPPEKPENFMYDSDSWAEDLIVSALLLIQYHLAQGGRRDARSFVEAAGTTNFPANEPPVAPDESCLKSAPIVGDQEQAEKKDLRSVFFNFIRNLLSETIFKRDQSPEPKVPEQPVKEDRKLCERPLASSPPRLYEDDETPGALSGLTKMAVSQIDGHMSGQMVEHLMNSVMKLCVIIAKSCDASLAELGDDKSGDASRLTSAFPDSLYECLPAKGTGSAEAVLQNAYQAIHNEMRGTSGQPPEGCAAPTVIVSNHNLTDTVQNKQLQAVLQWVAASELNVPILYFAGDDEGIQEKLLQLSAAAVDKGCSVGEVLQSVLRYEKERQLNEAVGNVTPLQLLDWLMVNL

SEQ ID NO: 313792 - protein, 96 aa, Artificial Sequence
  derived and/or modified sequence
MSEKVDWLQSQNGVCKVDVYSPGDNQAQDWKMDTSTDPVRVLSWLRRDLEKSTAEFQDVRFKPGESFGGETSNSGDPHKGFSVDYYNTTTKGTPER

SEQ ID NO: 313793 - DNA, 2562 bp, Artificial Sequence
  derived and/or modified sequence
atgagcgagaaggtggactggctgcagagccagaacggcgtgtgcaaggtggacgtgtacagccccggcgacaaccaggcccaggactggaagatggacaccagcaccgaccccgtgagagtgctgagctggctgagaagagacctggagaagagcaccgccgagttccaggacgtgagattcaagcccggcgagagcttcggcggcgagaccagcaacagcggcgacccccacaagggcttcagcgtggactactacaacaccaccaccaagggcacccccgagagactgcacttcgagatgacccacaaggagatcccctgccagggccccagagcccagctgggcaacggcagcagcgtggacgaggtgagcttctacgccaacagactgaccaacctggtgatcgccatggccagaaaggagatcaacgagaagatcgacggcagcgagaacaagtgcgtgtaccagagcctgtacatgggcaacgagcccacccccaccaagagcctgagcaagatcgccagcgagctggtgaacgagaccgtgagcgcctgcagcagaaacgccgcccccgacaaggcccccggcagcggcgacagagtgagcggcagcagccagagcccccccaacctgaagtacaagagcaccctgaagatcaaggagagcaccaaggagagacagggccccgacgacaagccccccagcaagaagagcttcttctacaaggaggtgttcgagagcagaaacggcgactacgccagagagggcggcagattcttccccagagagagaaagagattcagaggccaggagagacccgacgacttcaccgccagcgtgagcgagggcatcatgacctacgccaacagcgtggtgagcgacatgatggtgagcatcatgaagaccctgaagatccaggtgaaggacaccaccatcgccaccatcctgctgaagaaggtgctgctgaagcacgccaaggaggtggtgagcgacctgatcgacagcttcctgagaaacctgcacagcgtgaccggcaccctgatgaccgacacccagttcgtgagcgccgtgaagagaaccgtgttcagccacggcagccagaaggccaccgacatcatggacgccatgctgagaaagctgtacaacgtgatgttcgccaagaaggtgcccgagcacgtgagaaaggcccaggacaaggccgagagctacagcctgatcagcatgaagggcatgggcgaccccaagaacagaaacgtgaacttcgccatgaagagcgagaccaagctgagagagaagatgtacagcgagcccaagagcgaggaggagacctgcgccaagaccctgggcgagcacatcatcaaggagggcctgaccctgtggcacaagacccagcagaaggagtgcaagagcctgggcttccagcacgccgccttcgaggcccccaacacccagagaaagcccgccagcgacatcagcttcgagtaccccgaggacatcggcaacctgagcctgcccccctacccccccgagaagcccgagaacttcatgtacgacagcgacagctgggccgaggacctgatcgtgagcgccctgctgctgatccagtaccacctggcccagggcggcagaagagacgccagaagcttcgtggaggccgccggcaccaccaacttccccgccaacgagccccccgtggcccccgacgagagctgcctgaagagcgcccccatcgtgggcgaccaggagcaggccgagaagaaggacctgagaagcgtgttcttcaacttcatcagaaacctgctgagcgagaccatcttcaagagagaccagagccccgagcccaaggtgcccgagcagcccgtgaaggaggacagaaagctgtgcgagagacccctggccagcagcccccccagactgtacgaggacgacgagacccccggcgccctgagcggcctgaccaagatggccgtgagccagatcgacggccacatgagcggccagatggtggagcacctgatgaacagcgtgatgaagctgtgcgtgatcatcgccaagagctgcgacgccagcctggccgagctgggcgacgacaagagcggcgacgccagcagactgaccagcgccttccccgacagcctgtacgagtgcctgcccgccaagggcaccggcagcgccgaggccgtgctgcagaacgcctaccaggccatccacaacgagatgagaggcaccagcggccagccccccgagggctgcgccgcccccaccgtgatcgtgagcaaccacaacctgaccgacaccgtgcagaacaagcagctgcaggccgtgctgcagtgggtggccgccagcgagctgaacgtgcccatcctgtacttcgccggcgacgacgagggcatccaggagaagctgctgcagctgagcgccgccgccgtggacaagggctgcagcgtgggcgaggtgctgcagagcgtgctgagatacgagaaggagagacagctgaacgaggccgtgggcaacgtgacccccctgcagctgctggactggctgatggtgaacctgtag

SEQ ID NO: 313794 - DNA, 2562 bp, Artificial Sequence
  derived and/or modified sequence
atgagcgaaaaggtggattggctacagtcacagaacggcgtatgtaaggtagatgtttacagtcctggggacaaccaagcgcaggattggaaaatggacacctctaccgaccccgtgcgagtgctgagctggttgaggcgagatctggaaaaatcgacagctgagttccaggacgttcgctttaaaccaggagagtccttcggaggcgagacctccaactcaggtgatccgcacaagggtttctccgtggattactacaatacaacaacaaagggaacacccgaaaggttacacttcgagatgactcacaaggagatcccctgtcaagggccgagggctcagctgggtaacggtagcagcgtcgatgaagttagcttctatgccaaccggctgacaaatctggtgatcgctatggcccgcaaagagattaacgagaaaatcgatggttcggaaaataaatgcgtctaccaaagcctatatatgggcaatgaaccaactccgacaaaaagcctgagcaaaattgctagtgagctggtgaatgagaccgtgtctgcctgttcaagaaatgctgcacctgacaaagctcctggtagcggggacagagtgagtgggtcctcccaaagccctcctaacctgaagtacaagtccaccctgaagattaaggagtccactaaggaaagacagggtccagacgacaagcccccttctaaaaaaagctttttttacaaagaggtctttgaaagtagaaacggtgactacgcgagggagggcggaaggttctttccgcgtgagagaaagagatttcgcggacaggagcggcctgatgacttcactgcttccgtgtccgaaggcattatgacgtatgctaattctgtggtgagtgatatgatggtatctatcatgaagactctgaaaatccaagtcaaagatactaccattgctaccatcctcctgaaaaaggtcctcttgaaacatgccaaagaagtggtaagcgatctcattgactcatttctacgaaaccttcacagcgtgacaggtaccctgatgacagacacccagttcgttagcgcggtcaagcgcacggtgttctcccatgggtcccagaaggcaaccgatatcatggacgctatgttaagaaaactctacaatgttatgttcgccaaaaaagtgccggagcatgtgcggaaagcccaggacaaagcggagagttacagcttgatatcaatgaagggtatgggggatccaaaaaaccgaaatgtgaactttgctatgaagtcagaaacaaagttaagagagaagatgtactctgagcctaagtctgaagaggagacgtgtgcaaagactctgggcgaacatattataaaagaggggctgactctctggcataaaacccagcagaaagagtgtaagagcctgggattccagcacgccgctttcgaagcacccaacacacaacggaagccggcatctgatataagttttgaataccctgaggacatcggcaatctgtctctacctccgtatcctccagaaaaaccagagaactttatgtatgattccgattcctgggccgaggacctcattgtgagcgccctgctgcttatccagtatcacctggcccagggggggaggcgtgatgctcgaagcttcgtagaggctgccggcaccacgaatttcccagctaatgagccccctgtggcccccgacgagtcttgccttaagagcgcgccaattgtgggtgaccaggaacaagccgagaagaaggacctgaggtctgtgtttttcaatttcattagaaacctactgtctgagaccatttttaagagagatcagagtcctgagccgaaagttcctgaacagccggtgaaagaggatagaaagctatgtgaaaggccactcgcttctagcccaccgcggctgtatgaggatgacgagactcccggagcattaagcgggttgactaagatggctgtgagccagatcgacggtcatatgtctggtcaaatggtcgagcacctgatgaattccgtaatgaaactgtgcgtaataatcgcaaaaagctgcgacgcctctctcgccgagttgggagacgacaagtcaggggatgccagccgcctcactagcgcctttccggattcgctgtatgagtgtctgcccgctaagggcacaggctctgcggaagcagtgctgcaaaatgcatatcaggccatccacaatgaaatgaggggcacctccggacagccacccgaaggttgcgcagctcctaccgtgatagtttcaaaccacaatctgaccgataccgtccagaacaaacagctccaggcggtgttacagtgggtggctgcgtccgaactgaacgtccctattctctattttgccggcgacgatgaaggaatccaggagaagcttctgcagctgagtgctgcggctgttgacaaaggttgttctgttggcgaagtcctccaatccgtcttgcggtatgaaaaggagcggcagctgaatgaggccgtcggtaacgtcaccccactacaattgctggactggttgatggtgaatctgtag

SEQ ID NO: 313795 - DNA, 2562 bp, Artificial Sequence
  derived and/or modified sequence
atgtctgagaaggtggactggctgcagagccagaatggagtgtgcaaggtggatgtgtacagccctggggacaaccaggcccaggactggaagatggacaccagcacagatcctgtgcgggtgctgtcctggctgcggcgggacctggagaagagcacagctgagttccaggatgtgcgcttcaagccaggagagagctttggaggagagaccagcaacagcggggacccccacaagggcttctctgtggactactacaacaccaccaccaagggcaccccagagcggctgcactttgagatgacccacaaggagatcccctgccagggcccccgggcccagctgggcaatggcagctctgtggatgaggtgtccttctacgccaaccggctgaccaacctggtgattgccatggccaggaaggagatcaatgagaagattgatggctctgaaaataaatgtgtgtaccagagcctgtacatgggaaatgagcccacccccaccaagagcctgagcaagatcgccagcgagctggtgaatgagaccgtgtctgcctgcagcagaaatgctgccccagacaaggcccctggcagcggggacagagtgtctggcagcagccagagcccccccaacctgaagtacaagagcaccctgaagatcaaggagagcaccaaggagcggcagggcccagatgacaagccacccagcaagaagagcttcttctacaaggaggtgtttgagagcagaaatggagactatgcccgggagggcggccgcttcttcccccgggagaggaagcgcttccggggccaggagaggccagatgacttcaccgcctctgtgtctgagggcatcatgacctacgccaacagcgtggtgtctgacatgatggtgtccatcatgaagaccctgaagatccaggtgaaggacaccaccatcgccaccatcctgctgaagaaggtgctgctgaagcacgccaaggaggtggtgtctgacctgattgacagcttcctgaggaacctgcacagcgtgacaggcaccctgatgacagacacccagtttgtgtctgctgtgaagaggacagtgttcagccacggcagccagaaggccacagacatcatggatgccatgctgaggaagctgtacaacgtgatgtttgccaagaaggtgcctgagcacgtgaggaaggcccaggacaaggccgagagctacagcctcatctccatgaagggcatgggagaccccaagaacagaaatgtgaactttgccatgaagtctgagaccaagctgcgggagaagatgtacagcgagcccaagtctgaggaggagacctgtgccaagaccctgggggagcacatcatcaaggagggcctgaccctgtggcacaagacccagcagaaggagtgcaagagcctgggcttccagcacgccgcctttgaggcccccaacacccagaggaagccagccagtgacatcagctttgagtacccagaggacatcggcaacctgagcctgcccccctacccacctgagaagccagagaacttcatgtatgacagcgacagctgggccgaggacctgattgtgtctgccctgctgctgatccagtaccacctggcccagggcggcagaagagatgcccggagctttgtggaggccgccggcaccaccaacttccctgccaatgagccccctgtggccccagatgagagctgcctgaagagcgcccccatcgtgggggaccaggagcaggccgagaagaaggacctgcggagcgtcttcttcaacttcatccggaacctgctgtctgagaccatcttcaagagggaccagagccctgagcccaaggtgcctgagcagcctgtgaaggaggacaggaagctgtgtgagcggcccctggccagcagccccccccggctgtatgaagatgatgagacccctggggccctgagcggcctgaccaagatggctgtgtcccagattgatggccacatgagcggccagatggtggagcacctgatgaacagcgtgatgaagctgtgtgtgatcatcgccaagagctgtgatgccagcctggccgagctgggagatgacaagtctggagatgccagccggctgaccagcgccttcccagacagcctgtatgagtgcctgcctgccaagggcactggatctgctgaggccgtgctgcagaatgcctaccaggccatccacaatgagatgaggggcaccagcggccagcccccagagggctgtgccgcccccaccgtcatcgtgagcaaccacaacctgacagacacagtgcagaacaagcagctgcaggccgtgctgcagtgggtggccgccagcgagctgaatgtgcccatcctgtactttgctggagatgatgagggcatccaggagaagctgctgcagctgtctgctgctgctgtggacaagggctgcagcgtgggggaggtgctgcagagcgtgctgcgctatgagaaggagcggcagctgaatgaggccgtgggcaatgtgacccccctgcagctgctggactggctgatggtgaacctgtag

SEQ ID NO: 313796 - DNA, 3019 bp, Artificial Sequence
  derived and/or modified sequence
ggtacatggaaggccacaggaagaaacaagatcttgagctgagcaagaacatcccagcatcttcattgactttaaaagtatattctggagtcttccgtggttcactattccagtactacagagattccttatattacatggcaggaggggggtaaactgagggatagtgaagacaacaataaattaatcaagagctttcctcatatctcagaacctatcctctgtaagaatgtcagaaaaggttgactggttacaaagccaaaatggagtatgcaaagttgatgtctattctcctggagacaaccaagcccaggactggaaaatggacacctccacggatcctgtcagagtgctcagctggctccgcagagacctggagaagagtacagcagagttccaagatgttcggttcaaacccggagaatcatttggtggggaaacgtccaactcaggagacccacacaaaggtttctctgtagactattacaacaccaccaccaagggcactccagaaagattgcattttgagatgactcacaaagagattccttgccagggccccagggcccaacttggcaacgggagttcagtagatgaagtttccttctatgctaaccgcctcacgaatctagtcatagccatggcccgcaaagagatcaatgagaagatcgatggctctgaaaacaaatgtgtctatcagtcattgtacatggggaatgaacccacacccaccaaaagcctcagtaagatagcatcagagcttgtgaatgagaccgtctctgcatgttccaggaatgctgccccagacaaggctcctggctctggagacagagtctcgggatcatcacaaagtcccccaaatttgaaatacaagtccactttgaagatcaaggagagcaccaaagaaagacagggtccagatgacaagcctccttctaagaagtctttcttctataaggaagtgtttgaatctcgtaatggagattatgccagagagggtggaaggttctttcctcgggagagaaagaggtttcgagggcaggaaaggcctgatgactttacggcttctgttagtgaagggatcatgacctatgctaacagtgtggtatctgatatgatggtctccatcatgaagacactgaagatccaagtgaaagacacaaccattgccaccatcctactgaagaaggttctgctcaagcatgcaaaagaggtggtctcggatctcatcgactccttcttgaggaatctccacagcgtcacagggaccctcatgactgacacacagtttgtctcggctgtgaaaagaactgtcttctctcatggaagccaaaaggccacagatatcatggatgccatgctaaggaagctgtacaatgtaatgtttgccaagaaagtccctgagcatgtcaggaaagcccaagacaaggctgagagttattccctcatctccatgaaaggaatgggtgatcctaaaaaccgaaatgtgaactttgccatgaaatctgaaactaaattgagagaaaaaatgtattctgaacccaaatcagaggaggagacttgtgcgaaaactctgggtgagcacattatcaaagaggggcttaccttgtggcataaaactcagcagaaagaatgtaaatctctaggtttccagcatgcagcatttgaagctcccaacacacagcgtaagcctgcatcagacatttcctttgagtaccctgaagatattggcaacctcagccttcctccatatcctccagagaaacctgagaattttatgtatgattcagactcctgggccgaggacctgatcgtgtctgccctgcttctgattcaatatcacctggcccagggaggaagaagggatgcacggagcttcgttgaagctgctggcaccaccaactttcctgccaatgaacctcctgtagctcccgatgaatcttgccttaagtctgctcccattgtaggtgaccaagaacaagcagaaaagaaggacctaaggagtgttttctttaatttcatccggaacttacttagtgagaccattttcaagcgtgaccagagccctgaacccaaggtgccggaacagccagttaaggaagataggaagttgtgtgaaagaccgttggcgtcttctccccccaggctatatgaggatgatgagacccctggtgccctttctgggctgaccaagatggctgtcagccagatagatggccacatgagtgggcagatggtagaacatctgatgaactcagtgatgaagctgtgtgtcatcattgctaagtcctgtgatgcttcgttggcagagctgggagatgacaagtctggagatgccagtaggctaacttcggccttcccagatagtttatatgagtgcttaccagccaagggcacagggtcagcagaagctgtcctgcagaatgcctatcaagctatccataatgaaatgagaggcacatcaggacagccccctgaagggtgtgcagcacccacggtgattgtcagcaatcacaacctaacggacacagttcagaacaagcaactccaagccgtccttcaatgggtagctgcctctgagctcaatgtccctattttgtattttgctggtgatgatgaagggatccaggagaagctacttcagctctcagctgctgctgtggacaaaggatgcagtgtgggcgaggttctgcagtcggtgctgcgctatgagaaggagcgccagctgaatgaggcggtggggaatgtcacaccgctgcagctgctggactggctgatggtgaacctgtaatcggcaaccccactgctttcccctcttctggcagtggggccggcccttatccccgcccttctttctcacttccacatctccccctctatatcctcacagagccctaacattatcttcacaccactctcatcaaagacatgtcatcttgtgctagccactggattttgcagattttcctgtccatgcaagcaaggacgtaaaattaaaaaattacaattaaagggctcc

SEQ ID NO: 313797 - DNA, 2562 bp, Artificial Sequence
  derived and/or modified sequence
atgagcgagaaggtggactggctgcagagccagaacggcgtgtgcaaagtggatgtgtattctccgggcgacaatcaggcccaggattggaagatggataccagtacggatcctgtgcgggtcttatcgtggttacgcagagatctggagaagtctactgccgaattccaagatgtgcggttcaagccaggagaaagctttggaggagaaactagcaactcgggagatcctcataagggattctcagttgactattataacacgaccactaagggcacaccagagaggctgcactttgagatgacacataaagagatcccttgtcagggccccagagcacagctcggaaacgggagctccgtcgacgaggtatcattttatgccaaccgactaaccaacctggtaatcgcaatggccagaaaggaaattaacgaaaaaattgacggctctgagaataagtgtgtgtaccagtcactgtacatgggcaacgagcctacaccgacgaagtcattatcgaaaattgcctcagagttagtaaacgagaccgtgagtgcgtgtagccggaatgcggcccccgacaaggcccccgggagtggggatcgggtttccgggtcttcacagagcccgcccaacttgaaatataagtctacactgaagattaaggagtccactaaagagaggcaaggcccggatgacaagcctccctccaagaagagcttcttttataaggaggtctttgagtcaagaaatggagactatgcaagagagggaggacggttcttcccacgcgagcgaaagcgctttaggggacaggaaagacccgatgactttactgcctcggtgtcggagggtatcatgacttatgccaactctgttgtgagcgatatgatggtgtctatcatgaagaccctcaagatccaggttaaagatacgacaatagcaacgatcctgctgaagaaagtgctgctgaaacacgccaaggaagtggtgtcagacctcatagatagcttcctgcggaacttgcacagcgtcactggtacattaatgactgatacacaatttgtctctgcagttaaaaggactgttttctcacatggttcccaaaaagccaccgacattatggatgccatgctccgaaaactgtataacgttatgtttgccaagaaggtcccagagcacgtgagaaaggcccaggataaagccgaaagctactccctgataagcatgaagggtatgggcgacccgaagaatcggaatgtgaattttgccatgaaatctgaaacaaagctgagagaaaagatgtatagcgagcctaagtctgaagaggaaacctgtgcaaagactcttggagagcatattatcaaggaaggacttacattgtggcacaagactcaacagaaggaatgcaagtccttggggttccagcatgcggcattcgaggctccaaatacccaaaggaaacctgcaagcgatatctcctttgagtaccccgaagatattggcaacttgtctctgccgccgtacccaccggaaaaacccgaaaacttcatgtacgactccgatagctgggcggaggatctcattgtcagtgccctcttgctgattcagtatcatctggctcaggggggacgaagagacgcacggagctttgttgaggccgccggaaccaccaattttcctgctaatgagccacccgtcgctcccgacgagagttgcttgaagagtgcccccatagtaggcgaccaggaacaggccgagaagaaagatctgcgctccgtgtttttcaatttcatccgcaatctcctgtctgaaactattttcaagcgggaccagtctcctgaacctaaggtacctgagcaacctgttaaagaggacaggaagctgtgcgagcgccccctggcttcttcgccaccacgcctatacgaagatgacgaaaccccaggggccctgagcggtctgacaaagatggcggtctctcagatagacggccacatgagtggccagatggtggagcatcttatgaattccgtgatgaaactctgcgtgattatagccaagtcctgtgatgcatcactcgctgaattaggcgatgataagtctggagatgccagtcggctcacatctgcttttcccgacagcctctacgagtgtcttcccgccaaaggcactgggtctgctgaagccgtcctgcagaacgcctatcaggccatccataatgagatgcgcggcacttccggtcagccaccagaaggctgcgcagccccaacagttattgtttcaaatcataacttgaccgatactgttcagaacaaacagctccaagctgttctgcaatgggtggccgcctcagagctcaatgtgcccattctgtattttgccggcgatgatgagggcatccaagagaaactgctgcaattatcagcggcagccgtggacaaggggtgttctgtaggtgaggtgctacagagcgtgctccgctatgagaaagagcgtcaattaaacgaggcagtggggaacgtcactcccttgcagctacttgactggctgatggtcaatctttag

SEQ ID NO: 313798 - DNA, 2562 bp, Artificial Sequence
  derived and/or modified sequence
atgtcagagaaggtggattggctgcagtcacagaatggagtctgtaaggtcgacgtgtactctccaggggacaaccaggcccaagattggaagatggacacttccacagaccccgtaagagtcctcagttggctccggagagacctagaaaagtcaacagcagaattccaggacgtgcgattcaagcccggagagtctttcggtggcgagacaagcaattccggtgaccctcataagggcttttcagtggattactataacacaacaaccaagggcacacccgaaaggctacatttcgaaatgacccacaaagaaataccctgtcaaggcccacgggctcaactgggaaacggcagcagtgtggatgaggtgtccttctatgccaaccgtcttaccaatcttgtaatagcaatggctaggaaggaaatcaatgagaagatcgatggatccgaaaacaagtgcgtctatcaaagcctctatatgggcaacgagcctactcctactaagtcgctcagcaaaattgcctccgaactagtaaacgagacggtgagtgcatgcagccgaaacgccgcacctgataaggctcctggatccggcgaccgcgtgagcggctcctctcaatctccacctaatctcaaatacaagtccacactgaagattaaggaaagcacgaaggagcggcagggacctgatgataagccacctagcaagaagagcttcttttacaaggaggtgtttgagtccagaaatggggactatgcgagagagggcggacggttcttccccagagagcgcaagagattccggggacaagaacgtcctgatgacttcaccgcatctgttagcgagggaattatgacttatgcaaacagcgtggtcagtgacatgatggtctctatcatgaaaactctaaaaattcaggtaaaagatacaacaatcgctaccatactcctgaagaaagtgttactcaaacacgcaaaggaagtggtgagcgatttgatcgactccttcctgagaaatctgcatagcgtcaccggcacacttatgaccgatacccagttcgttagtgcagtcaaacgcacagtgtttagtcatggctcccagaaagcaacagacatcatggacgctatgctgagaaaactctataacgttatgttcgctaagaaagtacccgaacatgttcgtaaggcccaggacaaggccgaaagttactctttgatcagcatgaaaggaatgggcgaccctaagaacaggaacgtgaatttcgctatgaaatccgagactaagcttagggagaagatgtactctgagcctaaatcagaggaggaaacttgcgccaagactctgggggagcatatcattaaggaaggccttacgctctggcacaagacccagcaaaaggaatgcaagtccctggggttccagcacgcggcattcgaggcccctaacacacaaaggaagcccgcttctgacatatccttcgagtaccccgaggatattggaaatctgagtctacctccttacccccctgaaaaacccgaaaatttcatgtatgactccgattcatgggctgaagatcttatcgtttcagctttgctgcttattcaataccatcttgctcaggggggacgcagggacgcccgttctttcgtggaagcggctggtaccacgaattttccagcaaacgagcctcctgtcgcccctgacgagagctgcctgaaaagtgcgccaatcgtgggggaccaggaacaagccgaaaagaaggacctgcgttccgtattctttaatttcatccgcaacctactgtcagaaaccatttttaaaagagaccaatctcccgaacctaaagttccggagcagcccgtaaaggaggaccgtaaactttgcgaacgacctctcgcctcctcacctccaaggctatatgaggatgatgagactccgggagccttgtctgggctgacgaagatggccgtttcacagatcgatggccacatgagtggacagatggtcgaacatctcatgaactccgtgatgaaactgtgtgtcattatcgcaaaatcttgtgacgcgagtttggctgagttgggcgatgataaaagcggggatgcgtcgcggttaactagcgccttccctgatagcttgtatgagtgccttcccgctaaaggcacaggttcggcggaggccgtgctgcagaatgcttaccaggcgatacacaatgagatgcgcggaacgtcgggccagccaccagagggatgcgccgctccaacggtcatagttagcaaccacaatctgacagacacagttcagaataaacagctgcaggccgtgttgcaatgggttgccgcatctgaattgaacgttccaatattatactttgctggcgacgatgagggaatccaggaaaagctcctccagttgagcgccgctgcggtggacaaagggtgcagcgtaggagaagttctacagtcagtgctgaggtatgagaaagagcgccagttgaatgaagcagtgggcaacgtcactcccctgcagcttctggactggctgatggtaaacctgtag

SEQ ID NO: 313799 - DNA, 3257 bp, Artificial Sequence
  derived and/or modified sequence
gtctgcgcaagcgctaaccaagaaacgacggtttcgggtagattgttggttaagaagaaagctgggaaagtgaaggagagggggaagaaaggaagtgaaaagactttggctgttggaatctcagatctggaataggctgtataggctatttataatctctaattgccgaggaacctgaagttcagagttaaccagtgactgactcaggacatgcaaaatggcaagacccgaggtagaagagctcacctttcctgactctcagtttcctgttccctgaaaattcccagcaagggggaggtacatggaaggccacaggaagaaacaagatcttgagctgagcaagaacatcccagcatcttcattgactttaaaagtatattctggagtcttccgtggttcactattccagtactacagagattccttatattacatggcaggaggggggtaaactgagggatagtgaagacaacaataaattaatcaagagctttcctcatatctcagaacctatcctctgtaagaatgtcagaaaaggttgactggttacaaagccaaaatggagtatgcaaagttgatgtctattctcctggagacaaccaagcccaggactggaaaatggacacctccacggatcctgtcagagtgctcagctggctccgcagagacctggagaagagtacagcagagttccaagatgttcggttcaaacccggagaatcatttggtggggaaacgtccaactcaggagacccacacaaaggtttctctgtagactattacaacaccaccaccaagggcactccagaaagattgcattttgagatgactcacaaagagattccttgccagggccccagggcccaacttggcaacgggagttcagtagatgaagtttccttctatgctaaccgcctcacgaatctagtcatagccatggcccgcaaagagatcaatgagaagatcgatggctctgaaaacaaatgtgtctatcagtcattgtacatggggaatgaacccacacccaccaaaagcctcagtaagatagcatcagagcttgtgaatgagaccgtctctgcatgttccaggaatgctgccccagacaaggctcctggctctggagacagagtctcgggatcatcacaaagtcccccaaatttgaaatacaagtccactttgaagatcaaggagagcaccaaagaaagacagggtccagatgacaagcctccttctaagaagtctttcttctataaggaagtgtttgaatctcgtaatggagattatgccagagagggtggaaggttctttcctcgggagagaaagaggtttcgagggcaggaaaggcctgatgactttacggcttctgttagtgaagggatcatgacctatgctaacagtgtggtatctgatatgatggtctccatcatgaagacactgaagatccaagtgaaagacacaaccattgccaccatcctactgaagaaggttctgctcaagcatgcaaaagaggtggtctcggatctcatcgactccttcttgaggaatctccacagcgtcacagggaccctcatgactgacacacagtttgtctcggctgtgaaaagaactgtcttctctcatggaagccaaaaggccacagatatcatggatgccatgctaaggaagctgtacaatgtaatgtttgccaagaaagtccctgagcatgtcaggaaagcccaagacaaggctgagagttattccctcatctccatgaaaggaatgggtgatcctaaaaaccgaaatgtgaactttgccatgaaatctgaaactaaattgagagaaaaaatgtattctgaacccaaatcagaggaggagacttgtgcgaaaactctgggtgagcacattatcaaagaggggcttaccttgtggcataaaactcagcagaaagaatgtaaatctctaggtttccagcatgcagcatttgaagctcccaacacacagcgtaagcctgcatcagacatttcctttgagtaccctgaagatattggcaacctcagccttcctccatatcctccagagaaacctgagaattttatgtatgattcagactcctgggccgaggacctgatcgtgtctgccctgcttctgattcaatatcacctggcccagggaggaagaagggatgcacggagcttcgttgaagctgctggcaccaccaactttcctgccaatgaacctcctgtagctcccgatgaatcttgccttaagtctgctcccattgtaggtgaccaagaacaagcagaaaagaaggacctaaggagtgttttctttaatttcatccggaacttacttagtgagaccattttcaagcgtgaccagagccctgaacccaaggtgccggaacagccagttaaggaagataggaagttgtgtgaaagaccgttggcgtcttctccccccaggctatatgaggatgatgagacccctggtgccctttctgggctgaccaagatggctgtcagccagatagatggccacatgagtgggcagatggtagaacatctgatgaactcagtgatgaagctgtgtgtcatcattgctaagtcctgtgatgcttcgttggcagagctgggagatgacaagtctggagatgccagtaggctaacttcggccttcccagatagtttatatgagtgcttaccagccaagggcacagggtcagcagaagctgtcctgcagaatgcctatcaagctatccataatgaaatgagaggcacatcaggacagccccctgaagggtgtgcagcacccacggtgattgtcagcaatcacaacctaacggacacagttcagaacaagcaactccaagccgtccttcaatgggtagctgcctctgagctcaatgtccctattttgtattttgctggtgatgatgaagggatccaggagaagctacttcagctctcagctgctgctgtggacaaaggatgcagtgtgggcgaggttctgcagtcggtgctgcgctatgagaaggagcgccagctgaatgaggcggtggggaatgtcacaccgctgcagctgctggactggctgatggtgaacctgtaatcggcaaccccactgctttcccctcttctggcagtggggccggcccttatccccgcccttctttctcacttccacatctccccctctatatcctcacagagccctaacattatcttcacaccactctcatcaaagacatgtcatcttgtgctagccactggattttgcag

SEQ ID NO: 313800 - DNA, 2562 bp, Artificial Sequence
  derived and/or modified sequence
atgagcgaaaaggtcgattggctgcaaagccaaaacggcgtatgtaaagtagacgtgtacagccccggcgataaccaggctcaggattggaagatggacacttcaaccgatcctgtgagggttttatcatggctgcggagagaccttgagaagagcacagcggagtttcaggacgtccgctttaagccaggcgaaagcttcgggggagagacaagtaacagcggcgacccccataagggattctcggttgactattataatacgactacaaagggtacgcccgaaaggttacacttcgagatgacacacaaagaaatcccgtgccagggaccaagggcgcagctgggaaacggcagcagcgtcgatgaggtgagcttttatgctaatcggcttaccaatctggttattgctatggcccggaaagagatcaacgagaaaattgatgggagcgaaaacaaatgcgtgtaccaaagtttgtacatgggtaatgagccaaccccaaccaagtctctctctaaaattgccagcgagttagttaacgaaacagtcagtgcttgctcaagaaatgccgcccctgataaggcgcctgggtcaggtgaccgcgttagtggctcatcgcagtcccctcctaatctcaagtacaagtcaacattaaaaataaaggaatctaccaaagagcgccagggcccagatgacaagcctccgagcaaaaaatcattcttttacaaggaagtattcgaatccaggaatggcgactacgcacgcgaaggaggaaggttctttcctagagaaagaaagcgttttagggggcaggaacgacccgatgacttcaccgctagtgtgtcagaaggcattatgacctatgccaacagtgtggtgtccgacatgatggtatccatcatgaagactttgaagatacaagttaaggatacaaccattgctaccatcctcttgaaaaaggtcctgctaaagcatgccaaggaggtggtgtctgatctgattgacagctttctacggaatctacactctgtaaccggtactctcatgacggatacccaatttgtatctgccgtcaaaagaaccgttttctctcatggcagtcagaaggctacagacattatggatgctatgttacgtaagctgtacaatgtaatgtttgcaaagaaggttcccgagcatgtcagaaaggcccaggataaggccgagagctactctctgatttccatgaagggaatgggcgacccgaaaaaccgcaacgtaaactttgccatgaaaagtgagactaagctgagggaaaagatgtactctgaaccaaagtctgaagaggagacttgcgccaaaacgctcggcgagcatattataaaggagggcctcacactttggcataagacgcagcaaaaagaatgcaaaagcctaggatttcagcatgctgcattcgaggcacccaatacccaacgcaagcctgcctccgatatctcatttgagtatcctgaggacattggaaatttgagcctgcccccctacccgccagaaaaaccggaaaactttatgtacgactctgacagctgggccgaggacctgattgtgtccgctctcctgctgattcaatatcatctggctcagggcggccgccgggatgccaggtcctttgtcgaagcagcagggaccacaaactttcccgccaatgaacccccggtcgcaccagatgagtcctgtttgaagtctgcaccaattgttggcgaccaagaacaggctgaaaagaaggatctaagaagcgttttctttaactttattcgcaatctgctgtcggagacgatttttaaacgggaccagtcccctgaaccaaaggttcccgagcagccagtgaaggaggacaggaagctatgcgaaaggccgctggccagctctcccccgcgtctgtatgaggatgatgaaacccctggtgccctatcggggctcactaaaatggcggtgtcccaaatagatgggcacatgagcggacagatggtggaacatctgatgaattctgtcatgaagttatgcgtgattatcgccaaatcttgcgacgcaagtctggctgagctcggtgacgacaagagcggggacgccagccggctgacgtctgctttcccggatagcctttacgagtgtctgcccgccaagggcaccgggagtgctgaagccgtgctccagaacgcataccaggcaattcataacgaaatgaggggtacaagcggccagcccccagagggttgtgctgccccaaccgtcattgtgagtaatcacaatctgacagacacggtgcagaacaagcagctgcaggccgtgttgcagtgggtggctgcgagtgagctcaacgttcccattctctatttcgctggcgatgacgaaggaattcaggaaaaactactgcaactgagcgccgccgctgttgacaaggggtgctcagtgggagaagttctccaatctgtgctgaggtatgagaaagaacgccagctgaatgaagccgtagggaatgtgacacccttgcagttactagactggttaatggtgaacctttag

SEQ ID NO: 313801 - DNA, 2562 bp, Artificial Sequence
  derived and/or modified sequence
atgagcgagaaggtggactggctgcagagccagaacggcgtgtgcaaagtcgatgtgtactcgcccggggacaaccaggctcaggactggaaaatggacacaagtacagatcctgtgcgcgtcctgagctggttaaggagagatttagagaagtctacggctgagtttcaggacgtaaggttcaagccgggagaatctttcgggggcgagacctccaactccggcgatccccacaagggcttctctgtcgattattataacacaacgaccaaaggaacgcccgaacgcttgcatttcgagatgacacataaggagatcccttgtcaaggaccccgggctcaacttggtaacgggtccagcgtcgacgaggtctccttctatgcaaaccggctcaccaatctggtgattgccatggcacggaaggaaatcaacgagaaaattgacgggagcgagaataagtgtgtctaccagagtctgtacatggggaacgagccaacgcccaccaagtctcttagcaaaattgcttcagagctcgtgaatgaaaccgttagtgcctgctctcgaaacgccgcacccgataaagcccccggaagtggcgatcgcgtgagcggttcaagtcagtcaccccctaacttgaagtacaagtcgacccttaaaatcaaggagagcacgaaagagcgccaagggcctgatgataaacctcctagcaagaagtcctttttctacaaggaggtgtttgagagcagaaatggtgattacgccagggaaggcggacgattttttccccgcgagaggaaaagatttagagggcaagaaaggccagacgactttacagctagcgtgtccgagggaatcatgacttatgccaactcagtcgtcagtgatatgatggttagtattatgaagacgctcaaaattcaggttaaggacacaacaatcgcaactatcctcctcaagaaagtgctactcaagcatgcgaaagaggttgtttccgacctaatcgattccttcctcaggaatctgcatagtgtgaccggcaccctgatgacagatacacagtttgtgagcgctgtcaagcgaacagtcttcagccatggctctcaaaaggccactgatatcatggacgccatgctgaggaagctgtataacgtcatgttcgccaagaaggtgcctgaacacgttaggaaggcccaagacaaggcagaatcttactctctgatctccatgaaaggcatgggggatcctaagaaccgtaacgtgaacttcgcgatgaaaagcgaaacaaaactgcgcgagaagatgtattcggagcctaaaagtgaagaggaaacatgcgccaagacccttggcgagcacattatcaaggagggtctcacactgtggcacaagacacagcagaaggagtgcaagtccctgggcttccagcatgctgccttcgaggctccaaacacccagaggaagcccgcctctgatataagctttgaatatccagaggacataggaaatctgagcctgcccccttaccctcctgagaaaccagaaaatttcatgtacgattcagattcctgggctgaagacctgatagtctctgccctcctgttgatccagtatcaccttgcgcaaggcgggcgccgtgacgctaggtcttttgtagaagctgcagggaccactaatttccccgctaacgagcctccggttgcgccagacgaaagctgcttaaaatcagctccaattgtcggcgatcaggagcaggctgagaaaaaggatctgcggtctgttttctttaattttattaggaatctgttaagcgagacgatatttaaacgagatcagagtcccgagccaaaagtgcctgaacagcctgtgaaggaagaccgaaagctatgcgagaggccactggcaagtagtccacctcggctgtatgaggatgacgagacgcctggcgctttatcagggctcactaaaatggccgtctcccagattgacgggcacatgagcgggcaaatggttgaacacctgatgaatagcgttatgaagctgtgcgtaataatcgcaaaaagttgcgatgcttcgttggccgaattgggtgatgacaaaagtggggatgcgtccagactcacgtcagcctttcctgattccttatacgagtgcttaccagcaaaggggacagggtccgcagaagctgttcttcaaaacgcgtatcaggcgatccacaacgagatgcgagggacaagcgggcaacctcccgaaggctgcgctgcccccaccgtgatagtctcgaaccacaacctcacggataccgtacagaataaacagctccaagcggtgctccagtgggtggcagctagcgaattaaacgtacccatcctctacttcgccggggacgacgagggcatacaggagaagttgctccagctgtctgccgcagccgtggataaaggttgttctgtgggggaagtcctccagagcgtcctccggtatgagaaagagcgacagctgaacgaggctgtgggaaatgtgactccgctgcagttgcttgactggctcatggtaaacctgtag

SEQ ID NO: 313802 - DNA, 2562 bp, Artificial Sequence
  derived and/or modified sequence
atgagcgagaaagtggactggcttcagtcccaaaatggagtctgtaaagtcgatgtctactcacccggagacaaccaggcccaggactggaagatggatacatccaccgaccctgtccgggtgctgagctggctccgacgcgatttagaaaaatctaccgccgagttccaagacgtgcggttcaaaccaggagaatctttcgggggagagacttctaactccggcgatccccataaaggtttttctgtggattactacaatactaccaccaaagggacacctgagcggttgcattttgagatgacacacaaggagatcccctgccaaggtccacgagcacaacttggcaatggaagttctgtcgacgaagtgtctttctatgccaatcggcttactaatttagtaatcgcaatggctcggaaggagatcaatgagaagatcgatggatcagagaacaagtgtgtgtaccaaagtctgtatatgggaaacgaaccaacgcctacaaagtccctctcaaaaattgcaagcgaactggtgaatgagacagtcagtgcatgttcccgcaacgcagctccggacaaagctcccggaagcggagaccgtgtgagcggcagctcccagtcgccaccaaatttgaagtataaaagtacactgaaaatcaaggagtccacaaaggaaaggcaagggcctgatgacaagccaccaagcaagaagtcatttttctacaaggaagtattcgaatcccgcaatggagactacgcccgtgaaggagggaggttcttcccaagggagcggaaacgctttcggggacaggaacgacccgacgatttcactgcaagcgtgagcgaaggaatcatgacatacgccaattctgtggtgtcggatatgatggtgagcattatgaagactctgaaaattcaggtgaaagataccaccatcgctactattctgttgaaaaaggtcctgctgaaacatgccaaggaagttgtcagtgacctgatcgacagctttctgcgcaacctgcactccgtaacaggcacactgatgacggacacccaattcgtgtcagctgtcaagagaacagttttcagccatggatcccagaaggctacagacattatggatgccatgctgcgaaagctctataacgttatgttcgctaaaaaggttccagaacacgtgcggaaggcccaggataaagccgaaagttatagtctgatctcaatgaagggaatgggcgacccaaagaacagaaatgttaattttgccatgaagtcagagactaagctgcgggagaagatgtacagtgagccaaagtccgaggaggagacatgtgctaaaacgctgggagaacacataatcaaagaaggtctcacgctgtggcacaagacccaacagaaggagtgcaaaagcttgggttttcagcacgccgcatttgaagcgcctaatacgcagcgtaaacccgcttcggacatttcttttgagtatccggaagatatcggaaatctgtccctccctccttacccccctgagaagcctgagaatttcatgtacgattccgactcttgggctgaggatctgatcgtaagtgctctgttgctgatccagtatcacctggctcaagggggacgaagggacgccagatcctttgttgaggccgctgggacgacaaacttcccagctaatgaacctcctgttgcgccagacgagagttgtctcaaatccgcccctattgtgggagaccaggaacaagccgaaaagaaggatctgcgctctgtattctttaacttcatcaggaatttgctgagtgagacaattttcaaacgcgatcagagccccgagccaaaggtgcccgagcaacccgtcaaagaagaccggaagctctgcgagaggccattggcctctagccctccgcgtctttatgaagacgatgaaacaccaggtgccttaagtggactgaccaagatggcagtatctcagatagatggccatatgtcaggccagatggtggagcacctcatgaactccgtaatgaagctctgcgtaatcatcgcgaagtcctgcgatgcttccctggccgagctaggcgacgacaaaagtggcgatgcaagcagactgactagcgcattccccgatagcctatatgagtgtctgcccgcaaagggaaccggatccgcagaagccgtcttgcagaatgcctatcaggccatacacaacgagatgcgaggaacatccggtcaaccgcctgagggctgtgctgctccaaccgtgatcgtatccaatcacaatctgacagataccgtccagaataagcaattacaggccgttctgcagtgggtcgctgcttccgagcttaacgtacccattctctatttcgcaggtgacgatgaaggaattcaggagaagttgctccagctgagcgccgcagccgtggacaaaggttgctctgttggggaggtgctccaatctgttctgcgttatgaaaaggagaggcagcttaatgaagccgtgggtaacgtcacccccttgcagctgctcgactggctgatggtcaacctgtag

SEQ ID NO: 313803 - protein, 302 aa, Artificial Sequence
  derived and/or modified sequence
MVRPVRHKKPVNYSQFDHSDSDDDFVSATVPLNKKSRTAPKELKQDKPKPNLNNLRKEEIPVQEKTPKKRLPEGTFSIPASAVPCTKMALDDKLYQRDLEVALALSVKELPTVTTNVQNSQDKSIEKHGSSKIETMNKSPHISNCSVASDYLDLDKITVEDDVGGVQGKRKAASKAAAQQRKILLEGSDGDSANDTEPDFAPGEDSEDDSDFCESEDNDEDFSMRKSKVKEIKKKEVKVKSPVEKKEKKSKSKCNALAASGGSRSSSSPLVVVSVKSPNQSLRLGLSRLARVKPLHPNATST

SEQ ID NO: 313804 - DNA, 909 bp, Artificial Sequence
  derived and/or modified sequence
atggtccggccagtgcggcacaaaaagccagtcaattacagtcagtttgaccacagtgactccgacgacgactttgtgtccgccacagttccgctgaataaaaagagcagaaccgctcccaaagaacttaagcaggataagcccaaacccaatctgaataatctgagaaaggaggagatccccgtgcaggagaaaacaccgaagaaacggctaccagagggtactttctctattccagcatcagcagtgccatgtactaagatggctcttgatgataagctatatcaaagagacctggaggttgccttggccctgagcgttaaagagctgcccaccgttaccaccaacgtccaaaatagtcaggacaagtctattgagaaacatggctccagtaaaattgaaaccatgaataagtctccacatatttcaaactgtagcgtggcgagtgattatttggacctggacaagatcactgttgaagatgacgtaggcggagtacagggcaagcgaaaggctgcctcgaaggccgctgcacagcagcggaagatactgctggagggttctgacggtgactccgccaatgataccgagccggactttgcacccggcgaggacagtgaagacgattcagacttctgcgaatccgaagataatgacgaggacttcagcatgagaaagagtaaagtcaaggaaattaaaaagaaagaggtgaaggtcaagtctccagtcgagaagaaggagaagaagagtaagtccaaatgcaacgcccttgccgcgtcaggcgggtcgcggagctcttctagtccactagtggtggtgtcagtcaaaagccctaaccagtccttacgcctaggcctgagccgcttggcacgggtgaaacctttgcatccaaacgctacgtctacctag

SEQ ID NO: 313805 - DNA, 909 bp, Artificial Sequence
  derived and/or modified sequence
atggtgcggcctgtgcgccacaagaagcctgtgaactacagccagtttgaccacagcgacagtgatgatgactttgtgtctgccaccgtgcccctgaacaagaagagcaggacagcccccaaggagctgaagcaggacaagcccaagcccaacctgaacaacctgaggaaggaggagatccctgtgcaggagaagacccccaagaagaggctgcctgagggcaccttcagcatcccagccagcgctgtgccctgcaccaagatggccctggatgacaagctgtaccagagggacctggaggtggccctggccctgtctgtgaaggagctgcccaccgtgaccaccaacgtgcagaacagccaggacaagagcattgagaagcacggcagcagcaagattgagaccatgaacaagagcccccacatcagcaactgcagcgtggccagtgactacctggacctggacaagatcaccgtggaggatgatgtgggcggcgtgcagggcaagaggaaggccgccagcaaggctgctgcccagcagaggaagatcctgctggagggcagtgatggagacagcgccaatgacacagagccagactttgcccctggagaggacagtgaagatgacagcgacttctgtgagagcgaggacaatgatgaggacttctccatgaggaagagcaaggtgaaggagatcaagaagaaggaggtgaaggtgaagagccctgtggagaagaaggagaagaagagcaagagcaaatgtaatgccctggccgccagcggcggcagccgcagcagcagcagccccctggtggtggtgtctgtgaagagccccaaccagagcctgcggctgggcctgagccggctggcccgggtgaagcccctgcaccccaatgccaccagcacctag

SEQ ID NO: 313806 - DNA, 909 bp, Artificial Sequence
  derived and/or modified sequence
atggtgcggcccgtgcggcacaagaagcccgtgaactacagccagttcgaccacagcgactccgatgatgactttgtgagcgccaccgtacctctgaacaaaaagagccgcactgcccccaaagaactgaaacaggacaaacccaagccgaacttgaacaacctcagaaaggaagagattccggtacaggaaaagacacctaagaagcggctcccggagggcacgttctctattcccgcttcagctgtgccgtgcacaaaaatggcacttgacgataaactgtatcaaagagatctcgaggtggctctggcgctcagcgttaaagagctcccgaccgtgacaactaatgtccagaatagccaagacaaatccattgaaaagcatggttcttctaaaatcgagaccatgaacaaaagcccccacatctcaaactgcagcgtagcctctgattatctcgatctcgacaaaatcacagtcgaagatgatgtcgggggggtgcagggaaagaggaaagcggcatccaaagccgctgcccagcagcgcaagatcttgctggaaggctctgacggtgatagcgctaatgatactgagcccgactttgcaccgggcgaagactccgaagatgactccgatttttgcgagagtgaggataatgacgaagacttcagcatgcgtaaaagcaaggttaaagagataaaaaaaaaagaggtgaaggtcaagagtcctgtggaaaagaaagagaaaaagagcaaatcaaaatgcaacgcgctggccgccagcggcggcagtcggtcctctagttctcccttggtggtagtgtcggtcaaaagtccaaaccagtctcttcgcctgggtctgagcaggctagcacgtgtgaagccactccatcctaatgccacatcaacttag

SEQ ID NO: 313807 - DNA, 909 bp, Artificial Sequence
  derived and/or modified sequence
atggttcggccagttaggcacaaaaagcctgtgaattactcacaattcgaccatagcgactctgacgatgacttcgtgtccgccactgtacccctaaataaaaagagccgcacagcacctaaggagctgaagcaggataagcctaagcctaacctgaacaatctgcgcaaagaggaaatccctgtgcaggagaagacccccaaaaagagactgcctgagggaacattttctatcccagccagcgccgtaccatgcactaaaatggccctggatgacaagctgtatcagagagacctggaggtggcattggcgctgtcagtaaaagaactgcccacggttaccaccaatgtgcagaatagccaagataaatccatcgaaaagcatggcagtagcaagatcgagacaatgaataagagcccacatattagtaactgctctgtggcaagcgattatctggatctcgacaagatcacagtggaggatgacgtggggggagtccagggcaagcggaaggccgctagtaaggcagcagcccagcagcggaagatccttctggaggggtccgatggagacagtgctaacgacaccgaacctgacttcgctccaggtgaagactcggaggatgacagtgatttctgtgagtctgaggacaacgacgaggatttctccatgcggaaatcaaaagtcaaagagattaagaagaaggaggttaaggttaagtcccccgtcgaaaagaaggagaagaagtcaaaaagcaagtgcaatgccttagccgcatctggaggatctcgaagttcgtcaagtcccctcgtcgtagtgtccgttaagtctcctaatcaatcactccggctgggactgtcaaggctggccagggtcaagcccctccatccaaacgctacttccacatag

SEQ ID NO: 313808 - DNA, 2119 bp, Artificial Sequence
  derived and/or modified sequence
acagcgcgtgcgccgccgcaagcatggctggtgatgattggacgactggtaacagggggcggagggctccgaagtctggttttgggcgggaattgaaaccgccgctgaagccaacaagaatttgagaactgtaaataccaagccttgaaagggaccatggtgcggcctgtgagacataagaaaccagtcaattactcacagtttgaccactctgacagtgatgatgattttgtttctgcaactgtacctttaaacaagaaatccagaacagcaccaaaggagttaaaacaagataaaccaaaacctaacttgaacaatctccggaaagaagaaatcccagtacaagagaaaacccctaaaaaaagactccctgaaggtacttttagtattccagctagtgcagtgccttgtacaaagatggctttagatgacaagctctaccagagagacttagaagttgcactagctttatcagtgaaggaacttccaacagtcaccactaatgtgcagaactctcaagataaaagcattgaaaaacatggcagtagtaaaatagaaacaatgaataagtctcctcatatctctaattgcagtgtagccagtgattatttagatttggataagattactgtggaagatgatgttggtggtgttcaagggaaaagaaaagcagcatctaaagctgcagcacagcagaggaagattcttctggaaggcagtgatggtgatagtgctaatgacactgaaccagactttgcacctggtgaagattctgaggatgattctgatttttgtgagagtgaggataatgacgaagacttctctatgagaaaaagtaaagttaaagaaattaaaaagaaagaagtgaaggtaaaatccccagtagaaaagaaagagaagaaatctaaatccaaatgtaatgctttggcggcatctggaggtagcagaagtagcagcagcccactggtggtagtgtctgtgaagtctcccaatcagagtctccgccttggcttgtccagattagcacgagttaaacctttgcatccaaatgccactagcacctgagtgtggtacaggaggaatgtttggttgggagaatcacagctttacaagggtgtttatatttgatttgtgtttatatttgaggcaggtattgtaatataaaggaatccattaccatgtcctataaatgacctctagccattttatgattatgttctctgtaaaactcttcaagacttcaatgagaagtttgtttataagaattatcttctcatacctttccttgtgaagagcgtattctgtttttctatcagttcgacatgaagtccacatcacatgctgttcttttctagttacatgatgtgcctttctagctttgtctagtttatagcaccttaactttaactgttcagttttatctggcagaggaaaacattcttatttctttcagaagacatttctgaaatcttataagctacttaagctacgttgtcagttttatcgcaaagatgttttgtattttagccaaatctttttatagtacaaacttagaattattttacacactaaaatggttgcagttttatggcatatgtctccgatttagatggttattctctagaaaatagtatttaaagacattttatgaaatcttcattgtcaaaacctttaataaaagtggaaatattttgaaatgccctttttcttgataccactcatccacgtgttcctgattgtccacatttcatgataaaatgagagctccgcagagaatgttagcctttctgttgtaaatgtaatcttcaagtagtcactttttgttaagttctttagaaagtagttgtcaagtacttagtcatccctattatgatatgagatagtacagcttttcaggaagcttagatctgaatttactttgaaaaacaattgtaatgaatattttatatttacattgagaatttcaactagcttctgatcaatttttaataaaaaattttcaaatcatgttagctgttaaaaaatgtataataactcagtttttcttggtttatggaaatatctatattaatgtgaaaataattaatttagaattgtgattaaagtgagcatttgtcta

SEQ ID NO: 313809 - DNA, 909 bp, Artificial Sequence
  derived and/or modified sequence
atggtgagacccgtgagacacaagaagcccgtgaactacagccagttcgaccacagcgacagcgacgacgacttcgtgagcgccaccgtgcccctgaacaagaagagcagaaccgcccccaaggagctgaagcaggacaagcccaagcccaacctgaacaacctgagaaaggaggagatccccgtgcaggagaagacccccaagaagagactgcccgagggcaccttcagcatccccgccagcgccgtgccctgcaccaagatggccctggacgacaagctgtaccagagagacctggaggtggccctggccctgagcgtgaaggagctgcccaccgtgaccaccaacgtgcagaacagccaggacaagagcatcgagaagcacggcagcagcaagatcgagaccatgaacaagagcccccacatcagcaactgcagcgtggccagcgactacctggacctggacaagatcaccgtggaggacgacgtgggcggcgtgcagggcaagagaaaggccgccagcaaggccgccgcccagcagagaaagatcctgctggagggcagcgacggcgacagcgccaacgacaccgagcccgacttcgcccccggcgaggacagcgaggacgacagcgacttctgcgagagcgaggacaacgacgaggacttcagcatgagaaagagcaaggtgaaggagatcaagaagaaggaggtgaaggtgaagagccccgtggagaagaaggagaagaagagcaagagcaagtgcaacgccctggccgccagcggcggcagcagaagcagcagcagccccctggtggtggtgagcgtgaagagccccaaccagagcctgagactgggcctgagcagactggccagagtgaagcccctgcaccccaacgccaccagcacctag

SEQ ID NO: 313810 - protein, 335 aa, Artificial Sequence
  derived and/or modified sequence
MEESHFNSNPYFWPSIPTVSGQIENTMFINKMKDQLLPEKGCGLAPPHYPTLLTVPASVSLPSGISMDTESKSDQLTPHSQASVTQNITVVPVPSTGLMTAGVSCSQRWRREGSQSRGPGLVITSPSGSLVTTASSAQTFPISAPMIVSALPPGSQALQVVPDLSKKVASTLTEEGGGGGGGGGSVAPKPPRGRKKKRMLESGLPEMNDPYVLSPEDDDDHQKDGKTYRSEGNCGTGNGQSLGLMDSVPGSTTNLLCDPGCRMCSLTFYSKSEMQIHSKSHTETKPHKCPHCSKTFANSSYLAQHIRIHSGAKPYSCNFCEKSFRQLSHLQQHTR

SEQ ID NO: 313811 - DNA, 1008 bp, Artificial Sequence
  derived and/or modified sequence
atggaggagagccacttcaacagcaacccctacttctggcccagcatccccaccgtgagcggccagatcgagaacaccatgttcatcaacaagatgaaggaccagctgctgcccgagaagggctgcggcctggcccccccccactaccccaccctgctgaccgtgcccgccagcgtgagcctgcccagcggcatcagcatggacaccgagagcaagagcgaccagctgaccccccacagccaggccagcgtgacccagaacatcaccgtggtgcccgtgcccagcaccggcctgatgaccgccggcgtgagctgcagccagagatggagaagagagggcagccagagcagaggccccggcctggtgatcaccagccccagcggcagcctggtgaccaccgccagcagcgcccagaccttccccatcagcgcccccatgatcgtgagcgccctgccccccggcagccaggccctgcaggtggtgcccgacctgagcaagaaggtggccagcaccctgaccgaggagggcggcggcggcggcggcggcggcggcagcgtggcccccaagccccccagaggcagaaagaagaagagaatgctggagagcggcctgcccgagatgaacgacccctacgtgctgagccccgaggacgacgacgaccaccagaaggacggcaagacctacagaagcgagggcaactgcggcaccggcaacggccagagcctgggcctgatggacagcgtgcccggcagcaccaccaacctgctgtgcgaccccggctgcagaatgtgcagcctgaccttctacagcaagagcgagatgcagatccacagcaagagccacaccgagaccaagccccacaagtgcccccactgcagcaagaccttcgccaacagcagctacctggcccagcacatcagaatccacagcggcgccaagccctacagctgcaacttctgcgagaagagcttcagacagctgagccacctgcagcagcacaccagatag

SEQ ID NO: 313812 - DNA, 1008 bp, Artificial Sequence
  derived and/or modified sequence
atggaagaatctcatttcaactccaacccctatttctggccatccatccctacagtgagtggccaaatagaaaacaccatgttcattaataagatgaaggaccagttgttgcccgagaaggggtgtggattggccccaccccactacccaactctcctgacagttcccgccagcgtgtcactccccagtggaatatcaatggacacagagtctaagagtgatcagctaaccccacactcacaagcttcggtgactcagaacatcacggtggtgccagtgccatccactggcctgatgacagcaggtgtgtcttgctcacagcgatggcggcgggaaggcagccagtcccgggggcccggcttggttatcacctctccgagcgggagtctcgtcacaaccgcgagctcagcacagacatttcccataagcgcgcccatgatcgtttcggccctgcccccagggtcccaagctctgcaagtcgtacccgatctgtcaaagaaagtcgcatctactctcaccgaggaagggggaggcggcgggggaggtggcggttcagtagctcccaaacctccccggggcagaaaaaagaagagaatgttagagtctggtctgcctgaaatgaacgatccatatgttttgtctccagaagatgatgacgaccaccagaaagacggaaagacctacaggagtgaaggaaactgcggaacaggtaacgggcaatctctcggcctgatggattccgtgcctggctccactacaaacctcctgtgcgatcccgggtgtaggatgtgttctctcaccttctacagcaagagcgagatgcagattcattcaaagagccacacagaaactaaaccccataaatgtccacattgctcgaagacctttgccaatagtagctaccttgctcaacacattcgcattcatagcggggctaaaccatactcctgtaacttctgtgaaaagtcattccgacaactgtcacacctccaacagcacaccagatag

SEQ ID NO: 313813 - DNA, 1008 bp, Artificial Sequence
  derived and/or modified sequence
atggaggagagccacttcaacagcaacccctacttctggcccagcatccccaccgtgtctggccagatcgagaacaccatgttcatcaacaagatgaaggaccagctgctgcctgagaagggctgcggcctggccccaccccactaccccaccctgctgactgtgcctgcctctgtgtccctgcccagcggcatctccatggacacagagagcaagagtgaccagctgaccccccacagccaggcctctgtgacccagaacatcaccgtggtgcctgtgcccagcacaggcctgatgacagctggggtgtcctgcagccagcgctggaggcgggagggcagccagagccggggccctggcctggtgatcaccagccccagcggcagcctggtgaccacagccagcagcgcccagaccttccccatcagcgcccccatgattgtgtctgccctgcccccaggcagccaggccctgcaggtggtgcctgacctgagcaagaaggtggccagcaccctgacagaggagggcggcggcggcggcggcggcggcggctctgtggcccccaagccaccccggggcaggaagaagaagaggatgctggagagcggcctgcctgagatgaatgacccctacgtgctgagcccagaagatgatgatgaccaccagaaggatggcaagacctacagaagtgagggcaactgtggcactggaaatggccagagcctgggcctgatggattctgtgcccggcagcaccaccaacctgctgtgtgaccccggctgcaggatgtgcagcctgaccttctacagcaagtctgagatgcagatccacagcaagagccacacagagaccaagccccacaagtgcccccactgcagcaagacctttgccaacagcagctacctggcccagcacatccgcatccacagcggggccaagccctacagctgcaacttctgtgagaagagcttccggcagctgagccacctgcagcagcacaccaggtag

SEQ ID NO: 313814 - DNA, 1008 bp, Artificial Sequence
  derived and/or modified sequence
atggaggagagccacttcaacagcaacccctacttctggcccagcatccccacggtttcgggccagatcgagaataccatgtttatcaacaagatgaaggatcagttgcttcctgaaaagggctgcggactagccccgcctcactatccgacactcctgaccgtgccagcctccgtctccctgccctctggcatctctatggacactgagagcaaatctgatcaactgactcctcactcccaggcttctgtgacccagaacatcaccgtggtgccagtgcccagcaccgggctgatgaccgcgggggtctcatgctctcagagatggagaagggagggctcccagagccgtgggcctgggcttgttataacttcaccatctggcagtcttgtgacaactgcctcctcagcccagactttccccatatctgcacctatgatcgtgtcagctctaccgccgggctcacaggccctacaggttgtacccgatctctccaagaaggttgccagtacactgactgaggaggggggagggggcgggggtggcgggggttccgtcgcccctaagccccctcgagggcggaaaaagaagagaatgttggagtccggcctgccagaaatgaacgacccctatgttttgtcaccagaggatgatgacgatcaccagaaagatggcaagacttaccgcagcgagggtaattgcggcacaggcaacgggcagtcactgggactgatggactccgtgcctgggtctacaacaaacctgctttgcgatcccggctgccgcatgtgcagcttgactttttattcaaagagcgagatgcaaatacacagtaagagccatactgaaacaaaaccccataaatgcccccactgcagcaagaccttcgcgaattcctcttacttggcccagcatatccgcattcattccggggcgaaaccatattcctgcaacttttgtgagaaatcttttcggcagctctcccacctacagcagcatacacgctag

SEQ ID NO: 313815 - DNA, 1008 bp, Artificial Sequence
  derived and/or modified sequence
atggaagagagtcacttcaacagtaacccttacttttggcctagcatcccgaccgtctccggacaaattgagaacaccatgtttattaacaagatgaaggaccagttactgcccgaaaagggttgtggtcttgccccaccccactatccaactcttcttaccgtccctgcaagtgtgtcactgccttcaggaatctctatggacactgagagtaaaagtgatcagctgactccccactctcaggccagcgtcacccagaacattacagttgtgcctgtacctagcaccgggctgatgaccgcaggggtgagttgctctcaacgctggagaagggaagggtctcagtctcgaggacccggacttgtgattacatccccatctggatctctggtgaccacagccagtagcgcccagacctttccaatttcagcacctatgatcgtgtcagcccttccccctggcagccaggcattacaggtggtgccggatctgtccaaaaaagtggcatcgaccttgaccgaagaaggaggtggagggggtgggggtgggggaagcgtggctcccaagcctccacggggtaggaagaaaaaacggatgctggaaagcggcctccccgaaatgaacgacccctacgtcctgtctcctgaagacgatgacgaccaccagaaagacgggaagacctatcggtctgagggtaactgcggtacaggcaacggtcagtctctgggtctcatggactcagtcccagggtccacaacgaatcttctgtgtgaccccggatgccgaatgtgctctctgaccttttacagcaaatccgaaatgcaaattcactccaagtcacatacagaaaccaagcctcacaaatgtccacactgctctaaaacctttgccaactcctcatacttagcgcagcatattcgcatccacagtggggcaaagccatattcatgtaacttctgtgagaaatcattccgccagctttctcatttacaacagcataccagatag

SEQ ID NO: 313816 - DNA, 1067 bp, Artificial Sequence
  derived and/or modified sequence
agttcagctccctggaggggaaggagggacgtcccaaggaagggtctttgagaaaggggtagaatggaagaatctcacttcaattctaacccgtacttctggccttctatccccacagtctcaggtcagatcgagaacacaatgttcatcaacaagatgaaggatcagctgttgccagagaagggctgtggtctggccccacctcactaccccaccttgctgacagtgcctgcctcagtgtccctgccctcaggcatcagtatggacacagagtccaagtcagaccagctgaccccacacagccaagcgtccgttacccagaatatcacggtggtccctgtgccgtctacaggactgatgactgctggagtctcctgttctcagaggtggagaagagaagggagtcaatcaaggggtccgggtttggtaatcacgtccccctcaggctctcttgtgaccacagcatcatcagctcagaccttccccatttcggctcccatgattgtctcagctcttccccctggctcacaagccctgcaggttgtccctgacctctccaagaaggtagcatcgaccctaaccgaggaaggaggcggaggtggtggtggaggtggcagtgtggctcctaagccaccccggggccggaagaagaagcggatgctggaatcagggctgcccgagatgaatgacccttatgtcctctcccctgaggatgatgatgaccatcagaaagacggcaagacctacaggagcgaagggaactgcggcacaggaaatggacagagccttgggctcatggattcagttcccggctccaccacgaatttgctgtgtgaccctgggtgccggatgtgctcactgacattctactccaagtcggagatgcagatccactccaagtcacacaccgagaccaagccccacaagtgcccacattgctccaagaccttcgccaacagctcctacctggcccagcacatccgtatacactcaggggctaagccctacagttgtaacttctgtgagaaatccttccgccagctctcccaccttcagcagcacacccg

SEQ ID NO: 313817 - DNA, 420 bp, Artificial Sequence
  derived and/or modified sequence
atgtttcttcttaaaaaatcttcagaaaagggttggtaccccgtgaaggaatcaagagatagaggtcctcggagatggtcccagggtctgtcgcgcaagaagcggacgtttcctactaagagttggcggaagaagaccccaggtttgctccttcccctcccaagcgggtggcaacacggcagcctgagagccggacaggtcctccacttggacggggcaggcggcgatagtgaggctgatgtactgatgatgctgcgtcgcctcatcagaggccaggtcaaaggcactctcggctggcgcgtgggtattgcagtgcctacaacacccactctcggcgggtgcccccggaggctcgaggtgtggtggtggctgctgcttttgctgctattgcttctgctgcttctgctgcttctcctatag

SEQ ID NO: 313818 - DNA, 420 bp, Artificial Sequence
  derived and/or modified sequence
atgttcctgctgaagaagagcagcgagaagggctggtaccctgtgaaggagagccgggaccggggcccccggcgctggagccagggcctgagcaggaagaagaggaccttccccaccaagtcctggaggaagaagaccccaggcctgctgctgcccctgcccagcggctggcagcacggcagcctgcgggccggccaggtgctgcacctggatggagctggaggagacagcgaggctgatgtgctgatgatgctgcggcggctcatccggggccaggtgaagggcaccctgggctggagggtgggcattgctgtgcccaccacccccaccctgggcggctgcccccggcggctggaggtgtggtggtggctgctgctgctgctgctgctgctgctgctgctgctgctgctgctgctgtag

SEQ ID NO: 313819 - DNA, 420 bp, Artificial Sequence
  derived and/or modified sequence
atgttcctgctgaagaagagcagcgagaagggctggtaccccgtgaaagaaagtcgagatcgtggtccacgccggtggagccaagggttgtctaggaagaaacggacctttccgaccaagtcatggagaaaaaaaacaccgggccttctgctcccgttgccaagcgggtggcagcatgggagcttacgcgccggacaagtgctccacctggacggagccgggggcgattctgaggcagacgtgctcatgatgctccgacgcttgataaggggacaggtgaaggggaccctcggctggagagtgggtatcgcggttcccacgactccaacactaggcggatgcccacggcgtttggaggtgtggtggtggctgctgctgctcttactgctgctgctgttgctcttattattgcttttgtag

SEQ ID NO: 313820 - DNA, 420 bp, Artificial Sequence
  derived and/or modified sequence
atgtttctgttgaaaaagtcttcagaaaaaggctggtaccccgtgaaggaaagtcgcgatcgtggccctcgccgttggagtcagggtctcagtaggaagaagaggacattccccacaaaaagttggcgaaaaaaaacacccggactcctcctgcctttgcccagcggctggcaacacgggagccttagagccggacaggtgctgcatctggatggggctggtggagacagcgaggcagacgtgttaatgatgctacggagactcatccgaggtcaagtgaagggtactctgggctggcgtgtggggattgctgtaccaacaactcccactctgggaggctgcccaagacggctcgaagtctggtggtggctactcctgctactcctcctcctgttactgttgctgctcttgctgctgtag

SEQ ID NO: 313821 - DNA, 1292 bp, Artificial Sequence
  derived and/or modified sequence
actatattaccgccggtacacatccgcccgacactgaaacttttccttttgcatggtagccacgaccgcccacagtgaggcggctgtagcccgcttccgcccttacagacaccccaggacgcgaccgagacaggagggctgatgttccttttgaagaagagttcagaaaaaggatggtatcctgtgaaggaaagccgtgacagaggcccaaggagatggagccaaggcctgtcaaggaagaaaaggacttttcccaccaagagttggagaaagaagacaccaggactacttcttcctcttcccagtgggtggcagcacggatctctaagagctggccaggtgctccacctggatggtgctggtggtgacagtgaggcagatgtccttatgatgctccgccgtcttatacggggtcaggtcaaaggaacactggggtggagggttgggattgctgtccccaccacccccaccctggggggctgccccaggagactggaagtgtggtggtggctgttgctgctgctgctgctgctgctgctgctgctgctgctgctgctgtgatgcctgggccactgctgccgctgctgctgctgcctgcacctgttgctgaagatcaggcgggttgtgtttgcgcatatgtttcataagggccctctgctaagatgagccaaggacttgagggtgcagtgacacctgctcctcatcagcgacttcagaaccatctctatgaccaggtgcttttcgggacctctggtataaaatctcaaaaacatcacaggacgtgtctcttatttgtgaggaaagcctgactcctcctcttctcaaagcaagatgtctgatcactttaaggtgagatcatcacatccacaagaagccgggtgagacggtctatggcctgtaagtctggactccagttcaacttgagatagcaccaaagatcatcacttctagttggcaggttcccttcttcctagtcactccagattcacgggataaacactgggcatctttatgaagcataagcgttttcattttctgtttgctgattctctctgaacatttagtacgtgttttcttttgttctctactcctggcatccctcagagccttgcttgttgctgtgggtgtcaccaggctggtgcccagctaatgtctgattttatttcctgttcataattggtgccctaagggctagaggtatggtcttctccactcaaatgcctctgttttggcatcaaggggcaaatcttccaagatgggtacatgagtattttcagggaggaaaattagag

SEQ ID NO: 313822 - protein, 515 aa, Artificial Sequence
  derived and/or modified sequence
MQIKVSIYGIWFYDKEECQRIAELMKNLTQYEQLKAHQGTGAGISPVILNSGEGKEVDILRMLIKAKDEYTKCKTCSEPKKITSSSAIYDNPNLIKPIPVKPSENQQQRIPQPNQTLDPEPQHLSLTALFGKQDKATCQETVEPPQTLHQQQQQQQQQQEKLPIRQGVVRSLSYEEPRRHSPPIEKQLCPAIQKLMVRSADLHPLSELPENRPCENGSTHSAGEFFTGPVQPGSPHNIGTSRGVQNASRTQNLFEKLQSTPGAANKCDPSTPAPASSAALNRSRAPTSVTPVAPGKGLAQPPQAYFNGSLPPQTVGHQAHGREQSTLPRQTLPISGSQTGSSGVISPQELLKKLQIVQQEQQLHASNRPALAAKFPVLAQSSGTGKPLESWINKTPNTEQQTPLFQVISPQRIPATAAPSLLMSPMVFAQPTSVPPKERESGLLPVGGQEPPAAATSLLLPIQSPEPSVITSSPLTKLQLQEALLYLIQNDDNFLNIIYEAYLFSMTQAAMKKTM

SEQ ID NO: 313823 - DNA, 1548 bp, Artificial Sequence
  derived and/or modified sequence
atgcagatcaaagtgtcaatctacggcatatggttttacgataaagaggaatgccaacgcattgctgagctgatgaagaacttaacgcagtacgagcaactgaaagcccaccaggggaccggggccggtattagccctgtcattctgaatagcggggagggtaaagaagtggacattcttcggatgttaataaaagctaaagacgagtatactaagtgtaagacatgctcagagccaaaaaaaatcacatcgagttccgcaatttatgataatcctaacctgattaagccgattcctgtcaagccatcagagaaccagcaacagagaataccgcagcccaatcagaccctggaccccgagccccagcacctgtcactaactgctctgttcgggaagcaggacaaagcaacttgccaagaaaccgtggagcctccccagactcttcaccagcagcaacagcaacaacagcagcagcaagaaaagctgcccattagacagggggtggtgaggagcctctcgtacgaggagccccggagacatagccctccgatagagaaacagctgtgcccagccatccagaagctgatggtcagatccgctgacctacaccctctgtccgagctgcctgagaatcgcccttgtgagaacggtagtacacacagcgctggtgagttctttacaggccctgtccagcctggaagccctcacaacatcggcactagccgtggagttcagaacgcaagtcggacgcaaaacctttttgaaaagctccagtccacacctggcgccgcgaataaatgcgatcccagcacccccgctccagcgtcatccgctgctcttaaccgtagcagggcccccacttctgtaacaccagttgctcccggcaagggactagctcaaccgccccaggcatattttaacggctccctgcctccacagacagtcggccaccaggctcacggacgagaacagagcacattaccacggcagactttaccaatctctggctcacagaccggcagctccggcgttatttctccacaagagctgctgaagaagttgcaaattgttcagcaggagcagcagctgcacgcctcaaataggcccgcgctagccgctaagtttcccgtgcttgcccagtcgagcggcaccggaaagccgctcgagtcatggattaataagactcctaacacggagcagcaaacccctctgttccaggtgatcagcccacagcgtattcccgccaccgccgcaccatctttactcatgagtccaatggtgtttgcacaaccgacctctgtgcctccaaaggagagagaatcagggctcctcccagtgggcgggcaggagcccccagctgcagctacttcgctgctgttgcccatccagtcccccgagccctctgtgataacgtccagcccactgacaaagctacagctgcaggaggccctgctgtatctaattcaaaacgacgacaactttctcaacataatctacgaggcttatctgttctctatgactcaagccgcaatgaaaaagactatgtag

SEQ ID NO: 313824 - DNA, 1548 bp, Artificial Sequence
  derived and/or modified sequence
atgcagatcaaggtgtccatctacggcatctggttctatgacaaggaggagtgccagagaattgctgagctgatgaagaacctgacccagtatgagcagctgaaggcccaccagggcaccggggccggcatcagccctgtgatcctgaacagcggggagggcaaggaggtggacatcctgaggatgctgatcaaggccaaggatgagtacaccaagtgcaagacctgcagcgagcccaagaagatcaccagcagcagcgccatctatgacaaccccaacctgatcaagcccatccctgtgaagcccagcgagaaccagcagcagaggatcccccagcccaaccagaccctggaccctgagccccagcacctgagcctgacagccctgtttgggaagcaggacaaggccacctgccaggagaccgtggagcccccccagaccctgcaccagcagcagcagcagcagcagcagcagcaggagaagctgcccatccggcagggcgtggtgcgcagcctgtcctatgaggagccccggcggcacagcccccccatcgagaagcagctgtgcccagccatccagaagctgatggtgcgctctgctgacctgcaccccctgtctgagctgcctgagaaccggccctgtgaaaatggcagcacccacagcgctggggagttcttcaccggccctgtgcagcccggcagcccccacaacatcggcaccagcagaggagtgcagaatgccagcaggacccagaacctgtttgagaagctgcagagcaccccaggagctgccaacaagtgtgaccccagcaccccagccccagccagcagcgctgccctgaacagaagccgggcccccacctctgtgacccctgtggcccctgggaagggcctggcccagcccccccaggcctacttcaacggcagcctgcccccccagacagtgggccaccaggcccacggccgggagcagagcaccctgccccggcagaccctgcccatcagcggcagccagacaggcagcagcggggtcatcagcccccaggagctgctgaagaagctgcagatcgtgcagcaggagcagcagctgcacgccagcaacagacctgccctggccgccaagtttcctgtgctggcccagagcagcggcaccgggaagcccctggagagctggatcaacaagacccccaacacagagcagcagacccccctcttccaggtgatcagcccccagaggatcccagccacagctgcccccagcctgctgatgagccccatggtgtttgcccagcccacctctgtgccccccaaggagcgggagagcggcctgctgcctgtgggcggccaggagcccccagctgctgccaccagcctgctgctgcccatccagagccctgagcccagcgtcatcaccagcagccccctgaccaagctgcagctgcaggaggccctgctgtacctgatccagaatgatgacaacttcctgaacatcatctatgaggcctacctgttctccatgacccaggccgccatgaagaagaccatgtag

SEQ ID NO: 313825 - DNA, 1548 bp, Artificial Sequence
  derived and/or modified sequence
atgcagatcaaggtgagcatctacggcatctggttctacgacaaggaagaatgccagcggatcgccgaacttatgaaaaacctgactcagtatgaacagctcaaggctcatcagggcacaggcgcaggcatctcccctgtgattctgaattccggcgagggtaaagaagtagatatcctgcgtatgctcattaaggccaaggacgagtacacaaaatgcaagacgtgtagtgagcccaagaaaattacttcatctagcgctatttacgataacccaaatctcatcaaacccatcccggtcaagccttctgaaaaccaacaacagcggattccgcaacctaaccaaaccctggaccctgagcctcaacatctgtcattgacagcgcttttcggcaagcaggacaaggccacctgtcaggagaccgtggaacccccacagactttgcaccagcagcagcagcagcagcagcaacagcaggaaaaactcccaatccgccagggggtggttagatcactgtcctacgaggaacctaggaggcattctccgcctatcgagaagcagctctgccccgctatccagaagctaatggtgcggtctgccgatctgcaccccctgtccgagctccctgagaaccgaccctgcgagaatggttcaacgcactctgccggtgagtttttcaccgggcccgtgcaaccaggttctccacataacattggaacaagcaggggggtgcaaaacgcctcaaggacccagaacctgtttgagaaactccagtccacgcccggcgcagccaataaatgtgatccttctacgcctgcccccgcttcatctgctgccctcaacagatcaagagcgcctacctcagttaccccggtggcccctggcaagggactggctcagcccccacaggcctacttcaatgggtctctacctccacaaacagtgggccatcaagcacatggccgcgaacaatccacattgccaagacagactctgcctatatctggatcccagactggtagtagtggggtcattagtccacaggagctgttgaagaaactgcaaatcgtacaacaggagcagcagttgcacgcatctaatcggccggcgctcgccgccaaattcccagttctagcgcagtccagcggtaccgggaaaccgttggaatcctggattaataaaacgccaaatacggagcaacagacacctctatttcaggtgattagcccacagcgaattcctgcaaccgcggctccttcattacttatgtcgcctatggtgttcgctcagccaacttccgtccccccgaaggagagggaaagcggtctattgcctgtaggaggtcaggagcctcctgccgccgccacatcgttgctgttaccaatccagtctccagagcctagtgtgatcactagctctcctctcactaaattacagctgcaggaagctttgctgtatctcatacaaaatgacgataacttcttaaacatcatttatgaggcgtatctgttcagcatgactcaagcggccatgaaaaaaacgatgtag

SEQ ID NO: 313826 - DNA, 1548 bp, Artificial Sequence
  derived and/or modified sequence
atgcaaattaaggtaagcatttatggaatatggttttacgacaaggaagagtgccagcgaattgccgagctgatgaagaatctcactcaatacgaacaattgaaggctcaccagggcacaggtgccggtatttctcctgtgattttgaacagtggggaagggaaggaggtggatatcctgcgtatgctgatcaaggccaaagacgagtataccaagtgtaagacttgtagtgaacccaagaagattacatcatcctctgccatctacgacaatcccaatctgattaaacctattcccgtgaagcccagcgaaaatcaacagcagagaataccacagccaaaccagaccttagaccccgaaccccagcacttgtcactgacagctctgtttggcaagcaggacaaagcgacctgtcaagaaactgtagagccaccacaaacactccaccaacagcagcagcaacagcagcagcaacaagaaaagcttcctatccgccagggagttgtacggtctctctcctatgaggaaccacgtaggcactccccccctattgagaaacagctgtgtcctgctattcagaaactgatggtgagaagtgcagacctacatcccttgtccgaactgcccgagaatcggccatgtgagaatgggagtacccacagtgcgggtgaattctttacgggaccagtccagccaggatcgccgcacaacattgggacctctcgcggtgtgcaaaatgccagtcgaacccaaaaccttttcgaaaagttgcaatcaacaccgggagcagccaataagtgcgacccctcaactcctgcacctgcctcttccgcggctctgaataggtcccgagcccctacaagcgttacacctgtggctcccggaaaaggtctggctcagccccctcaggcatattttaatgggtccctgcccccacagaccgtaggacaccaggcacatggcagggagcagagtaccctcccccgtcagacgttacccatctctggctctcagactggaagcagcggcgtgatttctcctcaggaacttcttaagaagctgcagattgtgcagcaggaacagcagcttcatgcctcaaataggcccgcactggctgctaagttcccagttctcgcccaatctagtgggactggcaagcctcttgaatcatggattaacaagaccccgaatacagagcagcagacacctctgtttcaggtgatttcaccacaacgcatcccagcgaccgctgcacccagtctcctgatgtcccctatggtgtttgctcagcccacttccgtcccaccaaaggagagagaatccggccttttgcccgtagggggtcaggaaccacctgccgctgcaacttcactactgttgccaatccagtcgcccgagcctagcgttatcactagttccccgctgacgaaattgcagttgcaggaggctttactgtatctgattcaaaacgatgataactttctcaatattatctatgaagcttatttgttctccatgacacaggcagcaatgaagaagactatgtag

SEQ ID NO: 313827 - DNA, 1548 bp, Artificial Sequence
  derived and/or modified sequence
atgcagatcaaggtgagcatctacggcatctggttctacgacaaggaggagtgccagagaatcgccgagctgatgaagaacctgacccagtacgagcagctgaaggcccaccagggcaccggcgccggcatcagccccgtgatcctgaacagcggcgagggcaaggaggtggacatcctgagaatgctgatcaaggccaaggacgagtacaccaagtgcaagacctgcagcgagcccaagaagatcaccagcagcagcgccatctacgacaaccccaacctgatcaagcccatccccgtgaagcccagcgagaaccagcagcagagaatcccccagcccaaccagaccctggaccccgagccccagcacctgagcctgaccgccctgttcggcaagcaggacaaggccacctgccaggagaccgtggagcccccccagaccctgcaccagcagcagcagcagcagcagcagcagcaggagaagctgcccatcagacagggcgtggtgagaagcctgagctacgaggagcccagaagacacagcccccccatcgagaagcagctgtgccccgccatccagaagctgatggtgagaagcgccgacctgcaccccctgagcgagctgcccgagaacagaccctgcgagaacggcagcacccacagcgccggcgagttcttcaccggccccgtgcagcccggcagcccccacaacatcggcaccagcagaggcgtgcagaacgccagcagaacccagaacctgttcgagaagctgcagagcacccccggcgccgccaacaagtgcgaccccagcacccccgcccccgccagcagcgccgccctgaacagaagcagagcccccaccagcgtgacccccgtggcccccggcaagggcctggcccagcccccccaggcctacttcaacggcagcctgcccccccagaccgtgggccaccaggcccacggcagagagcagagcaccctgcccagacagaccctgcccatcagcggcagccagaccggcagcagcggcgtgatcagcccccaggagctgctgaagaagctgcagatcgtgcagcaggagcagcagctgcacgccagcaacagacccgccctggccgccaagttccccgtgctggcccagagcagcggcaccggcaagcccctggagagctggatcaacaagacccccaacaccgagcagcagacccccctgttccaggtgatcagcccccagagaatccccgccaccgccgcccccagcctgctgatgagccccatggtgttcgcccagcccaccagcgtgccccccaaggagagagagagcggcctgctgcccgtgggcggccaggagccccccgccgccgccaccagcctgctgctgcccatccagagccccgagcccagcgtgatcaccagcagccccctgaccaagctgcagctgcaggaggccctgctgtacctgatccagaacgacgacaacttcctgaacatcatctacgaggcctacctgttcagcatgacccaggccgccatgaagaagaccatgtag

SEQ ID NO: 313828 - protein, 992 aa, Artificial Sequence
  derived and/or modified sequence
MYGSARSVGKVEPSSQSPGRSPRLPRSPRLGHRRTNSTGGSSGSSVGGGSGKTLSMENIQSLNAAYATSGPMYLSDHENVGSETPKSTMTLGRSGGRLPYGVRMTAMGSSPNIASSGVASDTIAFGEHHLPPVSMASTVPHSLRQARDNTIMDLQTQLKEVLRENDLLRKDVEVKESKLSSSMNSIKTFWSPELKKERALRKDEASKITIWKEQYRVVQEENQHMQMTIQALQDELRIQRDLNQLFQQDSSSRTGEPCVAELTEENFQRLHAEHERQAKELFLLRKTLEEMELRIETQKQTLNARDESIKKLLEMLQSKGLSAKATEEDHERTRRLAEAEMHVHHLESLLEQKEKENSMLREEMHRRFENAPDSAKTKALQTVIEMKDSKISSMERGLRDLEEEIQMLKSNGALSTEEREEEMKQMEVYRSHSKFMKNKIGQVKQELSRKDTELLALQTKLETLTNQFSDSKQHIEVLKESLTAKEQRAAILQTEVDALRLRLEEKETMLNKKTKQIQDMAEEKGTQAGEIHDLKDMLDVKERKVNVLQKKIENLQEQLRDKEKQMSSLKERVKSLQADTTNTDTALTTLEEALAEKERTIERLKEQRDRDEREKQEEIDNYKKDLKDLKEKVSLLQGDLSEKEASLLDLKEHASSLASSGLKKDSRLKTLEIALEQKKEECLKMESQLKKAHEAALEARASPEMSDRIQHLEREITRYKDESSKAQAEVDRLLEILKEVENEKNDKDKKIAELESLFSRQVKDQNKKVANLKHKEQVEKKKSAQMLEEARRREDNLNDSSQQLQDSLRKKDDRIEELEEALRESVQITAEREMVLAQEESARTNAEKQVEELLMAMEKVKQELESMKAKLSSTQQSLAEKETHLTNLRAERRKHLEEVLEMKQEALLAAISEKDANIALLELSSSKKKTQEEVAALKREKDRLVQQLKQQTQNRMKLMADNYEDDHFKSSHSNQTNHKPSPDQDEEEGIWA

SEQ ID NO: 313829 - protein, 992 aa, Artificial Sequence
  derived and/or modified sequence
MYGSARSVGKVEPSSQSPGRSPRLPRSPRLGHRRTNSTGGSSGSSVGGGSGKTLSMENIQSLNAAYATSGPMYLSDHENVGSETPKSTMTLGRSGGRLPYGVRMTAMGSSPNIASSGVASDTIAFGEHHLPPVSMASTVPHSLRQARDNTIMDLQTQLKEVLRENDLLRKDVEVKESKLSSSMNSIKTFWSPELKKERALRKDEASKITIWKEQYRVVQEENQHMQMTIQALQDELRIQRDLNQLFQQDSSSRTGEPCVAELTEENFQRLHAEHERQAKELFLLRKTLEEMELRIETQKQTLNARDESIKKLLEMLQSKGLSAKATEEDHERTRRLAEAEMHVHHLESLLEQKEKENSMLREEMHRRFENAPDSAKTKALQTVIEMKDSKISSMERGLRDLEEEIQMLKSNGALSTEEREEEMKQMEVYRSHSKFMKNKIGQVKQELSRKDTELLALQTKLETLTNQFSDSKQHIEVLKESLTAKEQRAAILQTEVDALRLRLEEKETMLNKKTKQIQDMAEEKGTQAGEIHDLKDMLDVKERKVNVLQKKIENLQEQLRDKEKQMSSLKERVKSLQADTTNTDTALTTLEEALAEKERTIERLKEQRDRDEREKQEEIDNYKKDLKDLKEKVSLLQGDLSEKEASLLDLKEHASSLASSGLKKDSRLKTLEIALEQKKEECLKMESQLKKAHEAALEARASPEMSDRIQHLEREITRYKDESSKAQAEVDRLLEILKEVENEKNDKDKKIAELESLTSRQVKDQNKKVANLKHKEQVEKKKSAQMLEEARRREDNLNDSSQQLQDSLRKKDDRIEELEEALRESVQITAEREMVLAQEESARTNAEKQVEELLMAMEKVKQELESMKAKLSSTQQSLAEKETHLTNLRAERRKHLEEVLEMKQEALLAAISEKDANIALLELSSSKKKTQEEVAALKREKDRLVQQLKQQTQNRMKLMADNYEDDHFKSSHSNQTNHKPSPDQDEEEGIWA

SEQ ID NO: 313830 - DNA, 2979 bp, Artificial Sequence
  derived and/or modified sequence
atgtacggcagcgccagaagcgtgggcaaggtggagcccagcagccagagccccggcagaagccccagactgcccagaagccccagactgggccacagaagaaccaacagcaccggcggcagcagcggcagcagcgtgggcggcggcagcggcaagaccctgagcatggagaacatccagagcctgaacgccgcctacgccaccagcggccccatgtacctgagcgaccacgagaacgtgggcagcgagacccccaagagcaccatgaccctgggcagaagcggcggcagactgccctacggcgtgagaatgaccgccatgggcagcagccccaacatcgccagcagcggcgtggccagcgacaccatcgccttcggcgagcaccacctgccccccgtgagcatggccagcaccgtgccccacagcctgagacaggccagagacaacaccatcatggacctgcagacccagctgaaggaggtgctgagagagaacgacctgctgagaaaggacgtggaggtgaaggagagcaagctgagcagcagcatgaacagcatcaagaccttctggagccccgagctgaagaaggagagagccctgagaaaggacgaggccagcaagatcaccatctggaaggagcagtacagagtggtgcaggaggagaaccagcacatgcagatgaccatccaggccctgcaggacgagctgagaatccagagagacctgaaccagctgttccagcaggacagcagcagcagaaccggcgagccctgcgtggccgagctgaccgaggagaacttccagagactgcacgccgagcacgagagacaggccaaggagctgttcctgctgagaaagaccctggaggagatggagctgagaatcgagacccagaagcagaccctgaacgccagagacgagagcatcaagaagctgctggagatgctgcagagcaagggcctgagcgccaaggccaccgaggaggaccacgagagaaccagaagactggccgaggccgagatgcacgtgcaccacctggagagcctgctggagcagaaggagaaggagaacagcatgctgagagaggagatgcacagaagattcgagaacgcccccgacagcgccaagaccaaggccctgcagaccgtgatcgagatgaaggacagcaagatcagcagcatggagagaggcctgagagacctggaggaggagatccagatgctgaagagcaacggcgccctgagcaccgaggagagagaggaggagatgaagcagatggaggtgtacagaagccacagcaagttcatgaagaacaagatcggccaggtgaagcaggagctgagcagaaaggacaccgagctgctggccctgcagaccaagctggagaccctgaccaaccagttcagcgacagcaagcagcacatcgaggtgctgaaggagagcctgaccgccaaggagcagagagccgccatcctgcagaccgaggtggacgccctgagactgagactggaggagaaggagaccatgctgaacaagaagaccaagcagatccaggacatggccgaggagaagggcacccaggccggcgagatccacgacctgaaggacatgctggacgtgaaggagagaaaggtgaacgtgctgcagaagaagatcgagaacctgcaggagcagctgagagacaaggagaagcagatgagcagcctgaaggagagagtgaagagcctgcaggccgacaccaccaacaccgacaccgccctgaccaccctggaggaggccctggccgagaaggagagaaccatcgagagactgaaggagcagagagacagagacgagagagagaagcaggaggagatcgacaactacaagaaggacctgaaggacctgaaggagaaggtgagcctgctgcagggcgacctgagcgagaaggaggccagcctgctggacctgaaggagcacgccagcagcctggccagcagcggcctgaagaaggacagcagactgaagaccctggagatcgccctggagcagaagaaggaggagtgcctgaagatggagagccagctgaagaaggcccacgaggccgccctggaggccagagccagccccgagatgagcgacagaatccagcacctggagagagagatcaccagatacaaggacgagagcagcaaggcccaggccgaggtggacagactgctggagatcctgaaggaggtggagaacgagaagaacgacaaggacaagaagatcgccgagctggagagcctgttcagcagacaggtgaaggaccagaacaagaaggtggccaacctgaagcacaaggagcaggtggagaagaagaagagcgcccagatgctggaggaggccagaagaagagaggacaacctgaacgacagcagccagcagctgcaggacagcctgagaaagaaggacgacagaatcgaggagctggaggaggccctgagagagagcgtgcagatcaccgccgagagagagatggtgctggcccaggaggagagcgccagaaccaacgccgagaagcaggtggaggagctgctgatggccatggagaaggtgaagcaggagctggagagcatgaaggccaagctgagcagcacccagcagagcctggccgagaaggagacccacctgaccaacctgagagccgagagaagaaagcacctggaggaggtgctggagatgaagcaggaggccctgctggccgccatcagcgagaaggacgccaacatcgccctgctggagctgagcagcagcaagaagaagacccaggaggaggtggccgccctgaagagagagaaggacagactggtgcagcagctgaagcagcagacccagaacagaatgaagctgatggccgacaactacgaggacgaccacttcaagagcagccacagcaaccagaccaaccacaagcccagccccgaccaggacgaggaggagggcatctgggcctag

SEQ ID NO: 313831 - DNA, 2979 bp, Artificial Sequence
  derived and/or modified sequence
atgtacggcagcgccagaagcgtgggcaaggtggagcccagcagccagagccccggcagaagccccagactgcccagaagccccagactgggccacagaagaaccaacagcaccggcggcagcagcggcagcagcgtgggcggcggcagcggcaagaccctgagcatggagaacatccagagcctgaacgccgcctacgccaccagcggccccatgtacctgagcgaccacgagaacgtgggcagcgagacccccaagagcaccatgaccctgggcagaagcggcggcagactgccctacggcgtgagaatgaccgccatgggcagcagccccaacatcgccagcagcggcgtggccagcgacaccatcgccttcggcgagcaccacctgccccccgtgagcatggccagcaccgtgccccacagcctgagacaggccagagacaacaccatcatggacctgcagacccagctgaaggaggtgctgagagagaacgacctgctgagaaaggacgtggaggtgaaggagagcaagctgagcagcagcatgaacagcatcaagaccttctggagccccgagctgaagaaggagagagccctgagaaaggacgaggccagcaagatcaccatctggaaggagcagtacagagtggtgcaggaggagaaccagcacatgcagatgaccatccaggccctgcaggacgagctgagaatccagagagacctgaaccagctgttccagcaggacagcagcagcagaaccggcgagccctgcgtggccgagctgaccgaggagaacttccagagactgcacgccgagcacgagagacaggccaaggagctgttcctgctgagaaagaccctggaggagatggagctgagaatcgagacccagaagcagaccctgaacgccagagacgagagcatcaagaagctgctggagatgctgcagagcaagggcctgagcgccaaggccaccgaggaggaccacgagagaaccagaagactggccgaggccgagatgcacgtgcaccacctggagagcctgctggagcagaaggagaaggagaacagcatgctgagagaggagatgcacagaagattcgagaacgcccccgacagcgccaagaccaaggccctgcagaccgtgatcgagatgaaggacagcaagatcagcagcatggagagaggcctgagagacctggaggaggagatccagatgctgaagagcaacggcgccctgagcaccgaggagagagaggaggagatgaagcagatggaggtgtacagaagccacagcaagttcatgaagaacaagatcggccaggtgaagcaggagctgagcagaaaggacaccgagctgctggccctgcagaccaagctggagaccctgaccaaccagttcagcgacagcaagcagcacatcgaggtgctgaaggagagcctgaccgccaaggagcagagagccgccatcctgcagaccgaggtggacgccctgagactgagactggaggagaaggagaccatgctgaacaagaagaccaagcagatccaggacatggccgaggagaagggcacccaggccggcgagatccacgacctgaaggacatgctggacgtgaaggagagaaaggtgaacgtgctgcagaagaagatcgagaacctgcaggagcagctgagagacaaggagaagcagatgagcagcctgaaggagagagtgaagagcctgcaggccgacaccaccaacaccgacaccgccctgaccaccctggaggaggccctggccgagaaggagagaaccatcgagagactgaaggagcagagagacagagacgagagagagaagcaggaggagatcgacaactacaagaaggacctgaaggacctgaaggagaaggtgagcctgctgcagggcgacctgagcgagaaggaggccagcctgctggacctgaaggagcacgccagcagcctggccagcagcggcctgaagaaggacagcagactgaagaccctggagatcgccctggagcagaagaaggaggagtgcctgaagatggagagccagctgaagaaggcccacgaggccgccctggaggccagagccagccccgagatgagcgacagaatccagcacctggagagagagatcaccagatacaaggacgagagcagcaaggcccaggccgaggtggacagactgctggagatcctgaaggaggtggagaacgagaagaacgacaaggacaagaagatcgccgagctggagagcctgaccagcagacaggtgaaggaccagaacaagaaggtggccaacctgaagcacaaggagcaggtggagaagaagaagagcgcccagatgctggaggaggccagaagaagagaggacaacctgaacgacagcagccagcagctgcaggacagcctgagaaagaaggacgacagaatcgaggagctggaggaggccctgagagagagcgtgcagatcaccgccgagagagagatggtgctggcccaggaggagagcgccagaaccaacgccgagaagcaggtggaggagctgctgatggccatggagaaggtgaagcaggagctggagagcatgaaggccaagctgagcagcacccagcagagcctggccgagaaggagacccacctgaccaacctgagagccgagagaagaaagcacctggaggaggtgctggagatgaagcaggaggccctgctggccgccatcagcgagaaggacgccaacatcgccctgctggagctgagcagcagcaagaagaagacccaggaggaggtggccgccctgaagagagagaaggacagactggtgcagcagctgaagcagcagacccagaacagaatgaagctgatggccgacaactacgaggacgaccacttcaagagcagccacagcaaccagaccaaccacaagcccagccccgaccaggacgaggaggagggcatctgggcctag

SEQ ID NO: 313832 - DNA, 2979 bp, Artificial Sequence
  derived and/or modified sequence
atgtatggatcagcccgatctgtcggcaaggtggaacccagtagtcagtcccccggcagatctcctcgactccctagatcaccccgactcggccaccgccggacaaatagtacagggggctcctcgggaagctccgtgggcggagggagtggcaaaaccctctctatggagaacatccagagcctgaacgcagcatacgcaacttcgggccctatgtacctctctgaccacgagaacgtgggttcggaaaccccaaagtcaactatgacactgggtcggtcgggagggagacttccttatggggtgaggatgaccgctatgggaagcagtccgaacattgccagttcaggtgtggcctctgacacaattgccttcggggagcaccacctgcccccagtttcaatggcttcgacagtcccccattcgctgaggcaggcacgggacaacacaataatggatctgcagacacagctcaaagaggtactccgtgaaaacgatctcctcagaaaggacgttgaggtgaaagagtctaagctgagctctagcatgaacagtattaaaactttttggagtccggaactcaaaaaagaacgcgcactacggaaagacgaagcctctaaaatcacaatttggaaagagcagtatcgcgtcgtacaggaggagaatcagcatatgcagatgacgattcaggccctgcaagatgaactgcgcatccagagggatctgaaccagctatttcagcaggattcctcaagccgaacaggagagccttgcgtcgctgagctgactgaggagaactttcagcgattgcacgcggaacacgaaagacaggcaaaggagttgttccttttacggaaaactctcgaggagatggagctgcgcattgaaacacaaaaacagacactcaatgcccgagacgaatctatcaagaaattactcgagatgttgcagtccaaggggctctccgccaaggccaccgaagaggatcacgagcgcacaagacgacttgcagaagccgagatgcacgttcaccacctggagagcctgctggagcagaaagagaaggagaactcgatgctgcgagaggagatgcatcgccggtttgagaatgcacctgattcggccaaaacgaaagcactgcaaaccgtcatagaaatgaaagactcaaagatctcaagtatggaacggggcctgcgggatttggaagaggaaattcagatgttaaaaagcaacggcgcgctctccactgaggaacgcgaggaagaaatgaagcaaatggaggtgtaccgttctcattccaagtttatgaaaaacaaaattggccaggtgaaacaggagctgtccaggaaggacacggagcttctcgcactacagacgaagctggagactttaacaaatcagttcagcgactcaaagcagcatattgaggtgctcaaagagtcattgactgccaaggagcaacgcgccgcgatcctacagactgaggtagatgccctaagactgaggttagaagagaaagagacaatgttgaataagaagacaaagcagatacaggatatggctgaggaaaagggaacccaggcaggtgaaattcacgacttaaaagacatgctagatgtaaaggaaagaaaggttaacgtgctgcagaagaagattgagaacttacaggagcagcttcgtgacaaagagaagcagatgagctcccttaaagaacgcgtgaaatccttacaagccgacactaccaacactgatactgcgctcactaccctggaagaagctcttgccgagaaagagagaactatcgagagacttaaagagcagcgggatagagatgagcgcgagaaacaggaagagattgacaactacaagaaggacttgaaggatctcaaggagaaggtgtctctgctgcagggggaccttagcgaaaaggaggcctcccttcttgacctaaaggaacatgcctcgagtctagcgtctagtggcctgaagaaggattcaagacttaagaccctagagatcgctcttgagcagaaaaaggaggaatgtctgaaaatggaatcacagctgaaaaaggcccatgaggcggctctagaggcacgggctagtcctgagatgtctgatcgaatccagcacctggaacgcgagattacccgctataaggatgagtcatctaaagcccaggctgaggtcgacaggctattagaaattctcaaggaagtagaaaatgagaagaatgataaagacaagaaaatcgccgaactagaaagcctgttttctagacaggtgaaggatcagaataagaaggtggctaacctgaaacacaaagaacaagtcgaaaagaagaagagcgcccagatgttagaagaagcccgcaggagggaggataatctgaatgacagtagtcaacagctccaggactctctgcgcaaaaaggacgatcgcatcgaggaacttgaagaggctctgagggagtcagttcagataaccgcagagcgagaaatggtacttgcgcaggaggagtcagcacgcaccaacgctgaaaaacaagtcgaagagctgttgatggcaatggaaaaagtgaagcaggagctggagtcaatgaaggccaagctttcgagcacccaacagagtctggccgagaaggaaactcatcttactaacctgcgtgccgaaagaaggaaacaccttgaggaagtcttagagatgaaacaagaggcattacttgctgccatcagtgagaaagacgctaacatagcactactcgagctgtcctccagcaagaaaaagacccaggaagaagtggcagctctgaagagggagaaagaccggctagtgcagcagctgaaacagcagacccaaaatcgcatgaaactgatggcagataattatgaggacgaccattttaagtccagccatagtaaccaaacaaatcacaagccatccccagatcaagatgaagaagaggggatctgggcatag

SEQ ID NO: 313833 - DNA, 2979 bp, Artificial Sequence
  derived and/or modified sequence
atgtacggctctgctcggtctgtgggaaaagtggaacctagctctcagagcccaggcaggagcccgagactgccaagaagccctcgcctgggtcaccggagaactaacagcaccggtggttcatctggcagctccgtcggcggaggcagtggcaagacactctcaatggaaaacatccaatcacttaacgctgcttacgccacatctgggcccatgtacttgtccgaccatgagaacgtgggctccgaaacgcccaaaagtacgatgactcttggtcgaagcggaggcaggctcccttacggggttcgcatgaccgccatggggagtagtccaaatatagcgtcaagcggcgtggcgtctgatacaattgcttttggcgagcaccatctcccaccagttagcatggcatccactgtgccgcacagcctgcgtcaggcaagagacaataccatcatggatttgcagacacagctgaaggaggtgctgcgagaaaatgaccttctccgtaaggacgtagaggtgaaggaatccaaattatcctctagtatgaactcgataaaaaccttctggtctccagaactgaaaaaagaaagagccctcaggaaagatgaggcatctaagatcacaatctggaaagagcagtatagagtggtgcaggaggagaatcagcacatgcagatgacaattcaggccctacaggacgaactcaggatccaacgcgatctgaaccaattgtttcagcaggatagctcatctagaacaggggagccatgtgtcgcggaactaactgaagaaaactttcagcggctccacgccgaacacgagaggcaggccaaagagttgtttctcctccgaaagacgctggaggagatggagcttaggattgagacgcagaagcaaacactcaacgcaagggatgaatcaattaaaaagcttctcgagatgcttcagagcaagggactctcagctaaggccaccgaggaagatcatgaacgcacaagaagattggcagaggccgagatgcacgtccatcacctcgagtcactcctggaacagaaggagaaggagaattccatgttacgcgaagagatgcacagaagattcgagaatgcccccgactctgcgaagaccaaggctctgcagacagtcatcgagatgaaagacagcaaaattagtagcatggagcgtggattgcgggatttggaagaggaaatccagatgctcaagagcaatggcgctctgtctaccgaagagcgtgaagaggagatgaaacagatggaagtgtaccgctcacatagcaaattcatgaagaataagatcggccaggtcaaacaagaactgagcaggaaggacactgaactgctagcactccaaaccaagttggagactttgacaaatcagttttctgattccaaacaacacattgaagtattgaaggagtcactgacagcaaaggaacagcgggccgccattcttcagacagaagttgatgctctgaggcttcgactggaggaaaaagagactatgctgaacaaaaagactaagcagattcaggatatggcggaggaaaagggaacacaggccggcgagatccacgacctgaaagacatgctcgacgtgaaagaacggaaggtcaacgtgttacagaaaaaaattgagaacctgcaggaacaactgcgagacaaggagaagcaaatgtcctcattaaaagagcgcgtcaagtcccttcaggccgataccaccaataccgacacggctctgaccacacttgaagaagcccttgcagagaaggaacgaaccattgagcggctgaaagagcagagggacagggatgagagagaaaagcaagaggaaattgacaactacaaaaaggacctgaaggatttgaaagagaaggtgtcccttcttcagggcgacctatccgagaaagaagctagcctcttagacctgaaggagcacgccagcagccttgccagttccggcctgaaaaaggattcccgcctgaagacgctggagatcgcattagaacaaaagaaagaggagtgcctaaagatggaaagccagctgaaaaaggcccacgaagcagccctagaagcccgtgcatcccccgagatgtcagatagaatccagcacctggagcgagagatcacccgttataaggacgagagctctaaagcccaggccgaggtggacaggctcctggagatacttaaggaagtcgagaacgagaaaaacgataaagacaagaaaatcgccgagctcgagagcctgactagtagacaggttaaagaccagaacaagaaagtggccaacctcaaacataaagagcaggttgagaagaagaagagcgcccagatgctggaggaggctcgtagacgagaggataacctcaatgacagcagccagcagctgcaagattccctgcgcaagaaagatgaccggatcgaagagctggaggaggccctcagggagagcgttcagataaccgcagaacgtgaaatggtgcttgcgcaagaagaatcggccaggaccaacgccgagaagcaggtggaagagctgctaatggcaatggagaaggtgaaacaagaactcgagagcatgaaggctaagttaagctccactcagcagtctctggccgagaaggaaacacacctgacgaacctcagggcagagcgtcgcaaacaccttgaagaagtgttggagatgaagcaggaagccctgctggcagccatatccgagaaggatgcaaatattgcattgttggagttatcctcttccaagaagaagacccaggaagaggttgccgcacttaagcgggagaaagaccggctcgtccagcagctgaagcaacagacacagaatcgcatgaagctaatggcggacaactatgaggatgatcactttaaaagctcccactccaatcagacaaaccacaagccgagccccgaccaggacgaggaggaaggtatctgggcctag

SEQ ID NO: 313834 - DNA, 2979 bp, Artificial Sequence
  derived and/or modified sequence
atgtatggcagcgcccggtctgtgggcaaggtggagcccagcagccagagccctggccgcagcccccggctgcccaggagcccccggctgggccacaggaggaccaacagcactggaggcagcagcggcagctctgtgggcggcggcagcggcaagaccctgtccatggagaacatccagagcctgaatgctgcctatgccaccagcggccccatgtacctgagtgaccatgaaaatgtgggcagcgagacccccaagagcaccatgaccctgggccgcagcggcggccgcctgccctacggcgtgaggatgacagccatgggcagcagccccaacatcgccagcagcggcgtggccagtgacaccatcgcctttggagagcaccacctgccccctgtgtccatggccagcacagtgccccacagcctgcggcaggcccgggacaacaccatcatggacctgcagacccagctgaaggaggtgctgcgggagaatgacctgctgaggaaggatgtggaggtgaaggagagcaagctgagcagctccatgaacagcatcaagaccttctggagccctgagctgaagaaggagcgggccctgaggaaggatgaggccagcaagatcaccatctggaaggagcagtacagagtggtgcaggaggagaaccagcacatgcagatgaccatccaggccctgcaggatgagctgcgcatccagagggacctgaaccagctgttccagcaggacagcagcagcaggactggagagccctgtgtggccgagctgacagaggagaacttccagaggctgcacgccgagcacgagcggcaggccaaggagctgttcctgctgaggaagaccctggaggagatggagctgagaattgagacccagaagcagaccctgaatgccagagatgagagcatcaagaagctgctggagatgctgcagagcaagggcctgagcgccaaggccacagaggaggaccacgagaggacccggcggctggccgaggccgagatgcacgtgcaccacctggagagcctgctggagcagaaggagaaggagaacagcatgctgcgggaggagatgcacagaagatttgaaaatgccccagacagcgccaagaccaaggccctgcagaccgtcatcgagatgaaggacagcaagatcagctccatggagcggggcctgcgggacctggaggaggagatccagatgctgaagagcaatggagccctgagcacagaggagcgggaggaggagatgaagcagatggaggtgtaccgcagccacagcaagttcatgaagaacaagattggccaggtgaagcaggagctgagcaggaaggacacagagctgctggccctgcagaccaagctggagaccctgaccaaccagttcagtgacagcaagcagcacatcgaggtgctgaaggagagcctgacagccaaggagcagagagctgccatcctgcagacagaggtggatgccctgcggctgcggctggaggagaaggagaccatgctgaacaagaagaccaagcagatccaggacatggccgaggagaagggcacccaggccggggagatccatgacctgaaggacatgctggatgtgaaggagaggaaggtgaatgtgctgcagaagaagattgagaacctgcaggagcagctgcgggacaaggagaagcagatgagcagcctgaaggagcgggtgaagagcctgcaggccgacaccaccaacacagacacagccctgaccaccctggaggaggccctggccgagaaggagaggaccatcgagcggctgaaggagcagagggacagagatgagcgggagaagcaggaggagattgacaactacaagaaggacctgaaggacctgaaggagaaggtgtccctgctgcagggcgacctgtctgagaaggaggccagcctgctggacctgaaggagcacgccagcagcctggccagcagcggcctgaagaaggacagccggctgaagaccctggagatcgccctggagcagaagaaggaggagtgcctgaagatggagagccagctgaagaaggcccatgaagctgccctggaggcccgggccagccctgagatgtctgaccgcatccagcacctggagcgggagatcacccgctacaaggatgagagcagcaaggcccaggccgaggtggaccggctgctggagatcctgaaggaggtggagaatgagaagaatgacaaggacaagaagattgctgagctggagagcctcttcagccggcaggtgaaggaccagaacaagaaggtggccaacctgaagcacaaggagcaggtggagaagaagaagagcgcccagatgctggaggaggcccggcggcgggaggacaacctgaatgacagcagccagcagctgcaggacagcctgaggaagaaggatgacagaattgaggagctggaggaggccctgcgggagagcgtgcagatcacagctgagcgggagatggtgctggcccaggaggagagcgcccggaccaatgctgagaagcaggtggaggagctgctgatggccatggagaaggtgaagcaggagctggagagcatgaaggccaagctgagcagcacccagcagagcctggccgagaaggagacccacctgaccaacctgcgggcagagaggaggaagcacctggaggaggtgctggagatgaagcaggaggccctgctggccgccatcagcgagaaggatgccaacatcgccctgctggagctgagcagcagcaagaagaagacccaggaggaggtggccgccctgaagcgggagaaggaccggctggtgcagcagctgaagcagcagacccagaacaggatgaagctgatggctgacaactatgaagatgaccacttcaagagcagccacagcaaccagaccaaccacaagcccagcccagaccaggatgaggaggagggcatctgggcctag

SEQ ID NO: 313835 - DNA, 2979 bp, Artificial Sequence
  derived and/or modified sequence
atgtatggcagcgcccggtctgtgggcaaggtggagcccagcagccagagccctggccgcagcccccggctgcccaggagcccccggctgggccacaggaggaccaacagcactggaggcagcagcggcagctctgtgggcggcggcagcggcaagaccctgtccatggagaacatccagagcctgaatgctgcctatgccaccagcggccccatgtacctgagtgaccatgaaaatgtgggcagcgagacccccaagagcaccatgaccctgggccgcagcggcggccgcctgccctacggcgtgaggatgacagccatgggcagcagccccaacatcgccagcagcggcgtggccagtgacaccatcgcctttggagagcaccacctgccccctgtgtccatggccagcacagtgccccacagcctgcggcaggcccgggacaacaccatcatggacctgcagacccagctgaaggaggtgctgcgggagaatgacctgctgaggaaggatgtggaggtgaaggagagcaagctgagcagctccatgaacagcatcaagaccttctggagccctgagctgaagaaggagcgggccctgaggaaggatgaggccagcaagatcaccatctggaaggagcagtacagagtggtgcaggaggagaaccagcacatgcagatgaccatccaggccctgcaggatgagctgcgcatccagagggacctgaaccagctgttccagcaggacagcagcagcaggactggagagccctgtgtggccgagctgacagaggagaacttccagaggctgcacgccgagcacgagcggcaggccaaggagctgttcctgctgaggaagaccctggaggagatggagctgagaattgagacccagaagcagaccctgaatgccagagatgagagcatcaagaagctgctggagatgctgcagagcaagggcctgagcgccaaggccacagaggaggaccacgagaggacccggcggctggccgaggccgagatgcacgtgcaccacctggagagcctgctggagcagaaggagaaggagaacagcatgctgcgggaggagatgcacagaagatttgaaaatgccccagacagcgccaagaccaaggccctgcagaccgtcatcgagatgaaggacagcaagatcagctccatggagcggggcctgcgggacctggaggaggagatccagatgctgaagagcaatggagccctgagcacagaggagcgggaggaggagatgaagcagatggaggtgtaccgcagccacagcaagttcatgaagaacaagattggccaggtgaagcaggagctgagcaggaaggacacagagctgctggccctgcagaccaagctggagaccctgaccaaccagttcagtgacagcaagcagcacatcgaggtgctgaaggagagcctgacagccaaggagcagagagctgccatcctgcagacagaggtggatgccctgcggctgcggctggaggagaaggagaccatgctgaacaagaagaccaagcagatccaggacatggccgaggagaagggcacccaggccggggagatccatgacctgaaggacatgctggatgtgaaggagaggaaggtgaatgtgctgcagaagaagattgagaacctgcaggagcagctgcgggacaaggagaagcagatgagcagcctgaaggagcgggtgaagagcctgcaggccgacaccaccaacacagacacagccctgaccaccctggaggaggccctggccgagaaggagaggaccatcgagcggctgaaggagcagagggacagagatgagcgggagaagcaggaggagattgacaactacaagaaggacctgaaggacctgaaggagaaggtgtccctgctgcagggcgacctgtctgagaaggaggccagcctgctggacctgaaggagcacgccagcagcctggccagcagcggcctgaagaaggacagccggctgaagaccctggagatcgccctggagcagaagaaggaggagtgcctgaagatggagagccagctgaagaaggcccatgaagctgccctggaggcccgggccagccctgagatgtctgaccgcatccagcacctggagcgggagatcacccgctacaaggatgagagcagcaaggcccaggccgaggtggaccggctgctggagatcctgaaggaggtggagaatgagaagaatgacaaggacaagaagattgctgagctggagagcctgaccagccggcaggtgaaggaccagaacaagaaggtggccaacctgaagcacaaggagcaggtggagaagaagaagagcgcccagatgctggaggaggcccggcggcgggaggacaacctgaatgacagcagccagcagctgcaggacagcctgaggaagaaggatgacagaattgaggagctggaggaggccctgcgggagagcgtgcagatcacagctgagcgggagatggtgctggcccaggaggagagcgcccggaccaatgctgagaagcaggtggaggagctgctgatggccatggagaaggtgaagcaggagctggagagcatgaaggccaagctgagcagcacccagcagagcctggccgagaaggagacccacctgaccaacctgcgggcagagaggaggaagcacctggaggaggtgctggagatgaagcaggaggccctgctggccgccatcagcgagaaggatgccaacatcgccctgctggagctgagcagcagcaagaagaagacccaggaggaggtggccgccctgaagcgggagaaggaccggctggtgcagcagctgaagcagcagacccagaacaggatgaagctgatggctgacaactatgaagatgaccacttcaagagcagccacagcaaccagaccaaccacaagcccagcccagaccaggatgaggaggagggcatctgggcctag

SEQ ID NO: 313836 - DNA, 2979 bp, Artificial Sequence
  derived and/or modified sequence
atgtacggcagcgcccggagcgtgggcaaggtggagcccagcagccaatctcctggcaggtcgcctcgccttccccgctcgccaagactaggccatcgccgtaccaattctactggtggaagctccggaagcagtgttgggggtggctccggaaagaccttatctatggaaaatatccagtctctcaatgcagcgtatgccacctcaggccctatgtacctgtcggatcacgaaaacgttgggtctgagacgcctaaaagtactatgactctgggacgatcaggaggcagactgccgtatggcgtccgtatgaccgcgatgggatcatctcctaacatcgccagttcaggcgtggcttccgatactatagctttcggcgagcatcatctgccccccgtctctatggcgtccaccgttccacactctctcaggcaggctcgtgataacactatcatggacctccagacccagctgaaggaagtgctcagagaaaacgacctgctgaggaaggatgttgaggtgaaagagtccaaactgtctagttccatgaactctatcaaaactttctggagcccggagttgaaaaaggagcgcgcgctaaggaaggatgaggcctcaaaaatcacgatttggaaggaacagtatcgggtggtgcaggaggaaaatcagcacatgcagatgacaattcaggccctccaggacgaactgcgtattcagagggatcttaatcagctgtttcagcaggattcgtccagtcgcacaggggagccatgtgtggctgaactcaccgaggaaaattttcagagactgcacgccgagcacgagagacaggccaaagaactttttctgctgaggaaaaccctcgaagaaatggagctgaggatcgaaactcagaagcagactcttaatgccagagatgaatccattaaaaagttactggagatgctgcagagcaagggactgagcgctaaggctaccgaggaagaccatgagcgcactagacgtctcgcagaggccgagatgcatgtgcaccaccttgaaagtctgctggaacagaaagagaaggaaaactccatgctccgggaagagatgcatcggaggttcgagaatgctccagactcggccaaaactaaggcactccagacggtaatcgaaatgaaagacagcaagatctcttcaatggagcgcgggctgagggatctggaagaagagatccagatgttgaagtctaacggtgcactctccaccgaagaaagagaagaggagatgaaacagatggaggtttacagaagtcatagtaaatttatgaagaacaaaatcggacaagttaagcaggaactgtcccgaaaggataccgagctacttgccctgcagaccaagctagaaacactgacaaatcagttctccgactcgaagcagcatatcgaagtgcttaaggagagccttactgctaaggaacagcgtgcagccattctgcaaactgaagttgacgccctccgtttacgactggaggaaaaggagacaatgcttaacaaaaagaccaaacaaattcaagacatggctgaggaaaagggcacgcaggccggcgagattcatgatctgaaggacatgctggatgtcaaggagcgcaaagttaatgtgctccagaagaaaatcgaaaatctccaagagcaactgcgtgataaggagaagcaaatgtcttcactgaaggagagagtgaagtctctgcaagccgatacaacaaatactgacaccgccttgactaccttggaggaggccttagcagagaaagagaggactattgaaagactgaaggagcaacgcgaccgggatgagcgagaaaagcaggaagagatagataattataagaaggacctgaaggatctcaaggagaaggtttctttactccaaggcgacctgtccgaaaaagaagccagcttgctggatctcaaggaacatgccagcagcctcgccagctctgggttaaagaaagacagtcgccttaaaacactcgaaattgctctggagcaaaaaaaggaggaatgcttgaagatggaatcccagctcaaaaaggcgcatgaggccgctttagaggctagagcatcgcctgagatgtccgaccgcattcagcacctggagagagagataacacgctacaaggatgaatcttcaaaagctcaggccgaggtcgatagactcctggagattttgaaagaagtagagaatgagaagaatgacaaagataagaagattgcagagctcgaatctctcttttctaggcaagtgaaggatcagaataagaaggttgccaacttgaagcacaaagagcaggttgaaaaaaagaaatcagctcagatgctcgaggaggcccgcagaagggaagataacttgaatgattcgtcccaacagttgcaagattcactaagaaagaaggacgataggattgaggagctagaggaggctctccgtgagagcgtgcaaatcaccgctgagagagaaatggttttggcccaggaggaatcggcacgcactaacgccgagaagcaggttgaggagctcctgatggctatggaaaaagttaagcaagaacttgagagcatgaaggcaaaactgtcatccactcagcagtccttggccgaaaaagagacccatcttactaatctgcgggctgagcgccgaaaacatcttgaagaggtcctggagatgaagcaggaggccttgcttgccgctatatcagaaaaagacgccaatatcgccctcctagagttatctagctctaagaaaaagacccaggaggaggtcgcagcacttaaacgtgagaaggatagacttgttcagcaactgaaacagcaaactcagaacagaatgaaactgatggcagataactatgaggatgatcacttcaagtcttcccactcgaatcagacaaatcataagccatcacctgaccaggatgaggaagagggcatctgggcttag

SEQ ID NO: 313837 - DNA, 2979 bp, Artificial Sequence
  derived and/or modified sequence
atgtacggcagcgcccggagcgtgggcaaggtggagcccagcagccagtcacctggacgcagccctaggttgccccggtctcctaggctaggccacagacgcacgaattccactggaggatcgtccgggagttctgtgggcggcgggtccgggaagacactttccatggagaacatccagtcactgaacgcggcttatgccacatctgggcccatgtatctcagcgatcacgagaacgtcgggtccgaaaccccaaagtcaactatgactctgggccggagcggggggagactcccgtacggtgtcaggatgaccgctatgggttcctctcccaatattgctagcagcggagtggcctccgacactatcgccttcggagaacaccatctaccacctgtgagtatggcgtccacagtgccccatagtctacgccaggccagggataatacaattatggacctgcagacccagcttaaggaagttctgcgggagaatgacctcctgagaaaagatgtggaggtgaaagaaagcaaattgtcctcttccatgaactcaataaagacattttggtccccggaactaaagaaagagagagccttgagaaaagatgaggcgagcaagattactatttggaaggagcaataccgtgtcgtgcaggaagagaaccagcacatgcagatgacgattcaggcgcttcaggacgagctgagaatccagagagacttgaaccagctctttcaacaggacagttccagtcgaactggcgagccctgcgtggccgagttaactgaggagaacttccagcgattgcacgcggagcatgagcgacaggccaaggagctctttctcttgcgtaagacccttgaagagatggagttgaggattgagactcagaagcagaccttgaatgcacgcgatgagtccattaagaagctactggagatgctacagtcgaagggcctctctgctaaagccactgaggaggatcacgaacggaccaggcgtttagccgaggctgagatgcacgttcaccacctcgaatctcttttggagcagaaggagaaggaaaacagtatgcttcgggaggagatgcataggaggttcgagaatgctccagatagcgccaaaaccaaggccctgcagaccgtgatagaaatgaaagacagcaagatttcctctatggaacggggtctccgggatttggaagaagaaatccagatgctcaagagcaatggggcactgtctactgaagagagagaggaggagatgaaacagatggaggtgtatagatcacattctaaatttatgaaaaacaagattgggcaagttaagcaggaactctcacgcaaggatacggagctgctggccttgcagacgaaacttgaaacattaactaaccagttctccgactcaaaacagcacatagaggttttgaaagagagtctgaccgctaaggaacagcgggctgctatacttcagactgaagtcgacgcattgagacttcggcttgaagaaaaagagaccatgctcaacaagaaaactaagcagattcaggatatggcggaggagaaaggcacgcaagccggcgagattcacgaccttaaggacatgttggacgtcaaggagaggaaagtgaacgtcctgcagaagaaaatagaaaatctgcaagagcagcttcgcgataaagaaaaacaaatgagtagcttgaaggagcgcgtgaagagcctgcaagctgacactacaaacactgatactgcactaacaaccttggaagaagctttggctgaaaaggaaaggaccattgagcggttaaaagaacaaagagatcgcgacgagagggagaaacaggaggagatcgacaattataagaaggacttgaaagacttgaaagaaaaagtatccctgcttcaaggagacctgtcggaaaaggaagcctcccttttggaccttaaagaacacgcatcaagtctggcgtccagcggcttgaaaaaagattcccgcctgaaaaccctcgagatcgccctcgagcagaaaaaggaggaatgtctgaagatggagagccagttaaagaaggcccacgaagccgcacttgaagccagagcctcccctgagatgtctgatagaattcaacaccttgaaagggaaattactcggtataaggatgaaagcagcaaggcccaggccgaggtcgataggctcctggaaattttgaaagaagtggagaacgagaagaacgacaaggataaaaagatcgccgagctggaatctctgaccagtaggcaggtgaaagatcaaaataagaaggtcgctaacctcaaacataaggagcaagtagaaaaaaagaagtccgcccagatgctggaggaagcacggaggcgggaggacaacttaaatgactcctcccaacagttacaggatagcctgcggaaaaaggacgaccgcattgaggaacttgaagaagccttgagggaaagtgtccagatcacagccgaaagggaaatggtactggcccaagaggagtccgccagaacaaatgcagagaagcaggttgaggaactcctaatggctatggagaaagtgaaacaagagctcgagtccatgaaagcaaagctatcctccacacagcagagcctcgcggagaaggagacccatctaacaaatctgcgggcggagaggaggaaacacttagaagaagtcctggaaatgaagcaggaagctctcctcgccgcaatttctgagaaggacgctaatatcgcacttttggaactcagctcgagtaaaaaaaagacacaggaagaagtggctgccctgaaaagagagaaggacaggttagtgcagcaattgaagcaacagacacaaaaccgaatgaaactgatggccgataactacgaagacgaccatttcaagagttctcacagtaatcaaactaatcataagcccagtcccgatcaagacgaagaggagggcatttgggcatag

SEQ ID NO: 313838 - DNA, 2979 bp, Artificial Sequence
  derived and/or modified sequence
atgtatggctctgccaggtctgtcgggaaggtcgagccgtccagccagtctcccggacggtcccctagactgccaagaagtcctcgcctaggacatcgcagaactaactccactggaggatctagtgggtctagtgtggggggaggttcgggtaaaactctgagtatggagaatatccaatccttgaatgccgcttatgccacatccggtcctatgtatttgagcgaccacgagaatgtgggctcggaaacacctaaatccaccatgaccctgggacgctctgggggaaggctgccgtatggtgtcagaatgacagcgatgggcagtagccccaacatcgcaagctctggggtagcctccgatacaattgcatttggagagcaccacttaccccctgtctcgatggctagcactgtgcctcattcacttagacaggccagagacaacacgattatggacctacagactcaattgaaggaggtgctccgggagaacgacctgctgaggaaagatgtcgaggtgaaggaatctaagctgagtagtagtatgaattctatcaagacattctggtcacccgaactgaaaaaggaaagggctctgcggaaggatgaagcttccaaaattactatatggaaggagcagtatcgcgtggtccaggaggagaatcagcatatgcagatgaccattcaggccctgcaggacgaactccggattcagcgcgacctgaatcagttattccaacaggattctagcagccgcactggggaaccatgtgtggcagaattgactgaggaaaacttccagcgactacacgccgagcacgagagacaggctaaagagctgttccttctccgcaagactctcgaggaaatggaattgaggatcgaaacccagaaacaaacactgaacgccagagatgaatctatcaaaaaactccttgagatgctgcaatcaaaaggtctttctgccaaagccacagaggaggatcatgagcgtacacgccgtctggccgaagcggagatgcacgtgcaccacctcgagagcttgctggagcagaaggagaaggaaaatagcatgctccgcgaggaaatgcaccgtcgctttgaaaatgctcctgatagcgctaagactaaagccttacagacagtgattgagatgaaggattctaaaatcagttctatggagaggggcttacgcgacttggaagaggagatccagatgctgaagagtaacggggctttgtctaccgaagagcgggaggaagagatgaaacagatggaagtgtaccgatcacactccaaatttatgaaaaataagatcggccaggttaaacaggaactgagccgcaaggacaccgaattgctggcactgcagacaaaacttgagactctcacaaatcaattctccgactctaaacagcacattgaggttctgaaggagtccttgactgcaaaggaacagagagcggctatactccagactgaggtggacgcactacgcttgaggctggaggagaaggaaacgatgctaaataagaagacaaaacagattcaagacatggctgaggaaaagggaacacaggcaggagaaatccatgatcttaaagacatgctcgatgtgaaagagcggaaagtgaatgtgctgcaaaagaagatagaaaacctccaggagcagctccgcgacaaggagaagcagatgtcctcactgaaggagcgggtgaagagcttgcaggcggacaccacaaacacagacactgccctgaccaccctggaagaagctctggctgagaaggaaaggaccattgaaagactgaaagaacagcgagatcgggacgaacgggagaagcaggaagagatcgacaactacaagaaagacttaaaagacctcaaggagaaagtatctcttttgcagggtgatcttagcgagaaggaagcatcattgctcgatcttaaagagcacgcttccagtctggcttcttcagggctcaagaaggattcgcgtctcaaaaccttggagatcgctctggagcagaaaaaggaagaatgcctaaagatggaatctcagctaaagaaggcacacgaagccgcactggaggcacgggctagccctgaaatgtcagacagaatacagcaccttgagagggagataacccgctacaaagacgaaagctccaaagcgcaggctgaagtggatcgactcctcgagatacttaaggaggtggaaaatgaaaagaatgataaagacaagaaaatcgccgagcttgagagcctcttcagccgacaggttaaggaccaaaacaaaaaagtggcaaatctgaagcacaaggaacaggttgagaaaaagaagtccgctcaaatgctggaggaagccaggaggcgtgaagacaacttaaatgattcgagtcagcaactgcaggatagcctgagaaagaaagacgaccggatcgaggaactggaggaagctctacgagaatctgtacagattaccgccgaacgcgagatggtcctagcacaggaagagtctgccagaacaaatgccgagaagcaagtggaggagctgctgatggctatggagaaagtgaaacaggaactggagtccatgaaagcaaaactaagtagtacgcagcagagcctcgccgagaaggaaacccacttgacaaatctgagagcggaacgcagaaagcacctggaggaggttctcgaaatgaagcaggaggctctgctggcagcgatttctgagaaggatgctaacatcgctttgcttgaactgtcgagcagcaagaagaagacccaggaggaggttgcagccctgaagagggaaaaggatcggctcgttcaacagctcaaacagcagacccagaatcggatgaaactaatggcagacaactacgaagatgatcactttaagtcttcacactctaatcagaccaatcacaagccatctccagatcaagacgaagaggagggcatatgggcttag

SEQ ID NO: 313839 - DNA, 2979 bp, Artificial Sequence
  derived and/or modified sequence
atgtacggcagcgcccgaagtgtaggcaaagttgaaccttccagtcagtctcccggtaggtctcccagactccctaggtcacccagattaggacatcggagaaccaattccacaggaggctccagcgggtcctcagtggggggtgggtccgggaagaccttgagtatggagaacattcagtctctgaatgcagcatacgccacctccggccctatgtatctatccgatcacgagaatgttggaagcgagacgcctaagagtacaatgacgctcgggcgaagtgggggtaggctaccctatggggtccgaatgacggctatgggcagttctcctaacatcgcctctagcggcgtggcctccgatacaatcgctttcggcgagcatcatctgcccccagtatctatggcttcaaccgtcccgcattccctgcgccaagcacgggataataccatcatggacctgcagactcaattgaaggaggtccttcgggagaacgacttactgaggaaagatgttgaggttaaggagagcaagctgagcagtagtatgaacagtatcaagacgttttggtcgccagagctcaagaaggagcgggcactcaggaaggatgaggccagcaagatcaccatttggaaggaacagtaccgagtcgtgcaggaggagaatcaacacatgcaaatgaccatccaagctctccaggatgagctacgaatccagagagacctcaatcagttatttcagcaggactcctccagccgaacaggcgagccatgtgtggcggaactcacagaggagaacttccagagactccacgccgaacacgaacgccaagcaaaagagctgtttctgctcagaaaaaccctggaggaaatggagctgcggattgaaacccagaagcagacactcaacgccagggatgaatccataaagaagttgctggagatgctgcagtctaagggactatccgcaaaggccacagaggaggatcacgagagaaccaggcgactggctgaggccgaaatgcacgttcaccatctggagagtctgctagaacagaaggaaaaagagaatagcatgctgcgagaggagatgcacaggcggttcgaaaatgccccagatagcgccaagactaaggcactgcagacagtgatcgagatgaaagattcaaaaatttcttccatggagagggggctgcgggatttagaggaggaaattcaaatgttaaaatctaacggagcactgtcaacagaggagcgggaagaagagatgaagcagatggaggtatataggagccacagcaagttcatgaagaataaaatcggacaagttaagcaggaattatcacgaaaagacacagagcttctggccttgcaaacaaagctagagaccctcactaaccagttcagtgattcgaagcagcatatagaagtcttgaaggagagtctgactgctaaagagcagcgagcagctatactgcagacagaggttgatgctctgcgattacgacttgaagagaaagagactatgctgaacaagaagacaaagcagatccaggacatggctgaagagaaaggtacacaggctggcgagattcacgacctcaaggatatgcttgacgttaaggagagaaaggtgaatgttctccagaagaaaatagagaatctgcaggaacaactgcgtgacaaggagaagcaaatgagttcattgaaagagagagttaaaagtttgcaagccgacaccactaataccgacactgctctaaccaccctggaagaagctttggctgagaaagagaggaccattgagcggcttaaggaacaacgcgaccgcgatgagagagagaagcaggaggagatcgataactataagaaggacctgaaagacctaaaagagaaagtctcactgctgcagggagacttgtctgaaaaggaggcctcccttctggatttgaaggagcacgcatcatcactggcatcttcaggcctgaagaaggactctcgacttaagacactcgaaattgccctggagcagaagaaggaagagtgtctcaagatggaatcccagctgaaaaaggctcacgaagcggcactggaagcacgcgcaagccccgaaatgtccgaccgaatccaacatctggagagagagataactcggtataaagacgaaagctcaaaagctcaggccgaagtagacagactccttgaaatcctgaaagaagttgaaaatgaaaaaaatgacaaagataaaaaaattgccgaactggagagcctgacctccagacaagtaaaggaccaaaacaagaaggtggcgaacctcaagcataaggaacaggtagagaaaaagaagagcgcgcagatgctggaagaagcccgaagacgcgaggataacctgaatgattcttcacagcaactgcaggactcactgcggaagaaggatgatagaatagaagagctggaggaagcccttcgcgagtcagtgcagatcactgccgaaagagagatggttctggcccaggaagaaagtgcgagaactaacgcggaaaaacaggtcgaagagctgctgatggcaatggagaaggtgaagcaggaactggaatcgatgaaagccaagctgtcgagtacccagcaatcactcgcagagaaagaaacccacctcacaaacctcagagctgagcgcagaaagcatctcgaagaggtcctggagatgaaacaggaggctctgttggcagctatttccgaaaaagatgccaatatcgccttactagaactgagctccagtaaaaaaaagactcaagaggaagtggcagcgctcaaaagggaaaaagacagactcgtccagcagctgaaacagcagacccaaaaccggatgaagctaatggctgataactatgaagatgaccacttcaagtcatctcactcgaaccaaacgaaccataagcctagccccgatcaggacgaggaggaaggcatctgggcttag

SEQ ID NO: 313840 - DNA, 9444 bp, Artificial Sequence
  derived and/or modified sequence
gtgctgtggcggcggcggcggcggtagtggcggcggcggcggtgcctgggcggcagcagcagcagtagcggcagccctgaggacggtgagacggccgcggcggcggcgacagcgcggaagtcgcgcgggacccagagcttcccccctgtcgctagtgctgaggctttcgcctttcctacccagcttcttgctcacggcccgggctgggctgggcagggcaacgcgcccccggggaggggcggagctgtagatatggtgtaagatacttcttcaagattggacagctggggaccttcttctgattaaccttaaaccaacttgtagccatagagacacctcacaaggttcccatttttgttgttgttgttgttgattttctgctcacacctttcctgaccttgcaaccatgtatggaagtgcccgctctgttgggaaggtggagccgagcagccagagccctgggcgttcacccaggcttccacgttcccctcgcttgggtcaccgtcgaaccaacagtacgggagggagttcgggaagcagtgttggaggtggcagtgggaaaaccctttcaatggaaaatatacaatctttaaatgctgcctatgccacctctggccctatgtatctaagtgaccatgaaaatgtgggttcagaaacacctaaaagcaccatgacacttggccgttctgggggacgtctgccttacggtgttcggatgactgctatgggtagtagccccaatatagctagcagtggggttgctagtgacaccatagcatttggagagcatcacctccctcctgtgagtatggcatccactgtacctcactcccttcgtcaggcgagagataacacaatcatggatctgcagacacagctgaaggaagtattaagagaaaatgatctcttgcggaaggatgtggaagtaaaggagagcaaattgagttcttcaatgaatagcatcaagaccttctggagcccagagctgaagaaggaacgagccctgagaaaagatgaagcttccaaaatcaccatttggaaggaacagtacagagttgtacaggaggaaaaccagcacatgcagatgacaatccaggctctccaggatgaattgcggatccagagggacctgaatcagctgtttcagcaggatagtagcagcaggactggcgaaccttgtgtagcagagctgacagaggagaactttcagaggcttcatgctgagcatgagcggcaggccaaagagctgtttcttcttcgaaagacattggaggaaatggagctgcgtattgagactcaaaagcagaccctaaatgctcgggatgaatccattaagaagcttctggaaatgttgcagagcaaaggactttctgccaaggctaccgaggaagaccatgagagaacaagacgactggcagaggcagagatgcacgttcatcacctagaaagccttttggagcagaaggaaaaagagaacagtatgttgagagaggagatgcatcgaaggtttgagaatgctcctgattctgccaaaacaaaagctctgcaaactgttattgagatgaaggattcaaaaatttcctctatggagcgtgggcttcgagacctggaagaggaaattcagatgctgaaatcgaatggtgctttgagtactgaggaaagggaagaagaaatgaagcaaatggaagtgtatcggagccattctaaatttatgaaaaataagattggccaggtgaaacaggagctgtccagaaaggacacagaactactcgccctgcagacaaagctagaaacactcacaaaccagttctcagatagtaaacagcacattgaagtgttgaaggagtccttgactgctaaggagcagagggctgccatcctgcagactgaggtggatgctctccgattgcgtttggaagagaaggaaaccatgttgaataaaaagacaaaacaaattcaggatatggctgaagagaaggggacacaagctggagagatacatgacctcaaggacatgttggatgtgaaggagcggaaggttaatgttcttcagaagaagattgaaaatcttcaagagcagcttagagacaaggaaaagcagatgagcagcttgaaagaacgggtcaaatccttgcaggctgacaccaccaacactgacactgccttgacaactttggaggaggcccttgcagagaaagagcggacaattgaacgcttaaaggagcagagggacagagatgagcgagagaagcaagaggaaattgataactacaaaaaagatcttaaagacttgaaggaaaaagtcagcctgttgcaaggcgacctttcagagaaagaggcttcacttttggatctgaaagagcatgcttcttctctggcatcctcaggactgaaaaaggactcacggcttaagacactagagattgctttggagcagaagaaggaggagtgtctgaaaatggaatcacaattgaaaaaggcacatgaggcagcattggaagccagagccagtccagagatgagtgaccgaatacagcacttggagagagagatcaccaggtacaaagatgaatctagcaaggcccaggcagaagttgatcgactcttagaaatcttgaaggaggtggaaaatgagaagaatgacaaagataagaagatagctgagttggaaagccttttttctaggcaagtgaaagaccagaataagaaggtagcaaatctgaagcacaaggaacaggtggaaaaaaagaagagtgcacaaatgttagaggaggcgcgacgacgggaggacaatctcaacgacagctctcagcagctacaggacagtctccgtaagaaggatgacaggattgaagagctggaagaagcactaagagaaagtgtacagataactgcagagcgggaaatggtgctagcacaagaggaatcagccaggaccaatgctgaaaaacaggtggaggagttactgatggccatggagaaggtaaagcaggaactagaatccatgaaagcaaagctgtcctccacccagcagtctctggcagaaaaggaaactcacttgactaatcttcgggcagagagaaggaaacacttagaggaagttctggagatgaagcaagaagctcttctggctgccattagtgaaaaagacgccaatatagctctcttggagctttcgtcctctaagaagaagacccaagaggaagtggctgccctgaagcgggagaaggatcgtctggtacagcagcttaagcagcagacgcaaaatcgaatgaagctaatggccgacaactacgaggatgaccacttcaaatcctcccattccaatcaaacaaatcacaagccctccccagaccaggatgaggaggagggtatatgggcatagccaatcagaggcttagttcagccattttgttcagaacgatcatccagcccctcttagaacttgaccaaaatagaagtaaattaaagttgtacattggacacctgacaaccctctgccatgaccgagaccccctgatcctccgtggactcactccaccagcttcctataacttggacgatgaccaggcggcttgggagaatgagctgcagaagatgacccgggggcagcttcaggatgagttagagaaaggtgaacgggacaatgcagaactgcaggagtttgccaacgccattcttcagcagatagcagaccattgtcccgacatcctagagcaagtggtcaacgccctggaagagtcctcttgaccctgctttatggggaagcctgaggtagtcaacccaggagccaagaaaagagaactacgaggaacaggtgcccggaaccttcttggcaccaaacactacaaacttcatcccaacttgctcacttgaagaagtgtgattccagcaccgtttctacatctgccatcttactctgcctttctgctttggatgtggtctctacactaaccttcttgatgtccagggtagataaagggtcgaatctctctgaagaactgccacctggtcatcagcagtggagaactgtgggagctggtggctctgccctgacagagagccatggagcagaggagcctctcacctcctgtcctctgacatgagaatgaaaccaggaatggacttggagttcaacaggctgagaggatgcctccaatggaccagagagctgagtgttctaatatcacaataggtgctttctcctaaaagggcaaaaaacaatctcaaaaagattagaaaaagagaaggggggaagggaagagaaaatcgactcttctttttactgtctcttctgcttactttccacatgagatgctttgtaccggggagctgtgagcaggcctcacgatggcttgggagcactcgttctcccaaggtctgagtcttcatccagccctgcctgtctgtcgcagccttcctcactctgttcctcggccagttaacaagaagatggtgtgaggtgttctccaccagtctctcctgtttgagactgttgacgttatcatactgaggtgttagatcaaatatctctaattgaagaacatgtgaggttgaaagagcaccagccagggcaacatagcgtgaccctgtctctacaaaaaattaaaaagagaacatacaaagttgacatatgagaccctgttgtccccgcctgcagctttgccccagtaacagatgcccgttgctcttgggctggtttcccctgaacacctccaagaggctgcctgccttgccagcacccgtgtcctgagctcctgcagcccagtggctgctgaagttgtgatccctcactcaccctgctagctttgcccttgactcgtcttctctgaacctcagcctcgtgcattgcctggaaccttcttctagcataaatgaaggtttttcctcctacacacattccttcctcggttatttcattcagagaatatttatgaaatgcctactgtgtgcaagtcatccatccttgaaaaggccacttctcagtgagggagagatgtagtggattctgtgagacatacctgctggagttgaagcagtaaatagcatgtccttcccctccccgatcttaaggtgtgttttctagaaaagttccctaatggaattcatgagtttgggggtctcagtcacccgcttgcctgtaggattccatttgatgattctggatttttgctgtttgttattgcccttagaggggctctgagtatctacttgtgggtggccatttcctgacatctgcatgtacctcgtggaattcagccagcttcatgttgcaaatcagaaagctgaccccaagactgcaaatcaatgaaggtattggcattgttaaggacgtagcgtagacaacagcagtcataaataattaggcaggaacttaacccaaatctagttctttgaccacctctaccaccagaacccagcagacactcacatctcctgataagagttgctggactcgatgtttttgttttgcattttctcctctccttccccacttactcagagaatttaaagtctgtagagtcagcacagccccatcagtccaggaacttcccaccaccagcccttgactgtcccattaactgacatggtcagatttccagctccccctactccctgctgtgaaacaatccctctccctgtgagaggaaactgtggagcgtttcttatcgaaggttaaatggactctgctcataaacctcttactgagatgcttcctgatagccaggctggccagagaggggtgcaggggttagatagtaagtggtggtcgtttgtggtcagttacctcaattctgttcattgcagtgcccgtaaaccatgtagaaagctcccagcactgaaaggcaggagtgttagcatctcgctttatccaccataacgtaaagaactgcggtgtgataacagccttcacggggccacggtggaaccaagacagcaggcgaggccatgcctaaacaagtggtctggcacgggcactggccagctgctctctccaagcaggtggcccagatcccacccacgtggactttctcatcaggtgcagcgcctgccactctcagccactgggtgtgtcactctcctcttcatctcagcattctccatcacttcccctccagaaaaacggatggaaggaagccctctgtgacactgcttctgagaagaagcatttccgggaccgatatcatctgtctggtctctgtgaacagcaaggaatcttcttgaccgttcttgggcactggaggctggctaggagttcagtaataaacgtggccttcgtgctgtagggcagagtggatgcagtttgtagctttcagagtgtctcattgagtctagatcattgaaccaacacttaaccaaatgtcccactcccatcacactaggacttgtcattccatgcccctctcctagtggtcatggtttcatatgggcatacaactgctactgaagttatatagccttgaaaactcagtgcaggttgcccttaattttccccaaacccctccatcggcaagtctagttgccctttagcacctaaagatctgcaccccaaaccaatgtcaccataaagagggcacgaagaagagtgggtgtgatcccaacggggttttgtaactgaagaagcccagtgtgagcttctcatcttttcatatacctctaacccccggtactcattgaatcattgatgaggtatctcaattgagatttgcaaggactttgataccatttgaaatggaaaaattttgaacgggctttaacatgtttaagaaatatggatggggccggccacagtggctcacgcctgtaatcccagaactctggaaggctgaggcaggcggatcacctgagatcaggagttcgaggccagcctggccaagatggcaaaaaccccgactctactaaaaatacaaaattagccaggcgtggtggcgtacgcctgtaatcccagctactcaggaggcaggagaatcgcttgagcctgggaggcagaggctgcggtgagccgagatcgtgtcactgcactccagcctgggtgacagagactccatttaaaaaaaaaaaaaaaaaatatatatatatatatatatatatatatatggatgggaatcaccaaattcatctcagctctaaccttttaacctttgtccttgcactttacaatctaaagatctacctgtggctctcagacttcctcacacttgggttttagaaataacttgtaaagcagactggacccaaggccgccttcagtgtcaagaagggcattgtgacttgcccctcaatttctgtccattgaagtctggttttccatgaggaacttgcgggctcacccacccccagagtgagagaagaggaaggcgaagtcatcacagacacggtcttagccacctgctgaactaatccctccgctattgagggtcagggttgtgaggcaaccatcatgtgtcaccccaaaatataaatgtttctgagccgcccatccactggcatttggatttgctgccagagtcctgttcctcccagaaccatcccgccctcctgttgaccatgttacttgagtgtaggcccggtgtcaagaccctcagagtctttgaggaaagagccaagcagagaagaccgctgcgtggagtgtgacaccacatggcatttctcaagcccagcggaccctgtgtcagcaaataccagtaatttaacatctgctcctggcctcctcttcacctgcctgggttcggaactgaggaggaaggatgagaagagactgcaatgcagcaggcaccctctgcagagtgaggccgcccgtccatcactgccagccctgggctgctcaggaggggacgtgaaccactcaaaggaatgtcttaaagaggatctggagtttcccccatgcaaattagggaagaattaggcaagaaaagacatacattacagggaaatccttctgaacaaaatggctgtcttcacctactcttcttgcaagaaaagacatacattacagggaaatccttctgaacaaaatggctatcttcacctactcttcagcaaaaaccgtctccagactttttagtgtcaaaaatgtaaccaactgtctcctgattttttccaatgtgtttggcaagtgctgtggccctgttgtaggtacttctcctgactcttgggggagaagtggttttagggattgatttgggggagcgggtttttgtcccatcccacctcctctcttctttctctgcttgtcgatattgtctgtgtgattcagagaattggggcagttacattgtgtctgttgttgagattattaaaagattaaaacgtagttgtagaaatgaaaaattaaacagctgtgttttaaaaatgcaaaccaatatcttgttaataaaggaattcaagctatggggcagccacactcccctcctcccaggctggcataggtggccctgggctggcggcttaggaagcatggagcacacttagggtagtgcctgcctgggcaagagacacctgccgagcaaaaggaacgagaatctggggctcagagcctcgcagttgtgccaggattttcctatacatgttcaggacctctgggtagaggtttcacagtttgtgaccccataaccaccctcacccgacgtgggttctagctcagtgtgcctaatactgcatggtaacctgggcttgaccctgaagcccctgcctggcaggccacaggacctctcctgcccacttggtgctatctcttccagtgaccacccagcacgggtgagcactggccagcctggagcctgcaatccaggtggaacagactgtcctccatgtcagttccttctggcttcaggccctcaattatttccctttgagcttttttagaccctagatctcctaggcccaggctctctcttgaccccagagaagccactgtcaggaaaggaagtgaaccctactgaagccagagaattcaccccggccaaagcaggccctctgggtccagcccctcattccacaccacgccagtattgcatccatctactgcagctacacatcctgagggcagcaccacccactctggcctgctggcccatcgcaggactagcccaggcacctgccgggcattgcaggatatccagtggggcctgtgactgctccctgatgcgtcagaagagaagtgttgcactttagtggaggagctgaggagcacctgcccccttgtagcttgagttccttttggtaacagtagcagcctccatggtggtgtctgggatgcacgtgcacccgctgccttcagctgtatgtgtgtgttcctgctggagttgtgttactgacaggataatgacattacaaagaaattgtgttatattcaactttgccttgataattattgtaaacactttgttcattttttcttttttattcacaaactaaatccaccaggaaattataaagttattt

SEQ ID NO: 313841 - DNA, 3868 bp, Artificial Sequence
  derived and/or modified sequence
gcggcggcggcggtgcctgggcggcagcagcagcagtagcggcagccctgaggacggtgagacggccgcggcggcggcgacagcgcggaagtcgcgcgggacccagagcttcccccctgtcgctagtgctgaggctttcgcctttcctacccagcttcttgctcacggcccgggctgggctgggcagggcaacgcgcccccggggaggggcggagctgtagatatggtgtaagatacttcttcaagattggacagctggggaccttcttctgattaaccttaaaccaacttgtagccatagagacacctcacaaggttcccatttttgttgttgttgttgttgattttctgctcacacctttcctgaccttgcaaccatgtatggaagtgcccgctctgttgggaaggtggagccgagcagccagagccctgggcgttcacccaggcttccacgttcccctcgcttgggtcaccgtcgaaccaacagtacgggagggagttcgggaagcagtgttggaggtggcagtgggaaaaccctttcaatggaaaatatacaatctttaaatgctgcctatgccacctctggccctatgtatctaagtgaccatgaaaatgtgggttcagaaacacctaaaagcaccatgacacttggccgttctgggggacgtctgccttacggtgttcggatgactgctatgggtagtagccccaatatagctagcagtggggttgctagtgacaccatagcatttggagagcatcacctccctcctgtgagtatggcatccactgtacctcactcccttcgtcaggcgagagataacacaatcatggatctgcagacacagctgaaggaagtattaagagaaaatgatctcttgcggaaggatgtggaagtaaaggagagcaaattgagttcttcaatgaatagcatcaagaccttctggagcccagagctgaagaaggaacgagccctgagaaaagatgaagcttccaaaatcaccatttggaaggaacagtacagagttgtacaggaggaaaaccagcacatgcagatgacaatccaggctctccaggatgaattgcggatccagagggacctgaatcagctgtttcagcaggatagtagcagcaggactggcgaaccttgtgtagcagagctgacagaggagaactttcagaggcttcatgctgagcatgagcggcaggccaaagagctgtttcttcttcgaaagacattggaggaaatggagctgcgtattgagactcaaaagcagaccctaaatgctcgggatgaatccattaagaagcttctggaaatgttgcagagcaaaggactttctgccaaggctaccgaggaagaccatgagagaacaagacgactggcagaggcagagatgcacgttcatcacctagaaagccttttggagcagaaggaaaaagagaacagtatgttgagagaggagatgcatcgaaggtttgagaatgctcctgattctgccaaaacaaaagctctgcaaactgttattgagatgaaggattcaaaaatttcctctatggagcgtgggcttcgagacctggaagaggaaattcagatgctgaaatcgaatggtgctttgagtactgaggaaagggaagaagaaatgaagcaaatggaagtgtatcggagccattctaaatttatgaaaaataagattggccaggtgaaacaggagctgtccagaaaggacacagaactactcgccctgcagacaaagctagaaacactcacaaaccagttctcagatagtaaacagcacattgaagtgttgaaggagtccttgactgctaaggagcagagggctgccatcctgcagactgaggtggatgctctccgattgcgtttggaagagaaggaaaccatgttgaataaaaagacaaaacaaattcaggatatggctgaagagaaggggacacaagctggagagatacatgacctcaaggacatgttggatgtgaaggagcggaaggttaatgttcttcagaagaagattgaaaatcttcaagagcagcttagagacaaggaaaagcagatgagcagcttgaaagaacgggtcaaatccttgcaggctgacaccaccaacactgacactgccttgacaactttggaggaggcccttgcagagaaagagcggacaattgaacgcttaaaggagcagagggacagagatgagcgagagaagcaagaggaaattgataactacaaaaaagatcttaaagacttgaaggaaaaagtcagcctgttgcaaggcgacctttcagagaaagaggcttcacttttggatctgaaagagcatgcttcttctctggcatcctcaggactgaaaaaggactcacggcttaagacactagagattgctttggagcagaagaaggaggagtgtctgaaaatggaatcacaattgaaaaaggcacatgaggcagcattggaagccagagccagtccagagatgagtgaccgaatacagcacttggagagagagatcaccaggtacaaagatgaatctagcaaggcccaggcagaagttgatcgactcttagaaatcttgaaggaggtggaaaatgagaagaatgacaaagataagaagatagctgagttggaaagtctcacctcaaggcaagtgaaagaccagaataagaaggtagcaaatctgaagcacaaggaacaggtggaaaaaaagaagagtgcacaaatgttagaggaggcgcgacgacgggaggacaatctcaacgacagctctcagcagctacaggacagtctccgtaagaaggatgacaggattgaagagctggaagaagcactaagagaaagtgtacagataactgcagagcgggaaatggtgctagcacaagaggaatcagccaggaccaatgctgaaaaacaggtggaggagttactgatggccatggagaaggtaaagcaggaactagaatccatgaaagcaaagctgtcctccacccagcagtctctggcagaaaaggaaactcacttgactaatcttcgggcagagagaaggaaacacttagaggaagttctggagatgaagcaagaagctcttctggctgccattagtgaaaaagacgccaatatagctctcttggagctttcgtcctctaagaagaagacccaagaggaagtggctgccctgaagcgggagaaggatcgtctggtacagcagcttaagcagcagacgcaaaatcgaatgaagctaatggccgacaactacgaggatgaccacttcaaatcctcccattccaatcaaacaaatcacaagccctccccagaccaggatgaggaggagggtatatgggcatagccaatcagaggcttagttcagccattttgttcagaacgatcatccagcccctcttagaacttgaccaaaatagaagtaaattaaagttgtacattggacacctgacaaccctctgccatgaccgagaccccctgatcctccgtggactcactccaccagcttcctataacttggacgatgaccaggcggcttgggagaatgagctgcagaagatgacccgggggcagcttcaggatgagttagagaaaggtgaacgggacaatgcagaactgcaggagtttgccaacgccattcttcagcagatagcagaccattgtcccgacatcctagagcaagtggtcaacgccctggaagagtcctcttgaccctgctttatggggaagcctgaggtagtcaacccaggagccaagaaaagagaactacgaggaacaggtgcccggaaccttcttggcaccaaacactacaaacttcatcccaacttgctcacttgaagaagtgtgattccagcaccg

SEQ ID NO: 313842 - protein, 720 aa, Artificial Sequence
  derived and/or modified sequence
MYGSARSVGKVEPSSQSPGRSPRLPRSPRLGHRRTNSTGGSSGSSVGGGSGKTLSMENIQSLNAAYATSGPMYLSDHENVGSETPKSTMTLGRSGGRLPYGVRMTAMGSSPNIASSGVASDTIAFGEHHLPPVSMASTVPHSLRQARDNTIMDLQTQLKEVLRENDLLRKDVEVKESKLSSSMNSIKTFWSPELKKERALRKDEASKITIWKEQYRVVQEENQVDALRLRLEEKETMLNKKTKQIQDMAEEKGTQAGEIHDLKDMLDVKERKVNVLQKKIENLQEQLRDKEKQMSSLKERVKSLQADTTNTDTALTTLEEALAEKERTIERLKEQRDRDEREKQEEIDNYKKDLKDLKEKVSLLQGDLSEKEASLLDLKEHASSLASSGLKKDSRLKTLEIALEQKKEECLKMESQLKKAHEAALEARASPEMSDRIQHLEREITRYKDESSKAQAEVDRLLEILKEVENEKNDKDKKIAELESLTSRQVKDQNKKVANLKHKEQVEKKKSAQMLEEARRREDNLNDSSQQLQDSLRKKDDRIEELEEALRESVQITAEREMVLAQEESARTNAEKQVEELLMAMEKVKQELESMKAKLSSTQQSLAEKETHLTNLRAERRKHLEEVLEMKQEALLAAISEKDANIALLELSSSKKKTQEEVAALKREKDRLVQQLKQQTQNRMKLMADNYEDDHFKSSHSNQTNHKPSPDQDEEEGIWA

SEQ ID NO: 313843 - protein, 720 aa, Artificial Sequence
  derived and/or modified sequence
MYGSARSVGKVEPSSQSPGRSPRLPRSPRLGHRRTNSTGGSSGSSVGGGSGKTLSMENIQSLNAAYATSGPMYLSDHENVGSETPKSTMTLGRSGGRLPYGVRMTAMGSSPNIASSGVASDTIAFGEHHLPPVSMASTVPHSLRQARDNTIMDLQTQLKEVLRENDLLRKDVEVKESKLSSSMNSIKTFWSPELKKERALRKDEASKITIWKEQYRVVQEENQVDALRLRLEEKETMLNKKTKQIQDMAEEKGTQAGEIHDLKDMLDVKERKVNVLQKKIENLQEQLRDKEKQMSSLKERVKSLQADTTNTDTALTTLEEALAEKERTIERLKEQRDRDEREKQEEIDNYKKDLKDLKEKVSLLQGDLSEKEASLLDLKEHASSLASSGLKKDSRLKTLEIALEQKKEECLKMESQLKKAHEAALEARASPEMSDRIQHLEREITRYKDESSKAQAEVDRLLEILKEVENEKNDKDKKIAELESLFSRQVKDQNKKVANLKHKEQVEKKKSAQMLEEARRREDNLNDSSQQLQDSLRKKDDRIEELEEALRESVQITAEREMVLAQEESARTNAEKQVEELLMAMEKVKQELESMKAKLSSTQQSLAEKETHLTNLRAERRKHLEEVLEMKQEALLAAISEKDANIALLELSSSKKKTQEEVAALKREKDRLVQQLKQQTQNRMKLMADNYEDDHFKSSHSNQTNHKPSPDQDEEEGIWA

SEQ ID NO: 313844 - DNA, 2163 bp, Artificial Sequence
  derived and/or modified sequence
atgtacggcagcgccagaagcgtgggcaaggtggagcccagcagccagagccccggcagaagccccagactgcccagaagccccagactgggccacagaagaaccaacagcaccggcggcagcagcggcagcagcgtgggcggcggcagcggcaagaccctgagcatggagaacatccagagcctgaacgccgcctacgccaccagcggccccatgtacctgagcgaccacgagaacgtgggcagcgagacccccaagagcaccatgaccctgggcagaagcggcggcagactgccctacggcgtgagaatgaccgccatgggcagcagccccaacatcgccagcagcggcgtggccagcgacaccatcgccttcggcgagcaccacctgccccccgtgagcatggccagcaccgtgccccacagcctgagacaggccagagacaacaccatcatggacctgcagacccagctgaaggaggtgctgagagagaacgacctgctgagaaaggacgtggaggtgaaggagagcaagctgagcagcagcatgaacagcatcaagaccttctggagccccgagctgaagaaggagagagccctgagaaaggacgaggccagcaagatcaccatctggaaggagcagtacagagtggtgcaggaggagaaccaggtggacgccctgagactgagactggaggagaaggagaccatgctgaacaagaagaccaagcagatccaggacatggccgaggagaagggcacccaggccggcgagatccacgacctgaaggacatgctggacgtgaaggagagaaaggtgaacgtgctgcagaagaagatcgagaacctgcaggagcagctgagagacaaggagaagcagatgagcagcctgaaggagagagtgaagagcctgcaggccgacaccaccaacaccgacaccgccctgaccaccctggaggaggccctggccgagaaggagagaaccatcgagagactgaaggagcagagagacagagacgagagagagaagcaggaggagatcgacaactacaagaaggacctgaaggacctgaaggagaaggtgagcctgctgcagggcgacctgagcgagaaggaggccagcctgctggacctgaaggagcacgccagcagcctggccagcagcggcctgaagaaggacagcagactgaagaccctggagatcgccctggagcagaagaaggaggagtgcctgaagatggagagccagctgaagaaggcccacgaggccgccctggaggccagagccagccccgagatgagcgacagaatccagcacctggagagagagatcaccagatacaaggacgagagcagcaaggcccaggccgaggtggacagactgctggagatcctgaaggaggtggagaacgagaagaacgacaaggacaagaagatcgccgagctggagagcctgaccagcagacaggtgaaggaccagaacaagaaggtggccaacctgaagcacaaggagcaggtggagaagaagaagagcgcccagatgctggaggaggccagaagaagagaggacaacctgaacgacagcagccagcagctgcaggacagcctgagaaagaaggacgacagaatcgaggagctggaggaggccctgagagagagcgtgcagatcaccgccgagagagagatggtgctggcccaggaggagagcgccagaaccaacgccgagaagcaggtggaggagctgctgatggccatggagaaggtgaagcaggagctggagagcatgaaggccaagctgagcagcacccagcagagcctggccgagaaggagacccacctgaccaacctgagagccgagagaagaaagcacctggaggaggtgctggagatgaagcaggaggccctgctggccgccatcagcgagaaggacgccaacatcgccctgctggagctgagcagcagcaagaagaagacccaggaggaggtggccgccctgaagagagagaaggacagactggtgcagcagctgaagcagcagacccagaacagaatgaagctgatggccgacaactacgaggacgaccacttcaagagcagccacagcaaccagaccaaccacaagcccagccccgaccaggacgaggaggagggcatctgggcctag

SEQ ID NO: 313845 - DNA, 2163 bp, Artificial Sequence
  derived and/or modified sequence
atgtacggttctgctagatctgttggcaaggtcgagcccagctctcagtcacctggaaggtcacccaggttgccaagatccccccgattggggcaccggcggaccaattccaccggcggctcatccgggagctccgttggggggggatccggaaaaaccttatcaatggaaaatatccagtcactgaacgccgcatatgccactagcgggccaatgtacctaagcgaccatgaaaacgtagggtctgagacccctaaatcaacgatgaccctcggcagatcggggggtaggctgccctacggcgtccgcatgacagcaatgggcagttcgcctaacattgctagctccggtgtggcaagcgacacgatcgccttcggtgagcaccatctgcctcccgttagcatggcttccacagtgccccatagtctacgtcaggcccgtgataacacaatcatggacctgcagacccagctcaaggaggtgttacgggaaaacgaccttttgcgcaaggacgttgaagtgaaggaatctaaactgtcgtccagcatgaacagcatcaagactttttggtcgccggagctgaagaaggaaagagcactgcgcaaggacgaggcctctaagataactatctggaaagagcagtacagagtagttcaggaggaaaatcaagtcgacgccttacgactaagactcgaagagaaggagaccatgcttaacaagaaaaccaagcaaatccaggatatggccgaagaaaaaggtactcaagcaggcgaaattcacgacctcaaagacatgctggatgtgaaggagagaaaagtgaacgttctgcagaaaaagattgagaacctgcaggagcaactgcgggataaagagaagcaaatgagtagcctcaaagagagagtcaagtccctgcaggctgacactactaacactgacaccgccctgacgacgttggaggaggcactggcggagaaagagaggacaattgagcgtcttaaggagcagcgagaccgtgacgagcgggaaaagcaggaagagattgacaactacaaaaaggatctcaaagacctgaaggaaaaagtaagcctgctgcaaggggatctgtccgaaaaagaggcaagcctgttagacctcaaggagcatgcttcctctctggccagttccggactgaaaaaggactccagacttaaaactctagagatcgccttggagcagaagaaggaagagtgcctgaagatggagtcccagctgaagaaggcccatgaagcagctttggaggctcgcgcatcacccgaaatgtccgatcgaatacagcatctggagcgtgagattacgaggtataaggacgaaagttctaaagctcaggccgaggtggacaggctgcttgagatccttaaggaggtggagaatgaaaagaacgacaaggataagaaaatcgccgagctggagtcgctgttttcgaggcaggtgaaggaccaaaacaaaaaggtggcgaacctcaagcacaaggagcaggttgagaagaaaaagtctgcgcagatgttggaagaagcccggaggcgagaagataacctcaacgacagctctcagcagctgcaggattcgctgcgaaaaaaggacgatcgtatcgaggagctcgaagaggctctgcgggagagcgtccagatcaccgccgagcgggagatggttcttgcacaagaggaaagcgccaggacaaatgccgaaaaacaggtggaggagctgctgatggctatggagaaagttaagcaggagcttgagtctatgaaggcaaagctgtctagcacgcagcagtctctcgctgaaaaggagactcatctgaccaacttgcgggccgaacgccgaaaacacctggaggaggtccttgaaatgaaacaagaggccctcctcgccgcaattagtgaaaaagatgccaacatcgcccttctcgaactgtcttcatctaagaaaaaaactcaggaagaagtagccgcactcaagagggaaaaagatcggttggtccagcaacttaagcagcaaacccaaaacaggatgaaactgatggcagataactatgaggacgatcacttcaagtcaagccattcaaaccaaacaaatcacaaacctagtcccgaccaagacgaggaagaaggcatctgggcttag

SEQ ID NO: 313846 - DNA, 2163 bp, Artificial Sequence
  derived and/or modified sequence
atgtatggctcagcacggagtgttggtaaagtcgaacccagctcacagagccccggtcggtctccaaggctaccgaggagcccaagattggggcatagacggacgaatagcaccggcggttcaagtggcagctcagtgggaggcgggtctggcaagaccctgagtatggagaatatacagtctctgaatgccgcttacgcaacttcagggccaatgtacttgtctgatcacgaaaacgtcggctccgaaactcccaaatcaacgatgacgttgggcaggtccggcgggcgcctcccatacggcgtgcggatgacagctatgggctcctctcccaatatagcttcgtccggcgtcgcctcagatactattgccttcggcgaacatcacctgccgcctgtttcaatggcttcaacagtcccacatagcctcagacaggcacgcgataataccatcatggacctccaaacccagctaaaggaagtgctcagagaaaatgacctgctgcggaaagatgtggaagtcaaggagagcaagctaagctctagtatgaattctatcaagactttctggagccctgagcttaaaaaagaacgcgcactgaggaaggacgaggcttctaagattacgatttggaaagaacaataccgggtggtgcaggaagagaatcaggtcgacgcattgcggctccgcttggaagaaaaggagacgatgctcaacaagaagacaaagcagatacaggacatggccgaggaaaagggaacacaggccggagaaatccatgacctgaaagatatgcttgatgtgaaggagagaaaggtcaacgtgctgcagaagaaaattgaaaacctgcaagagcaactccgcgataaagaaaagcaaatgtctagcctcaaagagagggtaaaatctcttcaggcggataccaccaacactgataccgctctcactacgctggaggaagcactggctgaaaaagagaggacaattgagagacttaaggaacagagagaccgcgatgaacgcgaaaagcaggaagaaattgacaattataaaaaggacctgaaagacctaaaggaaaaggtgtccctgctgcagggagatctgagcgagaaggaggcctccctgttggacctgaaagagcacgcttcgtccttagcatcgtccgggttgaagaaagactctcgattgaagacactggaaattgctttggaacagaaaaaagaagagtgcttgaaaatggaatcccagttaaagaaagctcacgaggcagcactggaggctcgggcaagccctgagatgtcagaccggattcagcacctcgaacgtgaaatcacgcggtataaggacgagagcagtaaagcccaggcggaggtggatcggctgctggaaatcctgaaagaggtggaaaatgaaaagaatgacaaagataagaaaatcgctgaactcgagtccctcacgtcacggcaagtcaaggaccagaataagaaggttgccaaccttaagcacaaggagcaggttgagaaaaagaagtcagcccagatgctcgaagaggctagacgccgtgaggacaatctgaatgattctagccagcaactgcaggactcactgaggaagaaggatgatcgaatcgaggagttagaggaggccttgcgcgaatcagtgcagataacagcagagcgcgagatggtcctcgcccaggaagaatccgcccgtacaaacgccgagaaacaggtggaagagctgctgatggccatggagaaggtcaagcaagaactcgaatcaatgaaggcaaagctcagcagtacccaacaaagtctggccgaaaaagagacccatcttacaaatttacgagctgagcgccggaagcatcttgaggaggtcctagagatgaagcaagaagccctcctggcggcaatctcagagaaagacgccaacattgcacttttagaacttagcagtagtaaaaagaagacacaagaggaagttgctgcccttaagcgggagaaggaccggctcgttcagcaacttaagcagcagacgcagaacagaatgaaattgatggctgacaattacgaggacgatcattttaagagcagccactctaaccagactaatcacaagccaagcccagaccaagacgaagaggaaggcatctgggcctag

SEQ ID NO: 313847 - DNA, 2163 bp, Artificial Sequence
  derived and/or modified sequence
atgtatggcagcgcccggtctgtgggcaaggtggagcccagcagccagagccctggccgcagcccccggctgcccaggagcccccggctgggccacaggaggaccaacagcactggaggcagcagcggcagctctgtgggcggcggcagcggcaagaccctgtccatggagaacatccagagcctgaatgctgcctatgccaccagcggccccatgtacctgagtgaccatgaaaatgtgggcagcgagacccccaagagcaccatgaccctgggccgcagcggcggccgcctgccctacggcgtgaggatgacagccatgggcagcagccccaacatcgccagcagcggcgtggccagtgacaccatcgcctttggagagcaccacctgccccctgtgtccatggccagcacagtgccccacagcctgcggcaggcccgggacaacaccatcatggacctgcagacccagctgaaggaggtgctgcgggagaatgacctgctgaggaaggatgtggaggtgaaggagagcaagctgagcagctccatgaacagcatcaagaccttctggagccctgagctgaagaaggagcgggccctgaggaaggatgaggccagcaagatcaccatctggaaggagcagtacagagtggtgcaggaggagaaccaggtggatgccctgcggctgcggctggaggagaaggagaccatgctgaacaagaagaccaagcagatccaggacatggccgaggagaagggcacccaggccggggagatccatgacctgaaggacatgctggatgtgaaggagaggaaggtgaatgtgctgcagaagaagattgagaacctgcaggagcagctgcgggacaaggagaagcagatgagcagcctgaaggagcgggtgaagagcctgcaggccgacaccaccaacacagacacagccctgaccaccctggaggaggccctggccgagaaggagaggaccatcgagcggctgaaggagcagagggacagagatgagcgggagaagcaggaggagattgacaactacaagaaggacctgaaggacctgaaggagaaggtgtccctgctgcagggcgacctgtctgagaaggaggccagcctgctggacctgaaggagcacgccagcagcctggccagcagcggcctgaagaaggacagccggctgaagaccctggagatcgccctggagcagaagaaggaggagtgcctgaagatggagagccagctgaagaaggcccatgaagctgccctggaggcccgggccagccctgagatgtctgaccgcatccagcacctggagcgggagatcacccgctacaaggatgagagcagcaaggcccaggccgaggtggaccggctgctggagatcctgaaggaggtggagaatgagaagaatgacaaggacaagaagattgctgagctggagagcctcttcagccggcaggtgaaggaccagaacaagaaggtggccaacctgaagcacaaggagcaggtggagaagaagaagagcgcccagatgctggaggaggcccggcggcgggaggacaacctgaatgacagcagccagcagctgcaggacagcctgaggaagaaggatgacagaattgaggagctggaggaggccctgcgggagagcgtgcagatcacagctgagcgggagatggtgctggcccaggaggagagcgcccggaccaatgctgagaagcaggtggaggagctgctgatggccatggagaaggtgaagcaggagctggagagcatgaaggccaagctgagcagcacccagcagagcctggccgagaaggagacccacctgaccaacctgcgggcagagaggaggaagcacctggaggaggtgctggagatgaagcaggaggccctgctggccgccatcagcgagaaggatgccaacatcgccctgctggagctgagcagcagcaagaagaagacccaggaggaggtggccgccctgaagcgggagaaggaccggctggtgcagcagctgaagcagcagacccagaacaggatgaagctgatggctgacaactatgaagatgaccacttcaagagcagccacagcaaccagaccaaccacaagcccagcccagaccaggatgaggaggagggcatctgggcctag

SEQ ID NO: 313848 - DNA, 2163 bp, Artificial Sequence
  derived and/or modified sequence
atgtatggcagcgcccggtctgtgggcaaggtggagcccagcagccagagccctggccgcagcccccggctgcccaggagcccccggctgggccacaggaggaccaacagcactggaggcagcagcggcagctctgtgggcggcggcagcggcaagaccctgtccatggagaacatccagagcctgaatgctgcctatgccaccagcggccccatgtacctgagtgaccatgaaaatgtgggcagcgagacccccaagagcaccatgaccctgggccgcagcggcggccgcctgccctacggcgtgaggatgacagccatgggcagcagccccaacatcgccagcagcggcgtggccagtgacaccatcgcctttggagagcaccacctgccccctgtgtccatggccagcacagtgccccacagcctgcggcaggcccgggacaacaccatcatggacctgcagacccagctgaaggaggtgctgcgggagaatgacctgctgaggaaggatgtggaggtgaaggagagcaagctgagcagctccatgaacagcatcaagaccttctggagccctgagctgaagaaggagcgggccctgaggaaggatgaggccagcaagatcaccatctggaaggagcagtacagagtggtgcaggaggagaaccaggtggatgccctgcggctgcggctggaggagaaggagaccatgctgaacaagaagaccaagcagatccaggacatggccgaggagaagggcacccaggccggggagatccatgacctgaaggacatgctggatgtgaaggagaggaaggtgaatgtgctgcagaagaagattgagaacctgcaggagcagctgcgggacaaggagaagcagatgagcagcctgaaggagcgggtgaagagcctgcaggccgacaccaccaacacagacacagccctgaccaccctggaggaggccctggccgagaaggagaggaccatcgagcggctgaaggagcagagggacagagatgagcgggagaagcaggaggagattgacaactacaagaaggacctgaaggacctgaaggagaaggtgtccctgctgcagggcgacctgtctgagaaggaggccagcctgctggacctgaaggagcacgccagcagcctggccagcagcggcctgaagaaggacagccggctgaagaccctggagatcgccctggagcagaagaaggaggagtgcctgaagatggagagccagctgaagaaggcccatgaagctgccctggaggcccgggccagccctgagatgtctgaccgcatccagcacctggagcgggagatcacccgctacaaggatgagagcagcaaggcccaggccgaggtggaccggctgctggagatcctgaaggaggtggagaatgagaagaatgacaaggacaagaagattgctgagctggagagcctgaccagccggcaggtgaaggaccagaacaagaaggtggccaacctgaagcacaaggagcaggtggagaagaagaagagcgcccagatgctggaggaggcccggcggcgggaggacaacctgaatgacagcagccagcagctgcaggacagcctgaggaagaaggatgacagaattgaggagctggaggaggccctgcgggagagcgtgcagatcacagctgagcgggagatggtgctggcccaggaggagagcgcccggaccaatgctgagaagcaggtggaggagctgctgatggccatggagaaggtgaagcaggagctggagagcatgaaggccaagctgagcagcacccagcagagcctggccgagaaggagacccacctgaccaacctgcgggcagagaggaggaagcacctggaggaggtgctggagatgaagcaggaggccctgctggccgccatcagcgagaaggatgccaacatcgccctgctggagctgagcagcagcaagaagaagacccaggaggaggtggccgccctgaagcgggagaaggaccggctggtgcagcagctgaagcagcagacccagaacaggatgaagctgatggctgacaactatgaagatgaccacttcaagagcagccacagcaaccagaccaaccacaagcccagcccagaccaggatgaggaggagggcatctgggcctag

SEQ ID NO: 313849 - DNA, 2163 bp, Artificial Sequence
  derived and/or modified sequence
atgtacggcagcgcccggagcgtgggcaaggtggagcccagcagccagagccctggaaggagtccccgactgccccgaagccctcgccttgggcataggcgaacgaactctaccggagggtcttccggttcttccgttggaggcgggtcaggtaaaaccctgagcatggagaatattcaatcactcaacgccgcctacgctacctctggccctatgtacctttccgatcatgaaaacgtgggatcagaaactcctaagagcaccatgacattggggaggtctggaggtcgactaccatatggcgttaggatgacagccatgggcagctcgcccaatattgctagctctggagtggcctccgacactatagcttttggagagcaccacctcccgcctgtgagcatggcctccacagtgcctcactcgctgcggcaggcccgggataacacaattatggatctccaaacacagttgaaggaggtgctccgggagaatgatcttcttagaaaggatgtggaagtcaaagagagtaaactcagctcttcaatgaatagtatcaagaccttttggtcaccagagttaaagaaggagagggccctgagaaaggacgaggccagcaagatcaccatctggaaggagcagtatcgcgtggtccaagaggagaatcaggtagatgccttgcggctcagacttgaggagaaagagaccatgttgaataagaaaacaaaacagatccaggatatggcggaagagaaaggtacccaagctggtgagattcatgatctcaaagacatgcttgatgtgaaggaaaggaaggttaacgtgctgcaaaaaaaaatagagaatctccaggaacagctgagagacaaggagaaacagatgtcgtctctgaaggagcgcgtcaaaagcttgcaggccgatactaccaataccgacaccgcactgaccactttggaggaagccttagctgagaaagaacgaacgatcgagcggctcaaagaacagagagacagggacgagcgggaaaaacaggaggaaatcgacaattacaagaaggatctcaaggatttgaaggaaaaagtgtcactgttgcagggggatctctccgaaaaagaggccagtctgctggacctgaaagagcatgctagtagtctcgcgtctagcgggttgaagaaagactctcggctgaaaacgctcgagattgctctcgaacaaaaaaaggaagagtgcttgaagatggagtcccaactgaaaaaggcacacgaggccgccttggaagcccgggcaagtccagagatgagtgatcgcatccagcacctcgagagggagatcactagatataaagatgagagctctaaggcccaggcagaagtggatcggctgctggaaatcttgaaggaggtcgaaaacgaaaagaacgacaaggataaaaagatcgccgaattagagtcattgttctcgaggcaggttaaggaccaaaataagaaagtggctaacctgaagcacaaggagcaggtggagaaaaagaaaagtgcccaaatgctggaggaagctcgtaggcgagaagataatctcaacgactccagccagcagctacaggattctctgcggaagaaagacgaccgcatcgaagaactggaggaggcactgagggagtctgtccagataaccgcagaacgagaaatggtgctcgctcaagaggagtcggcccggaccaacgcggaaaagcaggtggaagagctgctcatggccatggaaaaggttaagcaagaattagaaagcatgaaggccaagttatcctccacccagcaatctcttgctgagaaagaaacacatctgacgaaccttcgggccgagaggcggaagcatctggaagaggtcctagagatgaagcaagaagctctgctggctgcgatcagtgaaaaggacgctaatattgccttgctggagctcagttcctccaagaagaagacgcaggaagaagtcgcagcattgaagagggagaaggatcgactggtgcagcagctcaaacaacagacccagaaccgcatgaaacttatggccgataactacgaggatgatcatttcaagagttcccactccaatcaaacaaaccacaagccttcaccagaccaggatgaagaagaaggcatttgggcttag

SEQ ID NO: 313850 - DNA, 2163 bp, Artificial Sequence
  derived and/or modified sequence
atgtacggcagcgcccggagcgtgggcaaggtggagcccagcagccaaagtcctggacgctctccaaggctgcccagaagccctagactgggtcacagacgaacgaattctacaggtggaagctccggctccagcgtgggcggaggtagcggtaaaactttaagtatggagaacattcagtctctcaacgctgcctatgccacgtcaggacccatgtacctttcagatcatgaaaacgtgggcagcgagacccccaagtctaccatgacccttggccggagcggaggcaggctcccctacggtgtccggatgaccgctatgggttccagccccaatatcgcgtcttcaggcgtggcctctgatacaatagcattcggcgaacatcacctgccaccagtctccatggcttctacagtgcctcattcactgagacaggcccgggacaacactataatggatttgcaaacacagctgaaggaagtgctgcgggagaatgacctacttcgaaaggacgtggaggtgaaggagtccaagctcagttccagcatgaactctataaagacattctggtcccctgaactcaaaaaagagcgggccctgagaaaggacgaggcaagtaagatcaccatctggaaggagcaatacagagtggtccaggaggaaaatcaggtcgatgcactccggttgaggctagaggagaaggaaacgatgctgaacaagaaaactaagcagattcaagacatggcagaggaaaaaggtacacaagctggtgagatccacgatctcaaagatatgcttgatgtgaaagaacgcaaagttaatgttttgcagaagaaaatagaaaacttgcaggaacagctaagggacaaggaaaagcagatgagctctctaaaggagagagtcaaatcacttcaggccgacaccactaataccgacacagcactgaccacactggaggaagccctggctgagaaggagagaaccattgagaggctgaaggagcagagggaccgcgacgaacgcgaaaagcaagaagaaatcgacaattataagaaggatctgaaggacctgaaagaaaaagtttccctgctccagggcgatttgtcagagaaggaggcttctctcctcgacctaaaggagcacgcctcgtctctcgccagctccggccttaagaaagattctcgtctcaagactctcgagattgctctcgagcagaagaaggaagaatgtctgaaaatggagagccagctgaagaaggctcacgaagccgccctagaagcacgggcctctccggagatgagtgatcgcattcagcatctagagcgagaaattacccgctacaaagatgaaagctccaaggcccaagcggaggttgatagactccttgagatcctaaaggaggttgagaatgaaaagaacgacaaggacaaaaagattgcagaactagagtccttgacgtcccggcaggtgaaagaccagaataagaaagtcgccaacctcaaacacaaagaacaggtggaaaaaaaaaaaagtgctcagatgctggaagaggccagaaggagagaggataacctcaacgattccagccaacagttacaggattccctcaggaagaaggatgatcgcattgaagaattggaggaggcgcttcgcgagagtgttcaaataacagccgaaagagagatggtcctcgcccaggaggagtccgcccgcacaaatgccgagaaacaggtcgaggagctgttgatggcaatggagaaagtgaagcaagagcttgagtctatgaaggccaagctgtcctctacacaacagtccctggccgaaaaagagacacacctgaccaacctgcgggccgaacgcaggaagcacttagaggaagtgcttgagatgaaacaggaggcattgctggctgccatctcggagaaggacgctaacatcgccctcctcgaactgtcaagttctaagaaaaagactcaggaagaggtagcagccctgaagagagaaaaagaccgactggtacaacaactgaagcaacaaactcagaatagaatgaagctaatggcagacaactacgaggatgaccactttaaaagctcacattcaaatcagactaatcataagccctcacccgatcaggacgaggaggagggcatctgggcttag

SEQ ID NO: 313851 - DNA, 2163 bp, Artificial Sequence
  derived and/or modified sequence
atgtatgggtctgcgaggtccgtggggaaggttgagcccagttcacaatcccctggcagatcaccaagacttcctaggagcccaagacttggccacagaagaacaaacagcaccgggggaagctccggcagctctgttggaggcggatctggcaaaactcttagcatggagaatattcaatccctcaacgctgcgtatgcaacaagcggacctatgtatctgtccgaccatgagaatgtaggcagtgagacccctaagagtacgatgaccttggggagatctggtgggagattgccctacggggtcaggatgacggctatggggagttcgcccaatatcgcatcaagtggggtggccagcgataccattgccttcggcgaacatcatttacctcctgtcagcatggctagcacagtcccacacagcctccggcaggcaagagacaacactattatggacttacagacccagctaaaggaggtgttaagagagaacgacttgttgagaaaggatgtcgaagtgaaggagtccaagctgtcgtcctcgatgaattccattaagaccttttggtctccggaactaaagaaggagcgcgctttgagaaaggacgaggcatctaaaatcaccatttggaaggagcagtatagagttgtgcaggaggaaaaccaagtggacgccctgcgcctacggttggaagaaaaggagactatgctcaacaagaaaacaaaacagattcaagatatggccgaggagaagggcacacaggccggagagattcatgacctgaaagacatgttggacgtaaaagaaaggaaggtgaatgtcttacaaaaaaaaatcgagaacctgcaggagcaactgcgagacaaggagaagcagatgtcatcgctaaaggagcgggttaagtctcttcaggcggataccactaatacagataccgctctgactaccctggaggaggcacttgcggagaaggagaggactatcgagcggttaaaggagcagagggatcgggatgaacgagagaagcaggaagagatcgataattacaagaaggaccttaaggacctgaaagaaaaggtgtccctgctccagggagacttgtcagaaaaggaagcgtcgctactcgaccttaaggaacacgcgagctctcttgcgtcgtctgggcttaagaaggattctcgtcttaaaaccctggagattgcactggagcagaagaaagaagagtgcctgaagatggagtctcaactcaaaaaggcccatgaggcagctctcgaggccagggcctctccggagatgagtgatcgaattcaacacctggagagggaaattaccaggtacaaggatgagagttccaaggcgcaggccgaggtggacaggctcctggagatcctgaaggaggtcgaaaacgagaagaatgataaagacaagaagatcgccgaacttgaaagtttatttagtcgccaggtgaaagaccagaataaaaaggtcgctaatttgaagcataaggagcaagtcgagaagaaaaagagtgcccagatgctcgaagaagcgagacgtagagaagacaatctgaacgactctagtcagcagctccaagacagtctacggaaaaaggatgatcgaatcgaggaattagaagaagcactacgtgagtctgtgcagattactgccgagcgagagatggtgctggcccaagaggaatcagctcggacgaacgctgagaaacaggtggaggagctgctgatggcaatggaaaaagtaaaacaggagctagagagtatgaaggctaagctgagcagcacacaacaaagtctcgcagagaaagagacacatcttactaatcttagggcagagcgtaggaagcatctcgaagaggtcctggagatgaaacaagaagcattactcgccgctatttcggaaaaagacgctaatattgcactgttagaactttcaagctctaaaaagaaaacacaagaggaagtggctgcacttaagagagagaaggatagactggtgcaacaactgaagcagcagacccaaaatcgcatgaagctaatggcagacaactatgaggacgaccatttcaaaagttcccactccaatcagactaatcataagcctagtccagaccaggatgaggaggaggggatttgggcctag

SEQ ID NO: 313852 - DNA, 2163 bp, Artificial Sequence
  derived and/or modified sequence
atgtatggtagcgctaggtctgtcggaaaagttgaaccttctagtcaatcacccggacggtctccccgattaccccgaagcccaaggcttggccatagaagaactaacagcacaggaggatccagcgggagctcagttggcggaggctctggaaaaaccctgagcatggaaaacattcagagcctgaacgccgcatacgccacaagcgggccaatgtacttatccgatcacgaaaacgtggggagcgagacgcccaagtccactatgacccttggacggtccggaggccgactgccctacggagttcgtatgacagctatgggttcgtcccctaacattgcgagctctggagttgcctctgataccatagccttcggcgagcaccacctgccaccggtgagtatggcctcaacggtccctcattctcttcggcaagccagggataacaccatcatggaccttcagacacagctgaaagaagtgctccgtgagaacgacttgttaaggaaggacgttgaagttaaggaatccaagctgagttcgtcaatgaactccattaagacgttttggagccctgaacttaagaaagagagagccctccgtaaagacgaggcatcaaagataactatctggaaagagcagtatagggtggttcaggaggagaaccaggtggacgcactgagactcaggttggaggaaaaggaaacaatgttaaacaagaagactaagcagattcaggatatggcggaggaaaagggcacgcaggccggagagatccacgacctgaaagacatgctggatgtgaaggaacgcaaggtgaatgtgctgcagaagaagattgaaaacctccaggagcaactgcgcgataaggagaaacagatgtctagtctgaaggagcgcgtcaagagcctgcaggcagatacgacaaatacagacactgctttaacaactcttgaggaggctctggccgagaaagagcgcactatagagagattaaaagaacagagggaccgcgacgaaagggagaagcaggaagaaattgataactataaaaaggacctgaaggatctgaaggaaaaagtgtccctgctgcagggagacctgtcagaaaaagaagcaagccttttggaccttaaagagcatgcatctagcctcgcatcttcggggctgaaaaaggattcccgtttgaagacccttgagattgcactggaacagaagaaggaagaatgcctcaagatggagtcacagctgaagaaggcccatgaggccgctttagaggctcgggcatcacccgaaatgtcagaccggattcagcatctggagagggagattactagatataaggacgagtcatctaaagctcaggccgaggtagaccggcttctagagattctaaaagaggtggaaaacgaaaagaacgataaagacaagaagattgccgagcttgagtctttaaccagcagacaggtaaaggaccagaataagaaggtggccaatctgaagcataaagaacaggttgaaaagaaaaaatccgctcagatgctcgaagaggctcggagaagggaagacaacctgaatgatagttctcagcaactacaagattcactgagaaaaaaagacgacaggatagaagaacttgaagaagccctgcgcgagagtgtgcagatcaccgctgagcgggaaatggtgctcgctcaggaagaatcggcaagaaccaacgcggagaagcaggtagaggagcttctgatggcgatggagaaggtcaagcaggaactagagagcatgaaggcaaaacttagctccacccagcaatccctggccgagaaggagacccacctcactaatttgcgcgctgaacggagaaaacacctggaggaagtgctggaaatgaagcaagaagccttgctggctgcgatttcagagaaggacgccaatatcgctctcctcgagctttcatctagtaaaaagaaaacccaggaggaggtggccgctctgaaacgggaaaaggacagactggtacagcagctgaagcagcagacccagaaccgtatgaaactgatggccgataactacgaagacgaccattttaaatcttctcactccaatcagacgaaccataagcccagccccgaccaggacgaagaagaaggcatatgggcctag

SEQ ID NO: 313853 - DNA, 2881 bp, Artificial Sequence
  derived and/or modified sequence
gcggcggtgcctgggcggcagcagcagcagtagcggcagccctgaggacgatatggtgtaagatacttcttcaagattggacagctggggaccttcttctgattaaccttaaaccaacttgtagccatagagacacctcacaaggttcccatttttgttgttgttgttgttgattttctgctcacacctttcctgaccttgcaaccatgtatggaagtgcccgctctgttgggaaggtggagccgagcagccagagccctgggcgttcacccaggcttccacgttcccctcgcttgggtcaccgtcgaaccaacagtacgggagggagttcgggaagcagtgttggaggtggcagtgggaaaaccctttcaatggaaaatatacaatctttaaatgctgcctatgccacctctggccctatgtatctaagtgaccatgaaaatgtgggttcagaaacacctaaaagcaccatgacacttggccgttctgggggacgtctgccttacggtgttcggatgactgctatgggtagtagccccaatatagctagcagtggggttgctagtgacaccatagcatttggagagcatcacctccctcctgtgagtatggcatccactgtacctcactcccttcgtcaggcgagagataacacaatcatggatctgcagacacagctgaaggaagtattaagagaaaatgatctcttgcggaaggatgtggaagtaaaggagagcaaattgagttcttcaatgaatagcatcaagaccttctggagcccagagctgaagaaggaacgagccctgagaaaagatgaagcttccaaaatcaccatttggaaggaacagtacagagttgtacaggaggaaaaccaggtggatgctctccgattgcgtttggaagagaaggaaaccatgttgaataaaaagacaaaacaaattcaggatatggctgaagagaaggggacacaagctggagagatacatgacctcaaggacatgttggatgtgaaggagcggaaggttaatgttcttcagaagaagattgaaaatcttcaagagcagcttagagacaaggaaaagcagatgagcagcttgaaagaacgggtcaaatccttgcaggctgacaccaccaacactgacactgccttgacaactttggaggaggcccttgcagagaaagagcggacaattgaacgcttaaaggagcagagggacagagatgagcgagagaagcaagaggaaattgataactacaaaaaagatcttaaagacttgaaggaaaaagtcagcctgttgcaaggcgacctttcagagaaagaggcttcacttttggatctgaaagagcatgcttcttctctggcatcctcaggactgaaaaaggactcacggcttaagacactagagattgctttggagcagaagaaggaggagtgtctgaaaatggaatcacaattgaaaaaggcacatgaggcagcattggaagccagagccagtccagagatgagtgaccgaatacagcacttggagagagagatcaccaggtacaaagatgaatctagcaaggcccaggcagaagttgatcgactcttagaaatcttgaaggaggtggaaaatgagaagaatgacaaagataagaagatagctgagttggaaagtctcacctcaaggcaagtgaaagaccagaataagaaggtagcaaatctgaagcacaaggaacaggtggaaaaaaagaagagtgcacaaatgttagaggaggcgcgacgacgggaggacaatctcaacgacagctctcagcagctacaggacagtctccgtaagaaggatgacaggattgaagagctggaagaagcactaagagaaagtgtacagataactgcagagcgggaaatggtgctagcacaagaggaatcagccaggaccaatgctgaaaaacaggtggaggagttactgatggccatggagaaggtaaagcaggaactagaatccatgaaagcaaagctgtcctccacccagcagtctctggcagaaaaggaaactcacttgactaatcttcgggcagagagaaggaaacacttagaggaagttctggagatgaagcaagaagctcttctggctgccattagtgaaaaagacgccaatatagctctcttggagctttcgtcctctaagaagaagacccaagaggaagtggctgccctgaagcgggagaaggatcgtctggtacagcagcttaagcagcagacgcaaaatcgaatgaagctaatggccgacaactacgaggatgaccacttcaaatcctcccattccaatcaaacaaatcacaagccctccccagaccaggatgaggaggagggtatatgggcatagccaatcagaggcttagttcagccattttgttcagaacgatcatccagcccctcttagaacttgaccaaaatagaagtaaattaaagttgtacattggacacctgacaaccctctgccatgaccgagaccccctgatcctccgtggactcactccaccagcttcctataacttggacgatgaccaggcggcttgggagaatgagctgcagaagatgacccgggggcagcttcaggatgagttagagaaaggtgaacgggacaatgcagaactgcaggagtttgccaacgccattcttcagcagatagcagaccattgtcccgacatcctagagcaagtggtcaacgccctggaagagtcctcttgaccctgctttatggggaagcctgaggtagtcaacccaggagccaagaaaagagaactacgaggaacaggtgcccggaaccttcttggcaccaaacactacaaacttcatcccaacttgctcacttgaagaagtgtgattccagcaccg

SEQ ID NO: 313854 - DNA, 8628 bp, Artificial Sequence
  derived and/or modified sequence
gtgctgtggcggcggcggcggcggtagtggcggcggcggcggtgcctgggcggcagcagcagcagtagcggcagccctgaggacggtgagacggccgcggcggcggcgacagcgcggaagtcgcgcgggacccagagcttcccccctgtcgctagtgctgaggctttcgcctttcctacccagcttcttgctcacggcccgggctgggctgggcagggcaacgcgcccccggggaggggcggagctgtagatatggtgtaagatacttcttcaagattggacagctggggaccttcttctgattaaccttaaaccaacttgtagccatagagacacctcacaaggttcccatttttgttgttgttgttgttgattttctgctcacacctttcctgaccttgcaaccatgtatggaagtgcccgctctgttgggaaggtggagccgagcagccagagccctgggcgttcacccaggcttccacgttcccctcgcttgggtcaccgtcgaaccaacagtacgggagggagttcgggaagcagtgttggaggtggcagtgggaaaaccctttcaatggaaaatatacaatctttaaatgctgcctatgccacctctggccctatgtatctaagtgaccatgaaaatgtgggttcagaaacacctaaaagcaccatgacacttggccgttctgggggacgtctgccttacggtgttcggatgactgctatgggtagtagccccaatatagctagcagtggggttgctagtgacaccatagcatttggagagcatcacctccctcctgtgagtatggcatccactgtacctcactcccttcgtcaggcgagagataacacaatcatggatctgcagacacagctgaaggaagtattaagagaaaatgatctcttgcggaaggatgtggaagtaaaggagagcaaattgagttcttcaatgaatagcatcaagaccttctggagcccagagctgaagaaggaacgagccctgagaaaagatgaagcttccaaaatcaccatttggaaggaacagtacagagttgtacaggaggaaaaccaggtggatgctctccgattgcgtttggaagagaaggaaaccatgttgaataaaaagacaaaacaaattcaggatatggctgaagagaaggggacacaagctggagagatacatgacctcaaggacatgttggatgtgaaggagcggaaggttaatgttcttcagaagaagattgaaaatcttcaagagcagcttagagacaaggaaaagcagatgagcagcttgaaagaacgggtcaaatccttgcaggctgacaccaccaacactgacactgccttgacaactttggaggaggcccttgcagagaaagagcggacaattgaacgcttaaaggagcagagggacagagatgagcgagagaagcaagaggaaattgataactacaaaaaagatcttaaagacttgaaggaaaaagtcagcctgttgcaaggcgacctttcagagaaagaggcttcacttttggatctgaaagagcatgcttcttctctggcatcctcaggactgaaaaaggactcacggcttaagacactagagattgctttggagcagaagaaggaggagtgtctgaaaatggaatcacaattgaaaaaggcacatgaggcagcattggaagccagagccagtccagagatgagtgaccgaatacagcacttggagagagagatcaccaggtacaaagatgaatctagcaaggcccaggcagaagttgatcgactcttagaaatcttgaaggaggtggaaaatgagaagaatgacaaagataagaagatagctgagttggaaagccttttttctaggcaagtgaaagaccagaataagaaggtagcaaatctgaagcacaaggaacaggtggaaaaaaagaagagtgcacaaatgttagaggaggcgcgacgacgggaggacaatctcaacgacagctctcagcagctacaggacagtctccgtaagaaggatgacaggattgaagagctggaagaagcactaagagaaagtgtacagataactgcagagcgggaaatggtgctagcacaagaggaatcagccaggaccaatgctgaaaaacaggtggaggagttactgatggccatggagaaggtaaagcaggaactagaatccatgaaagcaaagctgtcctccacccagcagtctctggcagaaaaggaaactcacttgactaatcttcgggcagagagaaggaaacacttagaggaagttctggagatgaagcaagaagctcttctggctgccattagtgaaaaagacgccaatatagctctcttggagctttcgtcctctaagaagaagacccaagaggaagtggctgccctgaagcgggagaaggatcgtctggtacagcagcttaagcagcagacgcaaaatcgaatgaagctaatggccgacaactacgaggatgaccacttcaaatcctcccattccaatcaaacaaatcacaagccctccccagaccaggatgaggaggagggtatatgggcatagccaatcagaggcttagttcagccattttgttcagaacgatcatccagcccctcttagaacttgaccaaaatagaagtaaattaaagttgtacattggacacctgacaaccctctgccatgaccgagaccccctgatcctccgtggactcactccaccagcttcctataacttggacgatgaccaggcggcttgggagaatgagctgcagaagatgacccgggggcagcttcaggatgagttagagaaaggtgaacgggacaatgcagaactgcaggagtttgccaacgccattcttcagcagatagcagaccattgtcccgacatcctagagcaagtggtcaacgccctggaagagtcctcttgaccctgctttatggggaagcctgaggtagtcaacccaggagccaagaaaagagaactacgaggaacaggtgcccggaaccttcttggcaccaaacactacaaacttcatcccaacttgctcacttgaagaagtgtgattccagcaccgtttctacatctgccatcttactctgcctttctgctttggatgtggtctctacactaaccttcttgatgtccagggtagataaagggtcgaatctctctgaagaactgccacctggtcatcagcagtggagaactgtgggagctggtggctctgccctgacagagagccatggagcagaggagcctctcacctcctgtcctctgacatgagaatgaaaccaggaatggacttggagttcaacaggctgagaggatgcctccaatggaccagagagctgagtgttctaatatcacaataggtgctttctcctaaaagggcaaaaaacaatctcaaaaagattagaaaaagagaaggggggaagggaagagaaaatcgactcttctttttactgtctcttctgcttactttccacatgagatgctttgtaccggggagctgtgagcaggcctcacgatggcttgggagcactcgttctcccaaggtctgagtcttcatccagccctgcctgtctgtcgcagccttcctcactctgttcctcggccagttaacaagaagatggtgtgaggtgttctccaccagtctctcctgtttgagactgttgacgttatcatactgaggtgttagatcaaatatctctaattgaagaacatgtgaggttgaaagagcaccagccagggcaacatagcgtgaccctgtctctacaaaaaattaaaaagagaacatacaaagttgacatatgagaccctgttgtccccgcctgcagctttgccccagtaacagatgcccgttgctcttgggctggtttcccctgaacacctccaagaggctgcctgccttgccagcacccgtgtcctgagctcctgcagcccagtggctgctgaagttgtgatccctcactcaccctgctagctttgcccttgactcgtcttctctgaacctcagcctcgtgcattgcctggaaccttcttctagcataaatgaaggtttttcctcctacacacattccttcctcggttatttcattcagagaatatttatgaaatgcctactgtgtgcaagtcatccatccttgaaaaggccacttctcagtgagggagagatgtagtggattctgtgagacatacctgctggagttgaagcagtaaatagcatgtccttcccctccccgatcttaaggtgtgttttctagaaaagttccctaatggaattcatgagtttgggggtctcagtcacccgcttgcctgtaggattccatttgatgattctggatttttgctgtttgttattgcccttagaggggctctgagtatctacttgtgggtggccatttcctgacatctgcatgtacctcgtggaattcagccagcttcatgttgcaaatcagaaagctgaccccaagactgcaaatcaatgaaggtattggcattgttaaggacgtagcgtagacaacagcagtcataaataattaggcaggaacttaacccaaatctagttctttgaccacctctaccaccagaacccagcagacactcacatctcctgataagagttgctggactcgatgtttttgttttgcattttctcctctccttccccacttactcagagaatttaaagtctgtagagtcagcacagccccatcagtccaggaacttcccaccaccagcccttgactgtcccattaactgacatggtcagatttccagctccccctactccctgctgtgaaacaatccctctccctgtgagaggaaactgtggagcgtttcttatcgaaggttaaatggactctgctcataaacctcttactgagatgcttcctgatagccaggctggccagagaggggtgcaggggttagatagtaagtggtggtcgtttgtggtcagttacctcaattctgttcattgcagtgcccgtaaaccatgtagaaagctcccagcactgaaaggcaggagtgttagcatctcgctttatccaccataacgtaaagaactgcggtgtgataacagccttcacggggccacggtggaaccaagacagcaggcgaggccatgcctaaacaagtggtctggcacgggcactggccagctgctctctccaagcaggtggcccagatcccacccacgtggactttctcatcaggtgcagcgcctgccactctcagccactgggtgtgtcactctcctcttcatctcagcattctccatcacttcccctccagaaaaacggatggaaggaagccctctgtgacactgcttctgagaagaagcatttccgggaccgatatcatctgtctggtctctgtgaacagcaaggaatcttcttgaccgttcttgggcactggaggctggctaggagttcagtaataaacgtggccttcgtgctgtagggcagagtggatgcagtttgtagctttcagagtgtctcattgagtctagatcattgaaccaacacttaaccaaatgtcccactcccatcacactaggacttgtcattccatgcccctctcctagtggtcatggtttcatatgggcatacaactgctactgaagttatatagccttgaaaactcagtgcaggttgcccttaattttccccaaacccctccatcggcaagtctagttgccctttagcacctaaagatctgcaccccaaaccaatgtcaccataaagagggcacgaagaagagtgggtgtgatcccaacggggttttgtaactgaagaagcccagtgtgagcttctcatcttttcatatacctctaacccccggtactcattgaatcattgatgaggtatctcaattgagatttgcaaggactttgataccatttgaaatggaaaaattttgaacgggctttaacatgtttaagaaatatggatggggccggccacagtggctcacgcctgtaatcccagaactctggaaggctgaggcaggcggatcacctgagatcaggagttcgaggccagcctggccaagatggcaaaaaccccgactctactaaaaatacaaaattagccaggcgtggtggcgtacgcctgtaatcccagctactcaggaggcaggagaatcgcttgagcctgggaggcagaggctgcggtgagccgagatcgtgtcactgcactccagcctgggtgacagagactccatttaaaaaaaaaaaaaaaaaatatatatatatatatatatatatatatatggatgggaatcaccaaattcatctcagctctaaccttttaacctttgtccttgcactttacaatctaaagatctacctgtggctctcagacttcctcacacttgggttttagaaataacttgtaaagcagactggacccaaggccgccttcagtgtcaagaagggcattgtgacttgcccctcaatttctgtccattgaagtctggttttccatgaggaacttgcgggctcacccacccccagagtgagagaagaggaaggcgaagtcatcacagacacggtcttagccacctgctgaactaatccctccgctattgagggtcagggttgtgaggcaaccatcatgtgtcaccccaaaatataaatgtttctgagccgcccatccactggcatttggatttgctgccagagtcctgttcctcccagaaccatcccgccctcctgttgaccatgttacttgagtgtaggcccggtgtcaagaccctcagagtctttgaggaaagagccaagcagagaagaccgctgcgtggagtgtgacaccacatggcatttctcaagcccagcggaccctgtgtcagcaaataccagtaatttaacatctgctcctggcctcctcttcacctgcctgggttcggaactgaggaggaaggatgagaagagactgcaatgcagcaggcaccctctgcagagtgaggccgcccgtccatcactgccagccctgggctgctcaggaggggacgtgaaccactcaaaggaatgtcttaaagaggatctggagtttcccccatgcaaattagggaagaattaggcaagaaaagacatacattacagggaaatccttctgaacaaaatggctgtcttcacctactcttcttgcaagaaaagacatacattacagggaaatccttctgaacaaaatggctatcttcacctactcttcagcaaaaaccgtctccagactttttagtgtcaaaaatgtaaccaactgtctcctgattttttccaatgtgtttggcaagtgctgtggccctgttgtaggtacttctcctgactcttgggggagaagtggttttagggattgatttgggggagcgggtttttgtcccatcccacctcctctcttctttctctgcttgtcgatattgtctgtgtgattcagagaattggggcagttacattgtgtctgttgttgagattattaaaagattaaaacgtagttgtagaaatgaaaaattaaacagctgtgttttaaaaatgcaaaccaatatcttgttaataaaggaattcaagctatggggcagccacactcccctcctcccaggctggcataggtggccctgggctggcggcttaggaagcatggagcacacttagggtagtgcctgcctgggcaagagacacctgccgagcaaaaggaacgagaatctggggctcagagcctcgcagttgtgccaggattttcctatacatgttcaggacctctgggtagaggtttcacagtttgtgaccccataaccaccctcacccgacgtgggttctagctcagtgtgcctaatactgcatggtaacctgggcttgaccctgaagcccctgcctggcaggccacaggacctctcctgcccacttggtgctatctcttccagtgaccacccagcacgggtgagcactggccagcctggagcctgcaatccaggtggaacagactgtcctccatgtcagttccttctggcttcaggccctcaattatttccctttgagcttttttagaccctagatctcctaggcccaggctctctcttgaccccagagaagccactgtcaggaaaggaagtgaaccctactgaagccagagaattcaccccggccaaagcaggccctctgggtccagcccctcattccacaccacgccagtattgcatccatctactgcagctacacatcctgagggcagcaccacccactctggcctgctggcccatcgcaggactagcccaggcacctgccgggcattgcaggatatccagtggggcctgtgactgctccctgatgcgtcagaagagaagtgttgcactttagtggaggagctgaggagcacctgcccccttgtagcttgagttccttttggtaacagtagcagcctccatggtggtgtctgggatgcacgtgcacccgctgccttcagctgtatgtgtgtgttcctgctggagttgtgttactgacaggataatgacattacaaagaaattgtgttatattcaactttgccttgataattattgtaaacactttgttcattttttcttttttattcacaaactaaatccaccaggaaattataaagttattt

SEQ ID NO: 313855 - DNA, 2163 bp, Artificial Sequence
  derived and/or modified sequence
atgtacggcagcgccagaagcgtgggcaaggtggagcccagcagccagagccccggcagaagccccagactgcccagaagccccagactgggccacagaagaaccaacagcaccggcggcagcagcggcagcagcgtgggcggcggcagcggcaagaccctgagcatggagaacatccagagcctgaacgccgcctacgccaccagcggccccatgtacctgagcgaccacgagaacgtgggcagcgagacccccaagagcaccatgaccctgggcagaagcggcggcagactgccctacggcgtgagaatgaccgccatgggcagcagccccaacatcgccagcagcggcgtggccagcgacaccatcgccttcggcgagcaccacctgccccccgtgagcatggccagcaccgtgccccacagcctgagacaggccagagacaacaccatcatggacctgcagacccagctgaaggaggtgctgagagagaacgacctgctgagaaaggacgtggaggtgaaggagagcaagctgagcagcagcatgaacagcatcaagaccttctggagccccgagctgaagaaggagagagccctgagaaaggacgaggccagcaagatcaccatctggaaggagcagtacagagtggtgcaggaggagaaccaggtggacgccctgagactgagactggaggagaaggagaccatgctgaacaagaagaccaagcagatccaggacatggccgaggagaagggcacccaggccggcgagatccacgacctgaaggacatgctggacgtgaaggagagaaaggtgaacgtgctgcagaagaagatcgagaacctgcaggagcagctgagagacaaggagaagcagatgagcagcctgaaggagagagtgaagagcctgcaggccgacaccaccaacaccgacaccgccctgaccaccctggaggaggccctggccgagaaggagagaaccatcgagagactgaaggagcagagagacagagacgagagagagaagcaggaggagatcgacaactacaagaaggacctgaaggacctgaaggagaaggtgagcctgctgcagggcgacctgagcgagaaggaggccagcctgctggacctgaaggagcacgccagcagcctggccagcagcggcctgaagaaggacagcagactgaagaccctggagatcgccctggagcagaagaaggaggagtgcctgaagatggagagccagctgaagaaggcccacgaggccgccctggaggccagagccagccccgagatgagcgacagaatccagcacctggagagagagatcaccagatacaaggacgagagcagcaaggcccaggccgaggtggacagactgctggagatcctgaaggaggtggagaacgagaagaacgacaaggacaagaagatcgccgagctggagagcctgttcagcagacaggtgaaggaccagaacaagaaggtggccaacctgaagcacaaggagcaggtggagaagaagaagagcgcccagatgctggaggaggccagaagaagagaggacaacctgaacgacagcagccagcagctgcaggacagcctgagaaagaaggacgacagaatcgaggagctggaggaggccctgagagagagcgtgcagatcaccgccgagagagagatggtgctggcccaggaggagagcgccagaaccaacgccgagaagcaggtggaggagctgctgatggccatggagaaggtgaagcaggagctggagagcatgaaggccaagctgagcagcacccagcagagcctggccgagaaggagacccacctgaccaacctgagagccgagagaagaaagcacctggaggaggtgctggagatgaagcaggaggccctgctggccgccatcagcgagaaggacgccaacatcgccctgctggagctgagcagcagcaagaagaagacccaggaggaggtggccgccctgaagagagagaaggacagactggtgcagcagctgaagcagcagacccagaacagaatgaagctgatggccgacaactacgaggacgaccacttcaagagcagccacagcaaccagaccaaccacaagcccagccccgaccaggacgaggaggagggcatctgggcctag

SEQ ID NO: 313856 - protein, 1116 aa, Artificial Sequence
  derived and/or modified sequence
MYGSARSVGKVEPSSQSPGRSPRLPRSPRLGHRRTNSTGGSSGSSVGGGSGKTLSMENIQSLNAAYATSGPMYLSDHENVGSETPKSTMTLGRSGGRLPYGVRMTAMGSSPNIASSGVASDTIAFGEHHLPPVSMASTVPHSLRQARDNTIMDLQTQLKEVLRENDLLRKDVEVKESKLSSSMNSIKTFWSPELKKERALRKDEASKITIWKEQYRVVQEENQHMQMTIQALQDELRIQRDLNQLFQQDSSSRTGEPCVAELTEENFQRLHAEHERQAKELFLLRKTLEEMELRIETQKQTLNARDESIKKLLEMLQSKGLSAKATEEDHERTRRLAEAEMHVHHLESLLEQKEKENSMLREEMHRRFENAPDSAKTKALQTVIEMKDSKISSMERGLRDLEEEIQMLKSNGALSTEEREEEMKQMEVYRSHSKFMKNKVEQLKEELSSKEAQWEELKKKAAGLQAEIGQVKQELSRKDTELLALQTKLETLTNQFSDSKQHIEVLKESLTAKEQRAAILQTEVDALRLRLEEKETMLNKKTKQIQDMAEEKGTQAGEIHDLKDMLDVKERKVNVLQKKIENLQEQLRDKEKQMSSLKERVKSLQADTTNTDTALTTLEEALAEKERTIERLKEQRDRDEREKQEEIDNYKKDLKDLKEKVSLLQGDLSEKEASLLDLKEHASSLASSGLKKDSRLKTLEIALEQKKEECLKMESQLKKAHEAALEARASPEMSDRIQHLEREITRYKDESSKAQAEVDRLLEILKEVENEKNDKDKKIAELERQVKDQNKKVANLKHKEQVEKKKSAQMLEEARRREDNLNDSSQQLQDSLRKKDDRIEELEEALRESVQITAEREMVLAQEESARTNAEKQVEELLMAMEKVKQELESMKAKLSSTQQSLAEKETHLTNLRAERRKHLEEVLEMKQEALLAAISEKDANIALLELSSSKKKTQEEVAALKREKDRLVQQLKQQTQNRMKLMADNYEDDHFKSSHSNQTNHKPSPDQIIQPLLELDQNRSKLKLYIGHLTTLCHDRDPLILRGLTPPASYNLDDDQAAWENELQKMTRGQLQDELEKGERDNAELQEFANAILQQIADHCPDILEQVVNALEESS

SEQ ID NO: 313857 - DNA, 3351 bp, Artificial Sequence
  derived and/or modified sequence
atgtacggcagcgccagaagcgtgggcaaggtggagcccagcagccagagccccggcagaagccccagactgcccagaagccccagactgggccacagaagaaccaacagcaccggcggcagcagcggcagcagcgtgggcggcggcagcggcaagaccctgagcatggagaacatccagagcctgaacgccgcctacgccaccagcggccccatgtacctgagcgaccacgagaacgtgggcagcgagacccccaagagcaccatgaccctgggcagaagcggcggcagactgccctacggcgtgagaatgaccgccatgggcagcagccccaacatcgccagcagcggcgtggccagcgacaccatcgccttcggcgagcaccacctgccccccgtgagcatggccagcaccgtgccccacagcctgagacaggccagagacaacaccatcatggacctgcagacccagctgaaggaggtgctgagagagaacgacctgctgagaaaggacgtggaggtgaaggagagcaagctgagcagcagcatgaacagcatcaagaccttctggagccccgagctgaagaaggagagagccctgagaaaggacgaggccagcaagatcaccatctggaaggagcagtacagagtggtgcaggaggagaaccagcacatgcagatgaccatccaggccctgcaggacgagctgagaatccagagagacctgaaccagctgttccagcaggacagcagcagcagaaccggcgagccctgcgtggccgagctgaccgaggagaacttccagagactgcacgccgagcacgagagacaggccaaggagctgttcctgctgagaaagaccctggaggagatggagctgagaatcgagacccagaagcagaccctgaacgccagagacgagagcatcaagaagctgctggagatgctgcagagcaagggcctgagcgccaaggccaccgaggaggaccacgagagaaccagaagactggccgaggccgagatgcacgtgcaccacctggagagcctgctggagcagaaggagaaggagaacagcatgctgagagaggagatgcacagaagattcgagaacgcccccgacagcgccaagaccaaggccctgcagaccgtgatcgagatgaaggacagcaagatcagcagcatggagagaggcctgagagacctggaggaggagatccagatgctgaagagcaacggcgccctgagcaccgaggagagagaggaggagatgaagcagatggaggtgtacagaagccacagcaagttcatgaagaacaaggtggagcagctgaaggaggagctgagcagcaaggaggcccagtgggaggagctgaagaagaaggccgccggcctgcaggccgagatcggccaggtgaagcaggagctgagcagaaaggacaccgagctgctggccctgcagaccaagctggagaccctgaccaaccagttcagcgacagcaagcagcacatcgaggtgctgaaggagagcctgaccgccaaggagcagagagccgccatcctgcagaccgaggtggacgccctgagactgagactggaggagaaggagaccatgctgaacaagaagaccaagcagatccaggacatggccgaggagaagggcacccaggccggcgagatccacgacctgaaggacatgctggacgtgaaggagagaaaggtgaacgtgctgcagaagaagatcgagaacctgcaggagcagctgagagacaaggagaagcagatgagcagcctgaaggagagagtgaagagcctgcaggccgacaccaccaacaccgacaccgccctgaccaccctggaggaggccctggccgagaaggagagaaccatcgagagactgaaggagcagagagacagagacgagagagagaagcaggaggagatcgacaactacaagaaggacctgaaggacctgaaggagaaggtgagcctgctgcagggcgacctgagcgagaaggaggccagcctgctggacctgaaggagcacgccagcagcctggccagcagcggcctgaagaaggacagcagactgaagaccctggagatcgccctggagcagaagaaggaggagtgcctgaagatggagagccagctgaagaaggcccacgaggccgccctggaggccagagccagccccgagatgagcgacagaatccagcacctggagagagagatcaccagatacaaggacgagagcagcaaggcccaggccgaggtggacagactgctggagatcctgaaggaggtggagaacgagaagaacgacaaggacaagaagatcgccgagctggagagacaggtgaaggaccagaacaagaaggtggccaacctgaagcacaaggagcaggtggagaagaagaagagcgcccagatgctggaggaggccagaagaagagaggacaacctgaacgacagcagccagcagctgcaggacagcctgagaaagaaggacgacagaatcgaggagctggaggaggccctgagagagagcgtgcagatcaccgccgagagagagatggtgctggcccaggaggagagcgccagaaccaacgccgagaagcaggtggaggagctgctgatggccatggagaaggtgaagcaggagctggagagcatgaaggccaagctgagcagcacccagcagagcctggccgagaaggagacccacctgaccaacctgagagccgagagaagaaagcacctggaggaggtgctggagatgaagcaggaggccctgctggccgccatcagcgagaaggacgccaacatcgccctgctggagctgagcagcagcaagaagaagacccaggaggaggtggccgccctgaagagagagaaggacagactggtgcagcagctgaagcagcagacccagaacagaatgaagctgatggccgacaactacgaggacgaccacttcaagagcagccacagcaaccagaccaaccacaagcccagccccgaccagatcatccagcccctgctggagctggaccagaacagaagcaagctgaagctgtacatcggccacctgaccaccctgtgccacgacagagaccccctgatcctgagaggcctgaccccccccgccagctacaacctggacgacgaccaggccgcctgggagaacgagctgcagaagatgaccagaggccagctgcaggacgagctggagaagggcgagagagacaacgccgagctgcaggagttcgccaacgccatcctgcagcagatcgccgaccactgccccgacatcctggagcaggtggtgaacgccctggaggagagcagctag

SEQ ID NO: 313858 - DNA, 3351 bp, Artificial Sequence
  derived and/or modified sequence
atgtacgggagtgcacgatctgtcggcaaggtggaaccaagctcccaaagcccggggcggagtcctcgtctcccaaggagcccaagacttggccaccgccggactaattctaccggcggaagcagtgggtcatccgtgggagggggctcaggtaagacactgtccatggagaacatccagagccttaatgctgcgtacgccacgagtgggcctatgtatctgtctgaccacgaaaacgttggctctgagacacctaagtccactatgaccctggggcggagcggcggacgtctcccatacggagtgcgcatgacagccatgggaagctcacccaatatcgcgtctagcggtgtggcatccgataccatcgctttcggagaacaccacctccccccagtaagtatggcctctaccgtaccacactcattgagacaagccagggacaacaccatcatggatctgcagacacaattgaaagaagtgctgcgtgaaaacgacctgctgcggaaagacgtcgaggtgaaggaatctaagctttcaagctccatgaatagcatcaagacgttttggtcccccgaactgaaaaaggagagggccttgaggaaagacgaggcaagcaaaattaccatatggaaggaacagtacagagtggtacaagaagagaatcagcatatgcagatgacgatccaggccctgcaggacgaactacgcattcaacgtgatttaaatcagctgttccagcaggatagctcttccaggaccggagaaccctgcgtagctgaactcacagaagagaactttcagaggctgcacgccgagcatgagcgccaggctaaagagctgtttctgctgaggaagacgctcgaggagatggagcttcgcatcgagacccaaaaacaaacgctgaatgccagagacgagtcaattaagaaattgctagagatgctgcagtcaaagggtctcagcgctaaggctacagaggaggatcacgaacgaactagacgcctcgcagaagcagagatgcacgttcatcatttagaaagtctgctggagcagaaggagaaggagaactcaatgctgcgcgaggagatgcatcggcgatttgagaacgcccccgacagcgctaaaacgaaggccctgcagacagtgatagaaatgaaagactccaaaatatcttcaatggagcggggcctgagggacctggaagaagagattcagatgctcaaatctaatggcgcactgagcacagaggaaagagaggaagagatgaagcagatggaagtctaccgcagccattcgaagtttatgaagaacaaggtggagcagttaaaagaggagttgtcttccaaggaagcgcaatgggaagaacttaaaaaaaaagccgctggccttcaagccgaaatagggcaggtaaaacaggagctgtcaaggaaagacacggagttactcgcactgcagactaaactggagactctcactaatcagttcagcgactcaaagcagcatattgaagtgctgaaggagagcttaaccgctaaggaacagcgcgctgcaatcctgcagaccgaagtcgacgctctccggctcagactcgaggagaaagagacaatgctaaacaagaagacaaagcagatacaggatatggcagaggagaaagggacacaggcaggcgagattcatgacctgaaggacatgctcgatgttaaggagagaaaagtgaacgtcctgcagaaaaaaattgaaaacctgcaggaacaattgagggacaaagaaaagcaaatgtcttcattaaaagagcgcgtgaaatctctccaggcagatacaacaaacacggacactgcacttactacgctggaagaggccctggctgagaaggagcgcaccatagaaagactgaaagaacagcgagatcgtgatgaacgggagaagcaggaagaaatagacaattacaagaaggatctgaaagacctgaaagagaaagtttccctgctacagggggacctgtccgagaaagaggcgtcccttctggacttgaaggaacatgcttcaagcctcgcatcctccgggctgaagaaggactctagattgaaaactctggagatcgcattggagcaaaaaaaggaggaatgcctgaaaatggaatctcagctgaagaaggcacacgaagccgctctggaggcccgtgcatctcccgaaatgagcgatcggatccagcatctcgaaagagaaatcacccgatacaaggatgaatcatccaaggcccaggcagaggtggaccgtctgcttgaaattctaaaggaggtggagaacgagaaaaacgacaaggacaaaaaaatcgccgaattggagcgtcaggtcaaggatcaaaacaagaaggtcgcaaatttgaagcacaaggaacaagtggaaaaaaagaagagtgcacaaatgttagaggaggctcggaggcgcgaagacaacctgaacgattcctcccagcagcttcaagactcactgaggaagaaagacgatcgcatcgaggaactggaggaggcactgcgggaatccgttcagattactgctgagcgtgaaatggttttagctcaggaggaatccgcgagaactaatgcagagaaacaagtcgaggaactgctgatggctatggagaaagtgaaacaagagctggagagcatgaaggccaagctaagtagcacccaacagtcacttgcagaaaaggaaacccacctgacaaaccttagggctgaaaggcggaagcatctggaggaggtgctggagatgaagcaggaggcattgctggccgccattagcgagaaggatgcaaacatagcactcttagagctgagcagtagtaagaaaaaaacacaagaggaggtagcggccctgaaacgtgagaaggaccggctggtgcagcaactcaaacagcaaacccagaacagaatgaaactgatggccgataattatgaggacgaccactttaagtcttcacactccaatcagacaaatcacaaacccagtcccgatcagatcattcaaccactcttagagctggatcagaatagaagtaaactcaagctttacataggacatttaactaccttatgtcacgaccgggacccactcattctccgtggcctcacacctcccgcctcttataacctagacgatgatcaggcagcctgggagaatgaactgcagaagatgacacgcgggcaactgcaggatgagctggaaaagggagaacgcgataatgcagaactccaggaattcgctaacgcaatcctgcagcagatagctgaccactgtccagacatcctcgaacaagttgttaatgccctcgaggaatcgagctag

SEQ ID NO: 313859 - DNA, 5740 bp, Artificial Sequence
  derived and/or modified sequence
gattggacagctggggaccttcttctgattaaccttaaaccaacttgtagccatagagacacctcacaaggttcccatttttgttgttgttgttgttgattttctgctcacacctttcctgaccttgcaaccatgtatggaagtgcccgctctgttgggaaggtggagccgagcagccagagccctgggcgttcacccaggcttccacgttcccctcgcttgggtcaccgtcgaaccaacagtacgggagggagttcgggaagcagtgttggaggtggcagtgggaaaaccctttcaatggaaaatatacaatctttaaatgctgcctatgccacctctggccctatgtatctaagtgaccatgaaaatgtgggttcagaaacacctaaaagcaccatgacacttggccgttctgggggacgtctgccttacggtgttcggatgactgctatgggtagtagccccaatatagctagcagtggggttgctagtgacaccatagcatttggagagcatcacctccctcctgtgagtatggcatccactgtacctcactcccttcgtcaggcgagagataacacaatcatggatctgcagacacagctgaaggaagtattaagagaaaatgatctcttgcggaaggatgtggaagtaaaggagagcaaattgagttcttcaatgaatagcatcaagaccttctggagcccagagctgaagaaggaacgagccctgagaaaagatgaagcttccaaaatcaccatttggaaggaacagtacagagttgtacaggaggaaaaccagcacatgcagatgacaatccaggctctccaggatgaattgcggatccagagggacctgaatcagctgtttcagcaggatagtagcagcaggactggcgaaccttgtgtagcagagctgacagaggagaactttcagaggcttcatgctgagcatgagcggcaggccaaagagctgtttcttcttcgaaagacattggaggaaatggagctgcgtattgagactcaaaagcagaccctaaatgctcgggatgaatccattaagaagcttctggaaatgttgcagagcaaaggactttctgccaaggctaccgaggaagaccatgagagaacaagacgactggcagaggcagagatgcacgttcatcacctagaaagccttttggagcagaaggaaaaagagaacagtatgttgagagaggagatgcatcgaaggtttgagaatgctcctgattctgccaaaacaaaagctctgcaaactgttattgagatgaaggattcaaaaatttcctctatggagcgtgggcttcgagacctggaagaggaaattcagatgctgaaatcgaatggtgctttgagtactgaggaaagggaagaagaaatgaagcaaatggaagtgtatcggagccattctaaatttatgaaaaataaggtagaacaactgaaggaggaactaagttcgaaagaggctcaatgggaggagctgaaaaagaaagcggctggtcttcaggctgagattggccaggtgaaacaggagctgtccagaaaggacacagaactactcgccctgcagacaaagctagaaacactcacaaaccagttctcagatagtaaacagcacattgaagtgttgaaggagtccttgactgctaaggagcagagggctgccatcctgcagactgaggtggatgctctccgattgcgtttggaagagaaggaaaccatgttgaataaaaagacaaaacaaattcaggatatggctgaagagaaggggacacaagctggagagatacatgacctcaaggacatgttggatgtgaaggagcggaaggttaatgttcttcagaagaagattgaaaatcttcaagagcagcttagagacaaggaaaagcagatgagcagcttgaaagaacgggtcaaatccttgcaggctgacaccaccaacactgacactgccttgacaactttggaggaggcccttgcagagaaagagcggacaattgaacgcttaaaggagcagagggacagagatgagcgagagaagcaagaggaaattgataactacaaaaaagatcttaaagacttgaaggaaaaagtcagcctgttgcaaggcgacctttcagagaaagaggcttcacttttggatctgaaagagcatgcttcttctctggcatcctcaggactgaaaaaggactcacggcttaagacactagagattgctttggagcagaagaaggaggagtgtctgaaaatggaatcacaattgaaaaaggcacatgaggcagcattggaagccagagccagtccagagatgagtgaccgaatacagcacttggagagagagatcaccaggtacaaagatgaatctagcaaggcccaggcagaagttgatcgactcttagaaatcttgaaggaggtggaaaatgagaagaatgacaaagataagaagatagctgagttggaaaggcaagtgaaagaccagaataagaaggtagcaaatctgaagcacaaggaacaggtggaaaaaaagaagagtgcacaaatgttagaggaggcgcgacgacgggaggacaatctcaacgacagctctcagcagctacaggacagtctccgtaagaaggatgacaggattgaagagctggaagaagcactaagagaaagtgtacagataactgcagagcgggaaatggtgctagcacaagaggaatcagccaggaccaatgctgaaaaacaggtggaggagttactgatggccatggagaaggtaaagcaggaactagaatccatgaaagcaaagctgtcctccacccagcagtctctggcagaaaaggaaactcacttgactaatcttcgggcagagagaaggaaacacttagaggaagttctggagatgaagcaagaagctcttctggctgccattagtgaaaaagacgccaatatagctctcttggagctttcgtcctctaagaagaagacccaagaggaagtggctgccctgaagcgggagaaggatcgtctggtacagcagcttaagcagcagacgcaaaatcgaatgaagctaatggccgacaactacgaggatgaccacttcaaatcctcccattccaatcaaacaaatcacaagccctccccagaccagatcatccagcccctcttagaacttgaccaaaatagaagtaaattaaagttgtacattggacacctgacaaccctctgccatgaccgagaccccctgatcctccgtggactcactccaccagcttcctataacttggacgatgaccaggcggcttgggagaatgagctgcagaagatgacccgggggcagcttcaggatgagttagagaaaggtgaacgggacaatgcagaactgcaggagtttgccaacgccattcttcagcagatagcagaccattgtcccgacatcctagagcaagtggtcaacgccctggaagagtcctcttgaccctgctttatggggaagcctgaggtagtcaacccaggagccaagaaaagagaactacgaggaacaggtgcccggaaccttcttggcaccaaacactacaaacttcatcccaacttgctcacttgaagaagtgtgattccagcaccgtttctacatctgccatcttactctgcctttctgctttggatgtggtctctacactaaccttcttgatgtccagggtagataaagggtcgaatctctctgaagaactgccacctggtcatcagcagtggagaactgtgggagctggtggctctgccctgacagagagccatggagcagaggagcctctcacctcctgtcctctgacatgagaatgaaaccaggaatggacttggagttcaacaggctgagaggatgcctccaatggaccagagagctgagtgttctaatatcacaataggtgctttctcctaaaagggcaaaaaacaatctcaaaaagattagaaaaagagaaggggggaagggaagagaaaatcgactcttctttttactgtctcttctgcttactttccacatgagatgctttgtaccggggagctgtgagcaggcctcacgatggcttgggagcactcgttctcccaaggtctgagtcttcatccagccctgcctgtctgtcgcagccttcctcactctgttcctcggccagttaacaagaagatggtgtgaggtgttctccaccagtctctcctgtttgagactgttgacgttatcatactgaggtgttagatcaaatatctctaattgaagaacatgtgaggttgaaagagcaccagccagggcaacatagcgtgaccctgtctctacaaaaaattaaaaagagaacatacaaagttgacatatgagaccctgttgtccccgcctgcagctttgccccagtaacagatgcccgttgctcttgggctggtttcccctgaacacctccaagaggctgcctgccttgccagcacccgtgtcctgagctcctgcagcccagtggctgctgaagttgtgatccctcactcaccctgctagctttgcccttgactcgtcttctctgaacctcagcctcgtgcattgcctggaaccttcttctagcataaatgaaggtttttcctcctacacacattccttcctcggttatttcattcagagaatatttatgaaatgcctactgtgtgcaagtcatccatccttgaaaaggccacttctcagtgagggagagatgtagtggattctgtgagacatacctgctggagttgaagcagtaaatagcatgtccttcccctccccgatcttaaggtgtgttttctagaaaagttccctaatggaattcatgagtttgggggtctcagtcacccgcttgcctgtaggattccatttgatgattctggatttttgctgtttgttattgcccttagaggggctctgagtatctacttgtgggtggccatttcctgacatctgcatgtacctcgtggaattcagccagcttcatgttgcaaatcagaaagctgaccccaagactgcaaatcaatgaaggtattggcattgttaaggacgtagcgtagacaacagcagtcataaataattaggcaggaacttaacccaaatctagttctttgaccacctctaccaccagaacccagcagacactcacatctcctgataagagttgctggactcgatgtttttgttttgcattttctcctctccttccccacttactcagagaatttaaagtctgtagagtcagcacagccccatcagtccaggaacttcccaccaccagcccttgactgtcccattaactgacatggtcagatttccagctccccctactccctgctgtgaaacaatccctctccctgtgagaggaaactgtggagcgtttcttatcgaaggttaaatggactctgctcataaacctcttactgagatgcttcctgatagccaggctggccagagaggggtgcaggggttagatagtaagtggtggtcgtttgtggtcagttacctcaattctgttcattgcagtgcccgtaaaccatgtagaaagctcccagcactgaaaggcaggagtgttagcatctcgctttatccaccataacgtaaagaactgcggtgtgataacagccttcacggggccacggtggaaccaagacagcaggcgaggccatgcctaaacaagtggtctggcacgggcactggccagctgctctctccaagcaggtgg

SEQ ID NO: 313860 - DNA, 3351 bp, Artificial Sequence
  derived and/or modified sequence
atgtatggaagtgcccgtagcgtggggaaggttgagccatcatctcagagcccaggcagatccccccgtctccccaggagccccagactaggtcacaggagaacaaattctacaggcggctctagcgggtcgtccgtgggaggggggtctggcaagaccctgtctatggagaatattcaaagcctgaacgccgcatacgctacaagcgggcccatgtatctttctgaccacgagaacgtaggatctgagaccccaaagagtacgatgaccctggggagatctggaggccgcctgccttatggggtgcggatgacagcaatggggagttcaccaaatatcgcttcttccggggttgcctctgatacgatcgcattcggagagcatcacctgccccccgtgtccatggcatctaccgttccccattccctgcgtcaagctagagataacaccatcatggacctccagacccaactgaaagaagtgttgcgagagaatgacctgttaagaaaggacgtcgaagtaaaggaaagcaaactatcctcatcaatgaacagtattaagacattctggtcacccgagctgaaaaaggagagagccttgaggaaagatgaagccagtaagattacaatctggaaagagcagtatagggtcgtgcaggaagaaaatcagcatatgcagatgaccatccaagccctccaagatgaactgcggattcagcgcgatctcaatcaactgttccaacaggactcgtcctcaagaacaggcgagccatgcgtggccgaactcaccgaagaaaactttcaaaggcttcatgcggagcacgaaaggcaggccaaagagctgttcttgctccgtaagacgcttgaagaaatggagcttaggatagagactcagaagcagacgttaaacgcacgcgacgagtctatcaagaagctgttggaaatgctgcagtcaaaggggttatcagccaaggcaacagaggaagatcacgagcgcaccagaagactggcagaggctgaaatgcatgtccaccatctggaatctctcctagaacagaaggagaaggaaaacagcatgctgcgggaggagatgcaccggcgcttcgaaaacgctcctgactctgcaaagacgaaggctctccagactgtaattgagatgaaagatagtaagatctccagcatggagaggggcctgcgcgatctggaggaggagattcagatgctgaagagcaatggagctctgagcaccgaggaacgcgaggaggaaatgaagcagatggaggtctaccgctcacacagcaaatttatgaaaaataaagtggagcaattaaaggaggaattgtcgagtaaagaggcccagtgggaggagctcaaaaagaaggccgccggactacaggccgagattggtcaggtgaaacaggaattgtctcggaaagacactgagctactggcgctgcagacgaaactggagacactgaccaaccaattctcagattctaagcaacacatcgaagtacttaaggagtctctcaccgccaaggaacagagagccgccattttgcagaccgaagtggatgcactcaggctgcggctggaggaaaaggaaacaatgctgaacaaaaaaaccaagcagatccaggacatggctgaagaaaaaggcactcaggccggggagattcacgacctcaaagacatgcttgatgtaaaggaacgtaaagtgaacgtgctccaaaaaaaaatcgaaaacctgcaagaacaactgagggacaaggagaaacagatgagtagcttaaaagagcgtgtaaaaagtctccaggccgacacaacaaacacagacaccgcactcaccacactcgaagaagctttggctgagaaagaaagaacaatcgaacgtctgaaagagcaaagagatagagacgaacgcgaaaagcaagaggaaattgataattacaaaaaggacctcaaggatctgaaagagaaggtctccctgctccagggagatctcagcgaaaaagaggcctcactgttggatctgaaggagcacgcctcctcactcgcttcttcggggctgaaaaaagattctcgcttgaaaacattggaaattgccctggaacaaaagaaagaagagtgcctgaagatggagagtcagctgaagaaggcccacgaagccgctctagaggctcgcgcttcccccgaaatgagcgaccggatccagcacctggagcgcgagatcaccagatataaggatgaaagctccaaggctcaggcagaagtcgataggctgctggagatattgaaagaggtggaaaacgagaagaacgacaaggataagaagatcgccgaactggagaggcaggtgaaagaccagaataaaaaggtcgcaaatctgaagcacaaagaacaggtggagaaaaaaaagagcgctcagatgctggaggaggcccgcaggcgtgaggacaacctcaatgattcatctcaacagctgcaagactctctccgtaaaaaagacgatagaattgaagagctggaagaagccctcagggaaagtgtgcaaattacagcagagagggaaatggtactggctcaggaagagtccgctaggacaaatgcggaaaaacaggtggaggagttgttaatggccatggagaaggtaaaacaggaactggagtcaatgaaagcaaagcttagctccacgcaacaatcgctggcagaaaaagagactcacctgactaacctccgggccgaacggagaaaacatttggaggaagttctggaaatgaagcaggaagctctcctcgccgccatttccgagaaggatgctaacatcgcactcctggagctcagtagttccaaaaaaaagacacaagaagaggtcgccgccctcaagagggaaaaggatcgcctagtgcaacagctcaaacagcagacgcagaatcgcatgaagctgatggcagacaactacgaggatgaccattttaaaagcagtcacagcaaccaaaccaatcataagccttctccagatcagattatccagcctctgttggaactggaccagaatcgctctaaattaaagttgtacattggtcatcttacaacgttatgtcacgatcgggacccattgattctgagaggattgaccccacctgcgagctacaacctggacgacgaccaagcggcctgggaaaatgagcttcagaaaatgactcgtggccagctgcaagacgaactggagaagggggagcgggacaacgccgagctccaggagttcgcaaacgctattttgcagcaaatcgccgatcattgccccgatattctggaacaggtggtcaatgcactggaggagagctcctag

SEQ ID NO: 313861 - DNA, 3351 bp, Artificial Sequence
  derived and/or modified sequence
atgtatggcagtgccagaagtgtgggcaaagtagaaccctcttcacagtcccctggtcggtcgcccaggctgccacgctcaccacgccttggtcatcgtaggaccaacagcaccggtggatcaagtggaagcagcgtgggaggggggtcgggcaagaccctttctatggaaaacatacagtcacttaatgccgcctacgcgacgtcaggtcccatgtatctatccgatcatgagaacgtgggcagtgagactcccaagtctacaatgacattggggcggagcggcggccgcctgccatacggcgtaaggatgactgctatgggatcatctccgaacattgcctcaagcggcgttgcaagcgacacaattgcctttggcgagcaccatttgccccctgtaagcatggcatcaacagttccccacagtctaaggcaggccagggacaatactattatggacctgcagacacagttgaaggaggtcctccgcgaaaacgatcttttgagaaaggacgtggaggttaaagaaagtaagttgtccagttcaatgaattctataaaaactttttggtcccctgaactcaaaaaggagcgagctctgcgcaaggatgaagcttcaaagatcaccatttggaaggaacaataccgcgtcgtccaggaggaaaaccaacatatgcagatgactatccaagcgttgcaagacgaactgaggatccagcgggacctgaaccagctctttcagcaggatagctcgtctcgtacaggcgaaccctgtgtggctgaactcaccgaagagaattttcagcggcttcacgcagagcacgaaagacaggcaaaggagctgttccttctgcggaaaactcttgaagagatggagctgcgaattgaaacccagaagcagactttgaacgcccgcgacgagtcaattaaaaagcttctggaaatgctgcagtcgaaaggactgtctgccaaggcaactgaggaagatcatgagaggaccagacggctggccgaggcggagatgcatgtgcaccatttagagagcctgctggaacagaaggaaaaagagaacagtatgctccgcgaggagatgcacagacgcttcgaaaacgctccggattcagcaaaaacaaaggctcttcagaccgtcatcgaaatgaaggatagcaagatctcatccatggagcgcgggctgagggaccttgaggaagaaattcaaatgttgaaatcaaatggcgccctaagcactgaggaaagagaagaggagatgaaacaaatggaggtgtaccggtctcactctaaatttatgaaaaacaaggtagaacagcttaaggaggagctctcctcaaaggaggctcagtgggaggaacttaaaaaaaaagctgcaggcctgcaggccgaaataggccaggtcaagcaggagttaagccgcaaagataccgagttgctggccttgcagaccaagctggagacactgacaaatcagttcagcgactccaaacaacatatcgaagtcctaaaggaatctctcacggccaaggagcagcgtgctgctatactgcagacagaggtcgatgccctgaggctccggctggaagaaaaggagaccatgctgaataagaagacaaagcagattcaggacatggcggaagagaagggaacccaggcgggggaaatccacgacttgaaggatatgctagacgtgaaggaacgaaaagtcaatgtgttgcaaaaaaaaatcgagaatcttcaagaacaactccgggataaggaaaagcagatgtccagtctgaaagaacgagtgaaatctttacaggctgatacgaccaatacagacactgctctcacaaccctggaggaggccctggccgagaaagagagaaccattgaaagacttaaagaacagcgcgatagggacgaacgcgagaaacaagaggagatcgacaactataagaaggatctgaaggacctgaaggagaaggttagccttctgcagggggatctttccgagaaggaagcgtccctcctcgatctgaaagagcacgccagctccctggcgtcttcaggcctcaagaaggattctagattaaaaaccctagagattgcactagagcaaaagaaagaagagtgtctcaagatggagtcccagcttaaaaaggcccacgaagctgcattagaagcccgggcctcacccgagatgtccgaccggatccaacatctggagcgggaaatcacaaggtataaggatgagtcttcaaaggcgcaggcggaagtcgatagactgctggaaatcctaaaggaggtggagaacgagaagaacgataaagacaaaaagatcgcggaattagagagacaggtcaaggaccagaataaaaaggtggctaatcttaaacacaaggaacaggtagaaaagaagaagtctgctcagatgttggaggaagccagaagacgggaagacaatctcaatgactcctctcagcagctgcaggactcactgaggaagaaggatgacagaatcgaggagcttgaggaggccctcagggaatctgtgcagatcacagctgaacgggagatggtgctcgctcaggaagaatccgcaaggacaaacgctgagaaacaggtggaggaacttctgatggctatggagaaggtcaagcaagaattagagtccatgaaggcaaaattatctagtacgcagcagtcccttgcagaaaaagagacacacctaaccaatttgcgtgcggaaagacgaaagcatctggaagaggttctggaaatgaagcaggaggctctgctcgccgccattagcgagaaggacgcaaacatcgctctcctggagctttcatccagcaaaaagaagacgcaggaggaggtagcggccttgaagagagagaaagaccgcctcgtccagcagctcaagcagcagactcagaaccgcatgaaactcatggctgacaattatgaagacgatcactttaagagctcgcacagcaatcagacaaatcataagccctctcccgatcagatcattcaacctctgctggagctggatcagaacaggagcaaactgaagctgtatattggtcatctcaccacactctgccacgatagggatcctctaatcttgcgtggcctcactccacctgccagttacaatcttgatgacgaccaggcagcctgggagaacgaactgcagaagatgacccgcggtcagcttcaggatgagctggagaaaggcgagagggacaacgccgaattgcaggagttcgcgaatgccatcctccaacagatcgccgaccattgtcctgatattctggagcaggtggtaaatgcattggaagaaagtagctag

SEQ ID NO: 313862 - DNA, 3351 bp, Artificial Sequence
  derived and/or modified sequence
atgtatggcagtgccaggagcgtcgggaaggttgagcccagcagccagtccccggggcgcagccctaggctcccaagatccccacggctgggacataggagaacaaactctaccggcggaagctctggtagctccgtgggcggcggctccgggaaaaccttgagcatggagaatatccagtccctgaacgccgcctacgcgacttccggtcccatgtatctcagcgaccacgagaatgtgggaagcgaaacgccgaagtctactatgacccttggaagatctggtggcaggcttccttacggggtgcggatgaccgctatgggcagcagccccaacatcgcttcttcaggggtggccagcgatacaatcgctttcggcgagcaccatctcccccccgtttccatggcttcgaccgtgccccattccttgaggcaagcacgcgataatacaatcatggatctgcaaacacagttgaaggaggtgctcagagaaaatgacctattgcggaaggacgtagaggtgaaggagtcaaagctctctagctccatgaattccataaagacgttctggtcacctgaacttaaaaaagaacgggctctgcgaaaggacgaggcttctaagataactatttggaaagagcagtaccgtgttgtgcaggaggagaatcagcacatgcaaatgacgatccaagctttgcaggatgagctgcgcattcagcgcgatctcaatcagctcttccagcaggacagctctagccgcacaggggaaccttgtgttgcagagctgacggaagaaaacttccagcgcctccacgcagaacacgaaagacaggcaaaagagctcttcctcttgcgtaaaaccctcgaggagatggagttgcggatcgagactcagaagcagaccttaaacgcccgcgacgaatcaattaaaaagctgctggaaatgcttcagtctaaaggactcagcgctaaggccactgaagaggatcatgaacgcacacgaagactggccgaagctgaaatgcacgtacatcatctagaatcattgctcgaacagaaggagaaagaaaactccatgctgagagaggagatgcatcgccgattcgaaaacgctccggactctgccaaaaccaaggcgctccagaccgtcatcgaaatgaaagattccaagatatcgtccatggaaaggggtctgcgcgatctggaggaggagatccaaatgctgaaaagtaacggggctctgtcaacagaggaacgcgaagaagagatgaagcagatggaagtttaccgctcacattctaaattcatgaaaaacaaagttgaacagctgaaggaagagttatcttcaaaggaagcacaatgggaggaactgaaaaagaaagcagctggtctgcaggctgagatcgggcaggttaaacaagagctcagtaggaaagacacagagcttttagccctccagactaagctagagactctgaccaatcagtttagtgactcaaaacagcatatcgaggtgctcaaagagtccctgacagccaaggagcagcgcgctgccatcctccagacggaggtggatgcactgaggctaagactcgaagagaaagaaactatgctgaacaagaagactaaacagatacaggatatggctgaggaaaaggggacgcaggcaggtgaaattcatgacctgaaagatatgttagacgttaaggagcgcaaggtgaacgttctgcagaaaaagattgaaaatctgcaggagcagttacgcgataaagaaaaacaaatgtcatcactcaaagagagggtaaaatctctgcaggcagataccacaaacacagataccgccctgacaaccttagaggaagcactggctgaaaaggagcgaaccattgaacggcttaaggaacaaagagaccgcgatgaacgggaaaaacaggaggaaattgacaattacaaaaaagacttgaaagatctgaaagagaaagtgtcactgctgcagggggatctctccgagaaggaggcaagcctgttagatttgaaagaacacgcaagctcgctagcgtcaagcggcctgaaaaaggactcgagattaaaaactctggagattgccctcgaacagaagaaggaggaatgcctgaaaatggagtctcaattgaagaaagcccacgaggcagccctcgaagcacgcgctagcccagagatgtcagatcgaattcagcatctcgaaagagagattacgaggtataaggacgagtccagtaaggcccaggcagaagttgataggctgctagagatcctgaaagaggtggagaatgagaaaaatgataaagataaaaagattgcagagctggagcgccaggtgaaagatcaaaacaagaaggtggcaaatttgaaacacaaggaacaagttgaaaaaaagaagtccgcccagatgcttgaggaggcaagacgcagggaggacaatctgaacgatagcagccaacaactgcaagacagcttaagaaagaaagatgatcgcatagaggagctggaggaagctctgagagaatcagtgcagataaccgccgagagagagatggtgctggcccaggaggagtctgcaaggacgaacgccgaaaagcaggtggaggagttactcatggccatggagaaagttaagcaagaattggagtctatgaaagctaagctctcttctacacaacaaagtctcgccgagaaagagactcatcttactaatctgagagcagagcggagaaaacatttggaagaggttttggaaatgaaacaggaagcattgctcgcggcaatatccgaaaaggacgccaacattgccctcttagagttatccagttctaagaaaaagacccaggaggaggttgccgcccttaagagggaaaaggacagactggtccagcagcttaagcagcaaacgcagaataggatgaagctgatggccgataattacgaagacgaccactttaagagctcccatagcaaccagaccaaccataagccgtcccccgatcaaataatccagcctctcctggagctggatcagaaccggtcaaaattaaaattatatatcgggcacctgaccacactgtgccatgatcgagaccctctgatactgcgtgggctcaccccacccgcatcatataatctggatgacgatcaggcagcctgggaaaatgagctccaaaagatgactcgcgggcagttgcaagacgagctcgaaaagggtgaaagagacaacgctgaattacaggaatttgcaaatgccatactccagcagatcgccgatcattgcccagatattctcgagcaggtggtaaatgcactcgaggagagctcttag

SEQ ID NO: 313863 - DNA, 3351 bp, Artificial Sequence
  derived and/or modified sequence
atgtatggcagcgcccggtctgtgggcaaggtggagcccagcagccagagccctggccgcagcccccggctgcccaggagcccccggctgggccacaggaggaccaacagcactggaggcagcagcggcagctctgtgggcggcggcagcggcaagaccctgtccatggagaacatccagagcctgaatgctgcctatgccaccagcggccccatgtacctgagtgaccatgaaaatgtgggcagcgagacccccaagagcaccatgaccctgggccgcagcggcggccgcctgccctacggcgtgaggatgacagccatgggcagcagccccaacatcgccagcagcggcgtggccagtgacaccatcgcctttggagagcaccacctgccccctgtgtccatggccagcacagtgccccacagcctgcggcaggcccgggacaacaccatcatggacctgcagacccagctgaaggaggtgctgcgggagaatgacctgctgaggaaggatgtggaggtgaaggagagcaagctgagcagctccatgaacagcatcaagaccttctggagccctgagctgaagaaggagcgggccctgaggaaggatgaggccagcaagatcaccatctggaaggagcagtacagagtggtgcaggaggagaaccagcacatgcagatgaccatccaggccctgcaggatgagctgcgcatccagagggacctgaaccagctgttccagcaggacagcagcagcaggactggagagccctgtgtggccgagctgacagaggagaacttccagaggctgcacgccgagcacgagcggcaggccaaggagctgttcctgctgaggaagaccctggaggagatggagctgagaattgagacccagaagcagaccctgaatgccagagatgagagcatcaagaagctgctggagatgctgcagagcaagggcctgagcgccaaggccacagaggaggaccacgagaggacccggcggctggccgaggccgagatgcacgtgcaccacctggagagcctgctggagcagaaggagaaggagaacagcatgctgcgggaggagatgcacagaagatttgaaaatgccccagacagcgccaagaccaaggccctgcagaccgtcatcgagatgaaggacagcaagatcagctccatggagcggggcctgcgggacctggaggaggagatccagatgctgaagagcaatggagccctgagcacagaggagcgggaggaggagatgaagcagatggaggtgtaccgcagccacagcaagttcatgaagaacaaggtggagcagctgaaggaggagctgagcagcaaggaggcccagtgggaggagctgaagaagaaggccgccggcctgcaggccgagatcggccaggtgaagcaggagctgagcaggaaggacacagagctgctggccctgcagaccaagctggagaccctgaccaaccagttcagtgacagcaagcagcacatcgaggtgctgaaggagagcctgacagccaaggagcagagagctgccatcctgcagacagaggtggatgccctgcggctgcggctggaggagaaggagaccatgctgaacaagaagaccaagcagatccaggacatggccgaggagaagggcacccaggccggggagatccatgacctgaaggacatgctggatgtgaaggagaggaaggtgaatgtgctgcagaagaagattgagaacctgcaggagcagctgcgggacaaggagaagcagatgagcagcctgaaggagcgggtgaagagcctgcaggccgacaccaccaacacagacacagccctgaccaccctggaggaggccctggccgagaaggagaggaccatcgagcggctgaaggagcagagggacagagatgagcgggagaagcaggaggagattgacaactacaagaaggacctgaaggacctgaaggagaaggtgtccctgctgcagggcgacctgtctgagaaggaggccagcctgctggacctgaaggagcacgccagcagcctggccagcagcggcctgaagaaggacagccggctgaagaccctggagatcgccctggagcagaagaaggaggagtgcctgaagatggagagccagctgaagaaggcccatgaagctgccctggaggcccgggccagccctgagatgtctgaccgcatccagcacctggagcgggagatcacccgctacaaggatgagagcagcaaggcccaggccgaggtggaccggctgctggagatcctgaaggaggtggagaatgagaagaatgacaaggacaagaagattgctgagctggagcggcaggtgaaggaccagaacaagaaggtggccaacctgaagcacaaggagcaggtggagaagaagaagagcgcccagatgctggaggaggcccggcggcgggaggacaacctgaatgacagcagccagcagctgcaggacagcctgaggaagaaggatgacagaattgaggagctggaggaggccctgcgggagagcgtgcagatcacagctgagcgggagatggtgctggcccaggaggagagcgcccggaccaatgctgagaagcaggtggaggagctgctgatggccatggagaaggtgaagcaggagctggagagcatgaaggccaagctgagcagcacccagcagagcctggccgagaaggagacccacctgaccaacctgcgggcagagaggaggaagcacctggaggaggtgctggagatgaagcaggaggccctgctggccgccatcagcgagaaggatgccaacatcgccctgctggagctgagcagcagcaagaagaagacccaggaggaggtggccgccctgaagcgggagaaggaccggctggtgcagcagctgaagcagcagacccagaacaggatgaagctgatggctgacaactatgaagatgaccacttcaagagcagccacagcaaccagaccaaccacaagcccagcccagaccagatcatccagcccctgctggagctggaccagaacagaagcaagctgaagctgtacatcggccacctgaccaccctgtgccacgaccgggaccccctcatcctgcggggcctgaccccaccagccagctacaacctggatgatgaccaggccgcctgggagaatgagctgcagaagatgacccggggccagctgcaggatgagctggagaagggggagcgggacaatgctgagctgcaggagtttgccaatgccatcctgcagcagattgctgaccactgcccagacatcctggagcaggtggtgaatgccctggaggagagcagctag

SEQ ID NO: 313864 - DNA, 3351 bp, Artificial Sequence
  derived and/or modified sequence
atgtacggcagcgcccggagcgtgggcaaggtggagcccagcagccaatcaccaggaagatctccaaggctccctcgaagcccaagactgggtcataggaggaccaacagcacaggaggatccagcggatctagcgtcggggggggctccggtaagacactctctatggaaaatattcagtccttgaacgccgcttatgccacctcaggccctatgtatctgtccgatcatgaaaatgtcggcagtgagacgcccaagtcaactatgacgctcggtcgtagtggcggacgactgccctatggcgtcaggatgactgcaatggggtccagcccgaacatagcatcttctggagtcgcctctgacaccatagccttcggagaacaccacctaccacctgtgagtatggccagcaccgtgccacattctctcaggcaagcaagggacaataccatcatggacctgcaaactcagctgaaggaggtgctgcgcgaaaacgatctactgagaaaggacgtggaggtcaaggaatccaaactgagctcaagcatgaactctataaagacattttggtcacctgaactgaaaaaagagagggccctcaggaaggatgaggcctccaagatcactatatggaaggagcaataccgagtagtgcaggaagagaaccagcatatgcagatgacaattcaggcactgcaggatgagttgagaatccaacgggacctgaaccaattattccagcaggacagctcgtcgcgcaccggagagccctgcgtcgccgaactgaccgaagaaaacttccaacgcctgcatgccgaacatgagcgacaggcaaaagagctgtttctgctgcgcaagactctggaggagatggaacttcggatcgaaactcagaagcaaaccctgaacgcaagagatgagagtatcaagaagcttttggaaatgctgcaaagcaagggactaagcgccaaggctactgaggaggatcacgagcggacacgccggcttgcagaggcagagatgcacgtgcatcatctggagagcctactcgagcagaaagaaaaagagaattccatgcttcgtgaggaaatgcacaggcgattcgagaatgctccagactccgctaagacaaaagcgctccagactgtcattgagatgaaggactcgaaaattagctccatggagcgagggctgcgggatctggaggaggagattcagatgctaaaatccaatggcgccctctccacggaggaaagggaagaagaaatgaagcaaatggaggtatatcggagccacagcaaattcatgaagaataaggtggagcaacttaaagaagagctgagcagcaaagaagcgcagtgggaggaactgaagaagaaggcagcaggactgcaggctgaaattggccaggtgaagcaggaactctcgaggaaagatacggaactgctggccctgcagacgaagctggaaactctgaccaatcagttttctgactccaagcagcatatcgaggtgctgaaagagtcgttaactgccaaggaacagagagccgccatcctgcagacggaagtggacgctctgagactgaggctggaggaaaaagaaaccatgcttaacaagaagacgaagcagatccaggacatggccgaggaaaagggcacccaggcaggagagatccacgacctgaaggacatgctggacgtgaaagagcggaaggtaaatgtgctccagaagaaaattgagaatttgcaagaacagctccgtgacaaggaaaagcagatgtcttccctgaaagagcgcgttaagagtctccaagctgacaccactaatacggatacagccctcacaacgcttgaggaagcgctggccgagaaggaaagaaccatcgagagactcaaagaacagagggacagagacgaaagggagaagcaggaggagatcgataattataaaaaggacttaaaagacctgaaggaaaaggtgagtctgctgcagggtgatctcagtgaaaaggaggcttctctgctcgatctgaaggagcatgctagctcattagccagttccggcttgaagaaagatagcagactgaaaacactggagatcgctctcgagcaaaagaaggaagagtgccttaaaatggagtcgcagctgaaaaaggctcacgaggcagccctcgaagcacgggcatctcctgagatgtccgatcgaatacaacatctggagcgtgagatcaccagatataaggacgagagttcaaaggcacaagccgaggttgaccggcttctagagattcttaaggaggtcgagaatgaaaagaatgataaggataaaaagatcgcggaactcgagaggcaggtgaaagatcagaataagaaagtggccaatcttaagcataaagagcaggtggagaagaagaagtccgcccagatgcttgaggaggcgaggcgcagagaggacaatttgaatgactcctcccagcagttacaagattcactgcggaaaaaggatgaccgcattgaagaactcgaagaggccctgagagaatcggtccaaatcacggccgagagggaaatggttctggcgcaggaggagtccgcacggactaatgccgaaaaacaagtggaagagcttctaatggccatggaaaaggtgaagcaggagttggagtccatgaaagcgaagttgtccagcacacaacagagcttggctgagaaagaaacacatctcacaaatctgcgagcagaaagacgaaagcacctggaagaagtattggagatgaagcaagaggctctccttgccgccatcagtgagaaagatgcaaacatcgcccttctggaactgtcgagctctaagaagaagacacaggaggaggtcgcagccctaaagcgagaaaaggacagactggtgcagcagctcaaacagcaaactcagaaccggatgaagttgatggctgacaactacgaagacgatcacttcaaaagtagccattccaaccagactaatcacaagccgagtcccgaccagatcattcaaccgctgctcgagcttgatcaaaacaggagcaaattgaaactatatattgggcatctaaccactctctgtcacgaccgggatccgctcatcctccgtggactgacacctccggcgtcttacaacctcgatgatgatcaggcagcatgggagaacgagttgcagaaaatgactcgtgggcagctgcaggatgagctggagaagggagagcgcgataatgctgaattacaggagtttgcgaatgcaatcctgcaacagattgctgatcattgtcctgacatcttagagcaggttgtgaatgcgcttgaagaaagctcatag

SEQ ID NO: 313865 - DNA, 9451 bp, Artificial Sequence
  derived and/or modified sequence
gtgctgtggcggcggcggcggcggtagtggcggcggcggcggtgcctgggcggcagcagcagcagtagcggcagccctgaggacggtgagacggccgcggcggcggcgacagcgcggaagtcgcgcgggacccagagcttcccccctgtcgctagtgctgaggctttcgcctttcctacccagcttcttgctcacggcccgggctgggctgggcagggcaacgcgcccccggggaggggcggagctgtagatatggtgtaagatacttcttcaagattggacagctggggaccttcttctgattaaccttaaaccaacttgtagccatagagacacctcacaaggttcccatttttgttgttgttgttgttgattttctgctcacacctttcctgaccttgcaaccatgtatggaagtgcccgctctgttgggaaggtggagccgagcagccagagccctgggcgttcacccaggcttccacgttcccctcgcttgggtcaccgtcgaaccaacagtacgggagggagttcgggaagcagtgttggaggtggcagtgggaaaaccctttcaatggaaaatatacaatctttaaatgctgcctatgccacctctggccctatgtatctaagtgaccatgaaaatgtgggttcagaaacacctaaaagcaccatgacacttggccgttctgggggacgtctgccttacggtgttcggatgactgctatgggtagtagccccaatatagctagcagtggggttgctagtgacaccatagcatttggagagcatcacctccctcctgtgagtatggcatccactgtacctcactcccttcgtcaggcgagagataacacaatcatggatctgcagacacagctgaaggaagtattaagagaaaatgatctcttgcggaaggatgtggaagtaaaggagagcaaattgagttcttcaatgaatagcatcaagaccttctggagcccagagctgaagaaggaacgagccctgagaaaagatgaagcttccaaaatcaccatttggaaggaacagtacagagttgtacaggaggaaaaccagcacatgcagatgacaatccaggctctccaggatgaattgcggatccagagggacctgaatcagctgtttcagcaggatagtagcagcaggactggcgaaccttgtgtagcagagctgacagaggagaactttcagaggcttcatgctgagcatgagcggcaggccaaagagctgtttcttcttcgaaagacattggaggaaatggagctgcgtattgagactcaaaagcagaccctaaatgctcgggatgaatccattaagaagcttctggaaatgttgcagagcaaaggactttctgccaaggctaccgaggaagaccatgagagaacaagacgactggcagaggcagagatgcacgttcatcacctagaaagccttttggagcagaaggaaaaagagaacagtatgttgagagaggagatgcatcgaaggtttgagaatgctcctgattctgccaaaacaaaagctctgcaaactgttattgagatgaaggattcaaaaatttcctctatggagcgtgggcttcgagacctggaagaggaaattcagatgctgaaatcgaatggtgctttgagtactgaggaaagggaagaagaaatgaagcaaatggaagtgtatcggagccattctaaatttatgaaaaataaggtagaacaactgaaggaggaactaagttcgaaagaggctcaatgggaggagctgaaaaagaaagcggctggtcttcaggctgagattggccaggtgaaacaggagctgtccagaaaggacacagaactactcgccctgcagacaaagctagaaacactcacaaaccagttctcagatagtaaacagcacattgaagtgttgaaggagtccttgactgctaaggagcagagggctgccatcctgcagactgaggtggatgctctccgattgcgtttggaagagaaggaaaccatgttgaataaaaagacaaaacaaattcaggatatggctgaagagaaggggacacaagctggagagatacatgacctcaaggacatgttggatgtgaaggagcggaaggttaatgttcttcagaagaagattgaaaatcttcaagagcagcttagagacaaggaaaagcagatgagcagcttgaaagaacgggtcaaatccttgcaggctgacaccaccaacactgacactgccttgacaactttggaggaggcccttgcagagaaagagcggacaattgaacgcttaaaggagcagagggacagagatgagcgagagaagcaagaggaaattgataactacaaaaaagatcttaaagacttgaaggaaaaagtcagcctgttgcaaggcgacctttcagagaaagaggcttcacttttggatctgaaagagcatgcttcttctctggcatcctcaggactgaaaaaggactcacggcttaagacactagagattgctttggagcagaagaaggaggagtgtctgaaaatggaatcacaattgaaaaaggcacatgaggcagcattggaagccagagccagtccagagatgagtgaccgaatacagcacttggagagagagatcaccaggtacaaagatgaatctagcaaggcccaggcagaagttgatcgactcttagaaatcttgaaggaggtggaaaatgagaagaatgacaaagataagaagatagctgagttggaaaggcaagtgaaagaccagaataagaaggtagcaaatctgaagcacaaggaacaggtggaaaaaaagaagagtgcacaaatgttagaggaggcgcgacgacgggaggacaatctcaacgacagctctcagcagctacaggacagtctccgtaagaaggatgacaggattgaagagctggaagaagcactaagagaaagtgtacagataactgcagagcgggaaatggtgctagcacaagaggaatcagccaggaccaatgctgaaaaacaggtggaggagttactgatggccatggagaaggtaaagcaggaactagaatccatgaaagcaaagctgtcctccacccagcagtctctggcagaaaaggaaactcacttgactaatcttcgggcagagagaaggaaacacttagaggaagttctggagatgaagcaagaagctcttctggctgccattagtgaaaaagacgccaatatagctctcttggagctttcgtcctctaagaagaagacccaagaggaagtggctgccctgaagcgggagaaggatcgtctggtacagcagcttaagcagcagacgcaaaatcgaatgaagctaatggccgacaactacgaggatgaccacttcaaatcctcccattccaatcaaacaaatcacaagccctccccagaccagatcatccagcccctcttagaacttgaccaaaatagaagtaaattaaagttgtacattggacacctgacaaccctctgccatgaccgagaccccctgatcctccgtggactcactccaccagcttcctataacttggacgatgaccaggcggcttgggagaatgagctgcagaagatgacccgggggcagcttcaggatgagttagagaaaggtgaacgggacaatgcagaactgcaggagtttgccaacgccattcttcagcagatagcagaccattgtcccgacatcctagagcaagtggtcaacgccctggaagagtcctcttgaccctgctttatggggaagcctgaggtagtcaacccaggagccaagaaaagagaactacgaggaacaggtgcccggaaccttcttggcaccaaacactacaaacttcatcccaacttgctcacttgaagaagtgtgattccagcaccgtttctacatctgccatcttactctgcctttctgctttggatgtggtctctacactaaccttcttgatgtccagggtagataaagggtcgaatctctctgaagaactgccacctggtcatcagcagtggagaactgtgggagctggtggctctgccctgacagagagccatggagcagaggagcctctcacctcctgtcctctgacatgagaatgaaaccaggaatggacttggagttcaacaggctgagaggatgcctccaatggaccagagagctgagtgttctaatatcacaataggtgctttctcctaaaagggcaaaaaacaatctcaaaaagattagaaaaagagaaggggggaagggaagagaaaatcgactcttctttttactgtctcttctgcttactttccacatgagatgctttgtaccggggagctgtgagcaggcctcacgatggcttgggagcactcgttctcccaaggtctgagtcttcatccagccctgcctgtctgtcgcagccttcctcactctgttcctcggccagttaacaagaagatggtgtgaggtgttctccaccagtctctcctgtttgagactgttgacgttatcatactgaggtgttagatcaaatatctctaattgaagaacatgtgaggttgaaagagcaccagccagggcaacatagcgtgaccctgtctctacaaaaaattaaaaagagaacatacaaagttgacatatgagaccctgttgtccccgcctgcagctttgccccagtaacagatgcccgttgctcttgggctggtttcccctgaacacctccaagaggctgcctgccttgccagcacccgtgtcctgagctcctgcagcccagtggctgctgaagttgtgatccctcactcaccctgctagctttgcccttgactcgtcttctctgaacctcagcctcgtgcattgcctggaaccttcttctagcataaatgaaggtttttcctcctacacacattccttcctcggttatttcattcagagaatatttatgaaatgcctactgtgtgcaagtcatccatccttgaaaaggccacttctcagtgagggagagatgtagtggattctgtgagacatacctgctggagttgaagcagtaaatagcatgtccttcccctccccgatcttaaggtgtgttttctagaaaagttccctaatggaattcatgagtttgggggtctcagtcacccgcttgcctgtaggattccatttgatgattctggatttttgctgtttgttattgcccttagaggggctctgagtatctacttgtgggtggccatttcctgacatctgcatgtacctcgtggaattcagccagcttcatgttgcaaatcagaaagctgaccccaagactgcaaatcaatgaaggtattggcattgttaaggacgtagcgtagacaacagcagtcataaataattaggcaggaacttaacccaaatctagttctttgaccacctctaccaccagaacccagcagacactcacatctcctgataagagttgctggactcgatgtttttgttttgcattttctcctctccttccccacttactcagagaatttaaagtctgtagagtcagcacagccccatcagtccaggaacttcccaccaccagcccttgactgtcccattaactgacatggtcagatttccagctccccctactccctgctgtgaaacaatccctctccctgtgagaggaaactgtggagcgtttcttatcgaaggttaaatggactctgctcataaacctcttactgagatgcttcctgatagccaggctggccagagaggggtgcaggggttagatagtaagtggtggtcgtttgtggtcagttacctcaattctgttcattgcagtgcccgtaaaccatgtagaaagctcccagcactgaaaggcaggagtgttagcatctcgctttatccaccataacgtaaagaactgcggtgtgataacagccttcacggggccacggtggaaccaagacagcaggcgaggccatgcctaaacaagtggtctggcacgggcactggccagctgctctctccaagcaggtggcccagatcccacccacgtggactttctcatcaggtgcagcgcctgccactctcagccactgggtgtgtcactctcctcttcatctcagcattctccatcacttcccctccagaaaaacggatggaaggaagccctctgtgacactgcttctgagaagaagcatttccgggaccgatatcatctgtctggtctctgtgaacagcaaggaatcttcttgaccgttcttgggcactggaggctggctaggagttcagtaataaacgtggccttcgtgctgtagggcagagtggatgcagtttgtagctttcagagtgtctcattgagtctagatcattgaaccaacacttaaccaaatgtcccactcccatcacactaggacttgtcattccatgcccctctcctagtggtcatggtttcatatgggcatacaactgctactgaagttatatagccttgaaaactcagtgcaggttgcccttaattttccccaaacccctccatcggcaagtctagttgccctttagcacctaaagatctgcaccccaaaccaatgtcaccataaagagggcacgaagaagagtgggtgtgatcccaacggggttttgtaactgaagaagcccagtgtgagcttctcatcttttcatatacctctaacccccggtactcattgaatcattgatgaggtatctcaattgagatttgcaaggactttgataccatttgaaatggaaaaattttgaacgggctttaacatgtttaagaaatatggatggggccggccacagtggctcacgcctgtaatcccagaactctggaaggctgaggcaggcggatcacctgagatcaggagttcgaggccagcctggccaagatggcaaaaaccccgactctactaaaaatacaaaattagccaggcgtggtggcgtacgcctgtaatcccagctactcaggaggcaggagaatcgcttgagcctgggaggcagaggctgcggtgagccgagatcgtgtcactgcactccagcctgggtgacagagactccatttaaaaaaaaaaaaaaaaaatatatatatatatatatatatatatatatggatgggaatcaccaaattcatctcagctctaaccttttaacctttgtccttgcactttacaatctaaagatctacctgtggctctcagacttcctcacacttgggttttagaaataacttgtaaagcagactggacccaaggccgccttcagtgtcaagaagggcattgtgacttgcccctcaatttctgtccattgaagtctggttttccatgaggaacttgcgggctcacccacccccagagtgagagaagaggaaggcgaagtcatcacagacacggtcttagccacctgctgaactaatccctccgctattgagggtcagggttgtgaggcaaccatcatgtgtcaccccaaaatataaatgtttctgagccgcccatccactggcatttggatttgctgccagagtcctgttcctcccagaaccatcccgccctcctgttgaccatgttacttgagtgtaggcccggtgtcaagaccctcagagtctttgaggaaagagccaagcagagaagaccgctgcgtggagtgtgacaccacatggcatttctcaagcccagcggaccctgtgtcagcaaataccagtaatttaacatctgctcctggcctcctcttcacctgcctgggttcggaactgaggaggaaggatgagaagagactgcaatgcagcaggcaccctctgcagagtgaggccgcccgtccatcactgccagccctgggctgctcaggaggggacgtgaaccactcaaaggaatgtcttaaagaggatctggagtttcccccatgcaaattagggaagaattaggcaagaaaagacatacattacagggaaatccttctgaacaaaatggctgtcttcacctactcttcttgcaagaaaagacatacattacagggaaatccttctgaacaaaatggctatcttcacctactcttcagcaaaaaccgtctccagactttttagtgtcaaaaatgtaaccaactgtctcctgattttttccaatgtgtttggcaagtgctgtggccctgttgtaggtacttctcctgactcttgggggagaagtggttttagggattgatttgggggagcgggtttttgtcccatcccacctcctctcttctttctctgcttgtcgatattgtctgtgtgattcagagaattggggcagttacattgtgtctgttgttgagattattaaaagattaaaacgtagttgtagaaatgaaaaattaaacagctgtgttttaaaaatgcaaaccaatatcttgttaataaaggaattcaagctatggggcagccacactcccctcctcccaggctggcataggtggccctgggctggcggcttaggaagcatggagcacacttagggtagtgcctgcctgggcaagagacacctgccgagcaaaaggaacgagaatctggggctcagagcctcgcagttgtgccaggattttcctatacatgttcaggacctctgggtagaggtttcacagtttgtgaccccataaccaccctcacccgacgtgggttctagctcagtgtgcctaatactgcatggtaacctgggcttgaccctgaagcccctgcctggcaggccacaggacctctcctgcccacttggtgctatctcttccagtgaccacccagcacgggtgagcactggccagcctggagcctgcaatccaggtggaacagactgtcctccatgtcagttccttctggcttcaggccctcaattatttccctttgagcttttttagaccctagatctcctaggcccaggctctctcttgaccccagagaagccactgtcaggaaaggaagtgaaccctactgaagccagagaattcaccccggccaaagcaggccctctgggtccagcccctcattccacaccacgccagtattgcatccatctactgcagctacacatcctgagggcagcaccacccactctggcctgctggcccatcgcaggactagcccaggcacctgccgggcattgcaggatatccagtggggcctgtgactgctccctgatgcgtcagaagagaagtgttgcactttagtggaggagctgaggagcacctgcccccttgtagcttgagttccttttggtaacagtagcagcctccatggtggtgtctgggatgcacgtgcacccgctgccttcagctgtatgtgtgtgttcctgctggagttgtgttactgacaggataatgacattacaaagaaattgtgttatattcaactttgccttgataattattgtaaacactttgttcattttttcttttttattcacaaactaaatccaccaggaaattataaagttattt

SEQ ID NO: 313866 - DNA, 3351 bp, Artificial Sequence
  derived and/or modified sequence
atgtacggcagcgcccggagcgtgggcaaggtggagcccagcagccaatccccaggaaggtcaccccggctgccccgctcacctaggctaggccacagacgcactaactctactggcgggtcatctggttcatccgtcggggggggctcaggaaagacactgtctatggaaaatattcagagtctcaacgcagcttacgctacttctggcccaatgtacctgtccgatcatgaaaatgtcgggagcgagaccccaaaatctactatgactctgggacgttctggcggcaggctcccctacggcgtgagaatgacagctatggggagctcacctaacattgcaagtagcggggtggccagcgatacgatcgccttcggcgagcaccacttgcctccagtgagcatggccagcaccgttcctcacagcctgaggcaggcgagagacaacacgataatggacctccaaacacagcttaaagaggtcctgagagaaaatgatctgcttagaaaggatgtggaagtgaaggaaagcaagctgtcaagtagcatgaactctatcaagactttctggagccccgagcttaagaaggaaagggctcttcgtaaagatgaggcatcaaaaattaccatttggaaggagcagtatcgcgtcgttcaggaagaaaaccagcacatgcagatgactattcaagccctacaggacgaactgagaatccagagagacctgaaccagttgtttcagcaggatagcagtagccgcaccggcgagccctgtgtagcagagctcaccgaggagaacttccagagattgcatgccgaacacgaacggcaggcaaaggagctgtttctgcttcgcaaaaccctggaggagatggagctgcgaattgagactcagaagcagaccctgaacgcgcgggatgaatctattaaaaagctgctcgagatgctccagagtaaagggctctcagcaaaggctacagaggaggatcacgagcgaactcgcaggttggcggaggccgaaatgcatgtgcatcacttagagtccctactcgagcagaaagaaaaagagaactctatgctcagggaggagatgcatcgcagatttgagaatgcacctgattcagccaagaccaaggcactgcagacggttattgaaatgaaggacagcaagatttcatccatggaaagagggctccgggacctggaggaagagatccagatgctgaaaagcaatggcgcactatctacagaggagcgtgaagaagaaatgaagcaaatggaagtgtatcggtcccactcaaagttcatgaagaataaagtcgaacagctgaaagaagaacttagttccaaggaggcgcaatgggaagaactgaagaagaaggcagccggcttgcaagcggagatcgggcaagttaagcaggaactctcccgaaaggacacagaactcctggctttgcagacaaaattggagaccctgactaaccagttcagcgactccaaacaacacattgaggtgttgaaggagagtttgacggccaaggaacagcgggccgctatcctgcagacagaggttgatgcactccgattacgtctggaggagaaagaaacaatgctcaacaagaagactaagcagatacaggatatggcagaagaaaaggggactcaagctggcgagatccatgaccttaaagacatgctggacgtaaaggaacgtaaagttaatgtactacaaaagaagatagagaacctgcaggagcaactgagggataaagaaaagcagatgtcaagcctcaaggagcgtgtcaaaagtctccaagccgacacaaccaacacagacacggcgcttaccactcttgaagaagccctggccgaaaaagagcgtactatcgagcgtctgaaggaacagagagatcgcgatgagagagaaaagcaggaagagatcgataactataagaaggacctgaaggatctgaaggaaaaggtttctttgctgcagggtgacttgtctgaaaaagaggctagtctcctagacttgaaagaacacgcttcatccctcgcttcatctgggctgaaaaaagattcccgcctgaagacacttgagattgccctcgagcagaagaaggaggaatgcctaaaaatggagtcacagctaaagaaagctcacgaggcggcacttgaggccagggccagtccagaaatgagcgacaggatccaacacttggagagggagattacccgctacaaagatgagtcttcaaaagcacaggctgaagtcgacaggttgctggagatccttaaagaagtagagaatgagaaaaatgacaaggacaagaaaatagcggagctggaaagacaagtgaaggatcaaaacaaaaaggtagccaacttgaagcataaggagcaggtagagaaaaaaaagagcgcccagatgctcgaggaagccaggaggagagaggataacttaaatgattcatcacagcagctgcaagactctctgagaaagaaagatgataggatcgaggagttagaggaggcactcagagaaagtgtccagatcacagctgagagagagatggtcctggctcaagaagaaagcgcccgcaccaacgccgaaaagcaagttgaggagctgctgatggccatggagaaagtgaagcaggaattggagtcaatgaaggccaagctgtcctctacccagcagtcactggctgagaaggaaacccacctgaccaacctgcgggccgagcgcagaaagcacctggaagaagtgctggagatgaagcaggaagccttactggcagcaatatctgaaaaagacgcaaacatcgctttgctagagctgtcttcaagcaagaaaaaaacccaagaagaggtggccgccctcaagcgagaaaaagaccggctggttcagcagctgaagcagcagacccagaatcggatgaaactcatggcagacaattatgaagacgatcacttcaagagttcgcacagcaaccagacaaaccacaagccctcaccggaccaaataattcaaccacttttggaacttgaccagaacaggtcaaagttaaaactttacatcggccatctgaccaccttgtgtcacgatagggatcctctgatccttagaggacttacaccccccgccagttacaacctcgatgatgaccaggccgcatgggaaaacgagttgcagaagatgactagaggccagctacaagatgaacttgagaagggcgagagagacaatgccgaactgcaggaatttgctaacgcaatcttgcagcagattgccgatcactgcccagatatcctagagcaagtggtcaatgcccttgaggaaagctcttag

SEQ ID NO: 313867 - DNA, 3351 bp, Artificial Sequence
  derived and/or modified sequence
atgtacggcagcgcccggagcgtgggcaaggtggagcccagcagccagtcccctggaaggtccccacgacttcctcgaagtccccgactgggccatcgccgaaccaattcaacgggcgggtcatcaggatcctcagtcgggggaggaagtggcaagacactgagcatggagaatattcaatccttgaacgccgcatatgcaacaagtggcccaatgtatctcagcgatcacgaaaacgtgggatcggaaacccctaagagcactatgaccttgggccgctccggcgggagattaccatacggggttcgcatgaccgccatgggcagcagcccgaatatagccagcagtggggtggcttcagatacaattgcattcggcgaacatcatctgccacccgtgtcaatggcatctacggtgcctcacagcctcagacaggcccgagataacacaatcatggatctgcagacacagctgaaagaagtgctacgcgagaatgatctgcttaggaaggacgtggaagtcaaagagagcaagctctcaagtagtatgaactctatcaagactttctggagtcccgaattaaagaaggaacgcgccctgcggaaagacgaagcctccaagatcaccatctggaaggagcaatatcgtgttgtacaggaagaaaatcagcacatgcagatgactatccaggcactccaggatgagttgcgtatccaaagagatctcaatcagttatttcagcaggactcctcctcccgcaccggagaaccttgtgtagcagagctaacagaggagaatttccagagactgcatgcagagcacgaacgccaggctaaggaactgttcctactgaggaagacattggaagaaatggaactgcgaattgagacacagaaacagactcttaacgcccgcgacgaaagtataaaaaaactgttggagatgctgcagtctaagggcctctcagctaaggctaccgaggaggaccatgagagaacccgccggttagccgaagcggaaatgcacgtgcaccatctggaatcccttttggagcagaaggagaaggaaaattcaatgctgagggaggagatgcaccgcaggttcgaaaatgcccctgacagtgccaaaacaaaggccctgcagaccgttatcgagatgaaggatagcaagatcagcagcatggaacggggtcttcgagacctggaggaggaaattcagatgctgaaatccaatggggctttgtcaacggaagagcgggaagaggaaatgaagcagatggaggtgtatcgttcccacagcaagttcatgaagaataaagtcgaacagctgaaggaagagctatcgtccaaggaggcccagtgggaagaactgaagaaaaaggccgccggcctgcaggccgagatcggccaggtgaagcaggagctcagccgcaaagatacggaactgttggctctccaaaccaaactcgagactctcactaaccagttctccgactcgaagcagcacatcgaggtacttaaggagtcactcacggcaaaggaacaaagggccgccattctccagaccgaagtggatgccctccggctgcgtctggaagaaaaagagaccatgttgaacaaaaaaaccaagcagattcaggacatggccgaagagaaaggtactcaagctggcgaaatccacgatctcaaagatatgctggacgttaaggaaaggaaagtgaatgtgctccagaaaaagattgagaacctgcaggaacagctgagggacaaggaaaaacagatgtcctcactgaaggagcgggtgaaaagcttacaggctgacacaaccaataccgacacagccctgacaacgctcgaggaggcgctggctgagaaagaacggaccatcgaacgtctgaaggaacaaagggatcgagatgagagagaaaaacaggaggagatcgacaactacaagaaagacctgaaagatcttaaagagaaagtctcccttttgcagggagacttgtccgaaaaagaagcttccctgctggatttaaaggagcacgcgtcctcccttgcaagctctggtttgaagaaagacagccgactcaagacactggagatcgctctcgagcaaaaaaaggaggagtgtttgaagatggaaagtcagctcaaaaaagcccatgaggccgctctggaagcaagggcttctccggaaatgtctgatagaattcagcatctggagagagagattactcggtacaaagacgaatcctcaaaggcccaagccgaagtcgaccgactactggaaatcctcaaggaagtcgagaatgagaagaacgataaagataaaaaaattgccgagctggagaggcaagtgaaggatcaaaataagaaagtggccaatctaaaacacaaggaacaagtggaaaaaaagaaatccgcacagatgctcgaggaagcccggcgcagagaagacaacctgaacgactcctcccagcaattgcaggatagccttaggaagaaagatgataggatagaagaactcgaagaggcattgagagaatctgtgcagatcaccgctgaacgggaaatggtgcttgcacaggaggagagcgccaggaccaatgccgaaaagcaggtagaggagctgctgatggccatggaaaaggttaaacaggagctggagtcaatgaaggctaaactgtccagtacccagcagtctctcgcagaaaaggagacacacttaaccaacctgagagccgagcgccggaagcatcttgaagaagtattggaaatgaaacaggaggccctcctggccgccatctcagaaaaagacgcaaatatcgctctgctcgagctcagttctagcaagaaaaaaactcaggaggaggttgccgctctgaagagagagaaagatcgtctcgtgcagcagctgaagcagcaaacccaaaaccgcatgaagttgatggccgataactacgaagacgaccacttcaagtcttcgcacagtaaccaaacgaaccacaaacctagcccggaccaaataatccaaccactactagagttagatcagaataggagcaagctcaagctgtacatcggacatttaacaacattgtgtcacgacagggaccctctaatcctgcgtgggctcacacccccagcatcatacaacttggacgacgatcaggccgcttgggaaaatgaactgcagaaaatgacgcggggccagctgcaggacgaactcgaaaaaggcgagagagacaacgccgagttacaggaatttgccaatgccattctgcagcagatcgcagatcactgcccggacatattagagcaggttgtgaatgccctggaggaaagttcttag

SEQ ID NO: 313868 - DNA, 3351 bp, Artificial Sequence
  derived and/or modified sequence
atgtacggcagcgcccggagcgtgggcaaggtggagcccagcagccagagccctgggaggagtccacgcctgccccgcagccctcggttgggtcaccgcagaaccaactctactgggggatccagcggtagttccgtgggaggtggatctggaaagacactcagcatggagaatatccagtccctgaacgcagcctacgcaacttctgggccaatgtatctttccgatcatgaaaatgtcggcagcgaaactcccaaaagtacgatgacactaggtcgatcaggaggaaggctgccctacggcgtgcgcatgacagcaatgggatctagtccaaacatcgcgtcatcaggggtggcctctgatacaattgccttcggggagcaccatctgccgcccgtctcaatggcctccacggtaccccactctctgcgccaggcgcgcgataatactatcatggacctccaaacccagctcaaagaggttctaagagaaaacgacctgttgcggaaagatgtagaagtcaaggagagcaagctgagctcctctatgaattccattaagaccttttggtcacctgagctgaaaaaagaaagggctctcaggaaagacgaggccagtaaaatcacaatttggaaagagcaatatagagtagttcaggaggagaaccagcacatgcagatgactatccaggcactgcaggatgaattacgcatccagagggacctgaaccaactctttcagcaagattcctcctcgagaaccggcgaaccttgcgtagctgagcttaccgaagaaaactttcaacgtctccacgcagagcacgaaaggcaggctaaggagctgttcctactcaggaaaaccctggaggagatggaactcagaattgaaacccagaaacagactttgaacgcgagggacgagtcaatcaaaaagttactagaaatgctgcagagtaagggcctctcagccaaggccaccgaggaagatcacgaaaggacccgaaggctggcggaggccgagatgcatgtccaccacctggaaagcttgctcgaacagaaggagaaagagaactccatgctgcgcgaggaaatgcatcggagattcgagaacgccccagacagtgcaaagacgaaagcacttcagactgttatcgagatgaaagattctaagattagcagtatggagaggggactccgggacctggaagaagaaattcagatgctcaaatcaaatggcgcattgagtaccgaggaaagggaagaagaaatgaaacagatggaggtttatcggagccacagtaaatttatgaaaaataaggtcgaacagctgaaagaggagctgtcctccaaggaagcacagtgggaggagctcaaaaaaaaggctgcggggttacaggccgagatcgggcaggtaaagcaggagctgagccgaaaggacacagaactgctggctctgcagactaagctggagacgctgacaaaccaattctcagattcaaaacaacacatcgaagtgttgaaggaaagccttacagccaaggaacagagggccgctattctgcagactgaggtggatgcgctccgactccgcctggaagagaaagagacaatgctcaacaaaaaaacaaagcagatacaagacatggcagaagaaaaaggcacccaggctggggaaatccacgatctgaaagacatgctggatgtgaaggaaagaaaagtaaacgtgttgcagaagaaaatcgagaatcttcaagaacaactccgggacaaggaaaaacagatgagttcattaaaagagagagtaaagtctcttcaagccgatacgacaaatactgacacggccttgaccacactggaagaagccctggctgagaaggaacggaccattgagagactcaaagaacaacgggaccgggacgagagggagaaacaggaggagatcgataactataagaaggacttaaaggatctgaaagagaaggtttccctgctgcagggggatctgtctgagaaagaggcctctctgctggatctgaaagaacatgcatcctccctggcttcttcaggcctgaagaaagacagcaggctcaaaacgctggaaatcgccctggagcagaaaaaggaagagtgcctgaagatggagtcacagctaaagaaagctcacgaggcagccctcgaagctagagcttccccagaaatgtccgaccggatccagcatctcgagcgagagattacacggtataaagacgaatcttccaaggcccaggccgaggtcgaccgactgttagaaatacttaaggaagtcgagaacgagaagaacgataaggacaagaagatcgcagagctggagcgacaagtcaaggatcagaataaaaaagttgccaacctcaagcataaggagcaggtggaaaagaaaaaatccgcccagatgttagaagaagcacgcaggagagaagacaacctcaatgactcttctcaacaacttcaagactctctgcgtaagaaggatgacaggattgaggagcttgaggaggcccttcgggagtccgtgcagatcacagccgaacgcgaaatggttctggcacaggaggagtcggccaggacgaatgctgaaaagcaggttgaagagctgctgatggcaatggagaaagtaaaacaggagctggaatccatgaaggctaagcttagttccacccaacagtctttggccgagaaagagacccacctcacgaatcttagagcggaaaggagaaagcacctcgaagaggttctggaaatgaagcaggaggcccttctggccgcaatctccgaaaaggatgccaacatagctctgttagagctctcatccagcaaaaaaaaaactcaggaggaagtggccgctctaaagagggagaaggacaggttggttcagcagttgaaacagcagacccagaaccggatgaaactcatggcagataattatgaggatgaccactttaagtcttcccactcaaatcagacaaaccacaagccttccccagatcagatcatacagcctctcttggagctggaccaaaatcgctctaaacttaagctttacattgggcacctgacaacgctgtgccatgaccgtgatcccttgatcctcaggggattaacaccaccagcgagctataacctcgatgacgaccaggcagcatgggaaaatgagctccagaagatgacccgtgggcaactgcaggatgagctcgagaaaggggaaagagataacgccgagctgcaggagttcgctaatgcaatcctgcaacagattgccgaccactgcccagatatcctcgagcaggttgtgaatgctctagaggaatcttcctag

SEQ ID NO: 313869 - DNA, 3351 bp, Artificial Sequence
  derived and/or modified sequence
atgtatggttcggcgaggtcagtggggaaagttgagcccagctcccagtcaccaggcagatcccctcgactcccacggagtccgaggcttgggcacaggcggacaaattcaaccggaggttcctctggcagctcagtcggcggtgggtccgggaagacattatcaatggagaatatccagtcccttaacgcggcatacgccaccagtggccctatgtacctgtcagaccacgaaaacgtagggtccgaaacacccaaaagcaccatgacactcggacggtctggtggaagactgccctatggcgtaaggatgaccgctatgggcagtagcccaaatatcgcctcttccggcgttgcctcagataccatagcgttcggagagcatcatctcccacccgtgtctatggcgtccacggtgccccatagcctccgacaagcgagggacaacactataatggatcttcaaacgcagctgaaagaagtcctgcgcgaaaacgatctccttagaaaagacgtcgaggttaaggaatccaagctgagtagtagtatgaactcaatcaagaccttctggagccctgagctcaagaaggagcgagctctacggaaggatgaggcatccaagattaccatctggaaggagcagtaccgagtggtgcaggaagagaaccagcatatgcaaatgacaatacaggcgctccaggacgaattgcgaattcagcgcgatctgaatcagttgttccagcaggattcatctagccggactggggagccttgtgtggccgagcttaccgaggaaaactttcagcgtcttcacgccgagcacgaaagacaagctaaagagctttttttgcttaggaagacccttgaggaaatggaactgaggattgagacccagaagcagaccctcaacgcaagggacgagtctataaagaagctgctggaaatgctgcagagcaaaggactgtcagctaaagccacagaggaggatcacgagcgcactagaagacttgccgaagcggagatgcatgttcatcacctggaatctttactcgaacagaaggagaaggagaacagcatgttgagggaggagatgcacaggcgcttcgaaaacgctccagactccgctaaaacgaaggccctgcagactgtgatagagatgaaagactcaaagattagctccatggagaggggccttcgcgatctggaagaagaaatccagatgctgaagtctaacggcgcactgtctacagaggaaagggaggaggagatgaagcagatggaagtgtaccgatcacacagcaaattcatgaagaacaaagtagaacagcttaaggaggagctttcttcgaaggaagcccagtgggaagagctgaaaaagaaagcagccggactccaggcagagattggtcaggtcaagcaagaactctctcgtaaggatacagaactattagctctgcagacgaagctcgagaccctgacgaatcagttttctgattctaagcagcacatagaggtgctgaaagagagcttaacagcaaaagagcagcgggcagccatcttgcaaacagaggtcgacgcattacggctgagactggaggaaaaagagaccatgctcaacaaaaagactaagcagattcaggacatggctgaggaaaagggaacccaggcaggcgaaatccacgacttgaaagatatgcttgatgtcaaagaaaggaaagtcaacgtgctgcagaaaaagatagaaaatttgcaagaacagttgagggataaggagaagcagatgtcttcacttaaggagcgggtgaagtcactgcaggcagacacaactaataccgatacggccctcacaacgctggaggaggctctggccgaaaaagaaagaacaattgagcgccttaaggagcagcgagatcgggacgaacgcgagaagcaggaagaaatcgacaattataagaaagacctgaaggacttaaaagaaaaggtgagcctcctgcagggcgacctttccgagaaagaagcttctcttctcgatctcaaagagcatgcttcctctctagccagctcgggtctgaagaaggatagtcgccttaagaccctggaaatcgccttagaacagaagaaggaggaatgcctgaaaatggagagtcagctcaaaaaggcccacgaggctgcccttgaagcccgtgcaagccctgagatgtcagaccgcattcagcacttggagcgcgaaataactagatataaggatgaatcttctaaagcccaggctgaggttgacaggctgcttgagattttgaaggaagtggagaatgagaaaaatgacaaggataagaagatcgccgaactcgaaagacaagtgaaagaccagaacaagaaggtcgccaacctcaaacacaaggagcaggtggaaaaaaaaaagtctgcccagatgcttgaagaggcccgaagacgtgaggataacctcaatgattcctctcagcagttacaagattctctccggaagaaggatgacagaattgaggagctggaggaagcgcttagagaatctgttcagatcaccgccgaacgggaaatggtgctcgcccaggaagaaagtgccagaacaaatgctgagaaacaggtcgaagagttactgatggctatggaaaaggtcaaacaagagctggagtccatgaaagcaaaattgagcagtacacagcaaagcctggccgaaaaagaaacgcaccttactaatctccgcgctgaaaggcgcaagcatctggaggaggtgttagaaatgaagcaggaggcccttctggcagccatatctgaaaaggacgcgaatatagctcttttagagctttccagcagcaaaaaaaagactcaggaggaggtagctgcacttaaacgagaaaaagatagattagtccagcaactcaagcagcaaacccagaatcgcatgaaactgatggccgataattatgaggatgaccactttaagtcttcccactcgaaccaaaccaaccacaagccaagcccagaccagattatccagcctctcctcgagttggaccagaatcgatcaaagctcaaactttacattggtcacttgactacactgtgccacgatagggaccccctgattcttcggggacttactcccccagcctcgtataacttggacgatgatcaggccgcttgggagaacgaactgcagaagatgactaggggacaactgcaggacgaactagagaaaggtgagagggataatgccgagctgcaagagtttgctaatgccattttgcagcaaatcgctgatcattgccccgacatacttgaacaggtggtgaatgcccttgaggagagtagttag

SEQ ID NO: 313870 - DNA, 3351 bp, Artificial Sequence
  derived and/or modified sequence
atgtatggcagcgcccgatctgtgggcaaagttgaaccgagctctcagtcgcccggacggagcccccgattaccccgatcccctcggttaggccacagacggactaattctaccgggggtagttctggatcctccgtgggtggcggaagcgggaagacactctctatggaaaatattcaatcactgaacgcagcttatgcaacgtccggaccgatgtatcttagcgaccacgaaaatgtgggttctgaaaccccgaaaagcaccatgaccctgggacgctcaggtggccgattgccgtacggagtgaggatgaccgcaatggggtccagcccaaatattgccagcagcggggtggccagtgatactatagcttttggtgaacaccacctccccccagtgtccatggcaagcactgtgccccatagcctgcgtcaggcaagagataatacaatcatggatctgcaaacccagctcaaggaagtgttgcgagagaacgatctgctgcgtaaggatgtggaagtaaaagagagtaaactaagctctagcatgaactccattaagaccttctggagccccgaactcaagaaggagcgggctctgcggaaggatgaggcatcgaaaattacaatctggaaggaacagtacagggtggttcaagaagagaaccaacacatgcagatgaccattcaggccttacaggatgaactccgcatccagcgcgacttaaaccagttgtttcagcaggactcctcttcccggactggtgagccctgtgtggcagagcttactgaggaaaactttcaacgcctacacgcggaacacgagcgccaggctaaggagctcttccttctgaggaagactcttgaggaaatggaactgcgaatagaaacccaaaagcaaaccctcaatgcaagagatgaaagcatcaagaagctgctcgagatgctgcagtcaaagggtctgtccgccaaggcgactgaggaggatcacgaacgcaccaggcgcctcgctgaagctgagatgcacgtccaccacttggagtctcttttggagcaaaaggagaaagagaacagcatgctgcgcgaagaaatgcaccggcgtttcgaaaacgcccctgattcagcaaaaacaaaggccctccaaactgtgatcgaaatgaaggactcaaagatctccagcatggagagggggttgcgagatctcgaagaggaaattcaaatgttgaagtcaaacggggctttgagcaccgaggagcgggaagaggagatgaagcagatggaggtataccgctcccacagcaagtttatgaaaaataaagtcgagcagctcaaggaggagctttcaagcaaagaagcacaatgggaagaactgaaaaagaaagcggcagggctgcaggcagagattgggcaggtcaaacaagaactgtctcgaaaagataccgaactgttggccctgcagactaagcttgaaaccctgaccaatcagttctccgacagcaaacagcatatcgaggtgttgaaggagtctttgaccgccaaggagcagcgcgctgccatattgcagaccgaagtggacgcgttgaggctgcgcctagaggagaaagaaacaatgctaaacaagaagacaaaacagatccaggacatggcggaggagaagggcactcaagccggagaaattcacgatctgaaagacatgctcgacgtgaaggagagaaaggtgaacgtactgcagaaaaaaatagaaaatctgcaggagcagctccgtgacaaggagaagcaaatgtcaagcctaaaggaaagagtgaagtccttgcaagctgacacaacaaatacagacacagccctaaccaccctggaagaggccttggcagagaaagaaaggactattgaaagattgaaggagcagcgggaccgagatgaacgggagaaacaagaggagatagacaactacaagaaagacctgaaagatctgaaagagaaggtttcactgttacaaggcgacctatcggagaaagaggcttccctgctggacttgaaagaacacgcgtcatcccttgccagcagcgggttgaaaaaagattctagactgaagacccttgaaattgcactagagcaaaagaaagaggaatgtctcaagatggagagtcagttgaaaaaggcccatgaagccgctctcgaggcccgagcctccccagagatgtctgatagaatccagcacctggaacgggagataacacggtacaaggacgagtcttctaaagcccaggctgaggtcgaccgtctcctagagatactgaaggaggttgagaatgaaaagaacgataaagataagaagatcgctgagcttgaaagacaggtgaaggaccagaacaagaaagtagcaaatctgaagcacaaagagcaggtggagaaaaaaaaaagcgcccaaatgcttgaagaggctcgcaggcgggaggataacctaaatgattcatcccagcagctgcaggatagtttaagaaagaaggacgatcggattgaggagctcgaggaagcactcagggagtcagtccagatcactgctgaacgggagatggtactcgcccaagaggaatctgctcgaaccaacgccgaaaagcaagtagaggaactcctgatggccatggaaaaggtgaagcaagaactggagagcatgaaggctaagctctcctccacacaacagagtctggcagagaaagagacccatttgacaaatctgagggctgagcgcagaaaacacctggaggaggttttggagatgaaacaggaggccctacttgcagccattagcgagaaggacgcaaacatcgctctgctggaactatcttcctccaaaaagaagacgcaagaggaggtcgccgctcttaagagagaaaaagatcgactggtgcagcaattgaagcaacagacacagaatcggatgaaactgatggcggacaactacgaagacgaccacttcaagtctagtcactctaatcagaccaatcacaagccctctcctgaccagatcatccagccacttctggaactcgatcagaatcgctcaaaactgaagttgtacattggacacctcacaaccctgtgtcacgacagggatccgcttattctccggggactgactcctcccgcatcatataacctggacgatgatcaggccgcttgggagaatgaactccagaaaatgactagggggcagcttcaggatgagctggagaagggggagcgcgacaacgccgaattgcaggaatttgccaacgcaatcctgcagcaaattgctgaccactgccccgacattctggagcaggttgtcaatgccttggaggaaagcagctag

SEQ ID NO: 313871 - DNA, 3351 bp, Artificial Sequence
  derived and/or modified sequence
atgtatggttcagccagaagtgtcggaaaggtggagccttcatcgcaaagccccggacgctccccaaggctgcctcggtctcctcgcttaggacaccgcagaaccaattccacagggggatcctcaggcagctcagttggcggaggcagtgggaagactctgtctatggagaacatccagagccttaacgcagcttatgccacatcgggcccaatgtacctctctgatcacgaaaatgtcggaagtgagactcccaagagcaccatgaccctggggcgatccggcggtcggctcccatacggagtccggatgactgccatgggaagttcgcccaacattgccagctcaggggtggctagtgacacgattgcatttggcgagcaccatttgcccccagtttccatggcgagcacagtcccccatagcctgcggcaggcaagggacaatacaatcatggatctacaaacccagctcaaggaagtgctaagggagaacgaccttctaagaaaagacgtggaggtgaaggaatcaaaactctctagctcaatgaactcgattaaaaccttctggtctcctgaattgaagaaggagcgggctctgagaaaagacgaagcaagcaaaatcacaatttggaaggaacagtaccgggtggtgcaagaggaaaaccaacacatgcagatgaccatccaagcactccaagacgagctgcggatccagagggatctcaaccagctctttcagcaggactcgagctcccggacgggtgagccttgcgtcgccgagctgactgaagagaacttccagaggctacacgctgaacatgaaaggcaggccaaggagctgtttcttttaaggaaaactctggaggagatggaactgagaattgagacacaaaaacagacactgaacgctcgggatgaatccattaagaaactgctggagatgctgcagagtaagggactcagcgctaaagcgaccgaggaggatcacgagcgcactagaaggctggctgaagccgagatgcacgtgcaccacttggaatccctgttagaacagaaggaaaaggagaatagcatgctaagggaagaaatgcatcgtagatttgagaacgctccggacagcgccaaaactaaggccctacagacagtaatcgagatgaaggacagcaaaataagcagtatggagcgaggcttgagagatctagaagaggaaatccagatgcttaagtccaacggtgcactgtctactgaggagcgggaggaagagatgaagcagatggaggtgtatcgtagccattcaaaattcatgaagaataaggtcgagcagctgaaggaggaactgagcagcaaggaagcccagtgggaggagctaaagaagaaggccgctggcctgcaggcggaaatcgggcaagttaaacaggaactgtccaggaaagataccgaattactggcgctgcaaaccaagctggaaaccctcactaaccagttttcagattccaaacagcacatcgaggtcctaaaggagagtttaaccgctaaggaacagagagctgccatactgcagacggaggtggatgctctgagacttagactcgaggagaaagagaccatgctgaataaaaagaccaaacagatccaggacatggcagaggagaaaggtacccaggccggagagatccatgatctgaaggatatgctggatgtgaaagagcggaaagtgaacgtgcttcagaagaagatcgagaatctgcaagaacagcttcgcgacaaggaaaaacaaatgtcatcactgaaagagcgtgtaaaaagtctccaagcggatactacaaacacagatacagctttaactacactggaagaagcactggccgaaaaggagcggactatcgaacgattgaaagaacagcgcgatcgggatgagcgagaaaaacaggaagagatcgataattataagaaagatcttaaggacctgaaggagaaggtgtcgctcctccaaggcgatctgagcgaaaaggaagccagcttgctggacctgaaggagcatgcttcctcgctggctagctctggacttaaaaaagatagcaggttaaagactttggaaatagcgttagagcagaaaaaagaggagtgtctaaagatggaaagtcaactgaagaaggctcacgaagccgctctcgaggcaagggctagcccggaaatgtcagaccggatccagcacttagagcgggagatcactaggtacaaggacgagagttccaaggctcaggcagaagtcgaccgacttctcgaaatactaaaggaagtggagaatgaaaagaacgacaaagataagaaaattgcagagctcgagaggcaggtcaaggatcaaaacaagaaagtggcgaatctcaaacacaaagaacaagttgagaaaaagaaaagcgctcagatgctggaagaggcacgccgaagggaggacaatctcaatgacagctcacaacagctccaggacagcctgagaaagaaagacgacaggatagaggagctcgaggaggctctgagagaatccgtgcaaatcaccgccgagcgtgagatggttctcgcacaggaggaaagtgccaggacaaatgccgaaaagcaggttgaggaactattgatggccatggagaaagttaagcaggagctggaatctatgaaggctaaattgagctcaacccaacagagcctcgccgagaaggagacccatctgaccaatcttcgagcggaaaggcgcaagcatctggaagaagtcttggagatgaagcaagaggccctactggccgcaatttctgagaaggacgccaacattgcgttgctggagctctctagttctaaaaagaaaacacaggaagaggtcgccgctcttaaacgcgagaaagatagactggtgcaacagctgaagcagcagacgcagaatagaatgaagctgatggcggacaactatgaagacgatcactttaagagctcccacagcaatcaaaccaaccacaaaccgtcccccgaccagattatccagccactcttagagctggatcagaataggagcaaattgaagctgtacatcggacatctgacgaccttgtgccacgacagagaccctctcattttgaggggactcactccacctgcttcttacaatcttgacgacgatcaggccgcatgggaaaatgagctgcagaagatgaccagaggacagttgcaggacgaacttgaaaaaggcgagcgggataacgcggagttacaggagttcgctaacgccatcctacagcagatcgcagatcattgtccagacatcctggagcaggtggtgaatgccctggaggagtctagctag

SEQ ID NO: 313872 - DNA, 3351 bp, Artificial Sequence
  derived and/or modified sequence
atgtatggtagtgccagatctgtgggaaaggttgagccatccagccagtcccctggaagatcacctaggctgccacgatccccacgactcggccaccgtcggaccaacagcactggaggttcatccggatcatccgtggggggtggaagcggaaagactctcagcatggaaaacattcagtctctcaatgctgcctatgccacctcaggccctatgtatttgtcggaccatgaaaatgttggcagcgaaaccccaaagtcaacaatgacgcttgggagaagcgggggaagattaccttacggcgtcaggatgacagcgatgggctcttccccaaacatcgcctcatctggcgtcgcatcagataccattgcattcggagagcatcacctgcctcccgtttctatggcctctacagtgccccactcgctgaggcaggccagagacaatacaatcatggacctgcaaacacaactcaaggaagtgctgcgggagaacgatctactgcgaaaggatgtcgaagtgaaagaatccaaactcagcagctcaatgaattccataaaaaccttctggtcaccggaactgaaaaaagagcgcgctctgcgaaaggatgaagccagtaaaatcactatctggaaggaacagtacagagtcgtacaggaagaaaaccagcacatgcaaatgaccattcaggctctccaggacgagctgcgtattcagagggacctgaaccagttattccaacaggactccagctctaggactggagaaccttgcgtcgccgaattgacggaagaaaatttccaaaggctacacgctgaacacgagcgacaggcaaaggaactattcctgcttcggaaaacccttgaggaaatggaactcaggatcgagactcaaaagcaaacactcaacgcacgcgatgagagtataaagaaactgctggagatgctccagtccaaaggtctcagcgcgaaggcaactgaagaagaccacgagaggaccagaagactggccgaagccgaaatgcatgtgcatcatctggaaagtctgttagaacagaaggaaaaggaaaattccatgctgagagaggaaatgcatagaagattcgagaacgcccctgattccgccaaaaccaaagctctccaaacagtgatcgaaatgaaggacagcaagatttcgagtatggaacgcggtctcagagacctggaggaggagatccagatgttaaaatctaacggagccttatcaacagaagagcgcgaagaggaaatgaaacagatggaggtgtaccgaagccacagtaagttcatgaagaataaagtggaacagctgaaggaggagctgtcctccaaggaggcacagtgggaggagttaaagaaaaaggctgcgggtctccaagcggagatcgggcaggtaaaacaggagctgagtcggaaagatacagaattactggccttacaaaccaaactcgagacactgactaatcagtttagtgattctaaacagcatattgaggttctgaaagagtctctgacagccaaggagcaacgagcagctattctccagaccgaagtggacgccctgcgcctgcggctggaagaaaaagagaccatgctgaacaaaaagaccaagcagatacaggatatggccgaggaaaaaggcactcaggccggagagattcatgatttaaaagacatgctcgacgtgaaggagcggaaggtgaatgtcttgcagaaaaaaatcgaaaatctgcaggagcaactcagagataaagaaaaacaaatgagcagcctaaaagagcgtgtgaagtccctgcaggctgacaccaccaacacggacaccgccctgactactctcgaagaagcgttggctgaaaaggaacgtacaatagagaggctgaaggaacaaagggaccgcgatgagagagaaaaacaggaggaaatcgataactataagaaagatctaaaagacctgaaggagaaggtgagtcttctccaaggtgacctgtccgaaaaggaggccagcctccttgatttaaaggagcatgccagcagtctggcttcaagtggcctgaagaaagacagccgtctcaagacgctggagatcgcgctggagcagaagaaggaggagtgtctgaaaatggaatctcagttgaaaaaggcccacgaggctgctttggaagccagagcaagccctgagatgtcagacagaattcagcacctcgaacgtgagatcacaaggtacaaggatgagtctagtaaagcacaggcagaagtcgatcggctactggaaattctcaaggaggtagaaaacgagaagaacgacaaggacaagaaaattgccgagctggaaaggcaggttaaagatcagaataaaaaggtggctaacctcaaacataaggagcaggttgagaagaaaaagtctgcgcaaatgctggaggaagcaagacgcagggaggataatctcaacgatagtagccagcagttgcaggacagtctccggaaaaaagatgatcgaattgaagagctggaagaagccttgcgagaaagtgttcagatcactgccgagcgggagatggtgcttgcccaagaggagagtgccaggaccaatgccgagaaacaagttgaagagctgctcatggcaatggagaaagttaagcaggagctggagagtatgaaggcaaagctgtcctccacgcagcagtccctggcagaaaaggagactcaccttactaatttacgggctgaaagacgtaaacacctcgaggaagttctggagatgaagcaggaagctctcctggcagccatcagtgagaaggacgcaaacatagcacttctcgaactttcgagttccaagaagaagacccaggaggaagtcgctgcacttaagcgggagaaagaccgcctcgtgcagcagcttaagcaacagacccaaaataggatgaaacttatggccgataactacgaggatgatcacttcaagtcctcccacagcaatcagactaaccacaaaccatccccggatcaaatcatccaacccttgttggaactagaccagaatcgatctaaactgaaattgtatatcggccatctgaccacgctctgccatgatagggatcctctaattctcagaggtttaacgccgccagcctcttacaatcttgatgacgaccaggcagcttgggaaaatgaactgcagaagatgacacgaggccaactccaggatgaattggaaaagggagaacgggataatgccgaattacaggagttcgccaacgccattctgcaacaaatcgcagatcattgcccagacattctggagcaggttgtcaacgctttggaggaaagctcttag

SEQ ID NO: 313873 - DNA, 3923 bp, Artificial Sequence
  derived and/or modified sequence
agcagtagcggcagccctgaggacgatatggtgtaagatacttcttcaagattggacagctggggaccttcttctgattaaccttaaaccaacttgtagccatagagacacctcacaaggttcccatttttgttgttgttgttgttgattttctgctcacacctttcctgaccttgcaaccatgtatggaagtgcccgctctgttgggaaggtggagccgagcagccagagccctgggcgttcacccaggcttccacgttcccctcgcttgggtcaccgtcgaaccaacagtacgggagggagttcgggaagcagtgttggaggtggcagtgggaaaaccctttcaatggaaaatatacaatctttaaatgctgcctatgccacctctggccctatgtatctaagtgaccatgaaaatgtgggttcagaaacacctaaaagcaccatgacacttggccgttctgggggacgtctgccttacggtgttcggatgactgctatgggtagtagccccaatatagctagcagtggggttgctagtgacaccatagcatttggagagcatcacctccctcctgtgagtatggcatccactgtacctcactcccttcgtcaggcgagagataacacaatcatggatctgcagacacagctgaaggaagtattaagagaaaatgatctcttgcggaaggatgtggaagtaaaggagagcaaattgagttcttcaatgaatagcatcaagaccttctggagcccagagctgaagaaggaacgagccctgagaaaagatgaagcttccaaaatcaccatttggaaggaacagtacagagttgtacaggaggaaaaccagcacatgcagatgacaatccaggctctccaggatgaattgcggatccagagggacctgaatcagctgtttcagcaggatagtagcagcaggactggcgaaccttgtgtagcagagctgacagaggagaactttcagaggcttcatgctgagcatgagcggcaggccaaagagctgtttcttcttcgaaagacattggaggaaatggagctgcgtattgagactcaaaagcagaccctaaatgctcgggatgaatccattaagaagcttctggaaatgttgcagagcaaaggactttctgccaaggctaccgaggaagaccatgagagaacaagacgactggcagaggcagagatgcacgttcatcacctagaaagccttttggagcagaaggaaaaagagaacagtatgttgagagaggagatgcatcgaaggtttgagaatgctcctgattctgccaaaacaaaagctctgcaaactgttattgagatgaaggattcaaaaatttcctctatggagcgtgggcttcgagacctggaagaggaaattcagatgctgaaatcgaatggtgctttgagtactgaggaaagggaagaagaaatgaagcaaatggaagtgtatcggagccattctaaatttatgaaaaataaggtagaacaactgaaggaggaactaagttcgaaagaggctcaatgggaggagctgaaaaagaaagcggctggtcttcaggctgagattggccaggtgaaacaggagctgtccagaaaggacacagaactactcgccctgcagacaaagctagaaacactcacaaaccagttctcagatagtaaacagcacattgaagtgttgaaggagtccttgactgctaaggagcagagggctgccatcctgcagactgaggtggatgctctccgattgcgtttggaagagaaggaaaccatgttgaataaaaagacaaaacaaattcaggatatggctgaagagaaggggacacaagctggagagatacatgacctcaaggacatgttggatgtgaaggagcggaaggttaatgttcttcagaagaagattgaaaatcttcaagagcagcttagagacaaggaaaagcagatgagcagcttgaaagaacgggtcaaatccttgcaggctgacaccaccaacactgacactgccttgacaactttggaggaggcccttgcagagaaagagcggacaattgaacgcttaaaggagcagagggacagagatgagcgagagaagcaagaggaaattgataactacaaaaaagatcttaaagacttgaaggaaaaagtcagcctgttgcaaggcgacctttcagagaaagaggcttcacttttggatctgaaagagcatgcttcttctctggcatcctcaggactgaaaaaggactcacggcttaagacactagagattgctttggagcagaagaaggaggagtgtctgaaaatggaatcacaattgaaaaaggcacatgaggcagcattggaagccagagccagtccagagatgagtgaccgaatacagcacttggagagagagatcaccaggtacaaagatgaatctagcaaggcccaggcagaagttgatcgactcttagaaatcttgaaggaggtggaaaatgagaagaatgacaaagataagaagatagctgagttggaaaggcaagtgaaagaccagaataagaaggtagcaaatctgaagcacaaggaacaggtggaaaaaaagaagagtgcacaaatgttagaggaggcgcgacgacgggaggacaatctcaacgacagctctcagcagctacaggacagtctccgtaagaaggatgacaggattgaagagctggaagaagcactaagagaaagtgtacagataactgcagagcgggaaatggtgctagcacaagaggaatcagccaggaccaatgctgaaaaacaggtggaggagttactgatggccatggagaaggtaaagcaggaactagaatccatgaaagcaaagctgtcctccacccagcagtctctggcagaaaaggaaactcacttgactaatcttcgggcagagagaaggaaacacttagaggaagttctggagatgaagcaagaagctcttctggctgccattagtgaaaaagacgccaatatagctctcttggagctttcgtcctctaagaagaagacccaagaggaagtggctgccctgaagcgggagaaggatcgtctggtacagcagcttaagcagcagacgcaaaatcgaatgaagctaatggccgacaactacgaggatgaccacttcaaatcctcccattccaatcaaacaaatcacaagccctccccagaccagatcatccagcccctcttagaacttgaccaaaatagaagtaaattaaagttgtacattggacacctgacaaccctctgccatgaccgagaccccctgatcctccgtggactcactccaccagcttcctataacttggacgatgaccaggcggcttgggagaatgagctgcagaagatgacccgggggcagcttcaggatgagttagagaaaggtgaacgggacaatgcagaactgcaggagtttgccaacgccattcttcagcagatagcagaccattgtcccgacatcctagagcaagtggtcaacgccctggaagagtcctcttgaccctgctttatggggaagcctgaggtagtcaacccaggagccaagaaaagagaactacgaggaacaggtgcccggaaccttcttggcaccaaacactacaaacttcatcccaacttgctcacttgaagaagtgtgattccagcaccgtttctacatctgccatcttactctgcctttctgctttggatgtggtctctacactaaccttcttgatgtccagggtagataaagggtcgaatctctctgaagaactgccacctggtcatcagcagtggagaactgtgggagctggtggctctgccctgacagagagccatggagcagaggagcctctcacctcctgtcctctgacatgagaatgaaaccaggaatggacttggagttcaacagg

SEQ ID NO: 313874 - DNA, 9202 bp, Artificial Sequence
  derived and/or modified sequence
gatatggtgtaagatacttcttcaagattggacagctggggaccttcttctgattaaccttaaaccaacttgtagccatagagacacctcacaaggttcccatttttgttgttgttgttgttgattttctgctcacacctttcctgaccttgcaaccatgtatggaagtgcccgctctgttgggaaggtggagccgagcagccagagccctgggcgttcacccaggcttccacgttcccctcgcttgggtcaccgtcgaaccaacagtacgggagggagttcgggaagcagtgttggaggtggcagtgggaaaaccctttcaatggaaaatatacaatctttaaatgctgcctatgccacctctggccctatgtatctaagtgaccatgaaaatgtgggttcagaaacacctaaaagcaccatgacacttggccgttctgggggacgtctgccttacggtgttcggatgactgctatgggtagtagccccaatatagctagcagtggggttgctagtgacaccatagcatttggagagcatcacctccctcctgtgagtatggcatccactgtacctcactcccttcgtcaggcgagagataacacaatcatggatctgcagacacagctgaaggaagtattaagagaaaatgatctcttgcggaaggatgtggaagtaaaggagagcaaattgagttcttcaatgaatagcatcaagaccttctggagcccagagctgaagaaggaacgagccctgagaaaagatgaagcttccaaaatcaccatttggaaggaacagtacagagttgtacaggaggaaaaccagcacatgcagatgacaatccaggctctccaggatgaattgcggatccagagggacctgaatcagctgtttcagcaggatagtagcagcaggactggcgaaccttgtgtagcagagctgacagaggagaactttcagaggcttcatgctgagcatgagcggcaggccaaagagctgtttcttcttcgaaagacattggaggaaatggagctgcgtattgagactcaaaagcagaccctaaatgctcgggatgaatccattaagaagcttctggaaatgttgcagagcaaaggactttctgccaaggctaccgaggaagaccatgagagaacaagacgactggcagaggcagagatgcacgttcatcacctagaaagccttttggagcagaaggaaaaagagaacagtatgttgagagaggagatgcatcgaaggtttgagaatgctcctgattctgccaaaacaaaagctctgcaaactgttattgagatgaaggattcaaaaatttcctctatggagcgtgggcttcgagacctggaagaggaaattcagatgctgaaatcgaatggtgctttgagtactgaggaaagggaagaagaaatgaagcaaatggaagtgtatcggagccattctaaatttatgaaaaataaggtagaacaactgaaggaggaactaagttcgaaagaggctcaatgggaggagctgaaaaagaaagcggctggtcttcaggctgagattggccaggtgaaacaggagctgtccagaaaggacacagaactactcgccctgcagacaaagctagaaacactcacaaaccagttctcagatagtaaacagcacattgaagtgttgaaggagtccttgactgctaaggagcagagggctgccatcctgcagactgaggtggatgctctccgattgcgtttggaagagaaggaaaccatgttgaataaaaagacaaaacaaattcaggatatggctgaagagaaggggacacaagctggagagatacatgacctcaaggacatgttggatgtgaaggagcggaaggttaatgttcttcagaagaagattgaaaatcttcaagagcagcttagagacaaggaaaagcagatgagcagcttgaaagaacgggtcaaatccttgcaggctgacaccaccaacactgacactgccttgacaactttggaggaggcccttgcagagaaagagcggacaattgaacgcttaaaggagcagagggacagagatgagcgagagaagcaagaggaaattgataactacaaaaaagatcttaaagacttgaaggaaaaagtcagcctgttgcaaggcgacctttcagagaaagaggcttcacttttggatctgaaagagcatgcttcttctctggcatcctcaggactgaaaaaggactcacggcttaagacactagagattgctttggagcagaagaaggaggagtgtctgaaaatggaatcacaattgaaaaaggcacatgaggcagcattggaagccagagccagtccagagatgagtgaccgaatacagcacttggagagagagatcaccaggtacaaagatgaatctagcaaggcccaggcagaagttgatcgactcttagaaatcttgaaggaggtggaaaatgagaagaatgacaaagataagaagatagctgagttggaaaggcaagtgaaagaccagaataagaaggtagcaaatctgaagcacaaggaacaggtggaaaaaaagaagagtgcacaaatgttagaggaggcgcgacgacgggaggacaatctcaacgacagctctcagcagctacaggacagtctccgtaagaaggatgacaggattgaagagctggaagaagcactaagagaaagtgtacagataactgcagagcgggaaatggtgctagcacaagaggaatcagccaggaccaatgctgaaaaacaggtggaggagttactgatggccatggagaaggtaaagcaggaactagaatccatgaaagcaaagctgtcctccacccagcagtctctggcagaaaaggaaactcacttgactaatcttcgggcagagagaaggaaacacttagaggaagttctggagatgaagcaagaagctcttctggctgccattagtgaaaaagacgccaatatagctctcttggagctttcgtcctctaagaagaagacccaagaggaagtggctgccctgaagcgggagaaggatcgtctggtacagcagcttaagcagcagacgcaaaatcgaatgaagctaatggccgacaactacgaggatgaccacttcaaatcctcccattccaatcaaacaaatcacaagccctccccagaccagatcatccagcccctcttagaacttgaccaaaatagaagtaaattaaagttgtacattggacacctgacaaccctctgccatgaccgagaccccctgatcctccgtggactcactccaccagcttcctataacttggacgatgaccaggcggcttgggagaatgagctgcagaagatgacccgggggcagcttcaggatgagttagagaaaggtgaacgggacaatgcagaactgcaggagtttgccaacgccattcttcagcagatagcagaccattgtcccgacatcctagagcaagtggtcaacgccctggaagagtcctcttgaccctgctttatggggaagcctgaggtagtcaacccaggagccaagaaaagagaactacgaggaacaggtgcccggaaccttcttggcaccaaacactacaaacttcatcccaacttgctcacttgaagaagtgtgattccagcaccgtttctacatctgccatcttactctgcctttctgctttggatgtggtctctacactaaccttcttgatgtccagggtagataaagggtcgaatctctctgaagaactgccacctggtcatcagcagtggagaactgtgggagctggtggctctgccctgacagagagccatggagcagaggagcctctcacctcctgtcctctgacatgagaatgaaaccaggaatggacttggagttcaacaggctgagaggatgcctccaatggaccagagagctgagtgttctaatatcacaataggtgctttctcctaaaagggcaaaaaacaatctcaaaaagattagaaaaagagaaggggggaagggaagagaaaatcgactcttctttttactgtctcttctgcttactttccacatgagatgctttgtaccggggagctgtgagcaggcctcacgatggcttgggagcactcgttctcccaaggtctgagtcttcatccagccctgcctgtctgtcgcagccttcctcactctgttcctcggccagttaacaagaagatggtgtgaggtgttctccaccagtctctcctgtttgagactgttgacgttatcatactgaggtgttagatcaaatatctctaattgaagaacatgtgaggttgaaagagcaccagccagggcaacatagcgtgaccctgtctctacaaaaaattaaaaagagaacatacaaagttgacatatgagaccctgttgtccccgcctgcagctttgccccagtaacagatgcccgttgctcttgggctggtttcccctgaacacctccaagaggctgcctgccttgccagcacccgtgtcctgagctcctgcagcccagtggctgctgaagttgtgatccctcactcaccctgctagctttgcccttgactcgtcttctctgaacctcagcctcgtgcattgcctggaaccttcttctagcataaatgaaggtttttcctcctacacacattccttcctcggttatttcattcagagaatatttatgaaatgcctactgtgtgcaagtcatccatccttgaaaaggccacttctcagtgagggagagatgtagtggattctgtgagacatacctgctggagttgaagcagtaaatagcatgtccttcccctccccgatcttaaggtgtgttttctagaaaagttccctaatggaattcatgagtttgggggtctcagtcacccgcttgcctgtaggattccatttgatgattctggatttttgctgtttgttattgcccttagaggggctctgagtatctacttgtgggtggccatttcctgacatctgcatgtacctcgtggaattcagccagcttcatgttgcaaatcagaaagctgaccccaagactgcaaatcaatgaaggtattggcattgttaaggacgtagcgtagacaacagcagtcataaataattaggcaggaacttaacccaaatctagttctttgaccacctctaccaccagaacccagcagacactcacatctcctgataagagttgctggactcgatgtttttgttttgcattttctcctctccttccccacttactcagagaatttaaagtctgtagagtcagcacagccccatcagtccaggaacttcccaccaccagcccttgactgtcccattaactgacatggtcagatttccagctccccctactccctgctgtgaaacaatccctctccctgtgagaggaaactgtggagcgtttcttatcgaaggttaaatggactctgctcataaacctcttactgagatgcttcctgatagccaggctggccagagaggggtgcaggggttagatagtaagtggtggtcgtttgtggtcagttacctcaattctgttcattgcagtgcccgtaaaccatgtagaaagctcccagcactgaaaggcaggagtgttagcatctcgctttatccaccataacgtaaagaactgcggtgtgataacagccttcacggggccacggtggaaccaagacagcaggcgaggccatgcctaaacaagtggtctggcacgggcactggccagctgctctctccaagcaggtggcccagatcccacccacgtggactttctcatcaggtgcagcgcctgccactctcagccactgggtgtgtcactctcctcttcatctcagcattctccatcacttcccctccagaaaaacggatggaaggaagccctctgtgacactgcttctgagaagaagcatttccgggaccgatatcatctgtctggtctctgtgaacagcaaggaatcttcttgaccgttcttgggcactggaggctggctaggagttcagtaataaacgtggccttcgtgctgtagggcagagtggatgcagtttgtagctttcagagtgtctcattgagtctagatcattgaaccaacacttaaccaaatgtcccactcccatcacactaggacttgtcattccatgcccctctcctagtggtcatggtttcatatgggcatacaactgctactgaagttatatagccttgaaaactcagtgcaggttgcccttaattttccccaaacccctccatcggcaagtctagttgccctttagcacctaaagatctgcaccccaaaccaatgtcaccataaagagggcacgaagaagagtgggtgtgatcccaacggggttttgtaactgaagaagcccagtgtgagcttctcatcttttcatatacctctaacccccggtactcattgaatcattgatgaggtatctcaattgagatttgcaaggactttgataccatttgaaatggaaaaattttgaacgggctttaacatgtttaagaaatatggatggggccggccacagtggctcacgcctgtaatcccagaactctggaaggctgaggcaggcggatcacctgagatcaggagttcgaggccagcctggccaagatggcaaaaaccccgactctactaaaaatacaaaattagccaggcgtggtggcgtacgcctgtaatcccagctactcaggaggcaggagaatcgcttgagcctgggaggcagaggctgcggtgagccgagatcgtgtcactgcactccagcctgggtgacagagactccatttaaaaaaaaaaaaaaaaaatatatatatatatatatatatatatatatggatgggaatcaccaaattcatctcagctctaaccttttaacctttgtccttgcactttacaatctaaagatctacctgtggctctcagacttcctcacacttgggttttagaaataacttgtaaagcagactggacccaaggccgccttcagtgtcaagaagggcattgtgacttgcccctcaatttctgtccattgaagtctggttttccatgaggaacttgcgggctcacccacccccagagtgagagaagaggaaggcgaagtcatcacagacacggtcttagccacctgctgaactaatccctccgctattgagggtcagggttgtgaggcaaccatcatgtgtcaccccaaaatataaatgtttctgagccgcccatccactggcatttggatttgctgccagagtcctgttcctcccagaaccatcccgccctcctgttgaccatgttacttgagtgtaggcccggtgtcaagaccctcagagtctttgaggaaagagccaagcagagaagaccgctgcgtggagtgtgacaccacatggcatttctcaagcccagcggaccctgtgtcagcaaataccagtaatttaacatctgctcctggcctcctcttcacctgcctgggttcggaactgaggaggaaggatgagaagagactgcaatgcagcaggcaccctctgcagagtgaggccgcccgtccatcactgccagccctgggctgctcaggaggggacgtgaaccactcaaaggaatgtcttaaagaggatctggagtttcccccatgcaaattagggaagaattaggcaagaaaagacatacattacagggaaatccttctgaacaaaatggctgtcttcacctactcttcttgcaagaaaagacatacattacagggaaatccttctgaacaaaatggctatcttcacctactcttcagcaaaaaccgtctccagactttttagtgtcaaaaatgtaaccaactgtctcctgattttttccaatgtgtttggcaagtgctgtggccctgttgtaggtacttctcctgactcttgggggagaagtggttttagggattgatttgggggagcgggtttttgtcccatcccacctcctctcttctttctctgcttgtcgatattgtctgtgtgattcagagaattggggcagttacattgtgtctgttgttgagattattaaaagattaaaacgtagttgtagaaatgaaaaattaaacagctgtgttttaaaaatgcaaaccaatatcttgttaataaaggaattcaagctatggggcagccacactcccctcctcccaggctggcataggtggccctgggctggcggcttaggaagcatggagcacacttagggtagtgcctgcctgggcaagagacacctgccgagcaaaaggaacgagaatctggggctcagagcctcgcagttgtgccaggattttcctatacatgttcaggacctctgggtagaggtttcacagtttgtgaccccataaccaccctcacccgacgtgggttctagctcagtgtgcctaatactgcatggtaacctgggcttgaccctgaagcccctgcctggcaggccacaggacctctcctgcccacttggtgctatctcttccagtgaccacccagcacgggtgagcactggccagcctggagcctgcaatccaggtggaacagactgtcctccatgtcagttccttctggcttcaggccctcaattatttccctttgagcttttttagaccctagatctcctaggcccaggctctctcttgaccccagagaagccactgtcaggaaaggaagtgaaccctactgaagccagagaattcaccccggccaaagcaggccctctgggtccagcccctcattccacaccacgccagtattgcatccatctactgcagctacacatcctgagggcagcaccacccactctggcctgctggcccatcgcaggactagcccaggcacctgccgggcattgcaggatatccagtggggcctgtgactgctccctgatgcgtcagaagagaagtgttgcactttagtggaggagctgaggagcacctgcccccttgtagcttgagttccttttggtaacagtagcagcctccatggtggtgtctgggatgcacgtgcacccgctgccttcagctgtatgtgtgtgttcctgctggagttgtgttactgacaggataatgacattacaaagaaattgtgttatattcaactttgccttgataattattgtaaacactttgttcattttttcttttttattcacaaactaaatccaccaggaaattataaagttattt

SEQ ID NO: 313875 - protein, 1088 aa, Artificial Sequence
  derived and/or modified sequence
MYGSARSVGKVEPSSQSPGRSPRLPRSPRLGHRRTNSTGGSSGSSVGGGSGKTLSMENIQSLNAAYATSGPMYLSDHENVGSETPKSTMTLGRSGGRLPYGVRMTAMGSSPNIASSGVASDTIAFGEHHLPPVSMASTVPHSLRQARDNTIMDLQTQLKEVLRENDLLRKDVEVKESKLSSSMNSIKTFWSPELKKERALRKDEASKITIWKEQYRVVQEENQHMQMTIQALQDELRIQRDLNQLFQQDSSSRTGEPCVAELTEENFQRLHAEHERQAKELFLLRKTLEEMELRIETQKQTLNARDESIKKLLEMLQSKGLSAKATEEDHERTRRLAEAEMHVHHLESLLEQKEKENSMLREEMHRRFENAPDSAKTKALQTVIEMKDSKISSMERGLRDLEEEIQMLKSNGALSTEEREEEMKQMEVYRSHSKFMKNKIGQVKQELSRKDTELLALQTKLETLTNQFSDSKQHIEVLKESLTAKEQRAAILQTEVDALRLRLEEKETMLNKKTKQIQDMAEEKGTQAGEIHDLKDMLDVKERKVNVLQKKIENLQEQLRDKEKQMSSLKERVKSLQADTTNTDTALTTLEEALAEKERTIERLKEQRDRDEREKQEEIDNYKKDLKDLKEKVSLLQGDLSEKEASLLDLKEHASSLASSGLKKDSRLKTLEIALEQKKEECLKMESQLKKAHEAALEARASPEMSDRIQHLEREITRYKDESSKAQAEVDRLLEILKEVENEKNDKDKKIAELERQVKDQNKKVANLKHKEQVEKKKSAQMLEEARRREDNLNDSSQQLQDSLRKKDDRIEELEEALRESVQITAEREMVLAQEESARTNAEKQVEELLMAMEKVKQELESMKAKLSSTQQSLAEKETHLTNLRAERRKHLEEVLEMKQEALLAAISEKDANIALLELSSSKKKTQEEVAALKREKDRLVQQLKQQTQNRMKLMADNYEDDHFKSSHSNQTNHKPSPDQIIQPLLELDQNRSKLKLYIGHLTTLCHDRDPLILRGLTPPASYNLDDDQAAWENELQKMTRGQLQDELEKGERDNAELQEFANAILQQIADHCPDILEQVVNALEESS

SEQ ID NO: 313876 - DNA, 3267 bp, Artificial Sequence
  derived and/or modified sequence
atgtacggcagcgccagaagcgtgggcaaggtggagcccagcagccagagccccggcagaagccccagactgcccagaagccccagactgggccacagaagaaccaacagcaccggcggcagcagcggcagcagcgtgggcggcggcagcggcaagaccctgagcatggagaacatccagagcctgaacgccgcctacgccaccagcggccccatgtacctgagcgaccacgagaacgtgggcagcgagacccccaagagcaccatgaccctgggcagaagcggcggcagactgccctacggcgtgagaatgaccgccatgggcagcagccccaacatcgccagcagcggcgtggccagcgacaccatcgccttcggcgagcaccacctgccccccgtgagcatggccagcaccgtgccccacagcctgagacaggccagagacaacaccatcatggacctgcagacccagctgaaggaggtgctgagagagaacgacctgctgagaaaggacgtggaggtgaaggagagcaagctgagcagcagcatgaacagcatcaagaccttctggagccccgagctgaagaaggagagagccctgagaaaggacgaggccagcaagatcaccatctggaaggagcagtacagagtggtgcaggaggagaaccagcacatgcagatgaccatccaggccctgcaggacgagctgagaatccagagagacctgaaccagctgttccagcaggacagcagcagcagaaccggcgagccctgcgtggccgagctgaccgaggagaacttccagagactgcacgccgagcacgagagacaggccaaggagctgttcctgctgagaaagaccctggaggagatggagctgagaatcgagacccagaagcagaccctgaacgccagagacgagagcatcaagaagctgctggagatgctgcagagcaagggcctgagcgccaaggccaccgaggaggaccacgagagaaccagaagactggccgaggccgagatgcacgtgcaccacctggagagcctgctggagcagaaggagaaggagaacagcatgctgagagaggagatgcacagaagattcgagaacgcccccgacagcgccaagaccaaggccctgcagaccgtgatcgagatgaaggacagcaagatcagcagcatggagagaggcctgagagacctggaggaggagatccagatgctgaagagcaacggcgccctgagcaccgaggagagagaggaggagatgaagcagatggaggtgtacagaagccacagcaagttcatgaagaacaagatcggccaggtgaagcaggagctgagcagaaaggacaccgagctgctggccctgcagaccaagctggagaccctgaccaaccagttcagcgacagcaagcagcacatcgaggtgctgaaggagagcctgaccgccaaggagcagagagccgccatcctgcagaccgaggtggacgccctgagactgagactggaggagaaggagaccatgctgaacaagaagaccaagcagatccaggacatggccgaggagaagggcacccaggccggcgagatccacgacctgaaggacatgctggacgtgaaggagagaaaggtgaacgtgctgcagaagaagatcgagaacctgcaggagcagctgagagacaaggagaagcagatgagcagcctgaaggagagagtgaagagcctgcaggccgacaccaccaacaccgacaccgccctgaccaccctggaggaggccctggccgagaaggagagaaccatcgagagactgaaggagcagagagacagagacgagagagagaagcaggaggagatcgacaactacaagaaggacctgaaggacctgaaggagaaggtgagcctgctgcagggcgacctgagcgagaaggaggccagcctgctggacctgaaggagcacgccagcagcctggccagcagcggcctgaagaaggacagcagactgaagaccctggagatcgccctggagcagaagaaggaggagtgcctgaagatggagagccagctgaagaaggcccacgaggccgccctggaggccagagccagccccgagatgagcgacagaatccagcacctggagagagagatcaccagatacaaggacgagagcagcaaggcccaggccgaggtggacagactgctggagatcctgaaggaggtggagaacgagaagaacgacaaggacaagaagatcgccgagctggagagacaggtgaaggaccagaacaagaaggtggccaacctgaagcacaaggagcaggtggagaagaagaagagcgcccagatgctggaggaggccagaagaagagaggacaacctgaacgacagcagccagcagctgcaggacagcctgagaaagaaggacgacagaatcgaggagctggaggaggccctgagagagagcgtgcagatcaccgccgagagagagatggtgctggcccaggaggagagcgccagaaccaacgccgagaagcaggtggaggagctgctgatggccatggagaaggtgaagcaggagctggagagcatgaaggccaagctgagcagcacccagcagagcctggccgagaaggagacccacctgaccaacctgagagccgagagaagaaagcacctggaggaggtgctggagatgaagcaggaggccctgctggccgccatcagcgagaaggacgccaacatcgccctgctggagctgagcagcagcaagaagaagacccaggaggaggtggccgccctgaagagagagaaggacagactggtgcagcagctgaagcagcagacccagaacagaatgaagctgatggccgacaactacgaggacgaccacttcaagagcagccacagcaaccagaccaaccacaagcccagccccgaccagatcatccagcccctgctggagctggaccagaacagaagcaagctgaagctgtacatcggccacctgaccaccctgtgccacgacagagaccccctgatcctgagaggcctgaccccccccgccagctacaacctggacgacgaccaggccgcctgggagaacgagctgcagaagatgaccagaggccagctgcaggacgagctggagaagggcgagagagacaacgccgagctgcaggagttcgccaacgccatcctgcagcagatcgccgaccactgccccgacatcctggagcaggtggtgaacgccctggaggagagcagctag

SEQ ID NO: 313877 - DNA, 3267 bp, Artificial Sequence
  derived and/or modified sequence
atgtatgggtccgcccggtccgttggcaaggtcgagccctcatcacagtctcctgggagatcgcctcgattgccccggagcccaagactcggccacagacgaaccaactcaacagggggatcaagtggatccagcgttgggggcggttcaggcaaaactctttcaatggaaaacattcaaagcctgaacgccgcatacgcaacatccggacctatgtaccttagcgaccacgagaatgttggcagcgagacgcccaagagcacgatgacattgggtagatccggggggcgtttgccatacggggtgcgtatgactgctatgggctcctctcccaatattgcatccagtggggtcgcatctgacacaattgctttcggggagcaccacctgccccccgtgtcaatggcctccaccgtgcctcacagcctgcgccaggcccgggataataccatcatggatctgcagacacagctgaaagaggtcctgcgtgaaaacgacttgctgcgcaaggatgtcgaagtaaaagaatccaaactgtccagcagcatgaacagcattaaaacattctggtctcccgagttgaagaaggaaagagccctgcgtaaggacgaggcttcaaaaatcaccatctggaaggagcagtacagagtggttcaggaggagaatcagcacatgcaaatgacgattcaggctctgcaggacgagctacgcatacagcgggatttgaaccagctgttccagcaggactcatcgagccgcacgggggagccgtgcgttgctgaactcacagaagaaaatttccagagattacatgccgaacatgagcgccaggcgaaggagctcttccttcttcgcaagaccctggaagaaatggaattacggatcgagacccaaaagcagacgttgaacgcaagagacgaatctatcaagaaactgttagaaatgttgcagagcaaagggctgtcagcaaaggcaacagaggaagaccacgagaggaccagaagacttgccgaagccgagatgcacgtccatcatcttgaatctctgctggagcagaaagagaaggagaacagcatgcttcgtgaagaaatgcaccgaagattcgaaaacgcccccgatagcgccaaaaccaaagccctgcagaccgtgatagagatgaaagactcaaagatctctagcatggagcgagggcttagggatctggaggaggaaattcagatgctgaagtctaatggcgccctgagcactgaagaacgggaagaggagatgaaacagatggaagtgtacaggagccactctaagttcatgaagaacaagatcggccaggtcaaacaagagctctcgcggaaagatacggagcttttagccctgcagaccaaactcgaaaccctcacaaatcaattcagtgacagcaagcagcacattgaggttctgaaagagagcctcactgcaaaggaacagcgcgccgcaattttgcagacagaggtggacgcgttgaggctgcgcttggaagaaaaagaaaccatgctcaataaaaaaaccaagcagatccaggatatggcagaagagaaaggcactcaggctggcgaaattcatgacctgaaagatatgttggacgtgaaagaacgtaaggtgaacgtcttgcagaaaaaaatcgagaacctgcaggagcaactgagggacaaagaaaagcaaatgtctagccttaaggagagagtcaagtccctgcaagccgacactaccaacacagacaccgctttgaccaccctcgaagaggctcttgctgaaaaagagaggaccattgaaagactgaaggagcagcgcgaccgggatgaacgcgaaaagcaggaagaaatcgacaactacaaaaaagatctcaaggatttgaaagaaaaagtatccctgctccaaggggacttatccgagaaggaagcttctctgctggacctcaaagagcacgcctccagcctcgcgtcctctggtctgaagaaggattcccggttgaagaccctggagattgcccttgagcaaaagaaggaggagtgcctgaagatggagagtcagttgaagaaggcgcacgaagctgccctggaagcacgtgcctctcccgagatgtctgatagaatccagcatctcgagagagaaataaccagatacaaagacgaatcgagcaaggcccaggccgaggttgaccgcctcctggaaatactcaaggaggtggagaatgagaagaacgataaggacaagaaaatcgccgagctggagcgccaagtgaaagaccagaacaaaaaggtcgctaacctgaaacataaagagcaggtggagaaaaaaaagtctgcccagatgcttgaggaggcaagaagacgtgaggacaacctcaacgacagctcacagcagctccaggactccctgaggaaaaaggacgacaggatcgaagaactcgaggaagccctgagagagtctgtgcagattaccgccgagagagagatggtgctggcccaggaggagagcgcgcgcaccaacgcggaaaagcaagtggaggaactcttgatggcaatggagaaggtgaagcaagaactcgagtccatgaaggccaaactatcgtctactcagcaaagcctggccgaaaaggagacccacctgaccaatctcagagctgagcggcgtaagcacctcgaggaggtgttagaaatgaaacaggaggccctcctggccgcaatcagtgagaaagatgccaatatcgctttactcgaactgtctagttccaaaaaaaagacacaggaggaggtggcagctctgaaaagggagaaagatcgcctggttcaacagctgaagcagcagacacaaaaccgaatgaaactcatggcagacaactacgaggacgatcactttaaaagcagtcacagcaaccaaaccaatcacaagccttcccccgaccagattattcagcccttgttggaactagaccaaaatcgcagcaaactgaagctctacattggccatctcactaccttatgccacgaccgcgacccactcatcttgagaggattaactccgccggcctcctacaatcttgacgatgaccaggccgcatgggaaaacgagctgcagaaaatgactcgtggacagctccaggatgaactagaaaagggcgaaagggacaatgccgagctgcaggaatttgccaatgcgatccttcagcagattgcggaccactgtcctgatatactggagcaggtcgtcaatgctctcgaagaatcttcctag

SEQ ID NO: 313878 - DNA, 3267 bp, Artificial Sequence
  derived and/or modified sequence
atgtatggcagcgcccggtctgtgggcaaggtggagcccagcagccagagccctggccgcagcccccggctgcccaggagcccccggctgggccacaggaggaccaacagcactggaggcagcagcggcagctctgtgggcggcggcagcggcaagaccctgtccatggagaacatccagagcctgaatgctgcctatgccaccagcggccccatgtacctgagtgaccatgaaaatgtgggcagcgagacccccaagagcaccatgaccctgggccgcagcggcggccgcctgccctacggcgtgaggatgacagccatgggcagcagccccaacatcgccagcagcggcgtggccagtgacaccatcgcctttggagagcaccacctgccccctgtgtccatggccagcacagtgccccacagcctgcggcaggcccgggacaacaccatcatggacctgcagacccagctgaaggaggtgctgcgggagaatgacctgctgaggaaggatgtggaggtgaaggagagcaagctgagcagctccatgaacagcatcaagaccttctggagccctgagctgaagaaggagcgggccctgaggaaggatgaggccagcaagatcaccatctggaaggagcagtacagagtggtgcaggaggagaaccagcacatgcagatgaccatccaggccctgcaggatgagctgcgcatccagagggacctgaaccagctgttccagcaggacagcagcagcaggactggagagccctgtgtggccgagctgacagaggagaacttccagaggctgcacgccgagcacgagcggcaggccaaggagctgttcctgctgaggaagaccctggaggagatggagctgagaattgagacccagaagcagaccctgaatgccagagatgagagcatcaagaagctgctggagatgctgcagagcaagggcctgagcgccaaggccacagaggaggaccacgagaggacccggcggctggccgaggccgagatgcacgtgcaccacctggagagcctgctggagcagaaggagaaggagaacagcatgctgcgggaggagatgcacagaagatttgaaaatgccccagacagcgccaagaccaaggccctgcagaccgtcatcgagatgaaggacagcaagatcagctccatggagcggggcctgcgggacctggaggaggagatccagatgctgaagagcaatggagccctgagcacagaggagcgggaggaggagatgaagcagatggaggtgtaccgcagccacagcaagttcatgaagaacaagattggccaggtgaagcaggagctgagcaggaaggacacagagctgctggccctgcagaccaagctggagaccctgaccaaccagttcagtgacagcaagcagcacatcgaggtgctgaaggagagcctgacagccaaggagcagagagctgccatcctgcagacagaggtggatgccctgcggctgcggctggaggagaaggagaccatgctgaacaagaagaccaagcagatccaggacatggccgaggagaagggcacccaggccggggagatccatgacctgaaggacatgctggatgtgaaggagaggaaggtgaatgtgctgcagaagaagattgagaacctgcaggagcagctgcgggacaaggagaagcagatgagcagcctgaaggagcgggtgaagagcctgcaggccgacaccaccaacacagacacagccctgaccaccctggaggaggccctggccgagaaggagaggaccatcgagcggctgaaggagcagagggacagagatgagcgggagaagcaggaggagattgacaactacaagaaggacctgaaggacctgaaggagaaggtgtccctgctgcagggcgacctgtctgagaaggaggccagcctgctggacctgaaggagcacgccagcagcctggccagcagcggcctgaagaaggacagccggctgaagaccctggagatcgccctggagcagaagaaggaggagtgcctgaagatggagagccagctgaagaaggcccatgaagctgccctggaggcccgggccagccctgagatgtctgaccgcatccagcacctggagcgggagatcacccgctacaaggatgagagcagcaaggcccaggccgaggtggaccggctgctggagatcctgaaggaggtggagaatgagaagaatgacaaggacaagaagattgctgagctggagcggcaggtgaaggaccagaacaagaaggtggccaacctgaagcacaaggagcaggtggagaagaagaagagcgcccagatgctggaggaggcccggcggcgggaggacaacctgaatgacagcagccagcagctgcaggacagcctgaggaagaaggatgacagaattgaggagctggaggaggccctgcgggagagcgtgcagatcacagctgagcgggagatggtgctggcccaggaggagagcgcccggaccaatgctgagaagcaggtggaggagctgctgatggccatggagaaggtgaagcaggagctggagagcatgaaggccaagctgagcagcacccagcagagcctggccgagaaggagacccacctgaccaacctgcgggcagagaggaggaagcacctggaggaggtgctggagatgaagcaggaggccctgctggccgccatcagcgagaaggatgccaacatcgccctgctggagctgagcagcagcaagaagaagacccaggaggaggtggccgccctgaagcgggagaaggaccggctggtgcagcagctgaagcagcagacccagaacaggatgaagctgatggctgacaactatgaagatgaccacttcaagagcagccacagcaaccagaccaaccacaagcccagcccagaccagatcatccagcccctgctggagctggaccagaacagaagcaagctgaagctgtacatcggccacctgaccaccctgtgccacgaccgggaccccctcatcctgcggggcctgaccccaccagccagctacaacctggatgatgaccaggccgcctgggagaatgagctgcagaagatgacccggggccagctgcaggatgagctggagaagggggagcgggacaatgctgagctgcaggagtttgccaatgccatcctgcagcagattgctgaccactgcccagacatcctggagcaggtggtgaatgccctggaggagagcagctag

SEQ ID NO: 313879 - DNA, 3267 bp, Artificial Sequence
  derived and/or modified sequence
atgtacggcagcgcccggagcgtgggcaaggtggagcccagcagccaatccccaggcaggtccccccgacttccgaggtccccgcgacttggccacagaagaacaaactcgactgggggatcttcaggatcctccgtgggggggggatctggtaagactctgagcatggagaacattcagtccctcaatgcagcttatgccacatctggcccaatgtaccttagcgatcacgagaacgttggctctgagaccccaaagtcaaccatgactttaggtagatcaggtgggcgtctgccctacggggtccgcatgacagccatgggctctagtccaaatatagcgtcctcaggtgtcgcctcagacacaattgcatttggagagcaccacctaccacccgtctccatggcctccacagtgccacactcattacgacaggcacgcgataacaccatcatggacctgcagacacagctgaaagaagtgctgcgcgagaacgacctgctgcggaaagacgtcgaagtgaaagagagtaaattgagctcctctatgaattcaatcaagactttctggtctcccgaactcaagaaagaaagggctctgcgtaaagatgaggcttctaagattaccatatggaaggagcagtaccgggtggttcaagaggagaatcagcacatgcaaatgaccatccaggcccttcaagatgaactgagaatacaacgcgaccttaatcagctgtttcagcaggacagcagttccagaaccggtgagccctgcgttgctgagctgacagaggagaacttccagcgcttacacgccgaacatgagagacaggccaaagagctttttcttctgcgaaagaccttggaagaaatggagctgaggattgaaactcagaagcagactctcaatgcccgagatgaatccattaagaagttgctggagatgttgcagagcaaaggtctttcagcaaaggccaccgaagaagatcatgagcggacccgacgactggctgaggccgagatgcacgtgcaccacttagagtccttgctggagcaaaaagaaaaggagaacagcatgctgcgcgaggagatgcacagacggtttgagaacgccccagactcggccaaaaccaaagcactgcaaaccgtcatcgaaatgaaggacagcaagatttcctccatggaaagggggttgagggatctggaagaagagatccagatgttgaaatcaaacggggccttgagcacagaagagcgtgaagaagagatgaaacaaatggaggtgtatcgttctcattcaaaattcatgaaaaacaaaattggccaggtcaaacaggagctgtctaggaaggacacagaactgctcgccctgcagaccaaactcgaaaccttgacaaatcaattttccgattctaagcagcacattgaggtgttgaaagaatcgctaacagctaaggagcagcgggccgcaatcttacagactgaagtggatgctttgcgcctgcgcctggaggagaaagagacaatgctgaataagaagacaaaacagattcaggacatggcagaggagaagggcacacaggctggcgaaattcacgatctcaaagatatgttggatgttaaagaacggaaggttaacgtcctccagaagaagatagaaaacctccaagaacagttgcgcgacaaagagaagcagatgagcagtctaaaagaaagggtaaaaagcttgcaggcagatactaccaacactgatacagcactcactaccctggaggaagcattggcagaaaaagaaagaactattgaacgtctcaaggagcagagggacagagacgaaagggagaaacaagaagaaatcgacaattataaaaaggacctgaaagacttaaaagagaaggtgtccctattacagggcgacctctcagaaaaggaggcaagtctgcttgacttgaaggaacatgcatcatccctggccagctcagggctgaagaaggattctcgcttaaaaacgttagagattgctctggaacaaaagaaggaggaatgtctgaagatggaaagccagcttaagaaggcccacgaagccgccctcgaagcccgtgcctcccctgaaatgtctgatcgaatccagcacctcgagagagagattacgcgttataaggatgagagcagcaaggcacaagctgaggttgatcgcctgttagaaattttgaaagaggtggagaatgaaaagaacgacaaagataagaaaatcgcagagctggaacgtcaggtgaaagatcagaacaagaaagtggccaaccttaaacataaggagcaggtagagaagaagaagagtgctcaaatgctagaagaagcgcgacggagggaagacaatctgaatgacagctcgcagcagctgcaggactctctccgaaagaaagatgataggattgaggaactggaagaggctttgagagagtctgtccagattaccgcagagagagaaatggttctagcgcaggaggagtccgcacgtactaacgccgaaaagcaggtggaggaacttctgatggccatggagaaggtaaagcaggagctagagtccatgaaggcaaagctctcgtccactcagcaaagcctcgcagagaaggagacgcacctgaccaatttaagagcagaacgccgaaagcatctcgaggaagttctggaaatgaaacaggaggcactgctggccgctatttctgaaaaagacgctaacattgcactgttagagctctcctctagcaagaagaaaacacaggaggaggtcgcagcactgaagagggaaaaagatagactggtccaacagctaaagcagcagactcagaatagaatgaagctgatggccgataactacgaggatgaccactttaaatccagccactcaaatcaaactaaccataaaccatctcctgaccaaattattcagcccctgctggagcttgaccagaatcgatctaagctgaaattatatatcggccacctgactactttatgccacgacagagatccattaattctcagaggcctgacccccccagcttcttataaccttgatgatgaccaggcagcgtgggagaatgagcttcagaagatgacacgtggtcagctccaggacgaattggagaagggtgaacgggacaatgccgagttgcaggagttcgctaatgctattctacagcagatagcagaccactgcccagatatcttagagcaggtcgtgaacgcgcttgaagagtccagttag

SEQ ID NO: 313880 - DNA, 3267 bp, Artificial Sequence
  derived and/or modified sequence
atgtacggttcagctagatccgtgggaaaagtcgagccatcaagccaaagccccggtagaagccctagactgcccagatccccgagactcggacaccgcagaaccaacagcaccggcggttcatcagggtcctccgttggcggagggtctgggaagacgctgagcatggaaaacattcagtcccttaatgccgcttacgctacctcagggcctatgtacctctcagatcacgagaacgtgggcagcgagactcccaaaagtaccatgacattgggacggtccggaggacgtcttccttacggcgtgaggatgacggccatgggctcctctccaaatattgcatcaagcggagttgctagtgatacaatagcatttggggaacaccatttgcctcctgtgagcatggccagtacagtgccccatagcctgcgccaagctcgcgataacacaatcatggacctgcaaactcagctgaaggaggtcctacgggagaatgacctgctgcggaaagacgtggaggtgaaagagtccaagttatcttcctctatgaattctattaaaacattctggagccccgaattgaaaaaagagagagcactgcgcaaggatgaggctagcaagatcaccatttggaaggagcagtaccgggtcgtgcaggaggaaaatcaacacatgcagatgaccatccaggccctccaggacgagcttaggatccagcgggacctaaaccaacttttccaacaggactcttccagccgcactggcgagccttgcgtggctgagctgaccgaagaaaattttcagcgcttacacgctgagcacgagcgccaggccaaagaactttttctcctgcggaagacccttgaagagatggaactacgtattgagactcagaagcaaacgctgaatgcacgtgatgagagcatcaagaagcttctggagatgctgcagtccaaaggcttgagcgctaaagccaccgaagaggaccatgagcgcacacggaggttggcagaagctgagatgcatgtgcaccacctggaatcccttttagaacaaaaggagaaggagaactcaatgctgcgtgaagagatgcaccgtcgcttcgagaacgctcctgactcagcaaagaccaaagctctgcagaccgttatcgaaatgaaagattcaaagatctcctccatggagcgcggtcttcgggaccttgaggaggagattcaaatgctcaagagcaacggggctctgagcaccgaggagagggaagaagagatgaagcaaatggaggtgtatcggtctcactcaaaattcatgaagaataagatagggcaggttaagcaagagctgtcccgcaaagatacagagcttctcgcactgcaaacaaagttggagacattaacaaatcagtttagtgactcgaagcagcatatagaagtgttgaaggagtctttgacagcaaaggagcaacgggctgctatcttgcagaccgaggtggacgccctgcgactcagactggaagaaaaggaaaccatgctaaacaagaagactaaacagatccaagacatggccgaagagaaaggcacccaggccggagagatacacgatttgaaggacatgctggatgtgaaggaacgcaaggtcaatgtgctgcagaaaaagattgagaatctgcaggagcagctgcgcgataaggagaagcaaatgagctcactgaaagagcgagtcaagtcccttcaggcggacaccaccaatactgacaccgcgctaacaacattggaagaggcgctggccgagaaggagagaaccatcgagaggctgaaagagcagcgggatcgtgatgagcgcgaaaagcaggaggagatcgacaactacaagaaggatctgaaggacctcaaggagaaagttagcctgttgcagggcgacctctccgagaaggaggcctcgctgctcgatctgaaggagcatgcatcctcgttggcaagctctggcttgaaaaaggattcaagactcaagactctggaaatcgccctggagcaaaagaaggaagaatgtttaaagatggagagccagctcaagaaagcacacgaggctgctctggaagctagagcttcccccgaaatgagcgaccggatccagcacctcgaacgcgagatcacacgatataaggacgaaagctcaaaggcccaagccgaagtggatcgcctgctcgaaatcttgaaggaagtcgagaatgagaagaacgataaggacaagaaaatcgctgagttggagcggcaagttaaggaccagaacaagaaggtggcaaacctgaagcataaggagcaggtcgagaagaagaagagcgcgcagatgctggaagaagcgaggagaagagaagacaacctgaatgactcctcccagcagctccaagacagcttacggaaaaaggatgaccgcattgaggaactggaggaggcacttagggagtcagtccagatcacagctgagcgagagatggtcttagctcaggaggagagcgccagaacaaacgccgaaaaacaggtcgaggagctgttaatggccatggaaaaggtcaagcaggaattagagagtatgaaggccaagttgtcctcaacacagcagagtctggcagaaaaagagacccacctgacaaacctccgggctgagcgacggaaacacttggaggaagtcctcgagatgaaacaggaggcgcttctggccgctattagcgaaaaagatgcaaacattgctctgctggaactctcttcctccaagaaaaaaacccaggaggaggttgccgctcttaagcgagaaaaggacagactggttcagcagttaaagcagcaaactcagaataggatgaagctcatggcagataattacgaagacgaccacttcaagtccagccattccaatcaaacaaaccacaagccaagccctgaccagatcattcaaccattgttagagctcgatcagaacaggtcaaagctgaagctgtacattgggcatctgacaactctatgtcatgatagagatcctctgatcctacgcggactaacccctcctgcctcatataacttggacgatgaccaggcagcctgggaaaatgaattgcagaaaatgactcgaggccagctgcaggatgagctggagaagggcgagagggacaatgctgaactgcaggagttcgcaaatgccatcctgcaacagattgctgaccactgtcctgatatattagagcaggtagtgaacgcactggaggaaagctcatag

SEQ ID NO: 313881 - DNA, 4344 bp, Artificial Sequence
  derived and/or modified sequence
ggcggcggcggcggtgcctgggcggcagcagcagcagtagcggcagccctgaggacgatatggtgtaagatacttcttcaagattggacagctggggaccttcttctgattaaccttaaaccaacttgtagccatagagacacctcacaaggttcccatttttgttgttgttgttgttgattttctgctcacacctttcctgaccttgcaaccatgtatggaagtgcccgctctgttgggaaggtggagccgagcagccagagccctgggcgttcacccaggcttccacgttcccctcgcttgggtcaccgtcgaaccaacagtacgggagggagttcgggaagcagtgttggaggtggcagtgggaaaaccctttcaatggaaaatatacaatctttaaatgctgcctatgccacctctggccctatgtatctaagtgaccatgaaaatgtgggttcagaaacacctaaaagcaccatgacacttggccgttctgggggacgtctgccttacggtgttcggatgactgctatgggtagtagccccaatatagctagcagtggggttgctagtgacaccatagcatttggagagcatcacctccctcctgtgagtatggcatccactgtacctcactcccttcgtcaggcgagagataacacaatcatggatctgcagacacagctgaaggaagtattaagagaaaatgatctcttgcggaaggatgtggaagtaaaggagagcaaattgagttcttcaatgaatagcatcaagaccttctggagcccagagctgaagaaggaacgagccctgagaaaagatgaagcttccaaaatcaccatttggaaggaacagtacagagttgtacaggaggaaaaccagcacatgcagatgacaatccaggctctccaggatgaattgcggatccagagggacctgaatcagctgtttcagcaggatagtagcagcaggactggcgaaccttgtgtagcagagctgacagaggagaactttcagaggcttcatgctgagcatgagcggcaggccaaagagctgtttcttcttcgaaagacattggaggaaatggagctgcgtattgagactcaaaagcagaccctaaatgctcgggatgaatccattaagaagcttctggaaatgttgcagagcaaaggactttctgccaaggctaccgaggaagaccatgagagaacaagacgactggcagaggcagagatgcacgttcatcacctagaaagccttttggagcagaaggaaaaagagaacagtatgttgagagaggagatgcatcgaaggtttgagaatgctcctgattctgccaaaacaaaagctctgcaaactgttattgagatgaaggattcaaaaatttcctctatggagcgtgggcttcgagacctggaagaggaaattcagatgctgaaatcgaatggtgctttgagtactgaggaaagggaagaagaaatgaagcaaatggaagtgtatcggagccattctaaatttatgaaaaataagattggccaggtgaaacaggagctgtccagaaaggacacagaactactcgccctgcagacaaagctagaaacactcacaaaccagttctcagatagtaaacagcacattgaagtgttgaaggagtccttgactgctaaggagcagagggctgccatcctgcagactgaggtggatgctctccgattgcgtttggaagagaaggaaaccatgttgaataaaaagacaaaacaaattcaggatatggctgaagagaaggggacacaagctggagagatacatgacctcaaggacatgttggatgtgaaggagcggaaggttaatgttcttcagaagaagattgaaaatcttcaagagcagcttagagacaaggaaaagcagatgagcagcttgaaagaacgggtcaaatccttgcaggctgacaccaccaacactgacactgccttgacaactttggaggaggcccttgcagagaaagagcggacaattgaacgcttaaaggagcagagggacagagatgagcgagagaagcaagaggaaattgataactacaaaaaagatcttaaagacttgaaggaaaaagtcagcctgttgcaaggcgacctttcagagaaagaggcttcacttttggatctgaaagagcatgcttcttctctggcatcctcaggactgaaaaaggactcacggcttaagacactagagattgctttggagcagaagaaggaggagtgtctgaaaatggaatcacaattgaaaaaggcacatgaggcagcattggaagccagagccagtccagagatgagtgaccgaatacagcacttggagagagagatcaccaggtacaaagatgaatctagcaaggcccaggcagaagttgatcgactcttagaaatcttgaaggaggtggaaaatgagaagaatgacaaagataagaagatagctgagttggaaaggcaagtgaaagaccagaataagaaggtagcaaatctgaagcacaaggaacaggtggaaaaaaagaagagtgcacaaatgttagaggaggcgcgacgacgggaggacaatctcaacgacagctctcagcagctacaggacagtctccgtaagaaggatgacaggattgaagagctggaagaagcactaagagaaagtgtacagataactgcagagcgggaaatggtgctagcacaagaggaatcagccaggaccaatgctgaaaaacaggtggaggagttactgatggccatggagaaggtaaagcaggaactagaatccatgaaagcaaagctgtcctccacccagcagtctctggcagaaaaggaaactcacttgactaatcttcgggcagagagaaggaaacacttagaggaagttctggagatgaagcaagaagctcttctggctgccattagtgaaaaagacgccaatatagctctcttggagctttcgtcctctaagaagaagacccaagaggaagtggctgccctgaagcgggagaaggatcgtctggtacagcagcttaagcagcagacgcaaaatcgaatgaagctaatggccgacaactacgaggatgaccacttcaaatcctcccattccaatcaaacaaatcacaagccctccccagaccagatcatccagcccctcttagaacttgaccaaaatagaagtaaattaaagttgtacattggacacctgacaaccctctgccatgaccgagaccccctgatcctccgtggactcactccaccagcttcctataacttggacgatgaccaggcggcttgggagaatgagctgcagaagatgacccgggggcagcttcaggatgagttagagaaaggtgaacgggacaatgcagaactgcaggagtttgccaacgccattcttcagcagatagcagaccattgtcccgacatcctagagcaagtggtcaacgccctggaagagtcctcttgaccctgctttatggggaagcctgaggtagtcaacccaggagccaagaaaagagaactacgaggaacaggtgcccggaaccttcttggcaccaaacactacaaacttcatcccaacttgctcacttgaagaagtgtgattccagcaccgtttctacatctgccatcttactctgcctttctgctttggatgtggtctctacactaaccttcttgatgtccagggtagataaagggtcgaatctctctgaagaactgccacctggtcatcagcagtggagaactgtgggagctggtggctctgccctgacagagagccatggagcagaggagcctctcacctcctgtcctctgacatgagaatgaaaccaggaatggacttggagttcaacaggctgagaggatgcctccaatggaccagagagctgagtgttctaatatcacaataggtgctttctcctaaaagggcaaaaaacaatctcaaaaagattagaaaaagagaaggggggaagggaagagaaaatcgactcttctttttactgtctcttctgcttactttccacatgagatgctttgtaccggggagctgtgagcaggcctcacgatggcttgggagcactcgttctcccaaggtctgagtcttcatccagccctgcctgtctgtcgcagccttcctcactctgttcctcggccagttaacaagaagatggtgtgaggtgttctccaccagtctctcctgtttgagactgttgacgttatcatactgaggtgttagatcaaatatctctaattgaagaacatgtgaggttgaaagagcaccagccagggcaacatagcgtgaccctgtctctacaaaaaattaaaaaga

SEQ ID NO: 313882 - protein, 948 aa, Artificial Sequence
  derived and/or modified sequence
MYGSARSVGKVEPSSQSPGRSPRLPRSPRLGHRRTNSTGGSSGSSVGGGSGKTLSMENIQSLNAAYATSGPMYLSDHENVGSETPKSTMTLGRSGGRLPYGVRMTAMGSSPNIASSGVASDTIAFGEHHLPPVSMASTVPHSLRQARDNTIMDLQTQLKEVLRENDLLRKDVEVKESKLSSSMNSIKTFWSPELKKERALRKDEASKITIWKEQYRVVQEENQHMQMTIQALQDELRIQRDLNQLFQQDSSSRTGEPCVAELTEENFQRLHAEHERQAKELFLLRKTLEEMELRIETQKQTLNARDESIKKLLEMLQSKGLSAKATEEDHERTRRLAEAEMHVHHLESLLEQKEKENSMLREEMHRRFENAPDSAKTKALQTVIEMKDSKISSMERGLRDLEEEIQMLKSNGALSTEEREEEMKQMEVYRSHSKFMKNKIGQVKQELSRKDTELLALQTKLETLTNQFSDSKQHIEVLKESLTAKEQRAAILQTEVDALRLRLEEKETMLNKKTKQIQDMAEEKGTQAGEIHDLKDMLDVKERKVNVLQKKIENLQEQLRDKEKQMSSLKERVKSLQADTTNTDTALTTLEEALAEKERTIERLKEQRDRDEREKQEEIDNYKKDLKDLKEKVSLLQGDLSEKEASLLDLKEHASSLASSGLKKDSRLKTLEIALEQKKEECLKMESQLKKAHEAALEARASPEMSDRIQHLEREITRYKDESSKAQAEVDRLLEILKEVENEKNDKDKKIAELESLTSRQVKDQNKKVANLKHKEQVEKKKSAQMLEEARRREDNLNDSSQQLQVEELLMAMEKVKQELESMKAKLSSTQQSLAEKETHLTNLRAERRKHLEEVLEMKQEALLAAISEKDANIALLELSSSKKKTQEEVAALKREKDRLVQQLKQQTQNRMKLMADNYEDDHFKSSHSNQTNHKPSPDQDEEEGIWA

SEQ ID NO: 313883 - protein, 948 aa, Artificial Sequence
  derived and/or modified sequence
MYGSARSVGKVEPSSQSPGRSPRLPRSPRLGHRRTNSTGGSSGSSVGGGSGKTLSMENIQSLNAAYATSGPMYLSDHENVGSETPKSTMTLGRSGGRLPYGVRMTAMGSSPNIASSGVASDTIAFGEHHLPPVSMASTVPHSLRQARDNTIMDLQTQLKEVLRENDLLRKDVEVKESKLSSSMNSIKTFWSPELKKERALRKDEASKITIWKEQYRVVQEENQHMQMTIQALQDELRIQRDLNQLFQQDSSSRTGEPCVAELTEENFQRLHAEHERQAKELFLLRKTLEEMELRIETQKQTLNARDESIKKLLEMLQSKGLSAKATEEDHERTRRLAEAEMHVHHLESLLEQKEKENSMLREEMHRRFENAPDSAKTKALQTVIEMKDSKISSMERGLRDLEEEIQMLKSNGALSTEEREEEMKQMEVYRSHSKFMKNKIGQVKQELSRKDTELLALQTKLETLTNQFSDSKQHIEVLKESLTAKEQRAAILQTEVDALRLRLEEKETMLNKKTKQIQDMAEEKGTQAGEIHDLKDMLDVKERKVNVLQKKIENLQEQLRDKEKQMSSLKERVKSLQADTTNTDTALTTLEEALAEKERTIERLKEQRDRDEREKQEEIDNYKKDLKDLKEKVSLLQGDLSEKEASLLDLKEHASSLASSGLKKDSRLKTLEIALEQKKEECLKMESQLKKAHEAALEARASPEMSDRIQHLEREITRYKDESSKAQAEVDRLLEILKEVENEKNDKDKKIAELESLFSRQVKDQNKKVANLKHKEQVEKKKSAQMLEEARRREDNLNDSSQQLQVEELLMAMEKVKQELESMKAKLSSTQQSLAEKETHLTNLRAERRKHLEEVLEMKQEALLAAISEKDANIALLELSSSKKKTQEEVAALKREKDRLVQQLKQQTQNRMKLMADNYEDDHFKSSHSNQTNHKPSPDQDEEEGIWA

SEQ ID NO: 313884 - protein, 724 aa, Artificial Sequence
  derived and/or modified sequence
MQMTIQALQDELRIQRDLNQLFQQDSSSRTGEPCVAELTEENFQRLHAEHERQAKELFLLRKTLEEMELRIETQKQTLNARDESIKKLLEMLQSKGLSAKATEEDHERTRRLAEAEMHVHHLESLLEQKEKENSMLREEMHRRFENAPDSAKTKALQTVIEMKDSKISSMERGLRDLEEEIQMLKSNGALSTEEREEEMKQMEVYRSHSKFMKNKIGQVKQELSRKDTELLALQTKLETLTNQFSDSKQHIEVLKESLTAKEQRAAILQTEVDALRLRLEEKETMLNKKTKQIQDMAEEKGTQAGEIHDLKDMLDVKERKVNVLQKKIENLQEQLRDKEKQMSSLKERVKSLQADTTNTDTALTTLEEALAEKERTIERLKEQRDRDEREKQEEIDNYKKDLKDLKEKVSLLQGDLSEKEASLLDLKEHASSLASSGLKKDSRLKTLEIALEQKKEECLKMESQLKKAHEAALEARASPEMSDRIQHLEREITRYKDESSKAQAEVDRLLEILKEVENEKNDKDKKIAELESLTSRQVKDQNKKVANLKHKEQVEKKKSAQMLEEARRREDNLNDSSQQLQVEELLMAMEKVKQELESMKAKLSSTQQSLAEKETHLTNLRAERRKHLEEVLEMKQEALLAAISEKDANIALLELSSSKKKTQEEVAALKREKDRLVQQLKQQTQNRMKLMADNYEDDHFKSSHSNQTNHKPSPDQDEEEGIWA

SEQ ID NO: 313885 - DNA, 2847 bp, Artificial Sequence
  derived and/or modified sequence
atgtacggcagcgccagaagcgtgggcaaggtggagcccagcagccagagccccggcagaagccccagactgcccagaagccccagactgggccacagaagaaccaacagcaccggcggcagcagcggcagcagcgtgggcggcggcagcggcaagaccctgagcatggagaacatccagagcctgaacgccgcctacgccaccagcggccccatgtacctgagcgaccacgagaacgtgggcagcgagacccccaagagcaccatgaccctgggcagaagcggcggcagactgccctacggcgtgagaatgaccgccatgggcagcagccccaacatcgccagcagcggcgtggccagcgacaccatcgccttcggcgagcaccacctgccccccgtgagcatggccagcaccgtgccccacagcctgagacaggccagagacaacaccatcatggacctgcagacccagctgaaggaggtgctgagagagaacgacctgctgagaaaggacgtggaggtgaaggagagcaagctgagcagcagcatgaacagcatcaagaccttctggagccccgagctgaagaaggagagagccctgagaaaggacgaggccagcaagatcaccatctggaaggagcagtacagagtggtgcaggaggagaaccagcacatgcagatgaccatccaggccctgcaggacgagctgagaatccagagagacctgaaccagctgttccagcaggacagcagcagcagaaccggcgagccctgcgtggccgagctgaccgaggagaacttccagagactgcacgccgagcacgagagacaggccaaggagctgttcctgctgagaaagaccctggaggagatggagctgagaatcgagacccagaagcagaccctgaacgccagagacgagagcatcaagaagctgctggagatgctgcagagcaagggcctgagcgccaaggccaccgaggaggaccacgagagaaccagaagactggccgaggccgagatgcacgtgcaccacctggagagcctgctggagcagaaggagaaggagaacagcatgctgagagaggagatgcacagaagattcgagaacgcccccgacagcgccaagaccaaggccctgcagaccgtgatcgagatgaaggacagcaagatcagcagcatggagagaggcctgagagacctggaggaggagatccagatgctgaagagcaacggcgccctgagcaccgaggagagagaggaggagatgaagcagatggaggtgtacagaagccacagcaagttcatgaagaacaagatcggccaggtgaagcaggagctgagcagaaaggacaccgagctgctggccctgcagaccaagctggagaccctgaccaaccagttcagcgacagcaagcagcacatcgaggtgctgaaggagagcctgaccgccaaggagcagagagccgccatcctgcagaccgaggtggacgccctgagactgagactggaggagaaggagaccatgctgaacaagaagaccaagcagatccaggacatggccgaggagaagggcacccaggccggcgagatccacgacctgaaggacatgctggacgtgaaggagagaaaggtgaacgtgctgcagaagaagatcgagaacctgcaggagcagctgagagacaaggagaagcagatgagcagcctgaaggagagagtgaagagcctgcaggccgacaccaccaacaccgacaccgccctgaccaccctggaggaggccctggccgagaaggagagaaccatcgagagactgaaggagcagagagacagagacgagagagagaagcaggaggagatcgacaactacaagaaggacctgaaggacctgaaggagaaggtgagcctgctgcagggcgacctgagcgagaaggaggccagcctgctggacctgaaggagcacgccagcagcctggccagcagcggcctgaagaaggacagcagactgaagaccctggagatcgccctggagcagaagaaggaggagtgcctgaagatggagagccagctgaagaaggcccacgaggccgccctggaggccagagccagccccgagatgagcgacagaatccagcacctggagagagagatcaccagatacaaggacgagagcagcaaggcccaggccgaggtggacagactgctggagatcctgaaggaggtggagaacgagaagaacgacaaggacaagaagatcgccgagctggagagcctgaccagcagacaggtgaaggaccagaacaagaaggtggccaacctgaagcacaaggagcaggtggagaagaagaagagcgcccagatgctggaggaggccagaagaagagaggacaacctgaacgacagcagccagcagctgcaggtggaggagctgctgatggccatggagaaggtgaagcaggagctggagagcatgaaggccaagctgagcagcacccagcagagcctggccgagaaggagacccacctgaccaacctgagagccgagagaagaaagcacctggaggaggtgctggagatgaagcaggaggccctgctggccgccatcagcgagaaggacgccaacatcgccctgctggagctgagcagcagcaagaagaagacccaggaggaggtggccgccctgaagagagagaaggacagactggtgcagcagctgaagcagcagacccagaacagaatgaagctgatggccgacaactacgaggacgaccacttcaagagcagccacagcaaccagaccaaccacaagcccagccccgaccaggacgaggaggagggcatctgggcctag

SEQ ID NO: 313886 - DNA, 4955 bp, Artificial Sequence
  derived and/or modified sequence
gtgctgtggcggcggcggcggcggtagtggcggcggcggcggtgcctgggcggcagcagcagcagtagcggcagccctgaggacggtgagacggccgcggcggcggcgacagcgcggaagtcgcgcgggacccagagcttcccccctgtcgctagtgctgaggctttcgcctttcctacccagcttcttgctcacggcccgggctgggctgggcagggcaacgcgcccccggggaggggcggagctgtagatatggtgtaagatacttcttcaagattggacagctggggaccttcttctgattaaccttaaaccaacttgtagccatagagacacctcacaaggttcccatttttgttgttgttgttgttgattttctgctcacacctttcctgaccttgcaaccatgtatggaagtgcccgctctgttgggaaggtggagccgagcagccagagccctgggcgttcacccaggcttccacgttcccctcgcttgggtcaccgtcgaaccaacagtacgggagggagttcgggaagcagtgttggaggtggcagtgggaaaaccctttcaatggaaaatatacaatctttaaatgctgcctatgccacctctggccctatgtatctaagtgaccatgaaaatgtgggttcagaaacacctaaaagcaccatgacacttggccgttctgggggacgtctgccttacggtgttcggatgactgctatgggtagtagccccaatatagctagcagtggggttgctagtgacaccatagcatttggagagcatcacctccctcctgtgagtatggcatccactgtacctcactcccttcgtcaggcgagagataacacaatcatggatctgcagacacagctgaaggaagtattaagagaaaatgatctcttgcggaaggatgtggaagtaaaggagagcaaattgagttcttcaatgaatagcatcaagaccttctggagcccagagctgaagaaggaacgagccctgagaaaagatgaagcttccaaaatcaccatttggaaggaacagtacagagttgtacaggaggaaaaccagcacatgcagatgacaatccaggctctccaggatgaattgcggatccagagggacctgaatcagctgtttcagcaggatagtagcagcaggactggcgaaccttgtgtagcagagctgacagaggagaactttcagaggcttcatgctgagcatgagcggcaggccaaagagctgtttcttcttcgaaagacattggaggaaatggagctgcgtattgagactcaaaagcagaccctaaatgctcgggatgaatccattaagaagcttctggaaatgttgcagagcaaaggactttctgccaaggctaccgaggaagaccatgagagaacaagacgactggcagaggcagagatgcacgttcatcacctagaaagccttttggagcagaaggaaaaagagaacagtatgttgagagaggagatgcatcgaaggtttgagaatgctcctgattctgccaaaacaaaagctctgcaaactgttattgagatgaaggattcaaaaatttcctctatggagcgtgggcttcgagacctggaagaggaaattcagatgctgaaatcgaatggtgctttgagtactgaggaaagggaagaagaaatgaagcaaatggaagtgtatcggagccattctaaatttatgaaaaataagattggccaggtgaaacaggagctgtccagaaaggacacagaactactcgccctgcagacaaagctagaaacactcacaaaccagttctcagatagtaaacagcacattgaagtgttgaaggagtccttgactgctaaggagcagagggctgccatcctgcagactgaggtggatgctctccgattgcgtttggaagagaaggaaaccatgttgaataaaaagacaaaacaaattcaggatatggctgaagagaaggggacacaagctggagagatacatgacctcaaggacatgttggatgtgaaggagcggaaggttaatgttcttcagaagaagattgaaaatcttcaagagcagcttagagacaaggaaaagcagatgagcagcttgaaagaacgggtcaaatccttgcaggctgacaccaccaacactgacactgccttgacaactttggaggaggcccttgcagagaaagagcggacaattgaacgcttaaaggagcagagggacagagatgagcgagagaagcaagaggaaattgataactacaaaaaagatcttaaagacttgaaggaaaaagtcagcctgttgcaaggcgacctttcagagaaagaggcttcacttttggatctgaaagagcatgcttcttctctggcatcctcaggactgaaaaaggactcacggcttaagacactagagattgctttggagcagaagaaggaggagtgtctgaaaatggaatcacaattgaaaaaggcacatgaggcagcattggaagccagagccagtccagagatgagtgaccgaatacagcacttggagagagagatcaccaggtacaaagatgaatctagcaaggcccaggcagaagttgatcgactcttagaaatcttgaaggaggtggaaaatgagaagaatgacaaagataagaagatagctgagttggaaagtctcacctcaaggcaagtgaaagaccagaataagaaggtagcaaatctgaagcacaaggaacaggtggaaaaaaagaagagtgcacaaatgttagaggaggcgcgacgacgggaggacaatctcaacgacagctctcagcagctacaggtggaggagttactgatggccatggagaaggtaaagcaggaactagaatccatgaaagcaaagctgtcctccacccagcagtctctggcagaaaaggaaactcacttgactaatcttcgggcagagagaaggaaacacttagaggaagttctggagatgaagcaagaagctcttctggctgccattagtgaaaaagacgccaatatagctctcttggagctttcgtcctctaagaagaagacccaagaggaagtggctgccctgaagcgggagaaggatcgtctggtacagcagcttaagcagcagacgcaaaatcgaatgaagctaatggccgacaactacgaggatgaccacttcaaatcctcccattccaatcaaacaaatcacaagccctccccagaccaggatgaggaggagggtatatgggcatagccaatcagaggcttagttcagccattttgttcagaacgatcatccagcccctcttagaacttgaccaaaatagaagtaaattaaagttgtacattggacacctgacaaccctctgccatgaccgagaccccctgatcctccgtggactcactccaccagcttcctataacttggacgatgaccaggcggcttgggagaatgagctgcagaagatgacccgggggcagcttcaggatgagttagagaaaggtgaacgggacaatgcagaactgcaggagtttgccaacgccattcttcagcagatagcagaccattgtcccgacatcctagagcaagtggtcaacgccctggaagagtcctcttgaccctgctttatggggaagcctgaggtagtcaacccaggagccaagaaaagagaactacgaggaacaggtgcccggaaccttcttggcaccaaacactacaaacttcatcccaacttgctcacttgaagaagtgtgattccagcaccgtttctacatctgccatcttactctgcctttctgctttggatgtggtctctacactaaccttcttgatgtccagggtagataaagggtcgaatctctctgaagaactgccacctggtcatcagcagtggagaactgtgggagctggtggctctgccctgacagagagccatggagcagaggagcctctcacctcctgtcctctgacatgagaatgaaaccaggaatggacttggagttcaacaggctgagaggatgcctccaatggaccagagagctgagtgttctaatatcacaataggtgctttctcctaaaagggcaaaaaacaatctcaaaaagattagaaaaagagaaggggggaagggaagagaaaatcgactcttctttttactgtctcttctgcttactttccacatgagatgctttgtaccggggagctgtgagcaggcctcacgatggcttgggagcactcgttctcccaaggtctgagtcttcatccagccctgcctgtctgtcgcagccttcctcactctgttcctcggccagttaacaagaagatggtgtgaggtgttctccaccagtctctcctgtttgagactgttgacgttatcatactgaggtgttagatcaaatatctctaattgaagaacatgtgaggttgaaagagcaccagccagggcaacatagcgtgaccctgtctctacaaaaaattaaaaagagaacatacaaagttgacatatgagaccctgttgtccccgcctgcagctttgccccagtaacagatgcccgttgctcttgggctggtttcccctgaacacctccaagaggctgcctgccttgccagcacccgtgtcctgagctcctgcagcccagtggctgctgaagttgtgatccctcactcaccctgctagctttgcccttgactcgtcttctctgaacctcagcctcgtgcattgcctggaaccttcttctagcataaatgaaggtttttcctcctacacacattccttcctcggttatttcattcagagaatatttatgaaatgcctactgtgtgcaagtcatccatccttgaaaaggccacttctcagtgagggagagatgtagtggattctgtgagacatacctgctggagttgaagcagtaaatagcatgtccttcccctccccgatcttaaggtgtgttttctaga

SEQ ID NO: 313887 - DNA, 2847 bp, Artificial Sequence
  derived and/or modified sequence
atgtacggcagcgccagaagcgtgggcaaggtggagcccagcagccagagccccggcagaagccccagactgcccagaagccccagactgggccacagaagaaccaacagcaccggcggcagcagcggcagcagcgtgggcggcggcagcggcaagaccctgagcatggagaacatccagagcctgaacgccgcctacgccaccagcggccccatgtacctgagcgaccacgagaacgtgggcagcgagacccccaagagcaccatgaccctgggcagaagcggcggcagactgccctacggcgtgagaatgaccgccatgggcagcagccccaacatcgccagcagcggcgtggccagcgacaccatcgccttcggcgagcaccacctgccccccgtgagcatggccagcaccgtgccccacagcctgagacaggccagagacaacaccatcatggacctgcagacccagctgaaggaggtgctgagagagaacgacctgctgagaaaggacgtggaggtgaaggagagcaagctgagcagcagcatgaacagcatcaagaccttctggagccccgagctgaagaaggagagagccctgagaaaggacgaggccagcaagatcaccatctggaaggagcagtacagagtggtgcaggaggagaaccagcacatgcagatgaccatccaggccctgcaggacgagctgagaatccagagagacctgaaccagctgttccagcaggacagcagcagcagaaccggcgagccctgcgtggccgagctgaccgaggagaacttccagagactgcacgccgagcacgagagacaggccaaggagctgttcctgctgagaaagaccctggaggagatggagctgagaatcgagacccagaagcagaccctgaacgccagagacgagagcatcaagaagctgctggagatgctgcagagcaagggcctgagcgccaaggccaccgaggaggaccacgagagaaccagaagactggccgaggccgagatgcacgtgcaccacctggagagcctgctggagcagaaggagaaggagaacagcatgctgagagaggagatgcacagaagattcgagaacgcccccgacagcgccaagaccaaggccctgcagaccgtgatcgagatgaaggacagcaagatcagcagcatggagagaggcctgagagacctggaggaggagatccagatgctgaagagcaacggcgccctgagcaccgaggagagagaggaggagatgaagcagatggaggtgtacagaagccacagcaagttcatgaagaacaagatcggccaggtgaagcaggagctgagcagaaaggacaccgagctgctggccctgcagaccaagctggagaccctgaccaaccagttcagcgacagcaagcagcacatcgaggtgctgaaggagagcctgaccgccaaggagcagagagccgccatcctgcagaccgaggtggacgccctgagactgagactggaggagaaggagaccatgctgaacaagaagaccaagcagatccaggacatggccgaggagaagggcacccaggccggcgagatccacgacctgaaggacatgctggacgtgaaggagagaaaggtgaacgtgctgcagaagaagatcgagaacctgcaggagcagctgagagacaaggagaagcagatgagcagcctgaaggagagagtgaagagcctgcaggccgacaccaccaacaccgacaccgccctgaccaccctggaggaggccctggccgagaaggagagaaccatcgagagactgaaggagcagagagacagagacgagagagagaagcaggaggagatcgacaactacaagaaggacctgaaggacctgaaggagaaggtgagcctgctgcagggcgacctgagcgagaaggaggccagcctgctggacctgaaggagcacgccagcagcctggccagcagcggcctgaagaaggacagcagactgaagaccctggagatcgccctggagcagaagaaggaggagtgcctgaagatggagagccagctgaagaaggcccacgaggccgccctggaggccagagccagccccgagatgagcgacagaatccagcacctggagagagagatcaccagatacaaggacgagagcagcaaggcccaggccgaggtggacagactgctggagatcctgaaggaggtggagaacgagaagaacgacaaggacaagaagatcgccgagctggagagcctgttcagcagacaggtgaaggaccagaacaagaaggtggccaacctgaagcacaaggagcaggtggagaagaagaagagcgcccagatgctggaggaggccagaagaagagaggacaacctgaacgacagcagccagcagctgcaggtggaggagctgctgatggccatggagaaggtgaagcaggagctggagagcatgaaggccaagctgagcagcacccagcagagcctggccgagaaggagacccacctgaccaacctgagagccgagagaagaaagcacctggaggaggtgctggagatgaagcaggaggccctgctggccgccatcagcgagaaggacgccaacatcgccctgctggagctgagcagcagcaagaagaagacccaggaggaggtggccgccctgaagagagagaaggacagactggtgcagcagctgaagcagcagacccagaacagaatgaagctgatggccgacaactacgaggacgaccacttcaagagcagccacagcaaccagaccaaccacaagcccagccccgaccaggacgaggaggagggcatctgggcctag

SEQ ID NO: 313888 - DNA, 2175 bp, Artificial Sequence
  derived and/or modified sequence
atgcagatgaccatccaggccctgcaggacgagctgagaatccagagagacctgaaccagctgttccagcaggacagcagcagcagaaccggcgagccctgcgtggccgagctgaccgaggagaacttccagagactgcacgccgagcacgagagacaggccaaggagctgttcctgctgagaaagaccctggaggagatggagctgagaatcgagacccagaagcagaccctgaacgccagagacgagagcatcaagaagctgctggagatgctgcagagcaagggcctgagcgccaaggccaccgaggaggaccacgagagaaccagaagactggccgaggccgagatgcacgtgcaccacctggagagcctgctggagcagaaggagaaggagaacagcatgctgagagaggagatgcacagaagattcgagaacgcccccgacagcgccaagaccaaggccctgcagaccgtgatcgagatgaaggacagcaagatcagcagcatggagagaggcctgagagacctggaggaggagatccagatgctgaagagcaacggcgccctgagcaccgaggagagagaggaggagatgaagcagatggaggtgtacagaagccacagcaagttcatgaagaacaagatcggccaggtgaagcaggagctgagcagaaaggacaccgagctgctggccctgcagaccaagctggagaccctgaccaaccagttcagcgacagcaagcagcacatcgaggtgctgaaggagagcctgaccgccaaggagcagagagccgccatcctgcagaccgaggtggacgccctgagactgagactggaggagaaggagaccatgctgaacaagaagaccaagcagatccaggacatggccgaggagaagggcacccaggccggcgagatccacgacctgaaggacatgctggacgtgaaggagagaaaggtgaacgtgctgcagaagaagatcgagaacctgcaggagcagctgagagacaaggagaagcagatgagcagcctgaaggagagagtgaagagcctgcaggccgacaccaccaacaccgacaccgccctgaccaccctggaggaggccctggccgagaaggagagaaccatcgagagactgaaggagcagagagacagagacgagagagagaagcaggaggagatcgacaactacaagaaggacctgaaggacctgaaggagaaggtgagcctgctgcagggcgacctgagcgagaaggaggccagcctgctggacctgaaggagcacgccagcagcctggccagcagcggcctgaagaaggacagcagactgaagaccctggagatcgccctggagcagaagaaggaggagtgcctgaagatggagagccagctgaagaaggcccacgaggccgccctggaggccagagccagccccgagatgagcgacagaatccagcacctggagagagagatcaccagatacaaggacgagagcagcaaggcccaggccgaggtggacagactgctggagatcctgaaggaggtggagaacgagaagaacgacaaggacaagaagatcgccgagctggagagcctgaccagcagacaggtgaaggaccagaacaagaaggtggccaacctgaagcacaaggagcaggtggagaagaagaagagcgcccagatgctggaggaggccagaagaagagaggacaacctgaacgacagcagccagcagctgcaggtggaggagctgctgatggccatggagaaggtgaagcaggagctggagagcatgaaggccaagctgagcagcacccagcagagcctggccgagaaggagacccacctgaccaacctgagagccgagagaagaaagcacctggaggaggtgctggagatgaagcaggaggccctgctggccgccatcagcgagaaggacgccaacatcgccctgctggagctgagcagcagcaagaagaagacccaggaggaggtggccgccctgaagagagagaaggacagactggtgcagcagctgaagcagcagacccagaacagaatgaagctgatggccgacaactacgaggacgaccacttcaagagcagccacagcaaccagaccaaccacaagcccagccccgaccaggacgaggaggagggcatctgggcctag

SEQ ID NO: 313889 - DNA, 2847 bp, Artificial Sequence
  derived and/or modified sequence
atgtacggatcagcaaggtcagtgggaaaggtggagccctcatctcagagcccaggtcgatcacctaggctacccagaagccctagactggggcacagaagaactaactccacaggaggatcctccggatcctccgtcggtggtggaagcggaaagacacttagtatggagaacattcagagcttaaatgctgcttacgcaacgagcggccctatgtacctctcagatcatgagaacgtggggagcgaaaccccaaaatctacgatgacactaggccggtcagggggtaggctgccttatggtgttagaatgacagctatgggttcctcacccaacattgcctctagtggggtcgccagcgataccattgcattcggagaacaccacctcccaccagttagcatggcttccacagtcccccacagcctgcggcaggcgagagacaatacgattatggatctgcagacccagctaaaggaggtgttgcgcgaaaatgatctgttgcgcaaggacgtcgaggtgaaggagtcgaagctgagctccagtatgaatagcatcaaaacattctggtctcctgagctgaagaaggaacgagcgttgaggaaagacgaagctagcaaaattactatatggaaggagcagtacagggtcgttcaggaggaaaaccaacacatgcaaatgacaatccaggcgctgcaagatgagctcaggatccaacgggatcttaaccagctgtttcaacaggactctagttccagaactggcgagccgtgtgtggccgagctgactgaggaaaactttcaacgtctacacgccgagcatgagcgacaagcgaaagagctattcctgctccgcaagaccctcgaagaaatggaactccgaattgagacccagaaacagaccctaaatgctagagacgagagtatcaaaaaactgttggagatgctgcagagtaagggtctctctgcgaaggcaactgaggaggatcacgagaggaccaggcgactggctgaagccgagatgcacgtgcaccacctcgaatctctgctggaacaaaaagagaaggagaattcgatgctgcgggaggagatgcatcgacggttcgaaaatgcccccgattccgcaaagactaaagcactgcaaaccgtgattgagatgaaggattcaaaaataagctccatggaacgcggattgcgcgatctggaggaagagatccagatgcttaaatcaaacggagcactcagtacagaagagcgcgaagaggaaatgaagcagatggaagtgtaccgatcacattcaaagttcatgaaaaacaaaatcgggcaggttaagcaggagttgtctaggaaagacacggagctgctagcactgcagaccaagttggagacactcacaaaccagttcagcgactcaaaacagcatattgaagtgctcaaggagtcactgacggccaaggaacagagggctgctatactgcagactgaggtagatgcacttagattgcgcctggaagaaaaagagaccatgctgaataagaagacaaagcaaattcaggatatggcggaagagaagggaacccaagccggggagatccacgacctgaaggacatgctggatgtgaaggaaagaaaagtcaatgtgcttcaaaagaaaatcgagaatcttcaggagcagttacgggacaaggagaagcagatgagctctttgaaggagcgagtgaagagtttacaggctgacactacaaataccgatactgccctgacgactttagaggaggcgctcgccgaaaaagaacggactatcgagaggctgaaggagcaacgcgacagggacgaacgcgaaaaacaagaagaaatcgataattacaagaaggatttgaaagatctcaaggagaaagttagtctgctgcagggcgacctctccgagaaggaagcctcactcctcgacctcaaagagcatgcctcctccttagcctcatcaggattaaaaaaggactccagactcaaaactctggagattgctctggaacagaagaaggaagagtgtctaaaaatggagtcccagttaaagaaagcacacgaggccgcactggaagcaagggcgagtcccgagatgagcgaccgcattcagcacctcgagagggagatcaccaggtacaaagacgagtcttccaaggcccaggccgaggtagatagactcctggaaatattgaaggaggtggagaacgagaagaatgacaaagataaaaaaattgcagaactggagtccttgacttctaggcaggtcaaggatcagaataaaaaggtggctaatctgaagcacaaggaacaagtagaaaaaaagaagagcgcgcagatgctggaagaggcaagacggagggaggacaaccttaacgactcatcacagcagttacaggtggaggaactattaatggcaatggaaaaggtgaagcaagagctggaatcaatgaaggccaagctctcaagcacccagcaatcactcgctgagaaggagacacacctgactaacctccgagcagaaagaagaaaacacttggaggaagtgctcgaaatgaagcaggaagctcttttggccgctatcagcgagaaggatgccaacattgccctcctggagttgagtagctcaaagaaaaagactcaggaagaggttgcagcactcaaacgggagaaagaccgattggttcagcagctgaaacagcagacccagaacagaatgaagctgatggccgacaactatgaagacgatcacttcaaaagttcacatagcaaccagacaaaccacaagccgagccctgaccaggacgaagaggaagggatttgggcttag

SEQ ID NO: 313890 - DNA, 2847 bp, Artificial Sequence
  derived and/or modified sequence
atgtacggctccgccaggtcggtggggaaggttgagccttcgtcccagagccccggtaggtcccctagactccctagaagccctagactcggtcatcgtagaaccaattccaccgggggttcgagtgggagctccgttggcggagggtcaggtaagacactatccatggagaacatacaatcacttaatgcggcctacgctacaagcggcccgatgtacctctccgaccacgaaaatgtgggatccgagactcccaaaagtacaatgactttaggcagatccggcggtcggctgccttatggcgtccgaatgaccgcaatgggctcatctcccaacatagccagttccggcgtggcgtctgatacaatagcattcggagagcaccacctaccaccggtttcaatggcttccacagtcccacattccctgcggcaggcgcgcgacaacacaatcatggatttgcagacacagctgaaggaggtgttaagagaaaacgatttgttacggaaggatgtggaagtgaaagaaagtaagttgtccagctctatgaattcaattaagaccttttggagcccagaattgaagaaggagcgcgcactgagaaaggacgaagcatccaagattacaatctggaaagagcaatatcgagttgtccaggaggagaatcagcacatgcagatgaccattcaagccctccaggacgagctgaggatacagcgcgatctgaaccagctctttcagcaggatagctcctctagaacaggggaaccttgcgtagccgaactgacggaagaaaattttcagagactccacgccgagcacgagcgacaggcaaaggagctctttctacttcggaagacactggaagagatggagttgcgcattgaaactcagaagcagacactgaacgcccgggatgagtctattaagaagttgcttgaaatgctacagtcaaagggactttccgccaaggcaactgaagaagatcacgaaaggactagaagacttgccgaggcagaaatgcatgtgcatcatctcgagtcacttcttgagcagaaggagaaagagaactctatgctgagagaagagatgcaccgccgcttcgagaacgcgcccgactctgccaagacgaaagcactgcagacagttatcgaaatgaaagactcaaagatttctagtatggaaagagggcttagggatctggaagaggaaatacaaatgcttaaaagcaacggtgccctctcgacggaggagcgcgaagaggagatgaagcaaatggaggtgtataggtcccactccaagtttatgaagaataaaattggacaagtgaaacaggaattatctagaaaggatactgaactcctggccctgcagacaaaactagagacactgaccaaccagtttagcgatagcaagcagcatatcgaggtgctcaaggaatccctgacagctaaagagcagagagctgctatcctccagacggaagtggatgccctaagactccggctggaggagaaggagaccatgcttaataaaaagactaagcagatccaggatatggccgaggaaaagggaacacaggctggcgagattcacgacttaaaagacatgctcgacgtgaaggagagaaaagtgaacgttctccagaaaaagatcgaaaacctccaagaacagctccgagacaaggagaaacaaatgagcagcttaaaagaaagagtgaagtctctgcaagcagatacgaccaacaccgacacggcattaactaccctcgaagaggccctggctgaaaaggagaggaccatcgagagactgaaggagcagcgggaccgagatgaacgggagaagcaagaagaaatagacaactacaaaaaggacctgaaggacttgaaggagaaggtgtctctgctccagggggaccttagtgaaaaggaggctagtttgcttgatttgaaggagcacgctagtagtttagcttcctctggcttgaagaaggattctaggctgaagaccctggaaatcgcacttgaacagaaaaaggaggagtgtctgaagatggaaagccagctcaagaaagcccacgaggccgcactagaggcccgcgcatcgcccgaaatgtcggaccggatccaacacctcgagagggagatcaccagatacaaagacgaatcctcaaaggctcaggccgaagttgacagactgctagagatcctgaaggaagtagagaatgagaagaatgacaaggacaaaaaaatcgccgagctggaatcgctattcagccgccaggtgaaagatcagaacaaaaaggtagccaatctcaaacataaggagcaggtggaaaaaaagaagtctgcgcagatgctagaggaagcacgaaggcgtgaagacaatttgaacgactcatcgcagcagctgcaggttgaagaactactgatggccatggagaaggttaagcaggaactggaaagcatgaaggcaaagctgagctccacccagcaatcattggctgagaaggagactcatttaaccaatctgcgcgcagagagaagaaagcacttggaggaagtgttggagatgaagcaggaggcactccttgctgccatatccgagaaagacgccaatattgctcttctggagctgagttcatctaagaaaaaaacccaggaagaggttgctgctttgaagcgagaaaaggaccgcctggtacagcagcttaaacaacaaacacaaaatagaatgaaactcatggcggacaattacgaggacgaccacttcaagagttcacacagcaaccagactaatcacaaaccctccccagaccaggacgaggaggaggggatttgggcatag

SEQ ID NO: 313891 - DNA, 2175 bp, Artificial Sequence
  derived and/or modified sequence
atgcaaatgaccatccaggctttgcaggatgagttaaggatccagcgcgaccttaaccagctgtttcaacaagattccagcagtagaactggcgaaccgtgtgttgccgaactgactgaggaaaacttccagcggttacatgccgaacatgagcggcaggcgaaggagctgttcctcctacgtaagaccttagaagaaatggaactgaggattgagacccagaagcagacactgaacgccagggatgagtcaatcaagaagctcctggagatgctacagtcgaagggtctgagtgcaaaagcaactgaagaagatcacgagagaacccgacgtttagcagaggcagagatgcacgtgcatcacctggagagtctgttggagcagaaggagaaagaaaactcaatgctgagagaggaaatgcacagacggtttgagaatgctcctgactcagccaagaccaaagcgctgcagaccgttatcgagatgaaagattctaagatttctagcatggaacgcggcctccgagatctcgaggaggaaatccagatgctgaagagcaacggggccctgagcaccgaggaaagggaggaggagatgaaacaaatggaggtgtatcgttcccatagcaaatttatgaaaaacaagattggtcaggtgaaacaggaactgtctagaaaggatactgagcttctcgccttgcagaccaaactcgaaactctgaccaaccaattcagtgatagcaagcaacatatcgaagtgctgaaggagagcctgactgccaaggagcagagggcagcgattctgcagaccgaggttgatgcactgcgactccgtcttgaagagaaggagactatgctgaataaaaagaccaagcagattcaagatatggcggaagagaaaggcacccaagctggggagatacacgatctgaaggatatgctggacgtaaaagagcgtaaggtcaacgttttgcagaagaagatcgaaaatttgcaagagcagctgagggataaggagaaacagatgtcttctctgaaggaaagagttaaatctctgcaggcagatacaacgaacactgacacagctttaactaccctggaagaagcactggccgagaaggaacggacaatcgagaggctgaaagaacagcgagatcgagacgaacgggaaaaacaggaagagatcgacaattacaagaaagatctgaaagacctcaaggagaaagtgtctctattgcagggtgacttgtcggagaaagaggcatctcttttagaccttaaagaacacgcgagcagcctcgcaagttccgggctgaaaaaggattcgcgtcttaaaaccctggagattgccttagaacaaaaaaaggaggagtgcttaaagatggagagtcagctgaaaaaagcccatgaagcagcccttgaagctagagcgtctcccgaaatgagcgaccggattcagcaccttgaacgtgagattacacggtacaaggacgaatcttctaaagcccaggcggaagtggacaggctactggaaatcttgaaggaagtcgagaacgagaaaaacgataaagacaagaaaatcgctgagctcgaatctctgactagccgacaagtaaaggaccaaaataagaaggtcgctaacctcaagcacaaggaacaggtggagaaaaagaaatccgcccagatgctggaagaggcaaggcgcagagaggacaacctgaatgacagctctcaacagttacaggtggaagagctactgatggcaatggagaaggtaaagcaggagctggaatctatgaaagccaagttgagctcaacacagcagagtttggccgagaaagaaactcacttgactaatttgagggcagagcggaggaagcatctggaggaggtactggaaatgaagcaagaggctctgttggccgcaatttcagaaaaagatgccaatattgccctcctggagctgtcttctagcaagaagaagacccaggaagaagtcgctgccttaaagcgagaaaaggatagattagtccagcaactcaagcaacagacccagaatcgtatgaagcttatggccgacaactatgaggatgaccatttcaaaagcagccactcgaaccagacaaaccataaaccatctccggaccaggacgaagaggaaggaatttgggcctag

SEQ ID NO: 313892 - DNA, 2847 bp, Artificial Sequence
  derived and/or modified sequence
atgtatggcagcgcccggtctgtgggcaaggtggagcccagcagccagagccctggccgcagcccccggctgcccaggagcccccggctgggccacaggaggaccaacagcactggaggcagcagcggcagctctgtgggcggcggcagcggcaagaccctgtccatggagaacatccagagcctgaatgctgcctatgccaccagcggccccatgtacctgagtgaccatgaaaatgtgggcagcgagacccccaagagcaccatgaccctgggccgcagcggcggccgcctgccctacggcgtgaggatgacagccatgggcagcagccccaacatcgccagcagcggcgtggccagtgacaccatcgcctttggagagcaccacctgccccctgtgtccatggccagcacagtgccccacagcctgcggcaggcccgggacaacaccatcatggacctgcagacccagctgaaggaggtgctgcgggagaatgacctgctgaggaaggatgtggaggtgaaggagagcaagctgagcagctccatgaacagcatcaagaccttctggagccctgagctgaagaaggagcgggccctgaggaaggatgaggccagcaagatcaccatctggaaggagcagtacagagtggtgcaggaggagaaccagcacatgcagatgaccatccaggccctgcaggatgagctgcgcatccagagggacctgaaccagctgttccagcaggacagcagcagcaggactggagagccctgtgtggccgagctgacagaggagaacttccagaggctgcacgccgagcacgagcggcaggccaaggagctgttcctgctgaggaagaccctggaggagatggagctgagaattgagacccagaagcagaccctgaatgccagagatgagagcatcaagaagctgctggagatgctgcagagcaagggcctgagcgccaaggccacagaggaggaccacgagaggacccggcggctggccgaggccgagatgcacgtgcaccacctggagagcctgctggagcagaaggagaaggagaacagcatgctgcgggaggagatgcacagaagatttgaaaatgccccagacagcgccaagaccaaggccctgcagaccgtcatcgagatgaaggacagcaagatcagctccatggagcggggcctgcgggacctggaggaggagatccagatgctgaagagcaatggagccctgagcacagaggagcgggaggaggagatgaagcagatggaggtgtaccgcagccacagcaagttcatgaagaacaagattggccaggtgaagcaggagctgagcaggaaggacacagagctgctggccctgcagaccaagctggagaccctgaccaaccagttcagtgacagcaagcagcacatcgaggtgctgaaggagagcctgacagccaaggagcagagagctgccatcctgcagacagaggtggatgccctgcggctgcggctggaggagaaggagaccatgctgaacaagaagaccaagcagatccaggacatggccgaggagaagggcacccaggccggggagatccatgacctgaaggacatgctggatgtgaaggagaggaaggtgaatgtgctgcagaagaagattgagaacctgcaggagcagctgcgggacaaggagaagcagatgagcagcctgaaggagcgggtgaagagcctgcaggccgacaccaccaacacagacacagccctgaccaccctggaggaggccctggccgagaaggagaggaccatcgagcggctgaaggagcagagggacagagatgagcgggagaagcaggaggagattgacaactacaagaaggacctgaaggacctgaaggagaaggtgtccctgctgcagggcgacctgtctgagaaggaggccagcctgctggacctgaaggagcacgccagcagcctggccagcagcggcctgaagaaggacagccggctgaagaccctggagatcgccctggagcagaagaaggaggagtgcctgaagatggagagccagctgaagaaggcccatgaagctgccctggaggcccgggccagccctgagatgtctgaccgcatccagcacctggagcgggagatcacccgctacaaggatgagagcagcaaggcccaggccgaggtggaccggctgctggagatcctgaaggaggtggagaatgagaagaatgacaaggacaagaagattgctgagctggagagcctgaccagccggcaggtgaaggaccagaacaagaaggtggccaacctgaagcacaaggagcaggtggagaagaagaagagcgcccagatgctggaggaggcccggcggcgggaggacaacctgaatgacagcagccagcagctgcaggtggaggagctgctgatggccatggagaaggtgaagcaggagctggagagcatgaaggccaagctgagcagcacccagcagagcctggccgagaaggagacccacctgaccaacctgcgggcagagaggaggaagcacctggaggaggtgctggagatgaagcaggaggccctgctggccgccatcagcgagaaggatgccaacatcgccctgctggagctgagcagcagcaagaagaagacccaggaggaggtggccgccctgaagcgggagaaggaccggctggtgcagcagctgaagcagcagacccagaacaggatgaagctgatggctgacaactatgaagatgaccacttcaagagcagccacagcaaccagaccaaccacaagcccagcccagaccaggatgaggaggagggcatctgggcctag

SEQ ID NO: 313893 - DNA, 2847 bp, Artificial Sequence
  derived and/or modified sequence
atgtatggcagcgcccggtctgtgggcaaggtggagcccagcagccagagccctggccgcagcccccggctgcccaggagcccccggctgggccacaggaggaccaacagcactggaggcagcagcggcagctctgtgggcggcggcagcggcaagaccctgtccatggagaacatccagagcctgaatgctgcctatgccaccagcggccccatgtacctgagtgaccatgaaaatgtgggcagcgagacccccaagagcaccatgaccctgggccgcagcggcggccgcctgccctacggcgtgaggatgacagccatgggcagcagccccaacatcgccagcagcggcgtggccagtgacaccatcgcctttggagagcaccacctgccccctgtgtccatggccagcacagtgccccacagcctgcggcaggcccgggacaacaccatcatggacctgcagacccagctgaaggaggtgctgcgggagaatgacctgctgaggaaggatgtggaggtgaaggagagcaagctgagcagctccatgaacagcatcaagaccttctggagccctgagctgaagaaggagcgggccctgaggaaggatgaggccagcaagatcaccatctggaaggagcagtacagagtggtgcaggaggagaaccagcacatgcagatgaccatccaggccctgcaggatgagctgcgcatccagagggacctgaaccagctgttccagcaggacagcagcagcaggactggagagccctgtgtggccgagctgacagaggagaacttccagaggctgcacgccgagcacgagcggcaggccaaggagctgttcctgctgaggaagaccctggaggagatggagctgagaattgagacccagaagcagaccctgaatgccagagatgagagcatcaagaagctgctggagatgctgcagagcaagggcctgagcgccaaggccacagaggaggaccacgagaggacccggcggctggccgaggccgagatgcacgtgcaccacctggagagcctgctggagcagaaggagaaggagaacagcatgctgcgggaggagatgcacagaagatttgaaaatgccccagacagcgccaagaccaaggccctgcagaccgtcatcgagatgaaggacagcaagatcagctccatggagcggggcctgcgggacctggaggaggagatccagatgctgaagagcaatggagccctgagcacagaggagcgggaggaggagatgaagcagatggaggtgtaccgcagccacagcaagttcatgaagaacaagattggccaggtgaagcaggagctgagcaggaaggacacagagctgctggccctgcagaccaagctggagaccctgaccaaccagttcagtgacagcaagcagcacatcgaggtgctgaaggagagcctgacagccaaggagcagagagctgccatcctgcagacagaggtggatgccctgcggctgcggctggaggagaaggagaccatgctgaacaagaagaccaagcagatccaggacatggccgaggagaagggcacccaggccggggagatccatgacctgaaggacatgctggatgtgaaggagaggaaggtgaatgtgctgcagaagaagattgagaacctgcaggagcagctgcgggacaaggagaagcagatgagcagcctgaaggagcgggtgaagagcctgcaggccgacaccaccaacacagacacagccctgaccaccctggaggaggccctggccgagaaggagaggaccatcgagcggctgaaggagcagagggacagagatgagcgggagaagcaggaggagattgacaactacaagaaggacctgaaggacctgaaggagaaggtgtccctgctgcagggcgacctgtctgagaaggaggccagcctgctggacctgaaggagcacgccagcagcctggccagcagcggcctgaagaaggacagccggctgaagaccctggagatcgccctggagcagaagaaggaggagtgcctgaagatggagagccagctgaagaaggcccatgaagctgccctggaggcccgggccagccctgagatgtctgaccgcatccagcacctggagcgggagatcacccgctacaaggatgagagcagcaaggcccaggccgaggtggaccggctgctggagatcctgaaggaggtggagaatgagaagaatgacaaggacaagaagattgctgagctggagagcctcttcagccggcaggtgaaggaccagaacaagaaggtggccaacctgaagcacaaggagcaggtggagaagaagaagagcgcccagatgctggaggaggcccggcggcgggaggacaacctgaatgacagcagccagcagctgcaggtggaggagctgctgatggccatggagaaggtgaagcaggagctggagagcatgaaggccaagctgagcagcacccagcagagcctggccgagaaggagacccacctgaccaacctgcgggcagagaggaggaagcacctggaggaggtgctggagatgaagcaggaggccctgctggccgccatcagcgagaaggatgccaacatcgccctgctggagctgagcagcagcaagaagaagacccaggaggaggtggccgccctgaagcgggagaaggaccggctggtgcagcagctgaagcagcagacccagaacaggatgaagctgatggctgacaactatgaagatgaccacttcaagagcagccacagcaaccagaccaaccacaagcccagcccagaccaggatgaggaggagggcatctgggcctag

SEQ ID NO: 313894 - DNA, 2175 bp, Artificial Sequence
  derived and/or modified sequence
atgcagatgaccatccaggccctgcaggatgagctgcgcatccagagggacctgaaccagctgttccagcaggacagcagcagcaggactggagagccctgtgtggccgagctgacagaggagaacttccagaggctgcacgccgagcacgagcggcaggccaaggagctgttcctgctgaggaagaccctggaggagatggagctgagaattgagacccagaagcagaccctgaatgccagagatgagagcatcaagaagctgctggagatgctgcagagcaagggcctgagcgccaaggccacagaggaggaccacgagaggacccggcggctggccgaggccgagatgcacgtgcaccacctggagagcctgctggagcagaaggagaaggagaacagcatgctgcgggaggagatgcacagaagatttgaaaatgccccagacagcgccaagaccaaggccctgcagaccgtcatcgagatgaaggacagcaagatcagctccatggagcggggcctgcgggacctggaggaggagatccagatgctgaagagcaatggagccctgagcacagaggagcgggaggaggagatgaagcagatggaggtgtaccgcagccacagcaagttcatgaagaacaagattggccaggtgaagcaggagctgagcaggaaggacacagagctgctggccctgcagaccaagctggagaccctgaccaaccagttcagtgacagcaagcagcacatcgaggtgctgaaggagagcctgacagccaaggagcagagagctgccatcctgcagacagaggtggatgccctgcggctgcggctggaggagaaggagaccatgctgaacaagaagaccaagcagatccaggacatggccgaggagaagggcacccaggccggggagatccatgacctgaaggacatgctggatgtgaaggagaggaaggtgaatgtgctgcagaagaagattgagaacctgcaggagcagctgcgggacaaggagaagcagatgagcagcctgaaggagcgggtgaagagcctgcaggccgacaccaccaacacagacacagccctgaccaccctggaggaggccctggccgagaaggagaggaccatcgagcggctgaaggagcagagggacagagatgagcgggagaagcaggaggagattgacaactacaagaaggacctgaaggacctgaaggagaaggtgtccctgctgcagggcgacctgtctgagaaggaggccagcctgctggacctgaaggagcacgccagcagcctggccagcagcggcctgaagaaggacagccggctgaagaccctggagatcgccctggagcagaagaaggaggagtgcctgaagatggagagccagctgaagaaggcccatgaagctgccctggaggcccgggccagccctgagatgtctgaccgcatccagcacctggagcgggagatcacccgctacaaggatgagagcagcaaggcccaggccgaggtggaccggctgctggagatcctgaaggaggtggagaatgagaagaatgacaaggacaagaagattgctgagctggagagcctgaccagccggcaggtgaaggaccagaacaagaaggtggccaacctgaagcacaaggagcaggtggagaagaagaagagcgcccagatgctggaggaggcccggcggcgggaggacaacctgaatgacagcagccagcagctgcaggtggaggagctgctgatggccatggagaaggtgaagcaggagctggagagcatgaaggccaagctgagcagcacccagcagagcctggccgagaaggagacccacctgaccaacctgcgggcagagaggaggaagcacctggaggaggtgctggagatgaagcaggaggccctgctggccgccatcagcgagaaggatgccaacatcgccctgctggagctgagcagcagcaagaagaagacccaggaggaggtggccgccctgaagcgggagaaggaccggctggtgcagcagctgaagcagcagacccagaacaggatgaagctgatggctgacaactatgaagatgaccacttcaagagcagccacagcaaccagaccaaccacaagcccagcccagaccaggatgaggaggagggcatctgggcctag

SEQ ID NO: 313895 - DNA, 2847 bp, Artificial Sequence
  derived and/or modified sequence
atgtacggcagcgcccggagcgtgggcaaggtggagcccagcagccagtccccaggccggtcaccgagactccctcgttctccccgacttggacatcgccgaacgaactccacagggggttctagcggatcctccgtgggcggcggcagtggcaagacccttagcatggaaaatattcaaagcctcaacgccgcatacgccacgtccgggcctatgtacttaagtgatcacgaaaatgtgggcagtgagacccccaaatccacaatgaccctggggcggtctggtggtagactaccgtacggggtgagaatgactgctatgggaagtagtcccaacatcgcctcttccggggtcgcatcggacaccattgcctttggagagcaccaccttccacccgtctcgatggcttcaaccgtgccccatagcctgagacaagctcgagacaacaccatcatggacctgcaaacccagctcaaggaagtcctacgagagaatgatctgctgcggaaagacgtggaagtgaaggagtcaaaacttagcagttcgatgaattccattaaaacattttggagccccgagttgaaaaaggagcgggccttgaggaaagatgaggcctccaaaattacaatctggaaagaacagtacagagtcgtgcaggaggagaatcagcacatgcagatgaccatccaggcattacaagatgaacttagaatccagagggatcttaatcaactgttccagcaggactcctcaagtcgcactggggagccctgtgtggctgaactaaccgaggagaacttccagcgtcttcacgctgagcatgagcgacaggcaaaggagctgttcctcctgcggaaaaccctggaggaaatggagctgaggatcgagacgcaaaagcagactttgaatgcacgggatgagtcaatcaaaaagttgctggaaatgctgcagagcaaagggctgtccgccaaagcaacagaagaagatcatgaaagaactcgcaggcttgctgaagctgagatgcacgtccatcacctagaaagcctgctggaacagaaagagaaggagaattccatgttgcgagaagaaatgcaccggagatttgagaacgcaccagattccgctaaaaccaaggcgttgcagacagttatcgaaatgaaggactctaagatttcctcaatggagagggggctcagggacttggaagaagagatccagatgctcaagtctaacggcgccctgagtaccgaagaacgagaagaggagatgaagcagatggaggtttacagaagccacagcaagtttatgaaaaacaaaatcgggcaggtcaaacaggagcttagcagaaaggatactgagctcttggccttgcagaccaagttggaaacactgacaaatcagttctcagactccaaacaacatattgaagtgctgaaggaatctctcaccgccaaagagcagagagccgccattcttcagacagaggtcgatgcactgcggctgcgcctcgaggagaaggaaactatgttaaacaaaaaaactaagcagattcaggacatggccgaggaaaaaggcactcaagcaggagagatccatgatttgaaagacatgttagacgtgaaggagcgcaaggtgaacgtgctgcagaagaagatagaaaacctgcaggagcagctgcgagataaagagaagcagatgtcttcccttaaagagcgcgtgaagagcctgcaggccgatactacaaatactgatactgccttgaccacccttgaggaagccctggctgaaaaagagaggaccatagagcgcctgaaggaacaacgggacagggatgagcgagagaagcaggaggagatcgataattataaaaaggacctgaaagatttaaaagagaaagtgtcccttctccagggggacttgtctgaaaaagaggcaagcctgctggatcttaaggagcatgcctcctcccttgcctcttctggattaaagaaagatagtcgactcaaaacactggaaatcgcacttgaacagaaaaaggaagagtgcctcaagatggaaagtcaacttaaaaaagctcatgaggccgccctcgaagccagagcaagtccggaaatgtccgatagaattcagcatctcgagcgcgaaatcacccggtataaggacgagtccagtaaagcccaggccgaggtcgatagactcctcgagattctgaaggaggttgagaatgagaaaaacgacaaggacaaaaagatcgccgagttggagagcctgacttcgagacaagttaaggatcagaacaaaaaggttgccaacctaaaacacaaagagcaagtggagaagaagaaatctgcccagatgctcgaggaggccagacgaagagaggataatcttaatgatagctcccagcagctacaggttgaggagctcctgatggcgatggagaaggtgaagcaagagttagaatctatgaaagcgaagttgagcagtacgcagcagtcactggccgagaaggaaacgcacctgaccaacttaagggctgaacgtcgcaagcatcttgaagaagtccttgaaatgaagcaggaagccctgctagctgccatttctgagaaggatgccaacattgcccttctggagctgagctccagtaaaaaaaagacacaagaggaagttgcagctttaaagcgcgagaaggacaggttagtgcaacagcttaagcagcagacacaaaatcggatgaagctgatggccgataattatgaagacgatcactttaaatccagtcactctaatcagactaaccacaaacctagtccggaccaggatgaggaagagggtatttgggcatag

SEQ ID NO: 313896 - DNA, 2847 bp, Artificial Sequence
  derived and/or modified sequence
atgtacggcagcgcccggagcgtgggcaaggtggagcccagcagccagtccccaggacgttcacctaggctgcctaggtcaccgcggctcgggcatcggcgcactaacagcacaggcggctcgtcgggatcatccgttggggggggttccggaaagactctctctatggaaaacattcagtctctgaatgcagcctatgccaccagtggacctatgtacttgtctgaccacgagaacgtggggtccgaaacccctaaaagcaccatgacgctcggacgcagtggcgggcggctgccgtatggggtccggatgacagcaatgggcagctctccaaatatcgccagcagcggggtggcctctgacacaatcgcgttcggagaacaccatctccctccggtatcgatggcttccactgttccccactccttaagacaagcgagagacaacaccataatggacctgcagactcagttaaaggaagtcttacgtgaaaatgacctgctacgaaaggacgtcgaggtcaaggaatccaagctgtcctcctcaatgaacagcatcaagactttctggtcccccgagttaaagaaggagcgagccctacggaaggacgaggcctccaaaattacgatctggaaagaacagtatcgagtggtgcaggaagaaaaccagcatatgcagatgactatccaggcattacaggatgagctcagaatccagcgtgaccttaatcaactgtttcagcaagactcctccagcagaaccggggagccctgtgtggctgagctcaccgaagagaatttccaaagattgcatgccgagcacgaacgccaggccaaggaactgtttttgctgcgtaagacactggaagagatggaacttcgcatagaaacccagaagcagacactaaacgcccgtgacgagtcgataaagaagctcttggagatgctgcaatcgaaggggctgtcagccaaagcaactgaagaggatcatgagagaacccggcgattggccgaggctgaaatgcatgtgcatcacttagaatctctgctcgagcagaaggaaaaagagaattcgatgctgcgggaggagatgcatcgacgattcgaaaacgcccctgattccgcgaagacaaaggcattgcagacagttatcgagatgaaagactctaaaatcagctccatggaaagggggctgcgcgacttggaggaagaaatacagatgttgaaatcaaatggggccctgtccacagaggaaagagaggaagaaatgaaacagatggaagtttaccgtagtcactccaaatttatgaaaaacaaaattggccaagtgaagcaggaattgagccggaaagacactgaactgctggcactgcagacaaagctggaaactctgactaatcagttttctgatagcaagcagcacatcgaggtactgaaagaaagtttgaccgccaaagaacagcgggctgctatcctacagacggaggtcgacgcactgcgcctgcgcttggaggagaaggaaaccatgctgaataaaaagacaaagcagattcaggacatggcagaagagaaggggacccaggcaggagagatacatgatctgaaggatatgctggacgtcaaggaacgaaaagtcaatgttctgcagaaaaaaatcgagaatctccaggaacagctgcgcgacaaagaaaagcaaatgagttcactgaaagaaagagtgaaaagcctgcaggctgacacgacaaatacagataccgctttaactacccttgaggaggcactcgccgaaaaggaacgaaccattgagcggctaaaggagcagagagatagagacgaacgtgaaaagcaggaagagatcgataactacaaaaaggacctcaaggatctcaaggagaaggtgtcactgttgcagggcgacctgtctgagaaggaggcttccctacttgatctgaaggagcatgcgtcatcactggccagttctggtctcaaaaaggactcccgcctaaaaacattggagatcgccttggagcagaagaaggaggagtgcttgaagatggagtcccagctgaagaaggcacatgaggctgctctggaagcccgcgcaagcccagaaatgtccgatcgtatccagcacttagagcgcgagatcacacgctacaaagatgagagcagcaaagcccaggcggaggtagaccggcttcttgagattttaaaagaagtagagaacgagaagaatgataaggataaaaagatcgcagaactggagagcttattcagtcgtcaggtgaaggatcagaacaagaaagtcgccaatttgaagcacaaggaacaggttgaaaaaaagaagtctgcacagatgctggaagaggcaaggcgacgcgaggataatctgaatgactcatcacagcaactacaggtcgaggagctccttatggccatggagaaggtcaagcaagagctggagtctatgaaggcaaaactgagcagcacccagcagagccttgccgaaaaggaaacccatcttacaaacctaagagcggagaggcggaaacatctggaggaggtgctggagatgaaacaggaagctctgttggccgctatttccgaaaaagacgcaaacatcgcattactggagctgagcagttctaagaagaagacacaggaagaagttgcagcactgaagagggagaaagacagacttgtgcagcagctgaaacagcaaacacagaatcgcatgaagctgatggctgataattacgaagacgaccactttaaaagcagccattccaaccagactaaccacaaaccttcccctgaccaggacgaggaagagggcatatgggcttag

SEQ ID NO: 313897 - DNA, 2175 bp, Artificial Sequence
  derived and/or modified sequence
atgcagatgaccatccaggccctgcaggacgagctgcggatccagagggatctgaatcagcttttccaacaggacagttcctcacggacaggagaaccctgcgtggccgaactcacagaggaaaactttcagagactacatgccgagcatgagaggcaggcgaaagagctcttcctgctcaggaagactctggaggaaatggagctccggatagagacacagaagcagacgctaaacgcccgtgacgagtctattaaaaagctcttggaaatgctgcaatctaagggcctgtcagcaaaagccacagaggaagatcacgagcgcacaaggcgcctcgcagaggccgagatgcacgtgcatcacctggagtctttactggaacagaaggagaaggagaattctatgctgagagaggagatgcacaggagatttgaaaacgcccccgacagcgccaagaccaaggccctgcagactgttattgaaatgaaggatagtaagatttcttccatggagcgcgggctgagggatctggaagaagagatccaaatgctaaaaagcaacggcgctctgagcacagaggaaagggaagaagaaatgaaacagatggaagtgtatcggtcccacagtaagtttatgaagaataaaatcgggcaggtaaagcaggagttgtcaagaaaggataccgaactgttggccctacagaccaagctagagaccctgacaaaccagttcagtgactcaaaacagcacatcgaggtcctgaaagaatctctgacagctaaggagcagcgcgccgctatactgcagaccgaagtggatgccttgcgacttagactagaagagaaggagacgatgctcaacaagaagactaaacagatacaagacatggctgaggagaagggtacgcaagccggagaaatccacgatttgaaggacatgctcgacgtaaaagaaaggaaggtgaacgtgttgcagaagaaaatagaaaacttacaggaacagcttcgtgacaaggaaaaacagatgtcctcactcaaggagagggtgaagtcccttcaggctgacaccaccaacacggacactgctctcactactctggaggaagcactggcagagaaagagcgcacaatagagaggttgaaagagcagagagatcgagatgagagggaaaagcaggaagaaattgacaactacaagaaggatctgaaggatctgaaggagaaagtgtctctcctgcagggtgacttgtcagagaaagaagcctctcttttagacctgaaggagcacgcttcctccttagctagctcaggtctgaagaaagacagcagattgaagaccctggaaattgcattggaacagaagaaagaggagtgtctcaagatggaaagtcagttgaagaaagcgcatgaagccgccctggaggctagagcctcacccgagatgagcgatcggattcaacatcttgagcgggagataacacgctacaaagatgagtccagcaaagctcaagcagaggttgatcggttgctggagatactgaaagaggttgaaaatgagaagaatgacaaggacaaaaagattgccgagctggagtctttgacttccagacaggtgaaggaccaaaacaagaaggtggccaatctgaagcacaaagaacaggtggaaaagaaaaagagcgcgcaaatgttggaagaagcacggagacgcgaagataacctgaacgacagctcacagcagctccaggtcgaagaactgctcatggccatggagaaggtgaagcaggagcttgagagcatgaaggccaaattgtccagtacgcagcagagccttgctgagaaagaaacacacctcacaaatcttcgagctgagaggcggaaacacttggaagaagtactggaaatgaaacaggaggctctgctggcagctatctccgagaaagacgcaaacatcgctcttctggagctgtcgtcttcaaagaagaagacccaggaggaggtagcagctctgaagcgggaaaaagacaggctggtgcagcagctgaagcagcagacgcagaatcggatgaagctgatggctgataattatgaagacgatcactttaagtctagccattccaaccagactaatcataaacccagtcccgatcaggacgaagaagagggaatctgggcttag

SEQ ID NO: 313898 - DNA, 2847 bp, Artificial Sequence
  derived and/or modified sequence
atgtacggttcagcacggagtgtggggaaggtggagccctcctcccagtcccccggtagatcaccgaggctgcccagatctcctcgcctgggccaccgcaggactaatagcacgggcggatcctctgggtcgtcagtaggcggaggcagtgggaaaacgctgtctatggagaacatacaaagcctcaacgccgcatacgcgactagtggacccatgtacctcagcgatcacgaaaatgtagggtccgagaccccaaagtccaccatgacacttggcaggagcggcggaagactgccatacggcgtgcgtatgaccgccatgggcagttcaccaaacatcgcttcttccggagtggccagtgatacaatcgcttttggggaacaccatctccctcccgtcagtatggccagcaccgttccccattctctgagacaagccagggataacacaatcatggatctacagacccaattgaaggaggtcctgcgcgagaatgacctgctccggaaggatgtggaggttaaggaaagtaagctgagtagcagcatgaactcaatcaagactttctggtcacctgagctgaaaaaggaacgcgcacttcgcaaggacgaagcatccaaaataactatttggaaggaacaatatagagtggtgcaggaggaaaatcaacacatgcaaatgaccatccaggctctccaggatgaacttcgaattcagagggatttgaatcagctgtttcagcaagattcttcgtcaagaaccggcgagccatgtgttgccgagcttacagaggagaactttcagcgcctacatgctgaacacgaacgtcaggctaaagagctgtttctacttcgcaaaaccctggaagagatggagctgaggatagagacgcaaaaacaaacgctcaatgcgagagacgagtccattaaaaaactgctggaaatgctccagagcaaagggctgagtgccaaagctactgaggaggatcacgaaaggacgcgacgcctggcagaagccgagatgcatgtgcatcatttagaatcactacttgaacagaaggagaaagagaattccatgctccgtgaggaaatgcacagaaggttcgagaatgccccagatagtgccaaaactaaagcccttcagaccgtgatcgaaatgaaagactccaaaatttcttcgatggagagaggcttgagggatttagaggaagagatacagatgctgaagagcaatggggctttatccacagaggagcgggaagaagagatgaagcagatggaagtgtatcgttcccacagcaagttcatgaaaaacaagattgggcaggtcaagcaagagctgtcgcgaaaggatacagagcttttggctctgcagacaaaacttgaaacactgacaaaccagttcagcgactctaagcagcatatcgaggtcctgaaggaatcccttaccgctaaagagcagcgcgctgcgatcctccagactgaagtggacgccctgaggcttagactagaggaaaaggaaaccatgctaaataagaagactaaacagattcaggacatggctgaggagaagggtactcaggctggtgagattcacgaccttaaggacatgttggatgttaaagaacgaaaagtgaatgtgcttcagaagaagatcgaaaacctgcaagagcagctgagagataaggagaaacagatgtcttccctaaaagagcgcgtgaaatctctgcaggcagacaccactaacacagatacagcgctgaccacactcgaggaagcactggctgaaaaagagcggaccattgagcggctcaaggagcagagggacagggacgaaagagaaaaacaagaagagatcgacaattataaaaaggacctgaaggatttaaaagagaaggtgtcattgcttcagggtgatttgtctgagaaagaggcctcgctgttagatctcaaggagcatgcctcaagcttggcatcctctggcctgaagaaggactctagattaaaaacactcgagattgcgttggagcagaagaaggaagagtgcctgaaaatggagagtcaactaaaaaaggcgcatgaggccgcattggaagcccgtgcttcacccgagatgtctgacaggatccagcatctggaaagagagattacccggtataaggacgagagctcgaaggcccaagcggaagtggaccggctgctcgaaatcttgaaggaggtggagaatgagaagaatgacaaagacaaaaaaattgctgagctggagtctctcacttctcgccaggtgaaggatcagaataagaaggttgcaaatttgaagcataaagagcaggtggaaaagaagaaaagtgcgcagatgctcgaagaagccaggcgcagggaggacaatctcaacgacagcagccagcagttgcaggttgaagagcttctgatggctatggagaaggtaaagcaggagttggagagcatgaaggccaagctgagctcaacccagcagtctctggcagagaaggagacacacttaactaatctgcgggctgaaaggcgcaagcatctggaggaggtactggaaatgaaacaggaagctctgcttgcggctatctctgagaaagatgccaatatcgcccttttggaactttcttctagcaagaaaaagacacaggaggaagtggctgcactcaagcgcgaaaaggatcggctcgtgcagcagcttaagcagcagacccagaatcgaatgaaactgatggccgataattatgaggatgaccacttcaagtccagccacagcaaccagaccaatcataagcctagccctgaccaggatgaagaggagggaatttgggcctag

SEQ ID NO: 313899 - DNA, 2847 bp, Artificial Sequence
  derived and/or modified sequence
atgtatgggtccgcacgatccgtcgggaaggtcgagccatcttctcaatcacccggtcgatcaccacgcctcccaaggagtccaagactaggccatcgcagaaccaattctaccggaggcagcagcggatcatccgtcgggggtggcagcgggaagacgttgtctatggagaatatacaatctctgaatgccgcttatgcaacaagtgggcctatgtacctcagcgatcatgagaatgtgggaagtgaaacacctaagagcactatgactctgggccgatctggcggacgactgccttatggagtgagaatgacagcaatgggatcaagtccaaacattgcctctagcggagtggctagtgacaccattgccttcggagagcatcatctcccacctgtgtcaatggcttccacagtccctcattccctgagacaggctagagacaatacaataatggatttacagactcagttgaaagaggtgcttcgcgagaatgatcttcttagaaaagacgtggaagtgaaagagtctaagctgtcgtccagtatgaattcgataaaaacattctggtcacccgaactgaagaaagagcgggctctcaggaaggacgaggctagcaagatcacaatttggaaagaacaatatcgagtggtgcaggaagaaaaccaacatatgcagatgacgatccaggcgctccaagacgagctaaggatccagagagacctgaatcagcttttccaacaggacagctccagtcggacaggcgagccctgtgttgccgagctcacagaagagaacttccagaggttacacgcagagcatgagagacaggctaaagagctcttcctcttgagaaagaccctcgaagaaatggagcttcgcatcgaaacgcaaaagcagactctgaacgcaagagatgagagtataaaaaagttgctggagatgctacagagcaagggcctctcagccaaagccactgaggaggatcacgagcgcactcggagactggccgaagcggaaatgcatgttcaccacttagaatcactcttggaacagaaggagaaagagaattccatgctgcgcgaggaaatgcatagacggttcgagaatgctcctgattctgcgaagacaaaggcccttcagacagtgatagagatgaaggatagcaaaatcagttctatggagcgcggtctgcgggatctggaggaggagattcagatgctaaaatccaacggagcgctgagtactgaagaaagagaggaggagatgaagcagatggaggtatacaggtcccacagtaaatttatgaagaataaaattggccaggtgaaacaggagttatcaagaaaagacaccgaattgttggctcttcagaccaaactggagactcttactaaccaattcagcgacagcaaacagcacattgaggtactgaaagagtccctcacagccaaggagcagagagccgctattctccagactgaagtggacgccctgagattgaggctagaagagaaggagactatgctgaacaagaaaactaagcagatccaggacatggctgaagaaaagggcacgcaagctggcgagattcacgatttaaaggacatgctcgacgtgaaagagagaaaagtaaacgtgctgcagaagaagatcgagaatcttcaggagcagctacgggacaaagagaagcagatgtctagcctgaaagagcgcgtgaagtccctacaggcagatacaaccaatacggacaccgctttgacaacactggaagaagctttggcggagaaggaaagaaccattgagcgtctgaaggagcagagggaccgggacgagagagagaaacaggaggagatcgacaattacaagaaagatctgaaagatttaaaagagaaggtgagcctgctgcagggagaccttagcgagaaagaggccagtctcttagatctgaaggagcacgcttccagtctggcgagctccggcctcaaaaaggactccagactgaagacattagagatcgccctagagcagaagaaggaagagtgcctgaagatggaatcccaactgaagaaggcgcacgaagcagcgctagaggccagggcgtccccggagatgtctgaccggatccagcaccttgagcgcgagattacccgctacaaggacgaatccagtaaagcccaggctgaagtggaccggttgttagagatcctgaaggaagtagagaacgaaaaaaacgacaaagataaaaaaatcgccgagctcgagtccctgttttcccgccaggttaaggaccagaacaagaaagtggcaaatctgaaacacaaggagcaggtcgagaagaagaagtccgctcaaatgctggaggaggcccgtcggagagaagacaacttaaacgacagcagtcagcaactgcaggtggaggagttactcatggctatggagaaagtgaagcaggagctggagtcgatgaaggctaaactcagctctactcagcaaagtttagctgaaaaggagacgcacctcacaaatctacgagcggagaggaggaaacacctggaagaagttcttgaaatgaagcaggaggccctcctggctgcgatttctgagaaggacgccaacatagctctactagaactgtcgtcctcaaaaaagaaaacccaggaagaggtagcagccctgaagcgggagaaggaccgtctggtccagcagctcaaacagcagacgcagaaccgcatgaaactcatggcggacaactacgaggacgaccactttaagtcctcacacagtaaccaaacaaaccacaagccttcacctgatcaggacgaggaggagggcatatgggcctag

SEQ ID NO: 313900 - DNA, 2175 bp, Artificial Sequence
  derived and/or modified sequence
atgcagatgaccatacaagccctgcaggatgaattacgcatccagagagaccttaatcagctctttcagcaagacagctcctcgcgaaccggcgagccatgtgtcgccgaactgaccgaggagaacttccagagactgcacgcggagcatgagcgtcaagcaaaggagctcttccttttacgtaaaacactggaggaaatggagctcaggatagaaacccagaaacagactttaaacgctagagatgagagcatcaagaaacttttggagatgctacagagcaaaggactgtctgccaaagctaccgaggaagaccatgagcggacaaggagactggctgaagccgaaatgcacgtccatcacctggaatcccttctagaacagaaggagaaagaaaactcaatgctgcgcgaggaaatgcaccgtcggtttgaaaacgctccagattccgccaagactaaggccctgcagacagttattgaaatgaaagactctaaaatttcatccatggaaaggggactgcgcgacttagaggaggagatccagatgctaaaatctaacggtgccctctccacggaggagcgcgaggaggaaatgaaacaaatggaagtgtatcgtagccacagcaagttcatgaagaataagatcggtcaagttaagcaagagttatcccggaaggatacagagcttcttgccctacagaccaaactggaaaccttgactaatcagttttcagactctaaacagcacattgaagtgctaaaagagtctttgaccgccaaagagcagcgggctgctattctacaaaccgaagtggatgccttaagactgcgtttggaggagaaggagactatgcttaacaagaagacaaaacaaatccaggatatggccgaagagaagggcactcaggccggtgagatccacgatctgaaagatatgctggacgtaaaagaaaggaaggtgaacgttctgcagaagaagatcgaaaatctgcaagagcagctacgagacaaagaaaaacagatgtccagtctgaaggagagagttaaaagcctgcaggctgacaccaccaacactgacacggcccttaccactctggaagaagccctcgccgagaaggaacgaactatagagagactcaaagagcagagagacagggacgaaagggagaaacaagaggagatcgacaactataaaaaagaccttaaggacctgaaagagaaggttagccttcttcagggggatctaagcgaaaaggaagccagtctgctggatcttaaggagcatgccagtagcctcgccagctcagggctcaagaaggactcacgccttaagacacttgaaatcgcgctcgaacagaaaaaggaagagtgccttaagatggaatcccagctgaagaaagcacacgaagccgctctcgaagcacgcgcatcccccgaaatgtcagaccgtattcagcatctagaacgggaaatcacgagatacaaggacgagtcgtccaaagcacaggccgaggtggatcgcctgctcgagattctgaaagaggtcgaaaacgagaaaaatgacaaagacaagaagatcgcagagttggaatcactgacctcgagacaggtcaaagatcagaacaagaaggtcgctaacctgaagcacaaggaacaggttgagaaaaaaaaatccgcgcagatgctggaggaggctcgaagaagggaagacaatcttaatgactcatcccagcagctccaggtggaagaactgctcatggctatggagaaggttaaacaggaattggagagcatgaaagcaaaattaagttcgactcagcagtctttggcggaaaaagagacacacctgaccaatttacgggcagagcgtcgaaaacacctggaggaagtgttagagatgaagcaggaagctttactggccgcaattagcgagaaggacgctaacattgctctgttagaactatcctcttctaagaaaaagactcaggaagaagtggccgcactgaaacgcgagaaggatcggttggtacagcagttgaaacagcagacgcagaacagaatgaagctgatggccgataattatgaagatgatcacttcaaaagcagccactccaaccagactaatcataaacctagccctgaccaggatgaggaagagggcatttgggcctag

SEQ ID NO: 313901 - DNA, 9312 bp, Artificial Sequence
  derived and/or modified sequence
gtgctgtggcggcggcggcggcggtagtggcggcggcggcggtgcctgggcggcagcagcagcagtagcggcagccctgaggacggtgagacggccgcggcggcggcgacagcgcggaagtcgcgcgggacccagagcttcccccctgtcgctagtgctgaggctttcgcctttcctacccagcttcttgctcacggcccgggctgggctgggcagggcaacgcgcccccggggaggggcggagctgtagatatggtgtaagatacttcttcaagattggacagctggggaccttcttctgattaaccttaaaccaacttgtagccatagagacacctcacaaggttcccatttttgttgttgttgttgttgattttctgctcacacctttcctgaccttgcaaccatgtatggaagtgcccgctctgttgggaaggtggagccgagcagccagagccctgggcgttcacccaggcttccacgttcccctcgcttgggtcaccgtcgaaccaacagtacgggagggagttcgggaagcagtgttggaggtggcagtgggaaaaccctttcaatggaaaatatacaatctttaaatgctgcctatgccacctctggccctatgtatctaagtgaccatgaaaatgtgggttcagaaacacctaaaagcaccatgacacttggccgttctgggggacgtctgccttacggtgttcggatgactgctatgggtagtagccccaatatagctagcagtggggttgctagtgacaccatagcatttggagagcatcacctccctcctgtgagtatggcatccactgtacctcactcccttcgtcaggcgagagataacacaatcatggatctgcagacacagctgaaggaagtattaagagaaaatgatctcttgcggaaggatgtggaagtaaaggagagcaaattgagttcttcaatgaatagcatcaagaccttctggagcccagagctgaagaaggaacgagccctgagaaaagatgaagcttccaaaatcaccatttggaaggaacagtacagagttgtacaggaggaaaaccagcacatgcagatgacaatccaggctctccaggatgaattgcggatccagagggacctgaatcagctgtttcagcaggatagtagcagcaggactggcgaaccttgtgtagcagagctgacagaggagaactttcagaggcttcatgctgagcatgagcggcaggccaaagagctgtttcttcttcgaaagacattggaggaaatggagctgcgtattgagactcaaaagcagaccctaaatgctcgggatgaatccattaagaagcttctggaaatgttgcagagcaaaggactttctgccaaggctaccgaggaagaccatgagagaacaagacgactggcagaggcagagatgcacgttcatcacctagaaagccttttggagcagaaggaaaaagagaacagtatgttgagagaggagatgcatcgaaggtttgagaatgctcctgattctgccaaaacaaaagctctgcaaactgttattgagatgaaggattcaaaaatttcctctatggagcgtgggcttcgagacctggaagaggaaattcagatgctgaaatcgaatggtgctttgagtactgaggaaagggaagaagaaatgaagcaaatggaagtgtatcggagccattctaaatttatgaaaaataagattggccaggtgaaacaggagctgtccagaaaggacacagaactactcgccctgcagacaaagctagaaacactcacaaaccagttctcagatagtaaacagcacattgaagtgttgaaggagtccttgactgctaaggagcagagggctgccatcctgcagactgaggtggatgctctccgattgcgtttggaagagaaggaaaccatgttgaataaaaagacaaaacaaattcaggatatggctgaagagaaggggacacaagctggagagatacatgacctcaaggacatgttggatgtgaaggagcggaaggttaatgttcttcagaagaagattgaaaatcttcaagagcagcttagagacaaggaaaagcagatgagcagcttgaaagaacgggtcaaatccttgcaggctgacaccaccaacactgacactgccttgacaactttggaggaggcccttgcagagaaagagcggacaattgaacgcttaaaggagcagagggacagagatgagcgagagaagcaagaggaaattgataactacaaaaaagatcttaaagacttgaaggaaaaagtcagcctgttgcaaggcgacctttcagagaaagaggcttcacttttggatctgaaagagcatgcttcttctctggcatcctcaggactgaaaaaggactcacggcttaagacactagagattgctttggagcagaagaaggaggagtgtctgaaaatggaatcacaattgaaaaaggcacatgaggcagcattggaagccagagccagtccagagatgagtgaccgaatacagcacttggagagagagatcaccaggtacaaagatgaatctagcaaggcccaggcagaagttgatcgactcttagaaatcttgaaggaggtggaaaatgagaagaatgacaaagataagaagatagctgagttggaaagccttttttctaggcaagtgaaagaccagaataagaaggtagcaaatctgaagcacaaggaacaggtggaaaaaaagaagagtgcacaaatgttagaggaggcgcgacgacgggaggacaatctcaacgacagctctcagcagctacaggtggaggagttactgatggccatggagaaggtaaagcaggaactagaatccatgaaagcaaagctgtcctccacccagcagtctctggcagaaaaggaaactcacttgactaatcttcgggcagagagaaggaaacacttagaggaagttctggagatgaagcaagaagctcttctggctgccattagtgaaaaagacgccaatatagctctcttggagctttcgtcctctaagaagaagacccaagaggaagtggctgccctgaagcgggagaaggatcgtctggtacagcagcttaagcagcagacgcaaaatcgaatgaagctaatggccgacaactacgaggatgaccacttcaaatcctcccattccaatcaaacaaatcacaagccctccccagaccaggatgaggaggagggtatatgggcatagccaatcagaggcttagttcagccattttgttcagaacgatcatccagcccctcttagaacttgaccaaaatagaagtaaattaaagttgtacattggacacctgacaaccctctgccatgaccgagaccccctgatcctccgtggactcactccaccagcttcctataacttggacgatgaccaggcggcttgggagaatgagctgcagaagatgacccgggggcagcttcaggatgagttagagaaaggtgaacgggacaatgcagaactgcaggagtttgccaacgccattcttcagcagatagcagaccattgtcccgacatcctagagcaagtggtcaacgccctggaagagtcctcttgaccctgctttatggggaagcctgaggtagtcaacccaggagccaagaaaagagaactacgaggaacaggtgcccggaaccttcttggcaccaaacactacaaacttcatcccaacttgctcacttgaagaagtgtgattccagcaccgtttctacatctgccatcttactctgcctttctgctttggatgtggtctctacactaaccttcttgatgtccagggtagataaagggtcgaatctctctgaagaactgccacctggtcatcagcagtggagaactgtgggagctggtggctctgccctgacagagagccatggagcagaggagcctctcacctcctgtcctctgacatgagaatgaaaccaggaatggacttggagttcaacaggctgagaggatgcctccaatggaccagagagctgagtgttctaatatcacaataggtgctttctcctaaaagggcaaaaaacaatctcaaaaagattagaaaaagagaaggggggaagggaagagaaaatcgactcttctttttactgtctcttctgcttactttccacatgagatgctttgtaccggggagctgtgagcaggcctcacgatggcttgggagcactcgttctcccaaggtctgagtcttcatccagccctgcctgtctgtcgcagccttcctcactctgttcctcggccagttaacaagaagatggtgtgaggtgttctccaccagtctctcctgtttgagactgttgacgttatcatactgaggtgttagatcaaatatctctaattgaagaacatgtgaggttgaaagagcaccagccagggcaacatagcgtgaccctgtctctacaaaaaattaaaaagagaacatacaaagttgacatatgagaccctgttgtccccgcctgcagctttgccccagtaacagatgcccgttgctcttgggctggtttcccctgaacacctccaagaggctgcctgccttgccagcacccgtgtcctgagctcctgcagcccagtggctgctgaagttgtgatccctcactcaccctgctagctttgcccttgactcgtcttctctgaacctcagcctcgtgcattgcctggaaccttcttctagcataaatgaaggtttttcctcctacacacattccttcctcggttatttcattcagagaatatttatgaaatgcctactgtgtgcaagtcatccatccttgaaaaggccacttctcagtgagggagagatgtagtggattctgtgagacatacctgctggagttgaagcagtaaatagcatgtccttcccctccccgatcttaaggtgtgttttctagaaaagttccctaatggaattcatgagtttgggggtctcagtcacccgcttgcctgtaggattccatttgatgattctggatttttgctgtttgttattgcccttagaggggctctgagtatctacttgtgggtggccatttcctgacatctgcatgtacctcgtggaattcagccagcttcatgttgcaaatcagaaagctgaccccaagactgcaaatcaatgaaggtattggcattgttaaggacgtagcgtagacaacagcagtcataaataattaggcaggaacttaacccaaatctagttctttgaccacctctaccaccagaacccagcagacactcacatctcctgataagagttgctggactcgatgtttttgttttgcattttctcctctccttccccacttactcagagaatttaaagtctgtagagtcagcacagccccatcagtccaggaacttcccaccaccagcccttgactgtcccattaactgacatggtcagatttccagctccccctactccctgctgtgaaacaatccctctccctgtgagaggaaactgtggagcgtttcttatcgaaggttaaatggactctgctcataaacctcttactgagatgcttcctgatagccaggctggccagagaggggtgcaggggttagatagtaagtggtggtcgtttgtggtcagttacctcaattctgttcattgcagtgcccgtaaaccatgtagaaagctcccagcactgaaaggcaggagtgttagcatctcgctttatccaccataacgtaaagaactgcggtgtgataacagccttcacggggccacggtggaaccaagacagcaggcgaggccatgcctaaacaagtggtctggcacgggcactggccagctgctctctccaagcaggtggcccagatcccacccacgtggactttctcatcaggtgcagcgcctgccactctcagccactgggtgtgtcactctcctcttcatctcagcattctccatcacttcccctccagaaaaacggatggaaggaagccctctgtgacactgcttctgagaagaagcatttccgggaccgatatcatctgtctggtctctgtgaacagcaaggaatcttcttgaccgttcttgggcactggaggctggctaggagttcagtaataaacgtggccttcgtgctgtagggcagagtggatgcagtttgtagctttcagagtgtctcattgagtctagatcattgaaccaacacttaaccaaatgtcccactcccatcacactaggacttgtcattccatgcccctctcctagtggtcatggtttcatatgggcatacaactgctactgaagttatatagccttgaaaactcagtgcaggttgcccttaattttccccaaacccctccatcggcaagtctagttgccctttagcacctaaagatctgcaccccaaaccaatgtcaccataaagagggcacgaagaagagtgggtgtgatcccaacggggttttgtaactgaagaagcccagtgtgagcttctcatcttttcatatacctctaacccccggtactcattgaatcattgatgaggtatctcaattgagatttgcaaggactttgataccatttgaaatggaaaaattttgaacgggctttaacatgtttaagaaatatggatggggccggccacagtggctcacgcctgtaatcccagaactctggaaggctgaggcaggcggatcacctgagatcaggagttcgaggccagcctggccaagatggcaaaaaccccgactctactaaaaatacaaaattagccaggcgtggtggcgtacgcctgtaatcccagctactcaggaggcaggagaatcgcttgagcctgggaggcagaggctgcggtgagccgagatcgtgtcactgcactccagcctgggtgacagagactccatttaaaaaaaaaaaaaaaaaatatatatatatatatatatatatatatatggatgggaatcaccaaattcatctcagctctaaccttttaacctttgtccttgcactttacaatctaaagatctacctgtggctctcagacttcctcacacttgggttttagaaataacttgtaaagcagactggacccaaggccgccttcagtgtcaagaagggcattgtgacttgcccctcaatttctgtccattgaagtctggttttccatgaggaacttgcgggctcacccacccccagagtgagagaagaggaaggcgaagtcatcacagacacggtcttagccacctgctgaactaatccctccgctattgagggtcagggttgtgaggcaaccatcatgtgtcaccccaaaatataaatgtttctgagccgcccatccactggcatttggatttgctgccagagtcctgttcctcccagaaccatcccgccctcctgttgaccatgttacttgagtgtaggcccggtgtcaagaccctcagagtctttgaggaaagagccaagcagagaagaccgctgcgtggagtgtgacaccacatggcatttctcaagcccagcggaccctgtgtcagcaaataccagtaatttaacatctgctcctggcctcctcttcacctgcctgggttcggaactgaggaggaaggatgagaagagactgcaatgcagcaggcaccctctgcagagtgaggccgcccgtccatcactgccagccctgggctgctcaggaggggacgtgaaccactcaaaggaatgtcttaaagaggatctggagtttcccccatgcaaattagggaagaattaggcaagaaaagacatacattacagggaaatccttctgaacaaaatggctgtcttcacctactcttcttgcaagaaaagacatacattacagggaaatccttctgaacaaaatggctatcttcacctactcttcagcaaaaaccgtctccagactttttagtgtcaaaaatgtaaccaactgtctcctgattttttccaatgtgtttggcaagtgctgtggccctgttgtaggtacttctcctgactcttgggggagaagtggttttagggattgatttgggggagcgggtttttgtcccatcccacctcctctcttctttctctgcttgtcgatattgtctgtgtgattcagagaattggggcagttacattgtgtctgttgttgagattattaaaagattaaaacgtagttgtagaaatgaaaaattaaacagctgtgttttaaaaatgcaaaccaatatcttgttaataaaggaattcaagctatggggcagccacactcccctcctcccaggctggcataggtggccctgggctggcggcttaggaagcatggagcacacttagggtagtgcctgcctgggcaagagacacctgccgagcaaaaggaacgagaatctggggctcagagcctcgcagttgtgccaggattttcctatacatgttcaggacctctgggtagaggtttcacagtttgtgaccccataaccaccctcacccgacgtgggttctagctcagtgtgcctaatactgcatggtaacctgggcttgaccctgaagcccctgcctggcaggccacaggacctctcctgcccacttggtgctatctcttccagtgaccacccagcacgggtgagcactggccagcctggagcctgcaatccaggtggaacagactgtcctccatgtcagttccttctggcttcaggccctcaattatttccctttgagcttttttagaccctagatctcctaggcccaggctctctcttgaccccagagaagccactgtcaggaaaggaagtgaaccctactgaagccagagaattcaccccggccaaagcaggccctctgggtccagcccctcattccacaccacgccagtattgcatccatctactgcagctacacatcctgagggcagcaccacccactctggcctgctggcccatcgcaggactagcccaggcacctgccgggcattgcaggatatccagtggggcctgtgactgctccctgatgcgtcagaagagaagtgttgcactttagtggaggagctgaggagcacctgcccccttgtagcttgagttccttttggtaacagtagcagcctccatggtggtgtctgggatgcacgtgcacccgctgccttcagctgtatgtgtgtgttcctgctggagttgtgttactgacaggataatgacattacaaagaaattgtgttatattcaactttgccttgataattattgtaaacactttgttcattttttcttttttattcacaaactaaatccaccaggaaattataaagttattt

SEQ ID NO: 313902 - DNA, 2255 bp, Artificial Sequence
  derived and/or modified sequence
cttggttctagcacatgcagatgacaatccaggctctccaggatgaattgcggatccagagggacctgaatcagctgtttcagcaggatagtagcagcaggactggcgaaccttgtgtagcagagctgacagaggagaactttcagaggcttcatgctgagcatgagcggcaggccaaagagctgtttcttcttcgaaagacattggaggaaatggagctgcgtattgagactcaaaagcagaccctaaatgctcgggatgaatccattaagaagcttctggaaatgttgcagagcaaaggactttctgccaaggctaccgaggaagaccatgagagaacaagacgactggcagaggcagagatgcacgttcatcacctagaaagccttttggagcagaaggaaaaagagaacagtatgttgagagaggagatgcatcgaaggtttgagaatgctcctgattctgccaaaacaaaagctctgcaaactgttattgagatgaaggattcaaaaatttcctctatggagcgtgggcttcgagacctggaagaggaaattcagatgctgaaatcgaatggtgctttgagtactgaggaaagggaagaagaaatgaagcaaatggaagtgtatcggagccattctaaatttatgaaaaataagattggccaggtgaaacaggagctgtccagaaaggacacagaactactcgccctgcagacaaagctagaaacactcacaaaccagttctcagatagtaaacagcacattgaagtgttgaaggagtccttgactgctaaggagcagagggctgccatcctgcagactgaggtggatgctctccgattgcgtttggaagagaaggaaaccatgttgaataaaaagacaaaacaaattcaggatatggctgaagagaaggggacacaagctggagagatacatgacctcaaggacatgttggatgtgaaggagcggaaggttaatgttcttcagaagaagattgaaaatcttcaagagcagcttagagacaaggaaaagcagatgagcagcttgaaagaacgggtcaaatccttgcaggctgacaccaccaacactgacactgccttgacaactttggaggaggcccttgcagagaaagagcggacaattgaacgcttaaaggagcagagggacagagatgagcgagagaagcaagaggaaattgataactacaaaaaagatcttaaagacttgaaggaaaaagtcagcctgttgcaaggcgacctttcagagaaagaggcttcacttttggatctgaaagagcatgcttcttctctggcatcctcaggactgaaaaaggactcacggcttaagacactagagattgctttggagcagaagaaggaggagtgtctgaaaatggaatcacaattgaaaaaggcacatgaggcagcattggaagccagagccagtccagagatgagtgaccgaatacagcacttggagagagagatcaccaggtacaaagatgaatctagcaaggcccaggcagaagttgatcgactcttagaaatcttgaaggaggtggaaaatgagaagaatgacaaagataagaagatagctgagttggaaagtctcacctcaaggcaagtgaaagaccagaataagaaggtagcaaatctgaagcacaaggaacaggtggaaaaaaagaagagtgcacaaatgttagaggaggcgcgacgacgggaggacaatctcaacgacagctctcagcagctacaggtggaggagttactgatggccatggagaaggtaaagcaggaactagaatccatgaaagcaaagctgtcctccacccagcagtctctggcagaaaaggaaactcacttgactaatcttcgggcagagagaaggaaacacttagaggaagttctggagatgaagcaagaagctcttctggctgccattagtgaaaaagacgccaatatagctctcttggagctttcgtcctctaagaagaagacccaagaggaagtggctgccctgaagcgggagaaggatcgtctggtacagcagcttaagcagcagacgcaaaatcgaatgaagctaatggccgacaactacgaggatgaccacttcaaatcctcccattccaatcaaacaaatcacaagccctccccagaccaggatgaggaggagggtatatgggcatagccaatcagaggcttagttcagccattttgttcagaacgatcatccagcccctcttagaacttgacc

SEQ ID NO: 313903 - protein, 529 aa, Artificial Sequence
  derived and/or modified sequence
MRSEKSLTLAAPGEVRGPEGEQQDAGDFPEAGGGGGCCSSERLVINISGLRFETQLRTLSLFPDTLLGDPGRRVRFFDPLRNEYFFDRNRPSFDAILYYYQSGGRLRRPVNVPLDIFLEEIRFYQLGDEALAAFREDEGCLPEGGEDEKPLPSQPFQRQVWLLFEYPESSGPARGIAIVSVLVILISIVIFCLETLPQFRVDGRGGNNGGVSRVSPVSRGSQEEEEDEDDSYTFHHGITPGEMGTGGSSSLSTLGGSFFTDPFFLVETLCIVWFTFELLVRFSACPSKPAFFRNIMNIIDLVAIFPYFITLGTELVQQQEQQPASGGGGQNGQQAMSLAILRVIRLVRVFRIFKLSRHSKGLQILGKTLQASMRELGLLIFFLFIGVILFSSAVYFAEADDDDSLFPSIPDAFWWAVVTMTTVGYGDMYPMTVGGKIVGSLCAIAGVLTIALPVPVIVSNFNYFYHRETEQEEQGQYTHVTCGQPAPDLRATDNGLGKPDFPEANRERRPSYLPTPHRAYAEKRMLTEV

SEQ ID NO: 313904 - DNA, 1590 bp, Artificial Sequence
  derived and/or modified sequence
atgagaagcgagaagagcctgaccctggccgcccccggcgaggtgagaggccccgagggcgagcagcaggacgccggcgacttccccgaggccggcggcggcggcggctgctgcagcagcgagagactggtgatcaacatcagcggcctgagattcgagacccagctgagaaccctgagcctgttccccgacaccctgctgggcgaccccggcagaagagtgagattcttcgaccccctgagaaacgagtacttcttcgacagaaacagacccagcttcgacgccatcctgtactactaccagagcggcggcagactgagaagacccgtgaacgtgcccctggacatcttcctggaggagatcagattctaccagctgggcgacgaggccctggccgccttcagagaggacgagggctgcctgcccgagggcggcgaggacgagaagcccctgcccagccagcccttccagagacaggtgtggctgctgttcgagtaccccgagagcagcggccccgccagaggcatcgccatcgtgagcgtgctggtgatcctgatcagcatcgtgatcttctgcctggagaccctgccccagttcagagtggacggcagaggcggcaacaacggcggcgtgagcagagtgagccccgtgagcagaggcagccaggaggaggaggaggacgaggacgacagctacaccttccaccacggcatcacccccggcgagatgggcaccggcggcagcagcagcctgagcaccctgggcggcagcttcttcaccgaccccttcttcctggtggagaccctgtgcatcgtgtggttcaccttcgagctgctggtgagattcagcgcctgccccagcaagcccgccttcttcagaaacatcatgaacatcatcgacctggtggccatcttcccctacttcatcaccctgggcaccgagctggtgcagcagcaggagcagcagcccgccagcggcggcggcggccagaacggccagcaggccatgagcctggccatcctgagagtgatcagactggtgagagtgttcagaatcttcaagctgagcagacacagcaagggcctgcagatcctgggcaagaccctgcaggccagcatgagagagctgggcctgctgatcttcttcctgttcatcggcgtgatcctgttcagcagcgccgtgtacttcgccgaggccgacgacgacgacagcctgttccccagcatccccgacgccttctggtgggccgtggtgaccatgaccaccgtgggctacggcgacatgtaccccatgaccgtgggcggcaagatcgtgggcagcctgtgcgccatcgccggcgtgctgaccatcgccctgcccgtgcccgtgatcgtgagcaacttcaactacttctaccacagagagaccgagcaggaggagcagggccagtacacccacgtgacctgcggccagcccgcccccgacctgagagccaccgacaacggcctgggcaagcccgacttccccgaggccaacagagagagaagacccagctacctgcccaccccccacagagcctacgccgagaagagaatgctgaccgaggtgtag

SEQ ID NO: 313905 - DNA, 1590 bp, Artificial Sequence
  derived and/or modified sequence
atgcggtctgaaaagagcctgacactcgccgctcctggggaggtgcggggccccgagggagagcagcaggatgctggtgacttccccgaggctgggggcggcggtgggtgctgcagttcggagcgcctggtgattaatatcagtggcttgagattcgagacacagctccgaactctctcactgttccccgacactctcttgggtgatccaggacgccgagtgcggttctttgaccctctgcggaacgagtacttcttcgatcgcaatcgccctagcttcgatgcaatcctgtactattaccagagcggcggccggctgaggaggcctgtgaatgtccccctggacatcttcttggaagagatccgcttttatcagctaggcgacgaggcattggccgccttccgggaggatgaaggctgcctccctgaaggaggcgaagatgaaaagcccctgccttcccagcccttccagcgccaagtgtggttattatttgagtacccggaaagtagcgggccagctagaggaattgctatcgtttcagtactggtgatcctgatttcaatcgtcatcttctgcctggagaccctgcctcagttccgggtggacggtcgcggtgggaacaacggtggggttagccgggtgtcacctgtgagtcgtggatcccaggaggaggaagaagatgaggatgacagctacacctttcaccacgggatcactcctggtgagatgggcactgggggaagctccagcctgagcactctgggaggaagttttttcacagatcccttttttctcgttgagaccctttgtatcgtttggtttacgttcgaattgttggtaagattctctgcatgtccctccaagcccgcctttttccggaacatcatgaatatcatcgaccttgtggctattttcccttatttcatcacattagggaccgagttagtccagcagcaggaacagcagcccgctagtggtggcggcggacaaaacgggcagcaggccatgtctctggccatcctgcgcgtgattcgcctggtccgggtctttagaatctttaaactgagtcggcattccaagggccttcaaatattgggaaaaacattgcaggcttctatgcgggagctggggttgctcatcttctttctatttatcggagtcatcctgttctccagtgccgtctacttcgccgaggccgacgatgatgatagcctgtttccatctataccggatgccttctggtgggccgtcgtcaccatgacaacggttggatacggcgacatgtaccctatgactgtgggggggaaaattgttggctccctctgcgcgatcgcaggggtgctgacaatcgcgctccccgttccagtgatcgtctcaaactttaactacttttaccatcgggagacagaacaggaggagcagggacaatacacccacgtgacttgtggacagccagcccccgatctgagagctacagacaatggcctgggtaagcctgatttcccagaagctaaccgcgaaagaagacccagttacctcccgactcctcatcgtgcttatgccgaaaagcgaatgctgacagaggtgtag

SEQ ID NO: 313906 - DNA, 1590 bp, Artificial Sequence
  derived and/or modified sequence
atgcggtccgaaaagagcttgactctcgccgcacctggggaagtaagaggacctgaaggcgagcagcaagacgccggtgacttcccagaagctggcggtggaggaggatgttgtagcagcgagcggttggttataaatattagcggattacggtttgaaacacagttgaggacgctgtctctgtttcccgatacactgctgggcgaccccggacgacgtgtgaggttttttgatcctctacgcaatgagtatttttttgatcgcaacaggcccagcttcgatgcaatcctctactactaccagtctggggggagactgcgtagacctgtcaatgtccccttagacatatttcttgaggagattcgtttctatcagctcggagacgaggccctggccgcatttcgggaggatgagggatgcttgcccgagggaggggaggacgagaaaccacttccaagtcagcccttccagagacaagtatggctgttgttcgaataccctgaaagctctgggcctgctagggggatcgcaattgtgtcagtgctggtgatcctgatttccatcgtgatcttctgtctcgaaaccctaccacagttcagggtcgacggacggggcggcaacaatggcggcgtgtcgagagtatcacctgtatctcgaggcagccaggaggaagaagaagacgaagatgactcatacacttttcaccatggcattactcctggggaaatgggaaccggcggtagctctagcctatcaacgttgggaggcagcttctttactgacccattcttcctcgtggaaaccctctgcatcgtgtggttcacttttgagttgctggtgagattcagcgcatgtccttcaaagcccgcgttcttcaggaatatcatgaatatcatcgatctggtggctatcttcccttattttatcaccctagggacggaactcgttcagcaacaggagcagcaacctgcctccggcggcggtggccagaacggtcagcaggcaatgtcattagccattctgagagttatcagactagtgagggtcttccggatattcaagttgagccggcatagcaagggcctgcagattctaggcaagacactacaggcaagcatgcgcgaacttggtctcctgatcttctttttgttcatcggagtgattctctttagctctgcggtctattttgctgaggccgatgacgatgactccttgttcccatcgattcctgacgcgttctggtgggccgtggtgacaatgacaaccgtcggttatggcgacatgtatcccatgacagtgggcggcaagattgtgggctccctgtgcgctatcgcaggggtgctaaccatagctcttcccgtaccggttatcgtgtccaacttcaactacttttatcatagggaaaccgagcaagaagagcagggccagtacactcatgtgacttgtggccaacctgctcctgatctacgagccactgacaacggtttaggcaagcccgatttccccgaggctaatagggaacggcggccaagttatttacctacacctcaccgggcctatgccgaaaagcggatgttaaccgaagtgtag

SEQ ID NO: 313907 - DNA, 1590 bp, Artificial Sequence
  derived and/or modified sequence
atgaggtctgagaagagcctgaccctggccgcccctggagaggtgcggggccctgagggggagcagcaggatgctggggacttccctgaggccggcggcggcggcggctgctgcagcagcgagcggctggtgatcaacatcagcggcctgcgctttgagacccagctgcggaccctgagcctcttcccagacaccctgctgggggaccccggccggcgggtgcgcttctttgaccccctgagaaatgagtacttctttgacaggaaccggcccagctttgatgccatcctgtactactaccagagcggcggccgcctgcggcggcctgtgaatgtgcccctggacatcttcctggaggagatccgcttctaccagctgggagatgaggccctggccgccttccgggaggatgagggctgcctgcctgagggcggggaggatgagaagcccctgcccagccagcccttccagaggcaggtgtggctgctgtttgagtacccagagagcagcggccctgcccggggcatcgccatcgtgtctgtgctggtgatcctgatcagcatcgtcatcttctgcctggagaccctgccccagttccgggtggatggccggggcggcaacaacggcggcgtgtcccgggtgtcccctgtgtcccggggcagccaggaggaggaggaggatgaagatgacagctacaccttccaccacggcatcaccccaggagagatgggcactggaggcagcagcagcctgagcaccctgggcggcagcttcttcacagaccccttcttcctggtggagaccctgtgcatcgtgtggttcacctttgagctgctggtgcgcttcagcgcctgccccagcaagccagccttcttcaggaacatcatgaacatcatcgacctggtggccatcttcccctacttcatcaccctgggcacagagctggtgcagcagcaggagcagcagcctgccagcggcggcggcggccagaatggccagcaggccatgagcctggccatcctgcgggtcatccggctggtgcgggtcttccgcatcttcaagctgagccgccacagcaagggcctgcagatcctgggcaagaccctgcaggcctccatgagggagctgggcctgctgatcttcttcctgttcatcggggtcatcctcttcagcagcgctgtgtactttgctgaggctgatgatgatgacagcctcttccccagcatcccagatgccttctggtgggccgtggtgaccatgaccaccgtgggctatggagacatgtaccccatgacagtgggcggcaagatcgtgggcagcctgtgtgccatcgccggcgtgctgaccatcgccctgcctgtgcctgtgattgtgagcaacttcaactacttctaccaccgggagacagagcaggaggagcagggccagtacacccacgtgacctgtggccagcctgccccagacctgcgggccacagacaatggcctgggcaagccagacttccctgaggccaaccgggagcggcggcccagctacctgcccaccccccaccgggcctatgcagagaagaggatgctgacagaggtgtag

SEQ ID NO: 313908 - DNA, 1590 bp, Artificial Sequence
  derived and/or modified sequence
atgcggagcgagaagagcctgaccctggccgcccccggcgaggtgagaggacccgaaggggaacagcaagatgcgggggactttccggaagcaggcgggggcggcggatgctgttccagtgagcggctggttatcaatattagcggcttaaggttcgagacacaactcaggacgctttcattatttcctgacaccttgctgggggatcctgggaggagagtgaggtttttcgatccacttcgcaatgaatactttttcgatcgtaaccggccttcttttgacgcaatcctgtactactaccagagcggggggcgtctgcgccggcctgtgaacgtgcctttggatatctttctcgaagagataagattctaccagctcggggacgaggctctggcggcgtttcgggaggacgaagggtgcctgcccgagggcggagaggacgagaagcccctgccgtcacagccttttcagaggcaagtgtggctcctattcgagtacccagaatccagtggtccagcaagggggatcgcaattgtaagtgtcttggtgatcttaattagcattgttatattttgcctcgagactttgccacagtttcgagtggatggacggggcgggaacaacggaggtgttagcagagtgagcccagtgtcccgcggtagccaggaggaggaagaggacgaagacgactcttatacattccaccatgggattacccctggggagatgggaacaggaggctcttcttccctcagcactctggggggatctttctttaccgacccgtttttcctggtcgagacactgtgtatcgtgtggttcaccttcgaactgctagttcgatttagcgcctgcccgagcaaacctgctttcttccgcaatattatgaatatcattgaccttgtggctatatttccctacttcataacacttggaacagagctggtccagcagcaggagcagcaaccagcttctggaggcggcggacagaacggacagcaggcaatgtctctggccattctgagggtcattagactagttagagtgtttagaatcttcaaactgagccgccattccaaggggctgcagatactgggtaaaactctccaggccagcatgagggagctcgggcttttaatctttttcctttttatcggcgtgatactcttctcaagcgccgtgtacttcgccgaggccgatgatgatgattcattgtttcctagcatccctgacgctttctggtgggctgtggtcacgatgactactgtggggtacggggatatgtatcccatgacggtggggggaaaaattgtgggttctctctgtgctatcgcaggtgtcctgaccatcgcgcttcccgtacccgtcattgtgtcaaattttaattacttctaccaccgggagactgagcaggaagagcagggccagtatacacacgttacctgtggccagccagcacctgatcttagagccacagataatgggctcggcaaacctgatttccccgaagcgaatagagaaaggagacctagttacctcccaactccccacagggcttacgctgaaaagagaatgttgaccgaggtatag

SEQ ID NO: 313909 - DNA, 1590 bp, Artificial Sequence
  derived and/or modified sequence
atgcggagcgagaagagcctgaccctggccgcccccggcgaggtgcgcgggccagagggcgagcagcaggacgccggggatttcccagaggccgggggcggtggcggctgctgtagcagcgaacggctggtgataaatattagcggtctccggtttgaaacgcagctacgaaccctgtctctgtttcccgacacattactgggcgacccaggaaggagggtgcgcttctttgaccccctgcggaatgagtacttcttcgatagaaataggccgtcttttgatgcaattttatactactaccaatctgggggcagactgaggaggcccgtgaacgtccccctggatatcttcttggaagaaatccgattctatcaactgggagacgaggctctcgcggcctttcgcgaggacgaaggatgcctgcctgagggtggtgaagacgagaagccccttccatcccaaccctttcagcgccaggtctggctgctgtttgaatacccagagtcttctggccccgctaggggaattgccatcgtcagtgtgctagtcattttaattagcatcgttattttctgcctggagactctgccccagttcagagtcgatgggcgagggggcaacaacggtggtgtatcccgagtgtcaccagttagccggggatcacaagaggaggaggaggatgaggacgactcatacactttccaccatggtatcacacccggcgagatgggcactggtggaagctcttccctgagcacgctaggcgggagtttcttcaccgatcccttcttcctcgttgaaacactttgcatcgtatggttcacatttgaactgcttgtcagattctctgcctgcccctccaagccggctttctttcgcaatattatgaatatcattgatctggtcgctattttcccctatttcatcactctgggcacagagcttgtgcagcagcaggagcagcagcccgccagcggcgggggcggccagaatgggcagcaagcaatgtccttagcaatattacgggttatacggttagtgagagtgtttagaatctttaaactgtctcgtcacagcaaaggtcttcaaatcctgggcaaaacccttcaggcctccatgcgggagctgggactacttattttttttctgttcatcggagtgattctgttctcgtctgcagtctatttcgctgaggctgacgacgacgactcactgttcccatccatccccgatgccttctggtgggcagtcgtgactatgaccacagttggatatggcgacatgtaccccatgaccgtgggagggaagatcgtcggctccctgtgcgccatagcaggtgtgcttactatagctctgccggttccagtcattgttagtaacttcaattatttctatcaccgtgaaacagagcaggaggaacagggccagtacacgcacgtgacatgtggtcagccagctccagacctgcgagccaccgataatggtttagggaagccggatttccctgaagccaatcgcgagcgccgaccgagttacctccctacacctcatagagcttacgccgagaaacggatgctgactgaagtgtag

SEQ ID NO: 313910 - DNA, 4237 bp, Artificial Sequence
  derived and/or modified sequence
aagcttactggtgaggcaagtgtgcgtctatttccatggcgccctggctcgcggcagcccctggctgggcgaggggtgtgatgtgggagtggggtgggagggggcagcaggcggggcctgccacgtcacttggagagtgtgtgttgggaaggaagggcagagcggagagccgagccgctgcagctgcggcggcggcagcgaagccttgagccgtggggaggtgggtccccgcgctcgggcgccggggcagccccgggccctctgcgaggcctgcggcgcggctcctagggaggaggtggcggctgtggcggccggaaccgcgaccttggccggacccagccccgcggtggacgcagggcggaggccgagccccgccaggagtctttgccgagccggagggaggcgcatctggcgcttcggtaccagcggcagccgggggtccggagcggctggaggagcgcagtgggaactgggaagagctagcccggctggagggcggacctctgcgtccgggagccgggtctcaggcaccgctgggggcgaagccacgcgtcttttcgggcagccaatttcacacgcgcctgtgtgcggttccgggcatcccagtaagctctagcacccgggcgcgggtaacgggaagcgcagaaccaaatccccagcgcccaggtcacctccccagacccagccttgcagggaccagggctttagggctcacggacccaacggccaggtcagaccgcgaaccgggaggagcgcgggccccaccctaaagagggcgcagccgggagctggggagcgggtgccgcgctccagagattgtgtcgtgggcgccgtcctagtggcggggagcgcacctccgagggggcatgagatcggagaaatcccttacgctggcggcgccgggggaggtccgtgggccggagggagagcaacaggatgcgggagacttcccggaggccggcgggggcgggggctgctgtagtagcgagcggctggtgatcaatatctccgggctgcgctttgagacacaattgcgcaccctgtcgctgtttccggacacgctgctcggagaccctggccggcgagtccgcttcttcgaccccctgaggaacgagtacttcttcgaccgcaaccggcccagcttcgacgccatcctctactactaccagtctgggggccgcctgcggaggccggtcaacgtgcccctggacattttcctggaggagatccgcttctaccagctgggggacgaggccctggcggccttccgggaggacgagggctgcctgcccgaaggtggcgaggacgagaagccgctgccctcccagcccttccagcgccaggtgtggctgctctttgagtacccagagagctctgggccggccaggggcatcgccatcgtctccgtgttggtcattctcatctccatagtcatcttttgcctggagaccttaccccagttccgtgtagatggtcgaggtggaaacaatggtggtgtgagtcgagtctccccagtttccagggggagtcaggaggaagaggaggatgaagacgattcctacacatttcatcatggcatcacccctggggaaatggggaccgggggctcctcctcactcagtactcttgggggctccttctttacagaccccttctttctggtggagacgctgtgcattgtctggttcacttttgagctcctggtgcgcttctccgcctgccctagcaagccggccttcttccggaacatcatgaacatcattgacttggtggctatcttcccctacttcatcaccctgggcactgagctggtgcagcagcaggagcagcaaccagccagtggaggaggcggccagaatgggcagcaggccatgtccctggccatcctccgagtcatccgcctggtccgggtgttccgcatcttcaagctctcccgccactccaaggggctgcagatcctgggcaagaccttgcaggcctccatgagggagctggggctgctcatcttcttcctcttcatcggggtcatcctcttctccagtgccgtctacttcgcagaggctgacgatgacgattcgctttttcccagcatcccggatgccttctggtgggcagtggttacaatgaccacggtaggttacggggacatgtaccccatgactgtggggggaaagatcgtgggctcgctgtgtgccatcgctggggtcctcaccattgccctgcctgtgcccgtcatcgtctccaacttcaactacttctaccaccgggagacggagcaggaggagcaaggccagtatacccacgtcacttgtgggcagcctgcgccggacctgagggcaactgacaacggacttggcaagcctgacttccccgaggctaaccgggaacggagacccagctaccttcctacaccacatcgggcctatgcagagaaaagaatgctcacggaggtctgacccatgcaggcagggcctgcaggaggggagcactgagctaacagtctcttaggcttccttctcatttccactactcactctagcttcagttgacttcttgactctctcccctacacccactacctggcatccaggaccaaatacctggactatcaaccttgttgcttaatccctgcagcattcaaggttaatccatctaagtgacatttttgaaattccagcggtgccacccaatcatgcccagcttctgtcatatgaatgagatatacatttatgtctgaccttccctcaagactgatttttcatgtctgggacttacaatatctcaaggaacagcaatgtcaacaggatggaaaccagccctatctgagtcttcgctccctccttagtgttctttgctttgggtcatgtgcgtttcctagcttcaggctacttggtaactggaagaagctggaggacagaagcagtactcaacttgctgttattccagtgccctgtaacaatcactggtcctcctgcagatgacccttggtagagtctttatttgcatagcctcaaaataggttattcgtttctaaacttggatggaattagagaatacaatcaaactttaccacttggaggacacggggttagtccaggaccaaagaggccaatggatttttcaaagtgtgccccagcacaagaggcactggtgttcggtctacatttagttctccccactctgatcccctgactctccagcttccaggaaggttccttctcagagccaaatactctttgtgcaagtgccttcctgagcagaagaactggagaaagggaaccacagagccaggaggaatgtctgagcagagtcaagcaactggcttgaccacagtctgaagcaaggtgccacttaaacagatactgttttctcaaaggggcagaggaatcgtgttgcagatggcagccttttctccttcattttccccacattttctctggccctctaccttgcttcctgggagtttgatttaggattgctgttgaaggcttcctcaggcaaactccagcttaaagccctagacaggtaaaagcacacattggatggcagcatgggtttcttcccattttatgggcatgaaatatgtggtttagaataaggaacaagcattattcctttgccaacagcctcactctaagaggcttttttgctgagtcaagcaaacacttgcctgctctgccccttggagctgcatttgacctgctctcactggtaaggtgacttggtggcgttcccacttgatttagccattttcttccattgtgagaccactgccatctatccacctgcccacctccccttttgtttctcagtaacattgccatttgttttttgcctttgataaactgtgatgtactgttctgagatcttttgggtgcagttctgaaactgaaaggactgttaacatgtttttaattttatatctatgctttcagactctttgatgataattttttttttaaaaattattctctcgaagagcaacttacgagaggacagccttatgagggtttgcttgagaggcagtgtggcttctgtgactgccagctctaaatctcgatcttgccataactttacagggtaacttgggtccacagtcactctttgtgcctcagtttacccacccattaaatgggaacattactgtcttcccctccctacctcatggggaatgtctgggaagctggggacattgctatgcaaatgtgtgaatcttagtcatggatttgatttttag

SEQ ID NO: 313911 - DNA, 5977 bp, Artificial Sequence
  derived and/or modified sequence
aagcttactggtgaggcaagtgtgcgtctatttccatggcgccctggctcgcggcagcccctggctgggcgaggggtgtgatgtgggagtggggtgggagggggcagcaggcggggcctgccacgtcacttggagagtgtgtgttgggaaggaagggcagagcggagagccgagccgctgcagctgcggcggcggcagcgaagccttgagccgtggggaggtgggtccccgcgctcgggcgccggggcagccccgggccctctgcgaggcctgcggcgcggctcctagggaggaggtggcggctgtggcggccggaaccgcgaccttggccggacccagccccgcggtggacgcagggcggaggccgagccccgccaggagtctttgccgagccggagggaggcgcatctggcgcttcggtaccagcggcagccgggggtccggagcggctggaggagcgcagtgggaactgggaagagctagcccggctggagggcggacctctgcgtccgggagccgggtctcaggcaccgctgggggcgaagccacgcgtcttttcgggcagccaatttcacacgcgcctgtgtgcggttccgggcatcccagtaagctctagcacccgggcgcgggtaacgggaagcgcagaaccaaatccccagcgcccaggtcacctccccagacccagccttgcagggaccagggctttagggctcacggacccaacggccaggtcagaccgcgaaccgggaggagcgcgggccccaccctaaagagggcgcagccgggagctggggagcgggtgccgcgctccagagattgtgtcgtgggcgccgtcctagtggcggggagcgcacctccgagggggcatgagatcggagaaatcccttacgctggcggcgccgggggaggtccgtgggccggagggagagcaacaggatgcgggagacttcccggaggccggcgggggcgggggctgctgtagtagcgagcggctggtgatcaatatctccgggctgcgctttgagacacaattgcgcaccctgtcgctgtttccggacacgctgctcggagaccctggccggcgagtccgcttcttcgaccccctgaggaacgagtacttcttcgaccgcaaccggcccagcttcgacgccatcctctactactaccagtctgggggccgcctgcggaggccggtcaacgtgcccctggacattttcctggaggagatccgcttctaccagctgggggacgaggccctggcggccttccgggaggacgagggctgcctgcccgaaggtggcgaggacgagaagccgctgccctcccagcccttccagcgccaggtgtggctgctctttgagtacccagagagctctgggccggccaggggcatcgccatcgtctccgtgttggtcattctcatctccatagtcatcttttgcctggagaccttaccccagttccgtgtagatggtcgaggtggaaacaatggtggtgtgagtcgagtctccccagtttccagggggagtcaggaggaagaggaggatgaagacgattcctacacatttcatcatggcatcacccctggggaaatggggaccgggggctcctcctcactcagtactcttgggggctccttctttacagaccccttctttctggtggagacgctgtgcattgtctggttcacttttgagctcctggtgcgcttctccgcctgccctagcaagccggccttcttccggaacatcatgaacatcattgacttggtggctatcttcccctacttcatcaccctgggcactgagctggtgcagcagcaggagcagcaaccagccagtggaggaggcggccagaatgggcagcaggccatgtccctggccatcctccgagtcatccgcctggtccgggtgttccgcatcttcaagctctcccgccactccaaggggctgcagatcctgggcaagaccttgcaggcctccatgagggagctggggctgctcatcttcttcctcttcatcggggtcatcctcttctccagtgccgtctacttcgcagaggctgacgatgacgattcgctttttcccagcatcccggatgccttctggtgggcagtggttacaatgaccacggtaggttacggggacatgtaccccatgactgtggggggaaagatcgtgggctcgctgtgtgccatcgctggggtcctcaccattgccctgcctgtgcccgtcatcgtctccaacttcaactacttctaccaccgggagacggagcaggaggagcaaggccagtatacccacgtcacttgtgggcagcctgcgccggacctgagggcaactgacaacggacttggcaagcctgacttccccgaggctaaccgggaacggagacccagctaccttcctacaccacatcgggcctatgcagagaaaagaatgctcacggaggtctgacccatgcaggcagggcctgcaggaggggagcactgagctaacagtctcttaggcttccttctcatttccactactcactctagcttcagttgacttcttgactctctcccctacacccactacctggcatccaggaccaaatacctggactatcaaccttgttgcttaatccctgcagcattcaaggttaatccatctaagtgacatttttgaaattccagcggtgccacccaatcatgcccagcttctgtcatatgaatgagatatacatttatgtctgaccttccctcaagactgatttttcatgtctgggacttacaatatctcaaggaacagcaatgtcaacaggatggaaaccagccctatctgagtcttcgctccctccttagtgttctttgctttgggtcatgtgcgtttcctagcttcaggctacttggtaactggaagaagctggaggacagaagcagtactcaacttgctgttattccagtgccctgtaacaatcactggtcctcctgcagatgacccttggtagagtctttatttgcatagcctcaaaataggttattcgtttctaaacttggatggaattagagaatacaatcaaactttaccacttggaggacacggggttagtccaggaccaaagaggccaatggatttttcaaagtgtgccccagcacaagaggcactggtgttcggtctacatttagttctccccactctgatcccctgactctccagcttccaggaaggttccttctcagagccaaatactctttgtgcaagtgccttcctgagcagaagaactggagaaagggaaccacagagccaggaggaatgtctgagcagagtcaagcaactggcttgaccacagtctgaagcaaggtgccacttaaacagatactgttttctcaaaggggcagaggaatcgtgttgcagatggcagccttttctccttcattttccccacattttctctggccctctaccttgcttcctgggagtttgatttaggattgctgttgaaggcttcctcaggcaaactccagcttaaagccctagacaggtaaaagcacacattggatggcagcatgggtttcttcccattttatgggcatgaaatatgtggtttagaataaggaacaagcattattcctttgccaacagcctcactctaagaggcttttttgctgagtcaagcaaacacttgcctgctctgccccttggagctgcatttgacctgctctcactggtaaggtgacttggtggcgttcccacttgatttagccattttcttccattgtgagaccactgccatctatccacctgcccacctccccttttgtttctcagtaacattgccatttgttttttgcctttgataaactgtgatgtactgttctgagatcttttgggtgcagttctgaaactgaaaggactgttaacatgtttttaattttatatctatgctttcagactctttgatgataattttttttttaaaaattattctctcgaagagcaacttacgagaggacagccttatgagggtttgcttgagaggcagtgtggcttctgtgactgccagctctaaatctcgatcttgccataactttacagggtaacttgggtccacagtcactctttgtgcctcagtttacccacccattaaatgggaacattactgtcttcccctccctacctcatggggaatgtctgggaagctggggacattgctatgcaaatgtgtgaatcttagtcatggatttgatttttagttatccccatacccccataggcaaggccttcccccagagttcctgctttggatccaaagcctgagaataggccattatggaccattggctccctaaatccctccttggcctcttggactgagcccctcagcctttcttcttacccttcagaaaggagagttctctttagatatgttcagggggatccttccatggctggaggtcaccttgactgggggcttggcttctccaaacctgaaacacagtagaagatagagatgtttatgatgcaaaaacctgctctgaggtcagaaagtgctagttttccaaatctctcccattgctgctggctatctggggaaagaagagaaaagcccattccagaggcagaagggaagctcccagccgagggtaaaagttgagacctgtatgcatgtatctctgtatatgtgtatgtaatcaccctcatcaccatccctgagaaaacattttcttttcaagtcagagcacgcctgaaagggtttgtggagagcccagctcaccagggactctggttgccgtagcaaccttccagactgttctctctatcttctgctttgggcatcaagggagaccaggggactacatcttcccagcttctcaaatgggagcacctcccacatcgtggcttaggggctgggagtgccagggcacggatgtgggacttttggaaaatgtggaggaagcagggcctcaaagcttcctgtctggacttttcttcctagtttccccacccagtcattgaagctgcctcatcttactcctgattcttcagaaatttgaatgttaagcaaccagttaaaccaacgtcagtattaattttttcaagctgtcgaggggagcccttagaggggacaacttcttggagtggcggccaagctgggccttaccaggtgtgatcatagtcttaggtatcatggagttcccatctccgcagaggcaggctcttcccagctccacgagaggcggagaattgcaacttcttcctctctgggaacggcctatctagctcctgggaggaatctcaaagatctttcttcttaagacatcgaagaaaaactgagaggctgtagctcgacctagtttctgtgaagaattttgtcaagtgatccctctcggaccctgagcctctttatttggattttgtgccttgagcaccaagagaatatgcactctgggttgcctggacagctggggtggtgattcacaggaagggtccaagccatcactacacctgactcaagccggaaagagctcccagaggacttcctggagctgccagcctcagcctgagatgcgggatattcgtccccaaggagcgaggagggacagctcgccttctttgcaggaaaaatgctggcaggtggtgcaagcaaggacatctatgcatagaattctgacagcagctggaccctcaacttcttcagaagacgagaaccctgcctggcaccgctggcaggcatctggcctgacaccgctctggaggcctcccacaagcagcaaccaagccagaaaaagttgagaccagacccgttgtccctaaagatggggcccagaatgttggggtgaagctgtaggaacagggtgaaagctggtggtgtgagcaaagagaccagctatggggtggtcaggggattccgggaggtgcatgggtatgttgcagacccccccaggacaagggtggctgtggaagaatggcaaataaacacaaggcaaagtctc

SEQ ID NO: 313912 - DNA, 1590 bp, Artificial Sequence
  derived and/or modified sequence
atgcggtccgagaagagcctgaccctggctgcacccggagaagtaagagggccagagggcgaacagcaggacgcaggcgatttcccagaagcaggcggaggtgggggatgctgttcctccgagagacttgtgattaacattagcgggctacgattcgagactcagctccgaactttgtcactctttcctgacacacttctaggcgatcccggaaggcgcgtgagattcttcgaccccctccgcaacgagtattttttcgacaggaatcggcctagcttcgacgctattctttattattatcaatccggtggacgcctgcgaagaccagtcaatgtgcccctcgatatattcctggaagaaattaggttttatcagcttggcgatgaggccttggccgcttttcgggaggatgagggttgcctgcccgaaggcggagaggatgagaaaccgctcccctcacagccctttcagcgacaggtgtggctgctctttgaatatccagaatccagtggccctgcgcgaggaattgctattgtgtcagtcttagtcatactcattagcattgtgatcttttgtcttgagaccctccctcagttcagagtagacggccgtgggggaaataatggcggtgtgtcgagggtgtccccagttagcagaggaagtcaggaagaagaggaagacgaggatgattcatatactttccatcatggaattacacccggagagatggggaccggcggttcttcctcactatccactctggggggaagtttctttacagaccctttttttctagtggagaccctctgcatagtttggttcacgttcgaactcctagtaagattttccgcttgcccatccaaaccggctttctttcgcaatattatgaatattatcgaccttgtggccatcttcccatatttcataaccctagggacagaactagtgcagcaacaggaacagcaacccgctagcggaggcggaggccaaaatggccaacaggccatgagcctggctattcttcgagtcatccggctggtgagggtgttcagaatctttaagctttcacgtcacagtaaaggactgcagattctcggcaagactctgcaagccagtatgcgtgaactgggacttctgattttctttctgttcattggggtcatcctgttttcttcagctgtgtacttcgcagaggcagacgatgatgattccctgtttccttccattcccgacgccttctggtgggccgtggttaccatgactaccgttggctacggcgacatgtacccaatgaccgttggcggtaaaattgtgggatcactgtgcgctattgccggtgttctaacaatcgctctgcctgtacctgtaatcgtctctaactttaactacttttaccaccgcgagaccgaacaagaggagcagggccagtacacccatgtgacctgtgggcagcccgctcccgatctccgggcaacggacaatggtctcggaaagcccgatttcccagaggcaaatagggagagaaggcccagctacttaccaaccccccaccgcgcttacgccgaaaagcgcatgttgacagaagtgtag

SEQ ID NO: 313913 - DNA, 1590 bp, Artificial Sequence
  derived and/or modified sequence
atgcgatcagagaaaagcttgaccctcgcagccccaggagaagtgagggggccagaaggagagcagcaggacgctggggattttccagaggcaggaggcggtggaggctgttgcagcagcgagcgtctggtgatcaacattagcggcctgcgcttcgagacccagctgagaacactgagcttgttccctgatacgctgctgggtgaccctggacggagggttaggttcttcgatcccctgcggaatgagtacttcttcgaccgaaatcggccatcgtttgatgccattctgtactattaccaaagcgggggacgtctgcgtcggccagttaacgtgcctctggacattttccttgaggagatcagattctaccaactcggcgacgaggccctggctgctttccgggaagatgagggctgtctacccgaaggtggtgaggatgagaagcctctcccgagtcagccctttcagaggcaagtgtggcttttattcgagtatccagaaagctccggacctgccagaggaatcgccatcgtctcagtcctggtcatattaattagcatagtgatattttgtttggagactctgcctcagttccgagtggatggcagaggaggtaataatgggggagtttcaagggtgtcacccgtttcccgtggctcacaggaggaggaggaggatgaggatgattcttatacgtttcatcacgggatcacacccggtgaaatggggactgggggtagctcctctttatccacccttggaggaagctttttcactgacccattctttttggttgaaacactgtgcatcgtctggtttacttttgagctgctcgtaaggtttagcgcctgcccctccaagcccgctttctttcgtaatataatgaatatcattgatctggtggcgatttttccgtactttatcactcttggcacagagcttgtccagcagcaggagcagcagccagcttcagggggtggcggtcaaaatggacagcaggccatgagcctcgcaatcctcagggtcattagactcgttagggtcttcagaatctttaaactgagccggcacagtaagggcctgcaaatcttaggcaagaccctgcaggcttctatgagggagctgggcctcctcattttcttcctgttcatcggtgtgattctgttctcatcagcggtgtactttgccgaagccgacgatgatgactccctctttccatcaatcccggatgccttctggtgggccgttgtcacgatgactacggtgggatacggagatatgtaccctatgaccgtggggggaaaaatcgtgggaagcctgtgcgccatcgccggtgttcttacaatcgcattgcccgtacctgttatagtgagcaatttcaactatttctaccaccgggagacagagcaagaagagcaaggacagtacacccatgtgacttgcggccaacccgctccagacttgcgcgcaaccgataatggattgggaaagcccgattttccagaagccaacagggagagaaggcctagctacctgcccacacctcatcgagcttacgctgaaaaacgaatgttgaccgaggtatag

SEQ ID NO: 313914 - DNA, 2280 bp, Artificial Sequence
  derived and/or modified sequence
atgcttgagcacaagtatggtggtcacctcgtctctaggagagccgcctgtacaattcaaactgctttccgacagtaccagttgtccaagaatttcgaaaagatcaggaacagcctgttagaaagccgcctccctagacggatctccctgcgcaaggtacggtcaccgaccgcggaatcccttgcggcagagaaagctctgatggaggggtacgggttggtcggcctgcctctggtccgaagcccgtcactgcccccgaccttcgctggcacactgacagaactcgaggattccttcacggaacaggttcagagcctggctaagtccatcgatgacgccctctcaacctggtcacttaaaactatgtgttcattgagagaaagtggggcttaccagttgcatcaagctctgcaggctgcagccggccccccaggactggaggctgaaggaagagcccccgaatctgccgggccgggtcccggtgatgacgcagcagaaacgcccgggctcccccccgcccattcaggaaccctaatgatggccttccgagatgtgactgtacaaatcgccaaccagaatatatctgttagtagtagcacagctctctcagtggctaattgtctcggagcacagaccgtgcaggctcccgcagagccggccgcggggaaggccgagcagggcgaaacaagcggccgggaggcccccgaggccccagccgtggggagagaagacgcatctgctgaggattcctgtgccgaggcggcagcctccggggccgccgatggtgcgactgcaccaaaaaccgaagaggaggaggaagaggaggaaacggccgaggtgggaagaggcgcagaggcggaggcaggggacttggagcagctgagttcttcgagcacgtccaccaagagcgctaagagtgggagcgaagcatccgcttccgcgagcaaggacgccttgcaggccatgattctatctctgccccgctaccattgcgagaacccggcttcgtgcaaatcacccacactgtcaaccgataccctgagaaagaggctgtatcgcatcgggctcaatctgttcaatattaatcccgataagggcatccaattcttaatatcccgtgggtttattcccgacacccctatcggagtggctcacttcctcctgcagcgtaaaggactctcaaggcagatgataggagagttccttggtaattctaaaaagcagtttaatcgagatgtcctggattgtgttgttgacgagatggatttttcatccatggagttggatgaagccttgcgtaagttccaggcacacattcgtgtccagggcgaagctcagaaagttgagcgcctgatagaggcatttagccagagatactgcatgtgtaaccccgaagtggtgcagcagttccacaaccccgacacaatcttcatacttgcatttgctataatattgctgaataccgatatgtactcaccaaacattaaaccggatcgaaagatgatgctcgaggactttatacggaacttacgtggagtagatgacggggcggacatcccaagggagctcgttgtggggatatatgagcggattcagcagaaggagcttaaatctaatgaggaccacgtaacctatgtcaccaaggtggagaagtctattgtcggtatgaagacggtattaagcgtaccccaccggcgcctggtgtgttgtagccggctgttcgaagttacggatgtcaataagttacaaaagcaggcagctcaccagcgggaggtcttcctcttcaatgatctcctggtgattctcaaattgtgccctaagaaaaagagttcttcgacctacacattctgtaagtcggtggggttactcggaatgcagttccagctgtttgagaatgagtattattcccacgggattacactagtgactccactctccgggagtgagaaaaaacaggtccttcacttttgtgctctggggagcgacgaaatgcagaagttcgtggaagatttgaaagagtctattgcagaggtgaccgaattggagcagattcggatcgagtgggagctggaaaagcaacaggggaccaaaaccctttcttttaaaccctgtggtgcccagggcgatccacagtccaagcaagggagcccaacggccaagcgagaggccgctctacgggaaagaccggcagaatctacagtcgaggttctcataaacgccagtccagccaggcttactattctccccattagcagagacacaattaaaagctactgctag

SEQ ID NO: 313915 - DNA, 2701 bp, Artificial Sequence
  derived and/or modified sequence
aagcccctccccttctctgggccttgatttcccctcctgctcagtggggacgttcttggtcctccttcttgcccactctacccagtcgccgagtctggcgaagcagagctgtctgggggtcaccgcagcaggagggaccgagcttagatacgaaaaaagacttctacacggcaagagccacagaaaggacgctccagctggctcagcagaggggcatctctccctttcaagaacaaaaggtggcaggtacccgggggccctggggcagaacgaggtaaattctgcacggacttccacatctaagaccccagaaatctccagccggctccctccgaccgaatgagaccgtgctgcaccagttctgctgcccagccgccgacgcctgctccgacctggcctcccaaagattgaaatgctagaacataagtacggcggtcacctggtgtcccggcgcgccgcttgcaccatccaaaccgccttccgccaataccagctcagcaagaacttcgagaaaatccgcaactcgcttctggagagccgcctgccacggcggatctccctgcgcaaggtgcggtcacccacggccgagagcctggcggccgagaaagcgctcatggagggctacggcctcgtggggctgccgctggtgcgctcgccctccctgccgcccaccttcgcaggcaccctcaccgagctggaggactccttcaccgagcaggtgcaatccctggccaagtccatcgacgacgcgctcagcacgtggagcctcaagaccatgtgctccctgcgggagagtggcgcttaccagctccaccaggccctgcaggcggccgcggggcccccaggcctggaggccgaggggcgggcgccggagagcgcgggccccgggcccggggatgacgccgcggagacccccggcctgcccccggcccacagcgggaccctcatgatggctttccgggacgtcacggtgcagatcgccaaccagaacatatccgtctcctcctccacggctctgtcggtggccaactgcctgggcgctcagacggtccaggcccccgcagagcccgcggcgggcaaggccgagcagggcgagacctctgggcgggaggccccggaagcccccgccgtgggccgggaggacgcgtcagccgaggactcatgcgcagaggctgcggctagtggggcggcggatggggccacagcccccaaaacagaggaggaagaggaggaggaggagacggcggaggtggggagaggggccgaggccgaggcaggcgacttggagcagctgagcagcagcagcacgtccaccaagtccgccaagtcaggctcggaggcgtcggcctccgcctccaaggacgccctgcaggccatgatcctgagcctgccgcgctaccactgcgagaacccagccagctgcaagtcgcccacgctctccaccgacaccctgcgcaagcggctctaccgcatcggcctcaacctcttcaacataaaccccgacaagggcatccagttcctgatctcacgcggcttcatcccggacacccccatcggtgtggcccatttcctcctccagcgaaagggcctcagccgccagatgattggagagttcctgggcaacagcaagaagcagttcaaccgcgacgtgctggactgcgtggtggacgagatggacttctccagcatggagctggacgaggccctgcgcaagttccaggcacacatccgtgtgcagggggaggctcagaaggtggagcggctcattgaggccttcagccagcgctactgcatgtgcaaccccgaagtggttcagcagttccacaaccccgacaccatcttcatcctcgccttcgccatcatcctcctcaacaccgacatgtacagccccaacatcaagcctgaccggaagatgatgctggaggacttcatccgaaaccttcgaggtgtggacgatggcgctgacatccccagggagctggtggtaggcatctatgagaggatacagcagaaggagctcaagtccaatgaggaccacgtcacgtacgtcaccaaggtggagaagtccattgtgggcatgaagacagtgctgtccgtgccccaccgccgcctggtgtgctgcagccggctcttcgaggtgacggatgtgaacaagctgcagaagcaggcagcgcatcagagggaggtgttcctcttcaatgacctgctggtgattctcaaactttgcccgaagaagaagagctcctccacgtacaccttttgcaagtcagttggcctgctgggcatgcagttccagctctttgagaacgagtattactctcatggcatcacactggtgaccccgctctcgggctccgagaagaagcaggtgctgcatttctgtgccctgggctcggacgagatgcagaagttcgtggaggacctgaaggagtccattgctgaggtgacggagctggagcagatccgaatagagtgggagctggagaagcagcagggaacaaagacactctccttcaagccctgcggagcccagggggacccacagtcaaagcaaggatcgccgacagccaaaagggaagccgcgctcagggagaggccggcggagagcacggtggaggtattaatcaatgcctccccagcccgactcaccattttaccaatttcaagagatacaattaaaagttactgctagcatgggtaa

SEQ ID NO: 313916 - DNA, 2280 bp, Artificial Sequence
  derived and/or modified sequence
atgctggagcacaagtatggaggccacctggtgtccagaagagctgcctgcaccatccagacagccttccggcagtaccagctgagcaagaactttgagaagatccggaacagcctgctggagagccggctgccccggcgcatcagcctgaggaaggtgcgcagccccacagctgagagcctggccgctgagaaggccctgatggagggctacggcctggtgggcctgcccctggtgcgcagccccagcctgccccccacctttgctggcaccctgacagagctggaggacagcttcacagagcaggtgcagagcctggccaagagcattgatgatgccctgagcacctggagcctgaagaccatgtgcagcctgcgggagagcggggcctaccagctgcaccaggccctgcaggccgctgctggccccccaggcctggaggccgagggccgggcccctgagagcgctggccctggccctggagatgatgctgctgagaccccaggcctgcccccagcccacagcggcaccctgatgatggccttcagagatgtgacagtgcagatcgccaaccagaacatctctgtgagcagcagcacagccctgtctgtggccaactgcctgggcgcccagacagtgcaggccccagctgagcctgctgctgggaaggccgagcagggcgagaccagcggccgggaggcccctgaggccccagctgtgggcagagaagatgccagcgctgaggacagctgtgccgaggccgccgccagcggggctgctgatggagccacagcccccaagacagaggaggaggaggaggaggaggagacagctgaggtgggccgcggggctgaggccgaggccggggacctggagcagctgagcagcagcagcaccagcaccaagagcgccaagagcggcagcgaggccagcgccagcgccagcaaggatgccctgcaggccatgatcctgagcctgccccgctaccactgtgagaacccagccagctgcaagagccccaccctgagcacagacaccctgaggaagaggctgtaccgcatcggcctgaacctcttcaacatcaacccagacaagggcatccagttcctgatcagccggggcttcatcccagacacccccatcggcgtggcccacttcctgctgcagaggaagggcctgagccggcagatgattggagagttcctgggcaacagcaagaagcagttcaacagagatgtgctggactgtgtggtggatgagatggacttcagctccatggagctggatgaggccctgaggaagttccaggcccacatccgggtgcagggcgaggcccagaaggtggagcggctcatcgaggccttcagccagcgctactgcatgtgcaaccctgaggtggtgcagcagttccacaacccagacaccatcttcatcctggcctttgccatcatcctgctgaacacagacatgtacagccccaacatcaagccagacaggaagatgatgctggaggacttcatccggaacctgcggggcgtggatgatggagctgacatcccccgggagctggtggtgggcatctatgaaagaatccagcagaaggagctgaagagcaatgaagaccacgtgacctacgtgaccaaggtggagaagagcatcgtgggcatgaagacagtgctgtctgtgccccaccggcggctggtgtgctgcagccggctgtttgaggtgacagatgtgaacaagctgcagaagcaggccgcccaccagcgggaggtgttcctgttcaatgacctgctggtgatcctgaagctgtgccccaagaagaagagcagcagcacctacaccttctgcaagtctgtgggcctgctgggcatgcagttccagctgtttgaaaatgagtactacagccacggcatcaccctggtgacccccctgagcggcagcgagaagaagcaggtgctgcacttctgtgccctgggcagtgatgagatgcagaagtttgtggaggacctgaaggagagcattgctgaggtgacagagctggagcagatccgcatcgagtgggagctggagaagcagcagggcaccaagaccctgtccttcaagccctgtggggcccagggcgacccccagagcaagcagggcagccccacagccaagcgggaggccgccctgcgggagaggcctgctgagagcacagtggaggtgctgatcaatgccagccctgcccggctgaccatcctgcccatcagccgggacaccatcaagagctactgctag

SEQ ID NO: 313917 - DNA, 2280 bp, Artificial Sequence
  derived and/or modified sequence
atgctggagcacaagtacggcggccacctggtgagccggcgggccgcttgtacgatccagaccgcctttagacaataccagctatcaaaaaatttcgaaaaaatcaggaacagcctgctggagtctcgactaccaagacggatttccctgaggaaggtgcgcagtccaaccgctgagtcactcgcagctgaaaaagctctgatggaaggctacgggctggttgggttgcccttggtgcggagcccttcgctgccacctaccttcgctggcactctgaccgaattggaggacagctttactgaacaggtgcagagtttggcaaaatcgatcgacgacgccctctctacatggtccctaaaaaccatgtgtagcttgagggagtccggagcgtatcagctgcatcaggcgctgcaggccgccgccgggcctccggggctcgaggcagaaggaagggctcccgagtccgctgggccagggcccggagacgatgccgctgaaacaccagggctgcccccggcacattccgggaccctgatgatggctttccgtgatgtcactgtgcagatagctaaccagaatatctctgtctcatcatccacagctctgtccgtggccaattgcttgggggcccagaccgtacaggcacccgcggagcccgccgccggaaaggccgaacagggcgagacatcgggtcgggaagcccctgaggcccctgcagtcgggcgcgaggatgcctctgcagaagattcatgtgccgaagccgctgcatctggggcagccgacggggcaactgcaccaaagaccgaggaggaggaggaagaagaggaaacagctgaggtgggaagaggagcagaagccgaggcaggggatttagaacagttgagctcatcctccacttctactaagagcgccaagtccggtagcgaagctagtgcttccgcatccaaggatgctttacaggccatgatactgagcctgcctagataccattgtgagaatcccgcctcttgcaagtccccaactctctctacagacactctgaggaaaaggctgtataggataggcctgaatctgttcaatataaaccctgataaaggtatccaattcttgatctctcgtggtttcataccggacacacctataggggtcgcccactttctcctgcagaggaaagggctgtctcgacagatgattggggaattcctcggtaattcaaaaaagcaattcaatcgggatgtccttgattgcgtagtggatgagatggatttcagctccatggaactcgatgaagccctcaggaagttccaggcacacataagggtgcagggagaagcacagaaagttgaaagacttatcgaagcctttagtcagagatattgtatgtgtaaccccgaagttgtgcagcagtttcacaatccagacacgatctttatcttggcttttgccatcatcctgcttaacacagacatgtattcacctaacattaagccggacagaaagatgatgttggaggattttatccggaacttacgtggagttgatgacggagccgacatcccaagagaactggttgtgggaatttatgaaagaatccagcagaaggagctcaaaagtaacgaggaccatgttacctacgtgacaaaggttgaaaaaagcatcgtcggtatgaaaacagtgttgtctgttccccataggaggttagtttgctgcagccgcctgttcgaggtcaccgacgtgaataagctgcagaaacaggccgcacaccagagggaagtgtttctcttcaatgacctgctggtcatactgaagctctgtccaaaaaaaaaaagctccagtacctacacattttgtaaaagtgtggggttactcggcatgcagttccagctatttgagaacgagtattactcccacggaatcacactggtgacaccattgtcaggttctgagaagaaacaagttctgcacttctgtgctctaggaagcgatgagatgcagaagttcgtggaggacctgaaggagagcattgcagaggtcaccgagctcgagcagatccgcatagagtgggagctagaaaagcagcaagggactaagactctgtccttcaaaccctgcggagcccagggagacccccagagtaagcagggatctcctaccgctaaaagagaggccgccctccgggaaagacccgctgaatcaactgtagaagtgttaataaatgctagccctgctagattgacaatcctgcccatttccagagacacaataaagagttactgctag

SEQ ID NO: 313918 - DNA, 2280 bp, Artificial Sequence
  derived and/or modified sequence
atgctagagcacaaatatggcggacacctggtgagccgcagggcagcctgcaccatccagacagcattccgccagtaccaactttcgaaaaatttcgagaaaatcagaaattcattattggaaagccgactgccgagacgtattagtctacgaaaggttagatcgccaaccgccgaaagtctcgccgcagaaaaagccctgatggaagggtatggtcttgtcggcctgcctctcgtgagatcccctagcctcccccctacattcgcagggacccttacagaactggaggactcctttacagaacaagtgcagtctctggctaaaagcattgacgacgctttgtctacgtggagcctgaaaacgatgtgcagtctgcgtgagtctggcgcataccagctccaccaggccctgcaggctgctgcaggccctcctggtttagaagctgagggccgtgccccagagtctgcgggacccggtcccggagacgacgccgctgaaacgccaggattacctcccgctcactccggaacgcttatgatggcttttagagacgtgacagtacagattgccaatcagaacattagcgtgagcagcagcaccgcgttgagtgtggcgaactgtctgggcgctcagacagtccaggccccagcagagcccgcagctggcaaggctgagcagggcgaaacaagtggacgcgaagccccagaggcacccgcagtggggcgagaggacgcctccgccgaggattcgtgcgccgaggcagcagcatctggggcagccgatggcgcaaccgccccaaagaccgaggaagaggaggaggaggaagaaaccgcagaggtcggcaggggggctgaggcagaggctggcgatctcgaacaattgagcagcagtagcaccagcacaaaaagcgccaagagcggaagtgaagcttctgccagtgcatccaaggatgcattgcaggccatgatcttgtcccttcccagatatcattgcgagaacccagcctcttgtaaatcccccacccttagcaccgacaccctgcgcaagcggctgtatcggataggcctgaacctcttcaacattaaccctgacaaagggatccagtttctaatctcaagaggctttatccctgacacacccattggtgtggcgcattttctgctgcaaagaaaaggactgtcgcgccaaatgattggtgagtttttaggcaatagtaaaaagcaatttaacagggatgtgctcgactgcgttgtcgacgaaatggatttttccagcatggagctcgacgaggcactcagaaagttccaggcgcacattagggtacaaggagaggcccagaaggtcgagcggctgatagaggctttctctcagaggtattgcatgtgtaaccctgaggtggtgcagcagtttcataaccccgacaccatattcatcctcgcttttgccatcatcctgctgaacacagatatgtacagtcctaatatcaagcctgaccggaagatgatgttggaggactttattcggaatttacgaggggtggatgatggggcagacataccaagagaactggttgttggcatatacgaacgcatccaacagaaggagttgaaatcgaacgaagaccatgtcacatacgtcactaaggttgaaaagagcatcgttggcatgaaaaccgtgctgagtgtgcctcaccgacggctggtatgttgttctagacttttcgaggtgaccgacgtcaacaaacttcagaagcaggccgcacaccagagagaagtctttcttttcaacgacttactggtgattctcaagctgtgccccaagaagaaaagcagcagtacctacactttctgcaaaagcgtcggcctgctcggaatgcaatttcagttattcgaaaacgagtactatagtcatggcatcaccctagttacgccgctctccggcagcgagaaaaagcaggtcctccatttctgtgccctgggcagtgatgagatgcagaaatttgtggaagacctgaaagagtctatagcggaggtcacagaacttgagcagatccggattgagtgggagttagagaaacagcagggtactaagactttatcatttaagccgtgtggagcccagggggatccccagagtaagcagggtagtccaacagctaaacgggaagcagcactacgcgagcggcctgccgaaagcactgtggaagttctgattaacgcgtcaccagctaggcttacaattctgcctatttctcgggacacaatcaagtcatattgttag

SEQ ID NO: 313919 - DNA, 2280 bp, Artificial Sequence
  derived and/or modified sequence
atgctggagcacaagtacggcggccacctggtgagcagaagagccgcctgcaccatccagaccgccttcagacagtaccagctgagcaagaacttcgagaagatcagaaacagcctgctggagagcagactgcccagaagaatcagcctgagaaaggtgagaagccccaccgccgagagcctggccgccgagaaggccctgatggagggctacggcctggtgggcctgcccctggtgagaagccccagcctgccccccaccttcgccggcaccctgaccgagctggaggacagcttcaccgagcaggtgcagagcctggccaagagcatcgacgacgccctgagcacctggagcctgaagaccatgtgcagcctgagagagagcggcgcctaccagctgcaccaggccctgcaggccgccgccggcccccccggcctggaggccgagggcagagcccccgagagcgccggccccggccccggcgacgacgccgccgagacccccggcctgccccccgcccacagcggcaccctgatgatggccttcagagacgtgaccgtgcagatcgccaaccagaacatcagcgtgagcagcagcaccgccctgagcgtggccaactgcctgggcgcccagaccgtgcaggcccccgccgagcccgccgccggcaaggccgagcagggcgagaccagcggcagagaggcccccgaggcccccgccgtgggcagagaggacgccagcgccgaggacagctgcgccgaggccgccgccagcggcgccgccgacggcgccaccgcccccaagaccgaggaggaggaggaggaggaggagaccgccgaggtgggcagaggcgccgaggccgaggccggcgacctggagcagctgagcagcagcagcaccagcaccaagagcgccaagagcggcagcgaggccagcgccagcgccagcaaggacgccctgcaggccatgatcctgagcctgcccagataccactgcgagaaccccgccagctgcaagagccccaccctgagcaccgacaccctgagaaagagactgtacagaatcggcctgaacctgttcaacatcaaccccgacaagggcatccagttcctgatcagcagaggcttcatccccgacacccccatcggcgtggcccacttcctgctgcagagaaagggcctgagcagacagatgatcggcgagttcctgggcaacagcaagaagcagttcaacagagacgtgctggactgcgtggtggacgagatggacttcagcagcatggagctggacgaggccctgagaaagttccaggcccacatcagagtgcagggcgaggcccagaaggtggagagactgatcgaggccttcagccagagatactgcatgtgcaaccccgaggtggtgcagcagttccacaaccccgacaccatcttcatcctggccttcgccatcatcctgctgaacaccgacatgtacagccccaacatcaagcccgacagaaagatgatgctggaggacttcatcagaaacctgagaggcgtggacgacggcgccgacatccccagagagctggtggtgggcatctacgagagaatccagcagaaggagctgaagagcaacgaggaccacgtgacctacgtgaccaaggtggagaagagcatcgtgggcatgaagaccgtgctgagcgtgccccacagaagactggtgtgctgcagcagactgttcgaggtgaccgacgtgaacaagctgcagaagcaggccgcccaccagagagaggtgttcctgttcaacgacctgctggtgatcctgaagctgtgccccaagaagaagagcagcagcacctacaccttctgcaagagcgtgggcctgctgggcatgcagttccagctgttcgagaacgagtactacagccacggcatcaccctggtgacccccctgagcggcagcgagaagaagcaggtgctgcacttctgcgccctgggcagcgacgagatgcagaagttcgtggaggacctgaaggagagcatcgccgaggtgaccgagctggagcagatcagaatcgagtgggagctggagaagcagcagggcaccaagaccctgagcttcaagccctgcggcgcccagggcgacccccagagcaagcagggcagccccaccgccaagagagaggccgccctgagagagagacccgccgagagcaccgtggaggtgctgatcaacgccagccccgccagactgaccatcctgcccatcagcagagacaccatcaagagctactgctag

SEQ ID NO: 313920 - protein, 86 aa, Artificial Sequence
  derived and/or modified sequence
MFLSVLVDWMIPDIPTDISDQIKKEKSLLVDFFLKEEHEKLKLMDEPALRSPGGGDRSRSRAASSAPSGQSQLGSMMSSGSQHTNV

SEQ ID NO: 313921 - DNA, 261 bp, Artificial Sequence
  derived and/or modified sequence
atgttcctcagcgtactggtggattggatgatcccagatatccctaccgacatctccgatcagatcaaaaaagagaaatccttgctggtggatttcttcctcaaagaagagcacgaaaaattgaaactcatggatgaacccgccctgcggtcgccagggggcggagaccggtctcgcagcagggcagcttcttcagctccctctggacagtcacaacttggcagtatgatgtcctccggctcccagcacactaatgtttag

SEQ ID NO: 313922 - DNA, 261 bp, Artificial Sequence
  derived and/or modified sequence
atgttcctgtctgtgctggtggactggatgatcccagacatccccacagacatcagtgaccagatcaagaaggagaagagcctgctggtggacttcttcctgaaggaggagcacgagaagctgaagctgatggatgagcccgccctgcggagccctgggggcggggacaggagccgcagccgggccgccagcagcgcccccagcggccagagccagctgggctccatgatgagcagcggcagccagcacaccaacgtgtag

SEQ ID NO: 313923 - DNA, 261 bp, Artificial Sequence
  derived and/or modified sequence
atgttcctgagcgtgctggtggactggatgatccccgacatccccacggacattagtgaccagatcaagaaagagaagtccttgctggtagatttttttcttaaggaagagcacgaaaagttgaaactgatggacgagcctgcgctccgaagccccggggggggggatcgatctcgtagccgagcggcgtccagcgcacccagcggtcaaagccagctgggcagcatgatgtcctctggatcccaacacactaatgtgtag

SEQ ID NO: 313924 - DNA, 261 bp, Artificial Sequence
  derived and/or modified sequence
atgtttctgtccgttctggtagactggatgatacctgatatacctaccgacatctcagatcagatcaagaaagaaaaaagtcttctcgttgactttttcttgaaagaagaacacgaaaagctgaaactgatggatgaaccagcattacgcagccccggagggggagatcgaagtaggtcgcgcgcagcctcaagcgccccttcaggccagagccagctcgggtcgatgatgtcttccggttcccagcacacaaacgtgtag

SEQ ID NO: 313925 - DNA, 1085 bp, Artificial Sequence
  derived and/or modified sequence
ggaagagtgtgtgacttggtgaagcagctcccaagcacccaagatgcccaggagcctctggaagcagcagttggtccccagtgtcttcccctgaacccctaggaacatgtagggttcaagggctcagtcccagtctcagaggggaaaaggcatgtgagcgtgcaactggcagccagaacctcgtgatgttcctgagcgtcctcgtggactggatgattccagacatccccacggacatcagcgaccagatcaagaaagagaagagcttattagtggatttcttcctgaaagaggagcatgagaagctcaagctgatggatgagccggctctgaggagcccaggaggtggggatcgaagcaggagccgggcagccagctcagcaccttcaggccaaagccagctgggcagcatgatgtcgtcaggctctcagcacaccaatgtgtgagcagttcagcctgcagcagaggagggcacggcagcagagacacgcacatgcacgtaagcatgttcctacacccacatggcgtgctgtctgtctgcaggggcctggcttgatggggtcttgaagagggggcagtgtgtaaaaagaaagagcctgacagaatgagtgtaggaaggaagagaaatgatgctacatctcagaaacttcaagcttaagtttcttttaggtccccttttaagctgcatccttttgagggattggaaccccactggggtctctccaccccagagtctcaggcaccgcgagcattcccatgtaccctggggcaccctcttgtacttcaccatcatttctgactttgaccagctgtaagagaaatgcagtcaggagcacagcatcccctacttactatcactacaagaaaactgagtcacttgcagtggggctgccacagtctcagcagatgcaaattaagttacaaggctgaatggtgcagccgctggacctgatagtaaggtgcaaaggtccaaacctgggcttgtctccacttcacgtcacaaaaacgtttggagctaaatgcagataaccatcattttatgaaagttcagatttaaaataataaaataaatggacacattcttt

SEQ ID NO: 313926 - DNA, 261 bp, Artificial Sequence
  derived and/or modified sequence
atgttcctgagcgtgctggtggactggatgatccccgacatccccaccgacatcagcgaccagatcaagaaggagaagagcctgctggtggacttcttcctgaaggaggagcacgagaagctgaagctgatggacgagcccgccctgagaagccccggcggcggcgacagaagcagaagcagagccgccagcagcgcccccagcggccagagccagctgggcagcatgatgagcagcggcagccagcacaccaacgtgtag

SEQ ID NO: 313927 - protein, 104 aa, Artificial Sequence
  derived and/or modified sequence
MSEKSVEAAAELSAKDLKEKKEKVEEKASRKERKKEVVEAPVPLVVMVGKACSQPEATPSPGPHRRRRTGLRRKKKKLPRMERRKMKGKKKMRKKKKRMMKGPR

SEQ ID NO: 313928 - DNA, 315 bp, Artificial Sequence
  derived and/or modified sequence
atgtctgagaaatctgtagaggctgccgccgaactgtcagctaaggacctcaaggagaagaaagagaaggtggaagaaaaagcctcccgtaaggagcggaagaaagaggtcgttgaggcaccagtgccactcgtggtcatggtgggtaaagcctgcagccagccagaggctacccccagccccgggccacaccggaggcggcgcacagggctcaggagaaaaaagaagaagctgcccagaatggagcggcggaaaatgaagggcaaaaaaaagatgcgcaagaaaaagaaacggatgatgaagggcccccgttag

SEQ ID NO: 313929 - DNA, 315 bp, Artificial Sequence
  derived and/or modified sequence
atgtctgagaagtctgtggaggccgctgctgagctgagcgccaaggacctgaaggagaagaaggagaaggtggaggagaaggccagcaggaaggagaggaagaaggaggtggtggaggcccctgtgcccctggtggtgatggtgggcaaggcctgcagccagcctgaggccacccccagccctggcccccacagaagaagaagaacaggcctgcggaggaagaagaagaagctgcccaggatggagaggaggaagatgaagggcaagaagaagatgaggaagaagaagaagaggatgatgaagggccccaggtag

SEQ ID NO: 313930 - DNA, 315 bp, Artificial Sequence
  derived and/or modified sequence
atgagcgagaagagcgtggaggccgccgccgagctgagcgccaaggacttgaaagagaagaaagaaaaagtagaggagaaagcgagccgaaaggagcgtaaaaaagaggtggtcgaggccccggtgcccttggtggttatggtaggcaaagcctgttctcagcctgaggccactcctagccccggaccccataggcgaagacggacaggcctacgaaggaaaaagaagaagctgccacgcatggaaagaagaaagatgaaaggcaaaaagaaaatgcgtaagaagaaaaaacggatgatgaaaggtcctaggtag

SEQ ID NO: 313931 - DNA, 315 bp, Artificial Sequence
  derived and/or modified sequence
atgtccgagaagagcgttgaggccgcagcagagctatccgcaaaggatctcaaagagaagaaggagaaagtggaggaaaaagcgagtcgcaaagaacggaaaaaggaggtggtcgaagcgcctgtgccactggtggtgatggtgggaaaggcctgctcacagccagaagccacaccgtctcccggaccacacagacggcgtcgtaccggtttacggagaaagaagaaaaagctcccaagaatggaaagaagaaaaatgaagggcaagaaaaaaatgcgcaagaaaaagaagaggatgatgaagggaccgaggtag

SEQ ID NO: 313932 - DNA, 315 bp, Artificial Sequence
  derived and/or modified sequence
atgagcgagaagagcgtggaggccgccgccgagctgagcgccaaggacctgaaggagaagaaggagaaggtggaggagaaggccagcagaaaggagagaaagaaggaggtggtggaggcccccgtgcccctggtggtgatggtgggcaaggcctgcagccagcccgaggccacccccagccccggcccccacagaagaagaagaaccggcctgagaagaaagaagaagaagctgcccagaatggagagaagaaagatgaagggcaagaagaagatgagaaagaagaagaagagaatgatgaagggccccagatag

SEQ ID NO: 313933 - protein, 597 aa, Artificial Sequence
  derived and/or modified sequence
MLSRGWFHRDLSGLDAETLLKGRGVHGSFLARPSRKNQGDFSLSVRVGDQVTHIRIQNSGDFYDLYGGEKFATLTELVEYYTQQQGVLQDRDGTIIHLKYPLNCSDPTSERWYHGHMSGGQAETLLQAKGEPWTFLVRESLSQPGDFVLSVLSDQPKAGPGSPLRVTHIKVMCEGGRYTVGGLETFDSLTDLVEHFKKTGIEEASGAFVYLRQPYYATRVNAADIENRVLELNKKQESEDTAKAGFWEEFESLQKQEVKNLHQRLEGQRPENKGKNRYKNILPFDHSRVILQGRDSNIPGSDYINANYIKNQLLGPDENAKTYIASQGCLEATVNDFWQMAWQENSRVIVMTTREVEKGRNKCVPYWPEVGMQRAYGPYSVTNCGEHDTTEYKLRTLQVSPLDNGDLIREIWHYQYLSWPDHGVPSEPGGVLSFLDQINQRQESLPHAGPIIVHCSAGIGRTGTIIVIDMLMENISTKGLDCDIDIQKTIQMVRAQRSGMVQTEAQYKFIYVAIAQFIETTKKKLEVLQSQKGQESEYGNITYPPAMKNAHAKASRTSSKHKEDVYENLHTKNKREEKVKKQRSADKEKSKGSLKRK

SEQ ID NO: 313934 - DNA, 1794 bp, Artificial Sequence
  derived and/or modified sequence
atgttgagccggggctggtttcatagagacctgtcagggttagacgctgaaacattgctgaaaggaagaggcgtgcacggctcttttcttgcaagaccatcacgtaaaaatcagggagacttctctctgtcagtgcgagtcggcgatcaagttacacacatccggatccagaatagcggagacttctacgacctgtacggcggcgagaaattcgccaccctgactgaactggtcgagtattatacacaacagcagggagtactgcaggacagagacggtactatcatccatctgaaatatcccctgaattgttctgaccctaccagtgaacggtggtatcacgggcacatgtccggaggacaggctgaaacacttctccaagccaagggagagccctggacatttctcgtgagggaatccctctcccagcctggggactttgtcctgagcgtgttgtccgaccagcctaaagcgggacccggaagccccctgcgggtgacacacatcaaagtgatgtgcgagggcggacgctataccgtgggcggcttagaaacttttgattccctgaccgatctcgtggagcactttaaaaagacagggatcgaggaggcctccggggccttcgtctatctccgacagccctattatgcaacccgggtgaatgccgccgacattgaaaaccgtgtcctggaactgaacaagaagcaagagagcgaggatacagccaaggccggattttgggaggagtttgaatcactccagaagcaggaggttaagaatcttcaccaaaggcttgagggccagaggccagaaaacaagggcaaaaataggtataagaacatactgccatttgaccattcccgggtgatccttcagggccgagatagtaacataccaggatctgactatatcaatgcaaactatataaagaaccagctcttaggccccgacgaaaacgccaagacctatattgcttctcagggttgtctcgaggccacggtgaacgacttctggcagatggcttggcaggagaactcacgggtgattgtgatgaccactagggaagtggaaaaagggaggaacaagtgcgtaccatattggcccgaagttggcatgcagagagcttacggaccatacagtgttacgaattgtggcgagcacgacacgacggagtataaacttcggaccctgcaggtgtccccactcgataacggcgacttaattcgggaaatctggcactaccagtatttgtcatggcccgaccacggggtcccttcagagccaggcggcgtgttgtcatttttagatcagatcaatcagcgacaagaaagcctgccacatgccggacccatcatcgtgcactgttctgctggtattggtcgaacaggaacaattatagtaattgatatgctcatggagaacatttctaccaaaggactggactgtgatatcgacattcagaagacaatccagatggtgcgagcccagcggtcaggcatggtccaaaccgaagcccagtacaagtttatctatgtagccatcgcacagttcatcgagactacaaagaagaaattagaagtgctgcagagccaaaaggggcaggagtctgaatatgggaatattacctacccacccgcgatgaaaaacgcacacgccaaggcttcaagaactagcagtaagcacaaggaggacgtttatgaaaatctgcatacaaaaaacaagagggaggaaaaagtgaaaaaacagagaagcgcagacaaggaaaagtctaaagggagcttaaagcgtaaatag

SEQ ID NO: 313935 - DNA, 1671 bp, Artificial Sequence
  derived and/or modified sequence
atgctctcacgcggggtgggcgatcaagtcacccacattaggatccagaattctggagacttctacgacctttacggcggtgagaaattcgctacgctgacagagctggttgaatactatactcagcaacaaggagttctgcaggaccgggacggcactataatccacctgaagtacccgctgaattgtagcgaccccacctcagaacgctggtatcacgggcacatgagtggaggccaggcggaaacgttgctgcaggcgaaaggcgaaccatggacatttctcgtacgggaaagcttgtctcaacctggagattttgtcttgtcggttctcagtgatcaacccaaggccggtccagggtctcctttgcgcgtgacgcatattaaagtaatgtgtgaaggggggaggtatactgtgggcgggctggagaccttcgacagcctcacagatctggtggagcatttcaagaagacagggatcgaagaagctagtggggcgtttgtttatttgaggcagccgtattacgctacaagggtgaatgctgccgatattgagaaccgagtcttggaactcaacaaaaaacaggagtctgaagacacagccaaggccggcttctgggaagaatttgagtcccttcagaagcaagaggttaagaacctgcatcagaggcttgagggccagaggcctgaaaataagggaaagaatcggtacaaaaatattctgccctttgatcactcgcgggtgatcctccagggacgcgactccaatattccaggaagtgattatatcaacgcaaattacataaaaaaccagcttcttgggcccgacgagaatgccaaaacttacattgccagccagggctgccttgaagccactgtcaacgatttttggcagatggcctggcaggagaatagccgggtgatcgttatgactactcgggaggtggaaaaaggcaggaataagtgtgtgccttattggcccgaggtaggaatgcagcgcgcctatggaccctactccgtcacaaattgcggggaacatgacactactgaatataagttgagaacccttcaggtgagcccattagataatggtgacctgattcgagaaatatggcactaccagtatctgagctggccggatcacggtgtcccttctgagccaggtggcgtcctaagctttctggaccagattaatcagagacaagagtcactgccacacgccggacccatcatcgtgcactgctcagccggtattggccggacagggaccattatagttattgatatgttgatggaaaacattagtaccaaggggctcgattgcgacatcgacatccagaaaaccatacagatggtcagggcccaacggagtggaatggtccagaccgaagcgcagtacaaatttatatacgtggctattgctcaattcatagagaccactaaaaagaaactggaagtgctgcaaagccaaaaagggcaagagtcagagtacggaaacattacctacccgccagccatgaagaatgctcatgcgaaggccagtcgcacatcttcaaaacataaggaggatgtctatgaaaatctgcataccaaaaataagcgggaagagaaggtgaaaaagcaacggtctgcagataaagaaaagtccaagggatcactgaagcgaaagtag

SEQ ID NO: 313936 - DNA, 1794 bp, Artificial Sequence
  derived and/or modified sequence
atgctgagccggggctggttccaccgggacctgagcggcctggatgctgagaccctgctgaagggccggggcgtgcacggcagcttcctggcccggcccagcaggaagaaccagggcgacttcagcctgtctgtgcgggtgggggaccaggtgacccacatccgcatccagaacagcggggacttctatgacctgtatggaggagagaagtttgccaccctgacagagctggtggagtactacacccagcagcagggcgtgctgcaggacagagatggcaccatcatccacctgaagtaccccctgaactgcagcgaccccaccagcgagcgctggtaccacggccacatgtctgggggccaggccgagaccctgctgcaggccaagggggagccctggaccttcctggtgcgggagagcctgagccagcccggggactttgtgctgtctgtgctgagtgaccagcccaaggccggccctggcagccccctgcgggtgacccacatcaaggtgatgtgtgagggcggccgctacacagtgggcggcctggagacctttgacagcctgacagacctggtggagcacttcaagaagacaggaattgaggaggccagcggggcctttgtgtacctgcggcagccctactatgccaccagggtgaatgctgctgacatcgagaacagagtgctggagctgaacaagaagcaggagagcgaggacacagccaaggccggcttctgggaggagtttgagagcctgcagaagcaggaggtgaagaacctgcaccagaggctggagggccagaggccagaaaataaaggcaagaaccgctacaagaacatcctgccctttgaccacagcagggtcatcctgcagggccgggacagcaacatccctggcagtgactacatcaatgccaactacatcaagaaccagctgctgggcccagatgaaaatgccaagacctacatcgccagccagggctgcctggaggccaccgtgaatgacttctggcagatggcctggcaggagaacagccgggtgattgtgatgaccacccgggaggtggagaagggcaggaacaagtgtgtgccctactggccagaggtgggcatgcagagggcctacggcccctacagcgtgaccaactgtggggagcatgacaccacagagtacaagctgcggaccctgcaggtgagccccctggacaacggggacctgatccgggagatctggcactaccagtacctgtcctggccagaccacggcgtgcccagcgagcccggcggcgtgctgtccttcctggaccagatcaaccagaggcaggagagcctgccccacgccggccccatcatcgtgcactgcagcgctggcattggaagaacaggcaccatcatcgtcatcgacatgctgatggagaacatcagcaccaagggcctggactgtgacatcgacatccagaagaccatccagatggtgcgggcccagaggagcggcatggtgcagacagaggcccagtacaagttcatctacgtggccatcgcccagttcatcgagaccaccaagaagaagctggaggtgctgcagagccagaagggccaggagagtgaatatggcaacatcacctaccccccagccatgaagaatgcccacgccaaggccagcaggaccagcagcaagcacaaggaggatgtgtatgagaacctgcacaccaagaacaagcgggaggagaaggtgaagaagcagaggtctgctgacaaggagaagagcaagggcagcctgaagaggaagtag

SEQ ID NO: 313937 - DNA, 1671 bp, Artificial Sequence
  derived and/or modified sequence
atgctgagcagaggagtgggggaccaggtgacccacatccgcatccagaacagcggggacttctatgacctgtatggaggagagaagtttgccaccctgacagagctggtggagtactacacccagcagcagggcgtgctgcaggacagagatggcaccatcatccacctgaagtaccccctgaactgcagcgaccccaccagcgagcgctggtaccacggccacatgtctgggggccaggccgagaccctgctgcaggccaagggggagccctggaccttcctggtgcgggagagcctgagccagcccggggactttgtgctgtctgtgctgagtgaccagcccaaggccggccctggcagccccctgcgggtgacccacatcaaggtgatgtgtgagggcggccgctacacagtgggcggcctggagacctttgacagcctgacagacctggtggagcacttcaagaagacaggcatcgaggaggccagcggggcctttgtgtacctgcggcagccctactatgccaccagggtgaatgctgctgacattgaaaatagagtgctggagctgaacaagaagcaggagagcgaggacacagccaaggccggcttctgggaggagtttgagagcctgcagaagcaggaggtgaagaacctgcaccagaggctggagggccagaggcctgagaacaagggcaagaaccgctacaagaacatcctgccctttgaccacagcagggtcatcctgcagggccgggacagcaacatccctggcagtgactacatcaatgccaactacatcaagaaccagctgctgggcccagatgaaaatgccaagacctacatcgccagccagggctgcctggaggccaccgtgaatgacttctggcagatggcctggcaggagaacagcagggtcatcgtgatgaccacccgggaggtggagaagggcagaaataaatgtgtgccctactggccagaggtgggcatgcagagggcctacggcccctacagcgtgaccaactgtggggagcatgacaccacagagtacaagctgcggaccctgcaggtgagccccctggacaatggagacctgatccgggagatctggcactaccagtacctgtcctggccagaccatggagtgcccagcgagcctggaggagtgctgtccttcctggaccagatcaaccagaggcaggagagcctgccccatgctggccccatcatcgtgcactgcagcgctggcatcggccgcacaggcaccatcatcgtgattgacatgctgatggagaacatcagcaccaagggcctggactgtgacatcgacatccagaagaccatccagatggtgcgggcccagaggagcggcatggtgcagacagaggcccagtacaagttcatctacgtggccatcgcccagttcatcgagaccaccaagaagaagctggaggtgctgcagagccagaagggccaggagagtgaatatggcaacatcacctaccccccagccatgaagaatgcccacgccaaggccagcaggaccagcagcaagcacaaggaggatgtgtatgagaacctgcacaccaagaacaagcgggaggagaaggtgaagaagcagaggtctgctgacaaggagaagagcaagggcagcctgaagaggaagtag

SEQ ID NO: 313938 - DNA, 1794 bp, Artificial Sequence
  derived and/or modified sequence
atgctgagccggggctggttccaccgggacctgagcggcctggacgccgagaccctcctgaaaggccgtggagtccatggcagcttcttggcacggcccagccgcaagaatcagggagacttctccctgtccgttagagtgggagatcaggtgacccatataaggatacaaaactctggcgatttttatgacctgtacggaggggagaagtttgccaccctaacggaattagtggaatattatactcagcaacagggagttcttcaggaccgggatggcaccattatccacttaaaatacccgctcaactgtagcgatcccactagcgaacgatggtaccatgggcatatgtctggcgggcaggccgagaccctgctccaggcaaaaggagagccatggaccttcctggtgagggagagcctgtcacaaccaggggatttcgtcctctcggtcctaagtgaccagccgaaagcaggtcctggttccccacttagggttactcatattaaagttatgtgcgaggggggtcggtacactgtggggggtctggagacattcgatagcctcaccgatcttgtagaacatttcaagaaaactggtatcgaagaagcttcaggagcctttgtttatctgcgacaaccttattacgctacacgggtgaatgccgctgatatcgagaaccgggttctggaactgaataagaagcaagagagcgaggatactgccaaggctggattttgggaagagttcgagagtctgcagaaacaagaggtgaagaacctccatcaaagacttgaggggcagagacccgagaacaaaggtaagaataggtacaaaaatattctacctttcgaccattctcgtgttatccttcagggacgagacagcaacatccctggaagtgactatattaacgccaactacattaagaaccaactactggggcctgatgaaaacgccaagacttacattgcaagccagggatgtctggaggcaacggttaatgatttctggcagatggcatggcaagaaaattcccgggtaattgttatgaccactagggaagtggagaaggggcggaataaatgcgtgccttactggcctgaggttggtatgcagcgcgcctacgggccctacagtgtgaccaattgcggagaacatgacaccacggaatacaagctgagaaccctgcaggtgtcaccattggacaacggtgatctcattcgggaaatttggcattatcagtacctctcctggcccgatcacggcgttccctctgaaccgggaggcgtgctttcgttcctagatcaaatcaatcaacgccaggaaagcctaccacacgcaggccccatcatcgtacactgctcggctggaattggacgaaccggaactatcattgtaattgatatgttgatggagaacatctcaactaagggattggactgtgacattgatattcagaagacaatccagatggttagggcccagagatcaggaatggtgcaaacggaagctcaatataagttcatttatgtagcaattgcccagtttatcgagactactaagaaaaagctcgaagtattacagagtcagaaggggcaagaaagcgagtacgggaatatcacctaccctcccgcaatgaagaacgcccacgccaaggcatccaggacttcaagcaagcataaggaagatgtatatgagaacctccatactaagaataagcgggaggagaaggtcaagaagcagaggtctgctgacaaggaaaagtccaagggatccctgaagagaaaatag

SEQ ID NO: 313939 - DNA, 1671 bp, Artificial Sequence
  derived and/or modified sequence
atgctgagccggggcgtgggcgaccaggtgacccacatccggatccagaattccggagatttctacgacctgtacggtggtgagaagttcgcaactctgactgagctggtcgaatattatacccagcagcagggtgtactccaggaccgggacggcacaattattcatttgaagtaccccctgaattgtagcgatcccacatcagagcgctggtaccacggtcatatgtctggcgggcaagccgagacgctactgcaggctaagggcgaaccttggacctttctggtgcgggagagcctgagtcagcccggagactttgtcctgtctgtgctctctgaccagcctaaggccggtcctggtagccccctgcgagtcacacatataaaggtgatgtgcgaggggggcagatacacagttggaggcctcgagaccttcgactctctgacagacctcgttgaacatttcaagaagactggcatcgaggaggcaagcggcgcctttgtatatctcagacaaccctactatgccacccgggtgaacgctgccgacatcgagaaccgcgtcctcgagctgaacaagaaacaggaatctgaagacacagccaaggcaggattttgggaagaatttgagagcctgcagaagcaggaggttaaaaatctgcatcagcgcctggaaggtcagcgtcccgaaaacaagggaaagaatagatacaagaatatcctacccttcgatcattcacgtgttattctgcagggacgggactctaacatccctggttctgactacataaacgcaaactacattaaaaaccagctgctgggcccagacgagaacgcaaaaacttatatagcatcccaagggtgtctcgaggccactgttaatgacttctggcaaatggcctggcaggagaatagtcgggtgattgttatgactaccagagaggttgagaagggccggaataaatgtgtaccgtattggccagaagtggggatgcaacgggcatatggtccatactctgtgaccaattgcggcgagcacgacacgacagaatacaagttgagaactctccaggtgtccccgctcgataacggagacctgattagggagatctggcactatcagtatctcagctggcctgaccatggcgtcccaagcgagcccggcggggtgctgtctttcctggatcagattaaccagcgtcaggaaagtctgccccatgctgggccaataatcgtacactgcagcgcagggatcggaagaaccgggacgattattgtgatcgatatgctcatggagaacatctccaccaaaggactggactgcgatatagacattcagaagacaatccagatggtcagggcacagcgctctggaatggttcagaccgaagcacaatataaattcatctatgtcgcaatcgctcagttcattgaaaccaccaaaaaaaaactagaggtattgcagtctcagaaaggccaggaaagtgaatatggaaacatcacatacccacccgccatgaagaacgctcacgctaaggcgagtcggacatccagcaaacacaaagaagacgtgtacgagaatcttcatactaaaaacaaacgtgaggaaaaagtcaagaaacagcgctctgccgataaggaaaagtccaagggtagtcttaagaggaagtag

SEQ ID NO: 313940 - DNA, 1794 bp, Artificial Sequence
  derived and/or modified sequence
atgctctcccgaggatggtttcacagggatctgagtggcctggacgccgagacgctcttgaagggccgaggggtgcacggatcattcctcgcacgaccatccagaaagaaccagggcgacttcagtttgtctgtgcgggtgggtgatcaggttacccacatccggattcagaattcaggcgatttttatgacctctacggcggagagaaattcgccaccttgaccgaactggtcgaatactatacccaacaacaaggagtcctgcaggaccgcgacgggaccatcattcatctaaagtatcccctgaattgctcagacccaacttctgagcgctggtatcacggtcacatgtcgggcggtcaggccgagacgttgctgcaggctaagggcgaaccatggacttttctcgtgcgggaaagcctgagtcagccaggcgacttcgtgctcagcgtgctttcagatcaacctaaagccggtccaggctctcccctgagggtgacccacatcaaggtcatgtgtgaaggcggtagatacacggtgggcggtttggagacgttcgacagcctcacggaccttgtggagcattttaagaaaaccggtatcgaggaggcctccggcgcttttgtgtatctgaggcagccctactacgccacacgggtgaatgccgcagatatcgagaatcgggtgttggaattgaacaaaaaacaggaatcagaagatacggccaaggccggtttttgggaagagttcgagagcctgcagaaacaagaggttaagaaccttcaccaacgccttgagggacagagacctgagaataaaggtaaaaacagatataagaacatccttccttttgaccactcgcgagtgatcctgcaggggcgagattctaacatcccaggttctgactatatcaatgcaaactacatcaaaaaccagctgctgggcccagatgagaatgccaaaacatacattgcctcccagggctgccttgaagctacagttaacgacttctggcagatggcctggcaggaaaactctagggtcatagtcatgaccactagggaagttgagaaggggcgaaataagtgcgtaccttactggccggaggtgggtatgcagagagcctacgggccttacagtgtgacgaattgtggcgaacacgacacgacagagtacaaactccggactctgcaagtgtccccacttgacaatggcgacctgatccgcgagatatggcattaccagtacttgtcctggccggatcacggcgtgccttcagaaccaggtggcgttctgtcattcttggaccagattaatcaacggcaagagagccttccacatgccggtccaattatcgtgcactgtagtgctgggattgggaggacaggcaccatcatcgtgatcgatatgttgatggagaacataagtacaaagggtctcgattgcgacatcgacatccaaaagaccattcagatggtaagggctcagcgatcaggcatggtgcagactgaggcgcaatacaaattcatctacgtggccatcgcccaattcattgaaactactaaaaagaagctagaagtcttgcagagccagaaaggacaggagtccgaatacggtaatataacgtatccaccagccatgaagaacgcgcatgctaaggcttcaagaacatcaagcaagcataaggaagacgtatacgaaaacctccacaccaagaacaagcgggaagaaaaagtcaagaaacagcgctcggccgataaggagaagtcaaaaggatccctgaaacgaaagtag

SEQ ID NO: 313941 - DNA, 1671 bp, Artificial Sequence
  derived and/or modified sequence
atgctctcccgcggtgtgggggatcaagtcacacatattagaatacagaatagtggcgatttttatgatctgtacgggggagagaagtttgccacgctcacagagctggtggaatactacacccaacagcaaggcgtcctgcaggatagggatgggaccataattcaccttaaatatcccctgaattgctctgaccccacatctgagaggtggtaccatgggcacatgtcaggtggtcaggccgagactttgctacaggcgaagggcgagccatggacctttctggtgagggagtctttatcacagccgggagactttgttctgtcagtgctcagcgatcagccaaaagccggacctggaagtccactgcgggtcacacatataaaggttatgtgcgagggcggtcgctacactgttggtggccttgagacatttgatagcctaacagatctcgtcgagcactttaagaaaactggcatcgaagaagccagcggagcgtttgtgtacttacggcaaccatattatgccactcgcgtgaacgccgctgatatcgaaaatcgcgtcctggagttaaataagaagcaggagtccgaggatactgccaaggcgggattctgggaagagttcgagtcccttcagaaacaagaggtcaaaaatctccaccagcgcctcgaaggtcagcgccctgagaacaagggcaagaataggtacaagaatatcttgcctttcgaccactctagggtgatcctgcagggtagagactctaatataccaggcagcgactatataaacgcaaactacattaaaaatcagctcctcggaccagatgaaaacgctaagacctacatagcctcccagggatgcctcgaggccactgtcaatgacttctggcagatggcttggcaggagaattcacgggtgatcgtaatgactaccagagaagtggagaagggaagaaacaagtgcgtgccctattggccagaagttggcatgcaaagggcctatggcccatatagcgttacaaattgtggtgagcacgacaccaccgagtacaagctgcgcactctgcaagtgagtccactcgacaacggcgatcttattcgtgagatctggcattatcagtacctctcttggcctgatcacggtgttcctagtgaacctggaggggtgctatcgtttctcgaccagattaatcagcgccaggagagtctaccccacgccggaccaataatagtccactgcagcgccggaatcggaaggacaggtaccataatagtcatcgacatgctgatggagaatattagtactaagggtctcgactgtgacatcgacatccaaaagacaatccagatggtgcgcgctcagaggtcaggaatggtccaaacagaggcccaatacaaattcatttatgtcgcaattgcccagttcatcgaaacaaccaaaaagaaactcgaagttctacaatctcaaaagggacaagagagtgaatacggcaacattacctaccccccagcgatgaagaacgcgcacgctaaggcctctagaacatctagcaagcacaaagaggacgtgtacgagaatctgcacacgaaaaacaaacgggaagaaaaggtgaaaaaacaacgttccgccgataaggagaagagcaaagggtctctgaagcggaaatag

SEQ ID NO: 313942 - DNA, 2159 bp, Artificial Sequence
  derived and/or modified sequence
attggcctggcaggcaggatcgaggaggaagtggctgattactgagcggttcttcctcacctggcttgggccactgtgcacagctgtgccgctggctcagccccgccccctgcggccctctgccgtggcttccccctccctacagagagatgctgtcccgtgggtggtttcaccgagacctcagtgggctggatgcagagaccctgctcaagggccgaggtgtccacggtagcttcctggctcggcccagtcgcaagaaccagggtgacttctcgctctccgtcagggtgggggatcaggtgacccatattcggatccagaactcaggggatttctatgacctgtatggaggggagaagtttgcgactctgacagagctggtggagtactacactcagcagcagggtgtcctgcaggaccgcgacggcaccatcatccacctcaagtacccgctgaactgctccgatcccactagtgagaggtggtaccatggccacatgtctggcgggcaggcagagacgctgctgcaggccaagggcgagccctggacgtttcttgtgcgtgagagcctcagccagcctggagacttcgtgctttctgtgctcagtgaccagcccaaggctggcccaggctccccgctcagggtcacccacatcaaggtcatgtgcgagggtggacgctacacagtgggtggtttggagaccttcgacagcctcacggacctggtggagcatttcaagaagacggggattgaggaggcctcaggcgcctttgtctacctgcggcagccgtactatgccacgagggtgaatgcggctgacattgagaaccgagtgttggaactgaacaagaagcaggagtccgaggatacagccaaggctggcttctgggaggagtttgagagtttgcagaagcaggaggtgaagaacttgcaccagcgtctggaagggcagcggccagagaacaagggcaagaaccgctacaagaacattctcccctttgaccacagccgagtgatcctgcagggacgggacagtaacatccccgggtccgactacatcaatgccaactacatcaagaaccagctgctaggccctgatgagaacgctaagacctacatcgccagccagggttgtctggaggccacggtcaatgacttctggcagatggcgtggcaggagaacagccgtgtcatcgtcatgaccacccgagaggtggagaaaggccggaacaaatgcgtcccatactggcccgaggtgggcatgcagcgtgcttatgggccctactctgtgaccaactgcggggagcatgacacaaccgaatacaaactccgtaccttacaggtctccccgctggacaatggagacctgattcgggagatctggcattaccagtacctgagctggcccgaccatggggtccccagtgagcctgggggtgtcctcagcttcctggaccagatcaaccagcggcaggaaagtctgcctcacgcagggcccatcatcgtgcactgcagcgccggcatcggccgcacaggcaccatcattgtcatcgacatgctcatggagaacatctccaccaagggcctggactgtgacattgacatccagaagaccatccagatggtgcgggcgcagcgctcgggcatggtgcagacggaggcgcagtacaagttcatctacgtggccatcgcccagttcattgaaaccactaagaagaagctggaggtcctgcagtcgcagaagggccaggagtcggagtacgggaacatcacctatcccccagccatgaagaatgcccatgccaaggcctcccgcacctcgtccaaacacaaggaggatgtgtatgagaacctgcacactaagaacaagagggaggagaaagtgaagaagcagcggtcagcagacaaggagaagagcaagggttccctcaagaggaagtgagcggtgctgtcctcaggtggccatgcctcagccctgaccctgtggaagcatttcgcgatggacagactcacaacctgaacctaggagtgccccattcttttgtaatttaaatggctgcatcccccccacctctccctgaccctgtatatagcccagccaggccccaggcagggccaacccttctcctcttgtaaataaagccctgggatcactgtg

SEQ ID NO: 313943 - DNA, 1971 bp, Artificial Sequence
  derived and/or modified sequence
gctgattactgagcggttcttcctcacctggcttgggccactgtgcacagctgtgccgctggctcagccccgccccctgcggccctctgccgtggcttccccctccctacagagagatgctgtcccgtggggtgggggatcaggtgacccatattcggatccagaactcaggggatttctatgacctgtatggaggggagaagtttgcgactctgacagagctggtggagtactacactcagcagcagggtgtcctgcaggaccgcgacggcaccatcatccacctcaagtacccgctgaactgctccgatcccactagtgagaggtggtaccatggccacatgtctggcgggcaggcagagacgctgctgcaggccaagggcgagccctggacgtttcttgtgcgtgagagcctcagccagcctggagacttcgtgctttctgtgctcagtgaccagcccaaggctggcccaggctccccgctcagggtcacccacatcaaggtcatgtgcgagggtggacgctacacagtgggtggtttggagaccttcgacagcctcacggacctggtggagcatttcaagaagacggggattgaggaggcctcaggcgcctttgtctacctgcggcagccgtactatgccacgagggtgaatgcggctgacattgagaaccgagtgttggaactgaacaagaagcaggagtccgaggatacagccaaggctggcttctgggaggagtttgagagtttgcagaagcaggaggtgaagaacttgcaccagcgtctggaagggcagcggccagagaacaagggcaagaaccgctacaagaacattctcccctttgaccacagccgagtgatcctgcagggacgggacagtaacatccccgggtccgactacatcaatgccaactacatcaagaaccagctgctaggccctgatgagaacgctaagacctacatcgccagccagggttgtctggaggccacggtcaatgacttctggcagatggcgtggcaggagaacagccgtgtcatcgtcatgaccacccgagaggtggagaaaggccggaacaaatgcgtcccatactggcccgaggtgggcatgcagcgtgcttatgggccctactctgtgaccaactgcggggagcatgacacaaccgaatacaaactccgtaccttacaggtctccccgctggacaatggagacctgattcgggagatctggcattaccagtacctgagctggcccgaccatggggtccccagtgagcctgggggtgtcctcagcttcctggaccagatcaaccagcggcaggaaagtctgcctcacgcagggcccatcatcgtgcactgcagcgccggcatcggccgcacaggcaccatcattgtcatcgacatgctcatggagaacatctccaccaagggcctggactgtgacattgacatccagaagaccatccagatggtgcgggcgcagcgctcgggcatggtgcagacggaggcgcagtacaagttcatctacgtggccatcgcccagttcattgaaaccactaagaagaagctggaggtcctgcagtcgcagaagggccaggagtcggagtacgggaacatcacctatcccccagccatgaagaatgcccatgccaaggcctcccgcacctcgtccaaacacaaggaggatgtgtatgagaacctgcacactaagaacaagagggaggagaaagtgaagaagcagcggtcagcagacaaggagaagagcaagggttccctcaagaggaagtgagcggtgctgtcctcaggtggccatgcctcagccctgaccctgtggaagcatttcgcgatggacagactcacaacctgaacctaggagtgccccattcttttgtaatttaaatggctgcatcccccccacctctccctgaccctgtatatagcccagccaggccccaggcagggccaacccttct

SEQ ID NO: 313944 - DNA, 1794 bp, Artificial Sequence
  derived and/or modified sequence
atgctgagcagaggctggttccacagagacctgagcggcctggacgccgagaccctgctgaagggcagaggcgtgcacggcagcttcctggccagacccagcagaaagaaccagggcgacttcagcctgagcgtgagagtgggcgaccaggtgacccacatcagaatccagaacagcggcgacttctacgacctgtacggcggcgagaagttcgccaccctgaccgagctggtggagtactacacccagcagcagggcgtgctgcaggacagagacggcaccatcatccacctgaagtaccccctgaactgcagcgaccccaccagcgagagatggtaccacggccacatgagcggcggccaggccgagaccctgctgcaggccaagggcgagccctggaccttcctggtgagagagagcctgagccagcccggcgacttcgtgctgagcgtgctgagcgaccagcccaaggccggccccggcagccccctgagagtgacccacatcaaggtgatgtgcgagggcggcagatacaccgtgggcggcctggagaccttcgacagcctgaccgacctggtggagcacttcaagaagaccggcatcgaggaggccagcggcgccttcgtgtacctgagacagccctactacgccaccagagtgaacgccgccgacatcgagaacagagtgctggagctgaacaagaagcaggagagcgaggacaccgccaaggccggcttctgggaggagttcgagagcctgcagaagcaggaggtgaagaacctgcaccagagactggagggccagagacccgagaacaagggcaagaacagatacaagaacatcctgcccttcgaccacagcagagtgatcctgcagggcagagacagcaacatccccggcagcgactacatcaacgccaactacatcaagaaccagctgctgggccccgacgagaacgccaagacctacatcgccagccagggctgcctggaggccaccgtgaacgacttctggcagatggcctggcaggagaacagcagagtgatcgtgatgaccaccagagaggtggagaagggcagaaacaagtgcgtgccctactggcccgaggtgggcatgcagagagcctacggcccctacagcgtgaccaactgcggcgagcacgacaccaccgagtacaagctgagaaccctgcaggtgagccccctggacaacggcgacctgatcagagagatctggcactaccagtacctgagctggcccgaccacggcgtgcccagcgagcccggcggcgtgctgagcttcctggaccagatcaaccagagacaggagagcctgccccacgccggccccatcatcgtgcactgcagcgccggcatcggcagaaccggcaccatcatcgtgatcgacatgctgatggagaacatcagcaccaagggcctggactgcgacatcgacatccagaagaccatccagatggtgagagcccagagaagcggcatggtgcagaccgaggcccagtacaagttcatctacgtggccatcgcccagttcatcgagaccaccaagaagaagctggaggtgctgcagagccagaagggccaggagagcgagtacggcaacatcacctacccccccgccatgaagaacgcccacgccaaggccagcagaaccagcagcaagcacaaggaggacgtgtacgagaacctgcacaccaagaacaagagagaggagaaggtgaagaagcagagaagcgccgacaaggagaagagcaagggcagcctgaagagaaagtag

SEQ ID NO: 313945 - DNA, 1671 bp, Artificial Sequence
  derived and/or modified sequence
atgctgagcagaggcgtgggcgaccaggtgacccacatcagaatccagaacagcggcgacttctacgacctgtacggcggcgagaagttcgccaccctgaccgagctggtggagtactacacccagcagcagggcgtgctgcaggacagagacggcaccatcatccacctgaagtaccccctgaactgcagcgaccccaccagcgagagatggtaccacggccacatgagcggcggccaggccgagaccctgctgcaggccaagggcgagccctggaccttcctggtgagagagagcctgagccagcccggcgacttcgtgctgagcgtgctgagcgaccagcccaaggccggccccggcagccccctgagagtgacccacatcaaggtgatgtgcgagggcggcagatacaccgtgggcggcctggagaccttcgacagcctgaccgacctggtggagcacttcaagaagaccggcatcgaggaggccagcggcgccttcgtgtacctgagacagccctactacgccaccagagtgaacgccgccgacatcgagaacagagtgctggagctgaacaagaagcaggagagcgaggacaccgccaaggccggcttctgggaggagttcgagagcctgcagaagcaggaggtgaagaacctgcaccagagactggagggccagagacccgagaacaagggcaagaacagatacaagaacatcctgcccttcgaccacagcagagtgatcctgcagggcagagacagcaacatccccggcagcgactacatcaacgccaactacatcaagaaccagctgctgggccccgacgagaacgccaagacctacatcgccagccagggctgcctggaggccaccgtgaacgacttctggcagatggcctggcaggagaacagcagagtgatcgtgatgaccaccagagaggtggagaagggcagaaacaagtgcgtgccctactggcccgaggtgggcatgcagagagcctacggcccctacagcgtgaccaactgcggcgagcacgacaccaccgagtacaagctgagaaccctgcaggtgagccccctggacaacggcgacctgatcagagagatctggcactaccagtacctgagctggcccgaccacggcgtgcccagcgagcccggcggcgtgctgagcttcctggaccagatcaaccagagacaggagagcctgccccacgccggccccatcatcgtgcactgcagcgccggcatcggcagaaccggcaccatcatcgtgatcgacatgctgatggagaacatcagcaccaagggcctggactgcgacatcgacatccagaagaccatccagatggtgagagcccagagaagcggcatggtgcagaccgaggcccagtacaagttcatctacgtggccatcgcccagttcatcgagaccaccaagaagaagctggaggtgctgcagagccagaagggccaggagagcgagtacggcaacatcacctacccccccgccatgaagaacgcccacgccaaggccagcagaaccagcagcaagcacaaggaggacgtgtacgagaacctgcacaccaagaacaagagagaggagaaggtgaagaagcagagaagcgccgacaaggagaagagcaagggcagcctgaagagaaagtag

SEQ ID NO: 313946 - protein, 2880 aa, Artificial Sequence
  derived and/or modified sequence
MSGGAAEKQSSTPGSLFLSPPAPAPKNGSSSDSSVGEKLGAAAADAVTGRTEEYRRRRHTMDKDSRGAAATTTTTEHRFFRRSVICDSNATALELPGLPLSLPQPSIPAAVPQSAPPEPHREETVTATATSQVAQQPPAAAAPGEQAVAGPAPSTVPSSTSKDRPVSQPSLVGSKEEPPPARSGSGGGSAKEPQEERSQQQDDIEELETKAVGMSNDGRFLKFDIEIGRGSFKTVYKGLDTETTVEVAWCELQDRKLTKSERQRFKEEAEMLKGLQHPNIVRFYDSWESTVKGKKCIVLVTELMTSGTLKTYLKRFKVMKIKVLRSWCRQILKGLQFLHTRTPPIIHRDLKCDNIFITGPTGSVKIGDLGLATLKRASFAKSVIGTPEFMAPEMYEEKYDESVDVYAFGMCMLEMATSEYPYSECQNAAQIYRRVTSGVKPASFDKVAIPEVKEIIEGCIRQNKDERYSIKDLLNHAFFQEETGVRVELAEEDDGEKIAIKLWLRIEDIKKLKGKYKDNEAIEFSFDLERDVPEDVAQEMVESGYVCEGDHKTMAKAIKDRVSLIKRKREQRQLVREEQEKKKQEESSLKQQVEQSSASQTGIKQLPSASTGIPTASTTSASVSTQVEPEEPEADQHQQLQYQQPSISVLSDGTVDSGQGSSVFTESRVSSQQTVSYGSQHEQAHSTGTVPGHIPSTVQAQSQPHGVYPPSSVPRRGRSMSVCVPIFLLLPLCPASLPVLFHPTASTVCTSFSFPPPDCPEETFAEKLSKALESVLPMHSASQRKHRRSSLPSLFVSTPQSMAHPCGGTPTYPESQIFFPTIHERPVSFSPPPTCPPKVAISQRRKSTSFLEAQTHHFQPLLRTVGQSLLPPGGSPTNWTPEAVVMLGTTASRVTGESCEIQVHPMFEPSQVYSDYRPGLVLPEEAHYFIPQEAVYVAGVHYQARVAEQYEGIPYNSSVLSSPMKQIPEQKPVQGGPTSSSVFEFPSGQAFLVGHLQNLRLDSGLGPGSPLSSISAPISTDATRLKFHPVFVPHSAPAVLTHNNESRSNCVFEFHVHTPSSSSGEGGGILPQRVYRNRQVAVDLNQEELPPQSVGLHGYLQPVTEEKHNYHAPELTVSVVEPIGQNWPIGSPEYSSDSSQITSSDPSDFQSPPPTGGAAAPFGSDVSMPFIHLPQTVLQESPLFFCFPQGTTSQQVLTASFSSGGSALHPQAQGQSQGQPSSSSLTGVSSSQPIQHPQQQQGIQQTAPPQQTVQYSLSQTSTSSEATTAQPVSQPQAPQVLPQVSAGKQLPVSQPVPTIQGEPQIPVATQPSVVPVHSGAHFLPVGQPLPTPLLPQYPVSQIPISTPHVSTAQTGFSSLPITMAAGITQPLLTLASSATTAAIPGVSTVVPSQLPTLLQPVTQLPSQVHPQLLQPAVQSMGIPANLGQAAEVPLSSGDVLYQGFPPRLPPQYPGDSNIAPSSNVASVCIHSTVLSPPMPTEVLATPGYFPTVVQPYVESNLLVPMGGVGGQVQVSQPGGSLAQAPTTSSQQAVLESTQGVSQVAPAEPVAVAQTQATQPTTLASSVDSAHSDVASGMSDGNENVPSSSGRHEGRTTKRHYRKSVRSRSRHEKTSRPKLRILNVSNKGDRVVECQLETHNRKMVTFKFDLDGDNPEEIATIMVNNDFILAIERESFVDQVREIIEKADEMLSEDVSVEPEGDQGLESLQGKDDYGFSGSQKLEGEFKQPIPASSMPQQIGIPTSSLTQVVHSAGRRFIVSPVPESRLRESKVFPSEITDTVAASTAQSPGMNLSHSASSLSLQQAFSELRRAQMTEGPNTAPPNFSHTGPTFPVVPPFLSSIAGVPTTAAATAPVPATSSPPNDISTSVIQSEVTVPTEEGIAGVATSTGVVTSGGLPIPPVSESPVLSSVVSSITIPAVVSISTTSPSLQVPTSTSEIVVSSTALYPSVTVSATSASAGGSTATPGPKPPAVVSQQAAGSTTVGATLTSVSTTTSFPSTASQLCIQLSSSTSTPTLAETVVVSAHSLDKTSHSSTTGLAFSLSAPSSSSSPGAGVSSYISQPGGLHPLVIPSVIASTPILPQAAGPTSTPLLPQVPSIPPLVQPVANVPAVQQTLIHSQPQPALLPNQPHTHCPEVDSDTQPKAPGIDDIKTLEEKLRSLFSEHSSSGAQHASVSLETSLVIESTVTPGIPTTAVAPSKLLTSTTSTCLPPTNLPLGTVALPVTPVVTPGQVSTPVSTTTSGVKPGTAPSKPPLTKAPVLPVGTELPAGTLPSEQLPPFPGPSLTQSQQPLEDLDAQLRRTLSPEMITVTSAVGPVSMAAPTAITEAGTQPQKGVSQVKEGPVLATSSGAGVFKMGRFQVSVAADGAQKEGKNKSEDAKSVHFESSTSESSVLSSSSPESTLVKPEPNGITIPGISSDVPESAHKTTASEAKSDTGQPTKVGRFQVTTTANKVGRFSVSKTEDKITDTKKEGPVASPPFMDLEQAVLPAVIPKKEKPELSEPSHLNGPSSDPEAAFLSRDVDDGSGSPHSPHQLSSKSLPSQNLSQSLSNSFNSSYMSSDNESDIEDEDLKLELRRLRDKHLKEIQDLQSRQKHEIESLYTKLGKVPPAVIIPPAAPLSGRRRRPTKSKGSKSSRSSSLGNKSPQLSGNLSGQSAASVLHPQQTLHPPGNIPESGQNQLLQPLKPSPSSDNLYSAFTSDGAISVPSLSAPGQGTSSTNTVGATVNSQAAQAQPPAMTSSRKGTFTDDLHKLVDNWARDAMNLSGRRGSKGHMNYEGPGMARKFSAPGQLCISMTSNLGGSAPISAASATSLGHFTKSMCPPQQYGFPATPFGAQWSGTGGPAPQPLGQFQPVGTASLQNFNISNLQKSISNPPGSNLRTT

SEQ ID NO: 313947 - protein, 1555 aa, Artificial Sequence
  derived and/or modified sequence
MAKAIKDRVSLIKRKREQRQLVREEQEKKKQEESSLKQQVEQSSASQTGIKQLPSASTGIPTASTTSASVSTQVEPEEPEADQHQQLQYQQPSISVLSDGTVDSGQGSSVFTESRVSSQQTVSYGSQHEQAHSTGTVPGHIPSTVQAQSQPHGVYPPSSVQQGIQQTAPPQQTVQYSLSQTSTSSEATTAQPVSQPQAPQVLPQVSAGKQSTQGVSQVAPAEPVAVAQTQATQPTTLASSVDSAHSDVASGMSDGNENVPSSSGRHEGRTTKRHYRKSVRSRSRHEKTSRPKLRILNVSNKGDRVVECQLETHNRKMVTFKFDLDGDNPEEIATIMVNNDFILAIERESFVDQVREIIEKADEMLSEDVSVEPEGDQGLESLQGKDDYGFSGSQKLEGEFKQPIPASSMPQQIGIPTSSLTQVVHSAGRRFIVSPVPESRLRESKVFPSEITDTVAASTAQSPGMNLSHSASSLSLQQAFSELRRAQMTEGPNTAPPNFSHTGPTFPVVPPFLSSIAGVPTTAAATAPVPATSSPPNDISTSVIQSEVTVPTEEGIAGVATSTGVVTSGGLPIPPVSESPVLSSVVSSITIPAVVSISTTSPSLQVPTSTSEIVVSSTALYPSVTVSATSASAGGSTATPGPKPPAVVSQQAAGSTTVGATLTSVSTTTSFPSTASQLCIQLSSSTSTPTLAETVVVSAHSLDKTSHSSTTGLAFSLSAPSSSSSPGAGVSSYISQPGGLHPLVIPSVIASTPILPQAAGPTSTPLLPQVPSIPPLVQPVANVPAVQQTLIHSQPQPALLPNQPHTHCPEVDSDTQPKAPGIDDIKTLEEKLRSLFSEHSSSGAQHASVSLETSLVIESTVTPGIPTTAVAPSKLLTSTTSTCLPPTNLPLGTVALPVTPVVTPGQVSTPVSTTTSGVKPGTAPSKPPLTKAPVLPVGTELPAGTLPSEQLPPFPGPSLTQSQQPLEDLDAQLRRTLSPEMITVTSAVGPVSMAAPTAITEAGTQPQKGVSQVKEGPVLATSSGAGVFKMGRFQVSVAADGAQKEGKNKSEDAKSVHFESSTSESSVLSSSSPESTLVKPEPNGITIPGISSDVPESAHKTTASEAKSDTGQPTKVGRFQVTTTANKVGRFSVSKTEDKITDTKKEGPVASPPFMDLEQAVLPAVIPKKEKPELSEPSHLNGPSSDPEAAFLSRDVDDGSGSPHSPHQLSSKSLPSQNLSQSLSNSFNSSYMSSDNESDIEDEDLKLELRRLRDKHLKEIQDLQSRQKHEIESLYTKLGKVPPAVIIPPAAPLSGRRRRPTKSKGSKSSRSSSLGNKSPQLSGNLSGQSAASVLHPQQTLHPPGNIPESGQNQLLQPLKPSPSSDNLYSAFTSDGAISVPSLSAPGQGTSSTNTVGATVNSQAAQAQPPAMTSSRKGTFTDDLHKLVDNWARDAMNLSGRRGSKGHMNYEGPGMARKFSAPGQLCISMTSNLGGSAPISAASATSLGHFTKSMCPPQQYGFPATPFGAQWSGTGGPAPQPLGQFQPVGTASLQNFNISNLQKSISNPPGSNLRTT

SEQ ID NO: 313948 - DNA, 4668 bp, Artificial Sequence
  derived and/or modified sequence
atggccaaggccatcaaggacagagtgagcctgatcaagagaaagagagagcagagacagctggtgagagaggagcaggagaagaagaagcaggaggagagcagcctgaagcagcaggtggagcagagcagcgccagccagaccggcatcaagcagctgcccagcgccagcaccggcatccccaccgccagcaccaccagcgccagcgtgagcacccaggtggagcccgaggagcccgaggccgaccagcaccagcagctgcagtaccagcagcccagcatcagcgtgctgagcgacggcaccgtggacagcggccagggcagcagcgtgttcaccgagagcagagtgagcagccagcagaccgtgagctacggcagccagcacgagcaggcccacagcaccggcaccgtgcccggccacatccccagcaccgtgcaggcccagagccagccccacggcgtgtacccccccagcagcgtgcagcagggcatccagcagaccgcccccccccagcagaccgtgcagtacagcctgagccagaccagcaccagcagcgaggccaccaccgcccagcccgtgagccagccccaggccccccaggtgctgccccaggtgagcgccggcaagcagagcacccagggcgtgagccaggtggcccccgccgagcccgtggccgtggcccagacccaggccacccagcccaccaccctggccagcagcgtggacagcgcccacagcgacgtggccagcggcatgagcgacggcaacgagaacgtgcccagcagcagcggcagacacgagggcagaaccaccaagagacactacagaaagagcgtgagaagcagaagcagacacgagaagaccagcagacccaagctgagaatcctgaacgtgagcaacaagggcgacagagtggtggagtgccagctggagacccacaacagaaagatggtgaccttcaagttcgacctggacggcgacaaccccgaggagatcgccaccatcatggtgaacaacgacttcatcctggccatcgagagagagagcttcgtggaccaggtgagagagatcatcgagaaggccgacgagatgctgagcgaggacgtgagcgtggagcccgagggcgaccagggcctggagagcctgcagggcaaggacgactacggcttcagcggcagccagaagctggagggcgagttcaagcagcccatccccgccagcagcatgccccagcagatcggcatccccaccagcagcctgacccaggtggtgcacagcgccggcagaagattcatcgtgagccccgtgcccgagagcagactgagagagagcaaggtgttccccagcgagatcaccgacaccgtggccgccagcaccgcccagagccccggcatgaacctgagccacagcgccagcagcctgagcctgcagcaggccttcagcgagctgagaagagcccagatgaccgagggccccaacaccgccccccccaacttcagccacaccggccccaccttccccgtggtgccccccttcctgagcagcatcgccggcgtgcccaccaccgccgccgccaccgcccccgtgcccgccaccagcagcccccccaacgacatcagcaccagcgtgatccagagcgaggtgaccgtgcccaccgaggagggcatcgccggcgtggccaccagcaccggcgtggtgaccagcggcggcctgcccatcccccccgtgagcgagagccccgtgctgagcagcgtggtgagcagcatcaccatccccgccgtggtgagcatcagcaccaccagccccagcctgcaggtgcccaccagcaccagcgagatcgtggtgagcagcaccgccctgtaccccagcgtgaccgtgagcgccaccagcgccagcgccggcggcagcaccgccacccccggccccaagccccccgccgtggtgagccagcaggccgccggcagcaccaccgtgggcgccaccctgaccagcgtgagcaccaccaccagcttccccagcaccgccagccagctgtgcatccagctgagcagcagcaccagcacccccaccctggccgagaccgtggtggtgagcgcccacagcctggacaagaccagccacagcagcaccaccggcctggccttcagcctgagcgcccccagcagcagcagcagccccggcgccggcgtgagcagctacatcagccagcccggcggcctgcaccccctggtgatccccagcgtgatcgccagcacccccatcctgccccaggccgccggccccaccagcacccccctgctgccccaggtgcccagcatcccccccctggtgcagcccgtggccaacgtgcccgccgtgcagcagaccctgatccacagccagccccagcccgccctgctgcccaaccagccccacacccactgccccgaggtggacagcgacacccagcccaaggcccccggcatcgacgacatcaagaccctggaggagaagctgagaagcctgttcagcgagcacagcagcagcggcgcccagcacgccagcgtgagcctggagaccagcctggtgatcgagagcaccgtgacccccggcatccccaccaccgccgtggcccccagcaagctgctgaccagcaccaccagcacctgcctgccccccaccaacctgcccctgggcaccgtggccctgcccgtgacccccgtggtgacccccggccaggtgagcacccccgtgagcaccaccaccagcggcgtgaagcccggcaccgcccccagcaagccccccctgaccaaggcccccgtgctgcccgtgggcaccgagctgcccgccggcaccctgcccagcgagcagctgccccccttccccggccccagcctgacccagagccagcagcccctggaggacctggacgcccagctgagaagaaccctgagccccgagatgatcaccgtgaccagcgccgtgggccccgtgagcatggccgcccccaccgccatcaccgaggccggcacccagccccagaagggcgtgagccaggtgaaggagggccccgtgctggccaccagcagcggcgccggcgtgttcaagatgggcagattccaggtgagcgtggccgccgacggcgcccagaaggagggcaagaacaagagcgaggacgccaagagcgtgcacttcgagagcagcaccagcgagagcagcgtgctgagcagcagcagccccgagagcaccctggtgaagcccgagcccaacggcatcaccatccccggcatcagcagcgacgtgcccgagagcgcccacaagaccaccgccagcgaggccaagagcgacaccggccagcccaccaaggtgggcagattccaggtgaccaccaccgccaacaaggtgggcagattcagcgtgagcaagaccgaggacaagatcaccgacaccaagaaggagggccccgtggccagcccccccttcatggacctggagcaggccgtgctgcccgccgtgatccccaagaaggagaagcccgagctgagcgagcccagccacctgaacggccccagcagcgaccccgaggccgccttcctgagcagagacgtggacgacggcagcggcagcccccacagcccccaccagctgagcagcaagagcctgcccagccagaacctgagccagagcctgagcaacagcttcaacagcagctacatgagcagcgacaacgagagcgacatcgaggacgaggacctgaagctggagctgagaagactgagagacaagcacctgaaggagatccaggacctgcagagcagacagaagcacgagatcgagagcctgtacaccaagctgggcaaggtgccccccgccgtgatcatcccccccgccgcccccctgagcggcagaagaagaagacccaccaagagcaagggcagcaagagcagcagaagcagcagcctgggcaacaagagcccccagctgagcggcaacctgagcggccagagcgccgccagcgtgctgcacccccagcagaccctgcacccccccggcaacatccccgagagcggccagaaccagctgctgcagcccctgaagcccagccccagcagcgacaacctgtacagcgccttcaccagcgacggcgccatcagcgtgcccagcctgagcgcccccggccagggcaccagcagcaccaacaccgtgggcgccaccgtgaacagccaggccgcccaggcccagccccccgccatgaccagcagcagaaagggcaccttcaccgacgacctgcacaagctggtggacaactgggccagagacgccatgaacctgagcggcagaagaggcagcaagggccacatgaactacgagggccccggcatggccagaaagttcagcgcccccggccagctgtgcatcagcatgaccagcaacctgggcggcagcgcccccatcagcgccgccagcgccaccagcctgggccacttcaccaagagcatgtgccccccccagcagtacggcttccccgccacccccttcggcgcccagtggagcggcaccggcggccccgccccccagcccctgggccagttccagcccgtgggcaccgccagcctgcagaacttcaacatcagcaacctgcagaagagcatcagcaacccccccggcagcaacctgagaaccacctag

SEQ ID NO: 313949 - DNA, 4668 bp, Artificial Sequence
  derived and/or modified sequence
atggcgaaggccattaaggacagggtctctttgataaagcggaaacgcgagcaacgacaactggtacgggaagagcaagagaaaaagaagcaggaggaatcctcattgaagcagcaggtcgagcagtcatctgcatctcaaacagggattaaacagcttcctagtgcatcgaccggaatcccgaccgcatccaccacgagtgcgtcagtgagtacccaggtggaaccagaggaaccagaagcagatcagcaccagcagctgcagtaccagcaaccctctatatctgtcctcagtgacggcactgtggacagcggacagggatcgtccgtattcaccgagtcacgggtctcatcacaacagacagttagttacgggagccagcacgaacaggctcactcaaccgggacggtacctggccatatccctagtacagtgcaggcgcagagccagcctcatggagtatacccaccttctagtgtccagcagggaattcagcaaaccgctccaccgcaacaaacggtccagtactccctaagccagacatccacctcgtcagaggccactaccgcccaacctgtaagccagccacaggcccctcaggtgctcccacaggtgtccgccggcaaacagagtactcagggcgtttctcaggttgctcccgccgaacccgttgccgtggctcaaacccaggcaacgcagccaaccaccctggcatcatcggtggattcagcacactctgacgttgccagcgggatgtcagatggaaacgaaaacgtaccatcaagtagcggacggcacgaaggacgcaccaccaaacggcattaccgcaaatctgttcgatcacggtcccgccacgagaagaccagcaggccaaagctgcgaattctgaatgtttccaataagggggacagagtagtggagtgtcagcttgaaacccacaacagaaagatggttaccttcaaattcgatctggatggagacaaccccgaggagatagccaccattatggtgaacaacgacttcatcctggccattgagagggaaagcttcgtggaccaggtcagggaaatcattgagaaggctgacgaaatgttgtccgaagacgtcagtgtagaacctgagggagaccaggggttggaatcgttgcaggggaaggatgattatggctttagcgggagccagaaactcgagggcgaatttaaacagccaattcccgcctcctctatgccgcaacagattggtatccctaccagtagcctcacacaggttgtccatagcgctgggcggcggtttatcgtgtcacctgtgccagagtcccggctcagagagtcgaaagtcttcccaagcgagatcacagatacagttgcagcatcaaccgcccaatcaccaggaatgaacctgagccacagcgcatcatctctgtccctacagcaagcctttagcgagctgcgacgggcacaaatgacggaggggcccaacactgctccgcccaatttcagccacacgggccccaccttccccgtggtgcctccctttttgtccagcattgcgggagtccccacaaccgctgccgcaaccgcccctgttccagcaactagtagtcctccaaacgacattagtacaagtgtaatccagtccgaagtgacagttcctaccgaggaggggatagccggggtggcaacctcaactggtgtggtaacatcaggcggcttgcccatcccacctgtttcggagagccctgttttgtcatctgtggtttccagcatcactataccagccgtcgtgtccatcagtacaacaagtcctagtcttcaggtgcccacatcaacctctgaaatcgtcgtttctagcaccgccctctaccctagcgtgaccgtgagtgcaaccagcgcctcagccggtgggtctacagccaccccgggcccaaagccaccagcggtggtcagccagcaagctgctgggtctaccacagttggcgcaacattgacctcagtctcaactacaactagctttccttccaccgccagccaactttgtatccagctctcatcatcaactagtacccccacattggcagagaccgtagtcgtgtccgcacatagcctggataagacaagccattcctctactactggactggccttttctctctcggctccttcttcgagttcctcacctggcgcaggcgtgtcttcatacatcagtcagcctggtggtctgcacccactagtcattccttccgtgatagcctctacccccatcctgccacaggctgccggtcccacatcaacccctctgctgccacaggtgccctccatccctcccttggtccagcccgtcgcaaatgtgccagctgtgcagcaaactctaattcactcgcaaccgcagccagcattgttgccgaatcaacctcatacacactgcccagaggtggattccgacacacagcccaaagcaccagggatcgacgatattaagaccctggaagaaaagctgaggtcactgttctcagaacattcttcctctggcgcccagcacgcttctgtgtctctggaaaccagtctcgtaatcgagagtaccgtgacaccgggcatccctaccacagctgttgccccctcaaagttattgacgtccaccactagtacatgtctcccaccaacaaatctgcctctcgggactgtggccctgccagtaactccggtggttacccctggccaggtgagcacgccagtatctactactacatccggtgtgaaaccaggaacagctccctccaaaccacccttgaccaaggccccagttctgccagtggggacagaattgcctgccggcacactaccctctgagcagctgcccccattccctggcccaagccttacacagtcacagcagcctctggaggatcttgacgctcagttgcgacggacattgtcaccagaaatgatcacggtgaccagtgctgtgggtcccgtgtccatggccgcaccgaccgctatcacggaagccggaacacagcctcagaagggggtaagccaggttaaggaaggtcctgtcctggctacatctagcggtgcaggtgtctttaaaatgggaaggtttcaggtctcagtcgccgcagatggagcccaaaaggaagggaaaaacaagtcagaagacgccaagagtgtccactttgaatcgagcactagtgaatcttccgtgctgtcctcctcttcccctgaatctaccctagtaaaacctgagcccaatgggataacgatcccaggcatctcatcggatgtacctgagtctgcgcacaagaccactgccagcgaagctaaatcagatacaggccagcctacaaaagtgggtagattccaggtgaccactacggcgaacaaagttgggcggtttagcgtaagcaagactgaggacaaaattacagacactaaaaaagaaggacctgtggcctcccctccctttatggatctggaacaggccgtgcttccggccgtcattcctaaaaaggagaaacctgaattatcagaaccatcccacttgaatggaccctcatctgatcctgaggcagcattcctctcaagagatgtcgatgacgggtccgggtctcctcactctccacatcagcttagtagtaaatccctgcctagtcagaacttgtcacagagcttaagcaactccttcaacagctcctacatgagctccgacaatgagtccgatatcgaggacgaggatctgaagttagagctgcgccgactacgggataagcacttgaaggagatccaggacctgcagtcccggcaaaagcacgagatcgagtcactctatacgaagctaggcaaagtgccccccgctgttatcatacctccggctgcccctctttcgggccgtcgtcgacgccccactaagagtaaggggtccaagagcagtaggagttcctcattgggcaacaagagcccgcaactgtctggcaacctgagcggacagagcgcagcatctgtgcttcaccctcaacagacactccacccaccaggcaatatccctgagtcgggccaaaaccagctccttcagccactgaaaccatcaccatccagcgataatctgtatagcgcttttaccagcgatggtgccatctccgtaccctccctgtctgctcccggtcaagggacctcgtcaaccaataccgtcggggccaccgttaactcccaggccgcccaggcccaaccccctgccatgactagcagccggaagggtacctttaccgacgacctccataagctggtcgacaactgggcacgtgacgctatgaacctgtccgggagaagagggagcaaaggtcatatgaattatgagggccctggtatggccagaaaatttagtgctccggggcagttgtgcatcagcatgacttctaacctgggggggtccgctcccatctccgccgcttccgccacctcactcggacactttacgaagagcatgtgcccacctcagcaatacggtttcccagctacaccgtttggagctcagtggtccggaaccgggggcccagcccctcagccgttagggcaatttcagccggtcggtacagccagcctgcagaatttcaacatatcaaacctgcagaaaagtatctctaatccaccgggatcgaaccttcggaccacctag

SEQ ID NO: 313950 - DNA, 4668 bp, Artificial Sequence
  derived and/or modified sequence
atggccaaggccatcaaggacagagtgtccctcatcaagaggaagcgggagcagaggcagctggtgcgggaggagcaggagaagaagaagcaggaggagagcagcctgaagcagcaggtggagcagagcagcgccagccagacaggcatcaagcagctgcccagcgccagcacaggcatccccacagccagcaccaccagcgcctctgtgtccacccaggtggagcctgaggagcctgaggccgaccagcaccagcagctgcagtaccagcagcccagcatctctgtgctgagtgatggcaccgtggacagcggccagggcagctctgtgttcacagagagccgggtgagcagccagcagacagtgtcctatggcagccagcacgagcaggcccacagcacaggcaccgtgcccggccacatccccagcacagtgcaggcccagagccagccccacggcgtgtacccacccagctctgtgcagcagggcatccagcagacagccccaccccagcagacagtgcagtacagcctgagccagaccagcaccagcagcgaggccaccacagcccagcctgtgtcccagccccaggccccccaggtgctgccccaggtgtctgctgggaagcagagcacccagggcgtgtcccaggtggccccagctgagcctgtggccgtggcccagacccaggccacccagcccaccaccctggccagctctgtggacagcgcccacagtgatgtggccagcggcatgtctgatggaaatgaaaatgtgcccagcagcagcggcagacatgagggccgcaccaccaagaggcactacaggaagtctgtgcgcagccgcagcagacatgagaagaccagccggcccaagctgcgcatcctgaatgtgagcaacaagggggacagagtggtggagtgccagctggagacccacaacaggaagatggtgaccttcaagtttgacctggatggagacaaccctgaggagatcgccaccatcatggtgaacaatgacttcatcctggccatcgagcgggagagctttgtggaccaggtgcgggagatcatcgagaaggcagatgagatgctgtctgaagatgtgtctgtggagcctgagggggaccagggcctggagagcctgcagggcaaggatgattatggcttcagcggcagccagaagctggagggggagttcaagcagcccatcccagccagctccatgccccagcagatcggcatccccaccagcagcctgacccaggtggtgcacagcgctggaagacgcttcatcgtgtcccctgtgcctgagagccggctgcgggagagcaaggtgttccccagcgagatcacagacacagtggccgccagcacagcccagagccctggcatgaacctgagccacagcgccagcagcctgagcctgcagcaggccttcagcgagctgcggcgggcccagatgacagagggccccaacacagccccacccaacttcagccacacaggccccaccttccctgtggtgccccccttcctgagcagcattgctggggtgcccaccacagctgctgccacagcccctgtgcctgccaccagcagccccccaaatgacatcagcaccagcgtcatccagagcgaggtgacagtgcccacagaggagggcattgctggggtggccaccagcactggagtggtgaccagcggcggcctgcccatcccccctgtgtctgagagccctgtgctgagctctgtggtgagcagcatcaccatcccagctgtggtgtccatcagcaccaccagccccagcctgcaggtgcccaccagcaccagcgagatcgtggtgagcagcacagccctgtaccccagcgtgacagtgtctgccaccagcgccagcgctgggggcagcacagccaccccaggccccaagcccccagctgtggtgtcccagcaggccgccggcagcaccaccgtgggcgccaccctgacctctgtgtccaccaccaccagcttccccagcacagccagccagctgtgcatccagctgagcagcagcaccagcacccccaccctggccgagaccgtggtggtgtctgcccacagcctggacaagaccagccacagcagcaccaccggcctggccttcagcctgagcgcccccagcagcagcagcagccctggggccggcgtgagcagctacatcagccagcccggcggcctgcaccccctggtgatccccagcgtgattgccagcacccccatcctgccccaggccgccggccccaccagcacccccctgctgccccaggtgcccagcatcccccccctggtgcagcctgtggccaacgtgcctgctgtgcagcagaccctcatccacagccagccccagcctgccctgctgcccaaccagccccacacccactgcccagaggtggacagcgacacccagcccaaggcccctggcattgatgacatcaagaccctggaggagaagctgcggagcctcttcagcgagcacagcagcagcggggcccagcacgcctctgtgtccctggagaccagcctggtgattgagagcacagtgaccccaggcatccccaccacagctgtggcccccagcaagctgctgaccagcaccaccagcacctgcctgccccccaccaacctgcccctgggcaccgtggccctgcctgtgacccctgtggtgaccccaggccaggtgtccacccctgtgtccaccaccaccagcggcgtgaagccaggcacagcccccagcaagccacccctgaccaaggcccctgtgctgcctgtgggcacagagctgcctgctggcaccctgcccagcgagcagctgccccccttccctggccccagcctgacccagagccagcagcccctggaggacctggatgcccagctgcggaggaccctgagccctgagatgatcaccgtgaccagcgctgtgggccctgtgtccatggccgcccccacagccatcacagaggccggcacccagccccagaagggcgtgtcccaggtgaaggagggccctgtgctggccaccagcagtggagctggggtcttcaagatgggccgcttccaggtgtctgtggccgcagatggagcccagaaggagggcaagaacaagtcagaagatgccaagtctgtgcactttgagagcagcaccagcgagagctctgtgctgagcagcagcagccctgagagcaccctggtgaagccagagcccaacggcatcaccatccctggcatcagcagtgatgtgcctgagagcgcccacaagaccacagccagcgaggccaagagtgacaccggccagcccaccaaggtgggccgcttccaggtgaccaccacagccaacaaggtgggccgcttctctgtgtccaagacagaggacaagatcacagacaccaagaaggagggccctgtggccagcccccccttcatggacctggagcaggccgtgctgcctgctgtgatccccaagaaggagaagccagagctgtctgagcccagccacctgaatggccccagcagtgaccctgaggccgccttcctgagcagagatgtggatgatggcagcggcagcccccacagcccccaccagctgagcagcaagagcctgcccagccagaacctgagccagagcctgagcaacagcttcaacagcagctacatgagcagtgacaatgaaagtgacattgaagatgaggacctgaagctggagctgcggcggctgcgggacaagcacctgaaggagatccaggacctgcagagccggcagaagcatgaaattgagagcctgtacaccaagctgggcaaggtgcccccagctgtgatcatccccccagctgcccccctgagcggcagaagaagaagacccaccaagagcaagggcagcaagagcagccgcagcagcagcctgggcaacaagagcccccagctgagcggcaacctgagcggccagagcgctgcctctgtgctgcacccccagcagaccctgcaccccccaggcaacatccctgagagcggccagaaccagctgctgcagcccctgaagcccagccccagcagtgacaacctgtacagcgccttcaccagtgatggagccatctctgtgcccagcctgagcgcccctggccagggcaccagcagcaccaacacagtgggcgccaccgtgaacagccaggccgcccaggcccagcccccagccatgaccagcagcaggaagggcaccttcacagatgacctgcacaagctggtggacaactgggccagagatgccatgaacctgagcggccggcggggcagcaagggccacatgaactatgagggccctggcatggccaggaagttcagcgcccctggccagctgtgcatctccatgaccagcaacctgggcggcagcgcccccatctctgctgccagcgccaccagcctgggccacttcaccaagtccatgtgccccccccagcagtatggcttccctgccaccccatttggagcccagtggagcggcactggaggccctgccccccagcccctgggccagttccagcctgtgggcacagccagcctgcagaacttcaacatcagcaacctgcagaagagcatcagcaaccccccaggcagcaacctgcggaccacctag

SEQ ID NO: 313951 - DNA, 4668 bp, Artificial Sequence
  derived and/or modified sequence
atggccaaggccatcaaggaccgggtgagcctgatcaagcggaagcgcgagcagcgccagctggtgagggaggagcaggaaaaaaagaaacaggaagagtcttcgctgaaacagcaagtagaacaaagctccgcctctcagacaggcattaaacagctgccctcagcctctacaggaattcctacggcatctactacttccgcatctgtctcgacacaggtggaacccgaggaaccagaagcggatcagcatcaacagctccaatatcagcaaccaagtatttcagtactgtcagatggtactgtggacagcggacaaggatcaagcgtgttcactgaatcaagagtgagtagccagcaaacagtttcctatggcagccagcacgaacaagctcactctaccgggacagtccccggacacatcccgtcaacagtgcaggctcagtctcagcctcatggtgtgtatcctcctagtagcgtccagcagggaatccagcaaactgcacctccgcaacaaaccgttcagtatagcctctcacagacctcaactagcagcgaggcgacaactgcacagccagtttctcagccccaggctccccaggtactgccacaagtgtccgctggcaaacagtcgactcagggggtgtcccaggtggcacccgccgagcccgtggccgtcgctcagacccaggccacacaacccactacccttgctagtagcgtggattctgcccattcagatgttgcttccggaatgtcagacggaaatgagaacgtgccatcatcatccggacggcatgaaggcagaactactaaaaggcactatcgtaagagtgtgcggtcccggagccgccacgagaagactagcagacccaaactgagaatattgaacgtgtcaaacaaaggagacagggtggttgagtgtcagcttgaaacgcataacaggaagatggttaccttcaagtttgatctggacggagacaatcctgaagaaatcgcaaccatcatggtgaacaatgattttatcctggccatagaacgtgaatctttcgttgaccaggtcagggaaattattgaaaaggccgatgagatgttgagcgaagatgtcagtgtggagcccgagggggatcaggggctggagtcacttcagggaaaggatgactacggattctcagggagccagaaactggagggagagtttaagcagccaattcctgctagctcaatgcctcagcagattggcatccctacttccagtctgacgcaagttgtacacagcgccggtcggcggttcattgtgtctcctgtccccgaaagtagattacgcgagtcaaaggtctttccatctgagataacagataccgtggcagctagcacagcccaaagccctggaatgaatcttagccactctgcaagttcgctcagtctccaacaagctttctcagagttacgtcgggctcagatgaccgaaggacctaacactgcccctccaaatttctcgcatacaggacctaccttcccagtagtgcctccatttttgagttccatagccggcgtaccaacgaccgccgcagcgaccgcgccggtgccggccacaagctcacctcctaacgatataagtactagtgtgatacaatccgaagtcaccgtccctacggaggaaggcatcgcgggggtggccacttccacgggcgtggtcacctccggggggttacctataccacccgtctccgaaagccctgtgctgagctccgtagtctcctctattacgatccccgccgttgtgtcaataagcacaacctcccccagtctgcaggtgcctacgagtacttccgagattgtggtgtcaagcacagccctgtatccatcagtgacggtctccgcaactagcgcgagcgccggggggagcaccgccacccctggaccaaaaccccctgccgtcgtttcgcagcaggcggctggctcaacgactgttggcgccacccttacttcagtatctaccactactagtttcccttccacggcatcccagctgtgcatccagctgtctagcagcacctctacccctaccttagcagagaccgtcgtagtctccgctcattcactcgataaaacctcacacagctccacaaccggcttggcattctctctgagtgcaccctctagcagcagttccccaggggcgggcgtatcctcatatatctcacagcccgggggactccatccactggtgattcctagtgtcatcgctagtacaccgatccttccccaggctgcaggacccacaagcactcctctgcttccacaggtgcctagtatcccaccattggtacagcccgtggccaacgtgcctgcagtacagcaaactctcatacactcacagccacagcctgccctgttgccaaaccagccccacacacattgtccagaagtagatagcgacacacagcccaaggctccaggcatcgatgacattaaaactctggaagaaaaacttcgtagcctattttcggaacatagttcaagcggggcgcagcacgccagcgtaagtctggaaacctctttggttatcgagtccacagttacccccggaatccccaccacggctgtggctccctccaagctgctcacctctactacttcaacctgcttacccccaactaaccttcctctgggcactgtggccttgcctgtgacccccgtcgtcacccccggacaggtgtccactcctgtgtccacaacaacatctggtgtgaagccaggtacggccccctccaagcctcctttgacaaaggcgcccgtgcttcccgtgggcactgagctccccgccggaacactcccctctgagcagctgcctccctttccgggacctagccttacccagtctcaacagcccttggaggacctggatgcccagctacgaaggacgctctctccagagatgattacggtgacttccgcagtgggcccagtgtcgatggctgcacccactgcaattactgaagcagggactcagccccagaaaggcgtgtctcaggtgaaagaaggtcccgtgctggctacttcaagcggggcaggcgtgtttaaaatggggcggttccaggtgagcgttgctgccgatggagcacaaaaagaggggaaaaacaagtccgaagacgccaagtctgtgcattttgagtcatcaacttccgagtcttcagtcctttcctcatcttcccccgagagcaccttggtcaaacctgaacctaatggcattacaattcccggaataagtagtgatgttcccgagagtgcccacaaaacgaccgcgtcagaggctaaaagtgacacaggtcagcctaccaaggtgggaagatttcaggttacaaccaccgccaacaaagtgggcaggtttagcgtgtccaagaccgaagacaagatcactgataccaagaaggaaggccctgtggctagcccaccttttatggatctggagcaagccgtccttcccgcagtgatccccaagaaggagaaacctgagttgagtgagccctctcatctgaacggcccttcatcagaccctgaggctgctttcctctcccgggacgttgacgacggaagtggctcacctcatagccctcaccagctgtcgtctaagagcctgccctcccagaacctttcccagtccctgtccaattcattcaactccagctacatgagctcggataatgaaagcgatatcgaagatgaggatctcaagcttgaactgcgacgtctgagagacaagcacctgaaagagatacaagacctccagagccgtcagaaacatgaaatcgagagtctgtataccaagttgggaaaagtccctccagccgttatcatccccccggctgcccccctaagtggacgtcggagacgccccactaagtcaaaggggtccaagagttccagaagcagcagtcttgggaataagtcccctcaactgtctggtaacctcagtggacaatctgctgcatcagtcctacacccacagcagaccctccaccctcccggcaacattccagagagcggccagaaccagctgttgcagcctctgaagccaagtccttcaagcgataatctctactcagcattcaccagtgacggagccatttctgtgcccagtctgtctgcccccgggcaaggcacgagcagcactaataccgtgggtgccacagtcaattctcaggcagcccaggcgcagccgcctgcaatgacttcctctcgcaagggaacgtttacagacgatctccataaactcgtggacaattgggctagggacgcgatgaatctgtccggcagacggggcagcaagggacacatgaattatgaaggccccggaatggcaagaaaattctcagccccaggccaactgtgtatatccatgactagtaacctcggcgggagtgctcccatctcagctgcaagcgctacatcgcttgggcatttcaccaagagcatgtgtcctccgcaacagtacgggttccccgccacaccattcggggcccagtggtccggaacgggcgggccggccccccagcccctgggacagtttcagccagtgggcacagccagtctgcaaaactttaatatctccaatctccagaagtccataagcaacccgcctgggagcaacctgcgcaccacctag

SEQ ID NO: 313952 - DNA, 4668 bp, Artificial Sequence
  derived and/or modified sequence
atggcaaaagctattaaggacagggtctcactgattaagagaaaaagggagcagcggcagttagtgagggaggaacaagagaaaaagaagcaggaggaatctagtctcaaacagcaggtggaacagtccagtgcctcccaaaccgggataaaacagctgcccagcgcttccaccggcatcccaaccgcctccaccacaagcgcctccgtgtccacacaggttgaaccagaggagcctgaggctgaccaacatcaacagctccagtaccaacagccatctatttcggtgctgtccgatggcactgtggacagtggccagggaagttctgttttcactgagagtcgtgtctcttctcagcagacagttagctatggcagtcaacatgaacaggctcacagtactggcaccgtcccaggacacatccccagtacagttcaagcacagtcccaaccacatggagtgtacccaccctcctctgtacagcagggcatccaacagacagcccctccccagcagacagtccagtattccctctctcagacctccacaagcagtgaggcaaccactgcccagcctgtctctcagccacaggcaccccaggtgctgcctcaggtctcagctggtaaacagtctacacagggcgtgtcccaggtcgccccagccgagcccgttgctgttgctcaaacacaggccacacaacccactaccttggcttcatctgtggactcagcccactccgatgtcgcaagcggtatgagcgatggcaacgaaaacgtcccttccagcagtggtcgacatgagggaagaaccactaaacgacactacagaaagagcgtgaggtccaggtcccgccacgagaagaccagcaggccgaagctgagaatactgaatgtttccaataagggtgatagagtggtggagtgccagctggagacacataataggaaaatggtgacgttcaagtttgatctcgatggcgataatcctgaggagatagctaccattatggtcaacaatgattttatcctggccattgagcgagagagctttgtggaccaggtccgcgagatcattgaaaaagctgatgagatgctttcagaggatgtgtctgtggagcctgagggcgaccagggactggaatcccttcaggggaaagatgactatgggttcagtggttcacaaaagctcgaaggcgaatttaagcagcccattcccgctagtagtatgccccagcagataggaataccaacttccagtctgactcaagtggtgcattcagccggacggaggttcatcgtttctcccgttccagagtccaggctccgggaatctaaagtcttcccaagcgagataaccgataccgtcgccgcatctaccgctcagagccccggaatgaacctgagtcactcagcatcaagtctatccctgcagcaggcattttccgagctgcggcgtgcacagatgacagagggccctaatacagccccacccaatttttcccacaccggaccaactttccccgtcgtacctccattcctgtccagtattgctggtgtgcctacaacagccgcagcaacagcgccagtgcccgctactagtagccccccaaacgatatttcaaccagcgtaatccagtctgaggtgacagttccaaccgaggaggggattgctggcgtggcaacaagcactggcgttgtcaccagcggcggtctccccattccacccgtctccgaatcacccgtactgtctagcgtcgtcagtagcatcactattcccgcagtggtctctataagtacaacctcaccctcacttcaagttccaacgtcaaccagcgagattgttgtgtcctccacagcgctgtaccctagtgtgaccgtgagtgcaaccagcgcttcagcaggcggtagtaccgccactcctggcccaaaaccgcctgcagttgtgagccagcaggctgctgggtctaccacggtgggagccactctgacctccgtgtccacgaccacctcctttccgtcaacagctagccaactttgcattcagctcagcagctctactagcacgccaacactggcagagactgtggtcgtgagcgctcactccttagacaagacctcacatagctccaccacaggattagcattctctctgtcagcgccttcatcctcctcttctccaggtgctggagtctcgtcttacataagccagcctggcggtctccatccactcgttatcccctcagtgatcgcttctacaccaatcttgcctcaggcagcaggaccgacctccacccccctgttaccacaagtgccctctatccccccactggtccagccagtcgctaacgtgccggctgtgcaacagactctaatacactctcagcctcagccggctctcctgcccaaccagccacacactcactgccctgaggttgacagtgacacacagcctaaggcgcctggcattgatgacattaagactctcgaggagaagctcaggagcctgttctctgagcattcctcatctggcgcacagcacgcatccgtgagtctcgagacaagcctagtcattgagagtaccgtgactcccggtatccccacaacggccgtggctccatcaaaattgctcacaagtacaacatcaacatgcttaccacccacaaatctcccactcggaacggtcgcccttcccgtgactcccgtggttacaccaggacaggtcagtacaccagtgagtacaactaccagcggtgtgaaacccggtacagccccatcaaaaccccctctgacaaaggccccagtgttgccagtcggaactgagcttccggctggcactctgcccagcgagcagctacctccatttcccggaccatccctaacgcagtcgcagcagcccctcgaagatttagatgcccagctgaggaggactctgtcaccagaaatgattaccgtcacatcagctgtcggaccagtaagcatggcagcacctacagccatcaccgaggctggtacgcagccacagaagggagttagccaggtgaaagagggacctgtattagccaccagctccggcgctggagtattcaaaatgggaaggtttcaagtctcggttgcagcggatggcgctcagaaggaagggaagaacaaatctgaggacgcgaagtctgtccattttgagtcctccaccagtgagtccagcgtcctgtctagtagtagccctgaatcaacattggtgaagcctgaaccaaacggtatcactatcccaggaatttcatcagacgtgccagagagtgcccataaaactactgcatccgaggctaagagtgacaccgggcaacccaccaaagtggggaggttccaggtaactactacagcgaacaaggtagggcgattttcagtgagcaagacggaagacaagataacagataccaagaaggaaggcccagtggcctctccacccttcatggatctggaacaagccgtgctgcctgcagtaatccctaagaaagagaagcccgaattatctgagccgtcccacctgaacggcccttctagcgaccctgaggctgccttcttgtcacgcgacgtagatgacggatcaggaagcccccatagcccccaccagctgagcagtaaaagcttgccttcccagaacttgtcacagagtttgagtaactccttcaactcttcctatatgtcgtcagacaacgagtctgatattgaggatgaggacttgaaattagagctgcgcaggcttcgtgacaagcatttgaaggaaattcaggatcttcagtctcgacaaaaacatgagatcgaatctctttacaccaagctcggcaaggtgccacccgctgtcatcatccccccagctgcacctctgagtggaaggcgaagaaggcctacaaagtctaagggctccaagagttccagaagttcctctctaggcaataaatcacctcagctaagcggcaatttgagtggtcagtccgcggcatctgtgctgcacccccagcagaccttgcacccacctgggaacatccctgagtctggccagaaccagctcttacaaccactcaagcccagccctagttccgataacctgtacagcgccttcacctctgatggagcaatcagcgtccctagcttatccgcccctggccaagggactagtagtacaaatacagtcggcgcaacagtgaatagccaagccgcacaggctcagcccccagccatgacgtcctccagaaaagggactttcactgatgacctgcacaaattggttgataactgggctagagatgccatgaacctgtccgggagacgtgggagcaaggggcacatgaactatgaagggcctgggatggcgaggaagttttcggccccagggcaactgtgcatttcgatgacctctaatctgggcggatcagcacccatcagtgcagcctccgccacatcccttggccacttcaccaaatcgatgtgtcctccccagcagtatgggttccccgctacgccatttggggctcagtggtcggggacaggaggaccggctccccaacccttggggcagttccagcctgtgggaaccgccagtctccaaaacttcaatatcagcaatctccagaaaagtatctcaaacccaccaggatccaatctgcgaacaacatat

SEQ ID NO: 313953 - DNA, 9494 bp, Artificial Sequence
  derived and/or modified sequence
ctcctctgccccggggccgccaccgcccgggcgtcggacctggtcccgtgctcgcggtgccgccgccctctgggcctagcccgcccagctcggcgagcggcggcagtgggagccgcgtccgccgcatccgcctcgactcggtgccggcccctggccctcccctcatgactgcggcgcctctgctgccaccgcccgcccggccgccgctcgccgcaggatggatgcggaccgtgcggcgctaacccccgtggctcagctcccgaatcgcccgccttcgagccctcctcgtgagccgcagcagcctcggtgccagcccccgccgcagctgggcccagcggtccgcctgtccctcgttgcggcttgtcggtgctgagtgaggcgtcgtccgggtcggcgcgaacccgcccggccgcggttccctgcagacctctgcgcgggcggctcggcccttcacgcccttttcgttcacgaatccgagcccgctcgcctctctccagcgaaccgaccatgtctggcggcgccgcagagaagcagagcagcactcccggttccctgttcctctcgccgccggctcctgcccccaagaatggctccagctccgattcctccgtgggggagaaactgggagccgcggccgccgacgctgtgaccggcaggaccgaggagtacaggcgccgccgccacactatggacaaggacagccgtggggcggccgcgaccactaccaccactgagcaccgcttcttccgccggagcgtcatctgtgactccaatgccactgcactggagcttcccggccttcctctttccctgccccagcccagcatccccgcggctgtcccgcagagtgctccaccggagccccaccgggaagagaccgtgaccgccaccgccacttcccaggtagcccagcagcctccagccgctgccgcccctggggaacaggccgtcgcgggccctgccccctcgactgtccccagcagtaccagcaaagaccgcccagtgtcccagcctagccttgtggggagcaaagaggagccgccgccggcgagaagtggcagcggcggcggcagcgccaaggagccacaggaggaacggagccagcagcaggatgatatcgaagagctggagaccaaggccgtgggaatgtctaacgatggccgctttctcaagtttgacatcgaaatcggcagaggctcctttaagacggtctacaaaggtctggacactgaaaccaccgtggaagtcgcctggtgtgaactgcaggatcgaaaattaacaaagtctgagaggcagagatttaaagaagaagctgaaatgttaaaaggtcttcagcatcccaatattgttagattttatgattcctgggaatccacagtaaaaggaaagaagtgcattgttttggtgactgaacttatgacgtctggaacacttaaaacgtatctgaaaaggtttaaagtgatgaagatcaaagttctaagaagctggtgccgtcagatccttaaaggtcttcagtttcttcatactcgaactccacctatcattcaccgcgatcttaaatgtgacaacatctttatcaccggccctactggctcagtcaagattggagacctcggtctggcaaccctgaagcgggcttcttttgccaagagtgtgataggtaccccagagttcatggcccctgagatgtatgaggagaaatatgatgaatccgttgacgtttatgcttttgggatgtgcatgcttgagatggctacatctgaatatccttactcggagtgccaaaatgctgcacagatctaccgtcgcgtgaccagtggggtgaagccagccagttttgacaaagtagcaattcctgaagtgaaggaaattattgaaggatgcatacgacaaaacaaagatgaaagatattccatcaaagaccttttgaaccatgccttcttccaagaggaaacaggagtacgggtagaattagcagaagaagatgatggagaaaaaatagccataaaattatggctacgtattgaagatattaagaaattaaagggaaaatacaaagataatgaagctattgagttttcttttgatttagagagagatgtcccagaagatgttgcacaagaaatggtagagtctgggtatgtctgtgaaggtgatcacaagaccatggctaaagctatcaaagacagagtatcattaattaagaggaaacgagagcagcggcagttggtacgggaggagcaagaaaaaaaaaagcaggaagagagcagtctcaaacagcaggtagaacaatccagtgcttcccagacaggaatcaagcagctcccttctgctagcaccggcatacctactgcttctaccacttcagcttcagtttctacacaagtagaacctgaagaacctgaggcagatcaacatcaacaactacagtaccagcaacccagtatatctgtgttatctgatgggacggttgacagtggtcagggatcctctgtcttcacagaatctcgagtgagcagccaacagacagtttcatatggttcccaacatgaacaggcacattctacaggcacagtcccagggcatataccttctactgtccaagcacagtctcagccccatggggtatatccaccctcaagtgtgcagcagggaatacagcagacagcccctcctcaacagacagtgcagtattcactttcacagacatcaacctccagtgaggccactactgcacagccagtgagtcagcctcaagctccacaagtcttgcctcaagtatcagctggaaaacagagtactcagggagtctctcaggttgctcctgcagagccagttgcagtagcacagacccaagctacccagccgaccactttggcttcctctgtagacagtgcacattcagatgttgcttcaggtatgagtgatggcaatgagaacgtcccatcttccagtggaaggcatgaaggaagaactacaaaacggcattaccgaaaatctgtaaggagtcgctctcgacatgaaaaaacttcacgcccaaaattaagaattttgaatgtttcaaataaaggagaccgagtagtagaatgtcaattagagactcataataggaaaatggttacattcaaatttgacctagatggtgacaaccccgaggagatagcaacaattatggtgaacaatgactttattctagcaatagagagagagtcgtttgtggatcaagtgcgagaaattattgaaaaagctgatgaaatgctcagtgaggatgtcagtgtggaaccagagggtgatcagggattggagagtctacaaggaaaggatgactatggcttttcaggttctcagaaattggaaggagagttcaaacaaccaattcctgcgtcttccatgccacagcaaataggcattcctaccagttctttaactcaagttgttcattctgcgggaaggcggtttatagtgagtcctgtgccagaaagccgattacgagaatcaaaagttttccccagtgaaataacagatacagttgctgcctctacagctcagagccctggaatgaacttgtctcactctgcatcatcccttagtctacaacaggccttttctgaacttagacgtgcccaaatgacagaaggacccaacacagcacctccaaactttagtcatacaggaccaacatttccagtagtacctcctttcttaagtagcattgctggagtcccaaccacagcagcagccacagcaccagtccctgcaacaagcagccctcctaatgacatttccacatcagtaattcagtctgaggttacagtgcccactgaagaggggattgctggagttgccaccagcacaggtgtggtaacttcaggtggtctccccataccacctgtgtctgaatcaccagtactttccagcgtagtttcaagtatcacaatacctgcagttgtctcaatatctactacatccccgtcacttcaagtccccacatccacatctgagatcgttgtttctagtacagcactgtatccttcagtaacagtttcagcaacttcagcctctgcagggggcagtactgctaccccaggtcctaagcctccagctgtagtatctcagcaggcagcaggcagcactactgtgggagccacattaacatcagtttctaccaccacttcattcccaagcacagcttcacagctgtgcattcagcttagcagcagtacttctactcctactttagctgaaaccgtggtagttagcgcacactcactagataagacatctcatagcagtacaactggattggctttctccctctctgcaccatcttcctcttcctctcctggagcaggagtgtctagttatatttctcagcctggtgggctgcatcctttggtcattccatcagtgatagcttctactcctattcttccccaagcagcaggacctacttctacacctttattaccccaagtacctagtatcccacccttggtacagcctgttgccaatgtgcctgctgtacagcagacactaattcatagtcagcctcaaccagctttgcttcccaaccagccccatactcattgtcctgaagtagattctgatacacaacccaaagctcctggaattgatgacataaagactctagaagaaaagctgcggtctctgttcagtgaacacagctcatctggagctcagcatgcctctgtctcactggagacctcactagtcatagagagcactgtcacaccaggcatcccaactactgctgttgcaccaagcaaactcctgacttctaccacaagtacttgcttaccaccaaccaatttaccactaggaacagttgctttgccagttacaccagtggtcacacctgggcaagtttctaccccagtcagcactactacatcaggagtgaaacctggaactgctccctccaagccacctctaactaaggctccggtgctgccagtgggtactgaacttccagcaggtactctacccagcgagcagctgccaccttttccaggaccttctctaacccagtcccagcaacctctagaggatcttgatgctcaattgagaagaacacttagtccagagatgatcacagtgacttctgcggttggtcctgtgtccatggcggctccaacagcaatcacagaagcaggaacacagcctcagaagggtgtttctcaagtcaaagaaggccctgtcctagcaactagttcaggagctggtgtttttaagatgggacgatttcaggtttctgttgcagcagacggtgcccagaaagagggtaaaaataagtcagaagatgcaaagtctgttcattttgaatccagcacctcagagtcctcagtgctatcaagtagtagtccagagagtaccttggtgaaaccagagccgaatggcataaccatccctggtatctcttcagatgtgccagagagtgcccacaaaactactgcctcagaggcaaagtcagacactgggcagcctaccaaggttggacgttttcaggtgacaactacagcaaacaaagtgggtcgtttctctgtatcaaaaactgaggacaagatcactgacacaaagaaagaaggaccagtggcatctcctccttttatggatttggaacaagctgttcttcctgctgtgataccaaagaaagagaagcctgaactgtcagagccttcacatctaaatgggccgtcttctgacccggaggccgcttttttaagtagggatgtggatgatggttccggtagtccacactcgccccatcagctgagctcaaagagccttcctagccagaatctaagtcaaagccttagtaattcatttaactcctcttacatgagtagcgacaatgagtcagatatcgaagatgaagacttaaagttagagctgcgacgactacgagataaacatctcaaagagattcaggacctgcagagtcgccagaagcatgaaattgaatctttgtataccaaactgggcaaggtgccccctgctgttattattcccccagctgctcccctttcagggagaagacgacgacccactaaaagcaaaggcagcaaatctagtcgaagcagttccttggggaataaaagcccccagctttcaggtaacctgtctggtcagagtgcagcttcagtcttgcacccccagcagaccctccaccctcctggcaacatcccagagtccgggcagaatcagctgttacagccccttaagccatctccctccagtgacaacctctattcagccttcaccagtgatggtgccatttcagtaccaagcctttctgctccaggtcaaggaaccagcagcacaaacactgttggggcaacagtgaacagccaagccgcccaagctcagcctcctgccatgacgtccagcaggaagggcacattcacagatgacttgcacaagttggtagacaattgggcccgagatgccatgaatctctcaggcaggagaggaagcaaagggcacatgaattacgagggccctggaatggcaaggaagttctctgcacctgggcaactgtgcatctccatgacctcgaacctgggtggctctgcccccatctctgcagcatcagctacctctctaggtcacttcaccaagtctatgtgccccccacagcagtatggctttccagctaccccatttggcgctcaatggagtgggacgggtggcccagcaccacagccacttggccagttccaacctgtgggaactgcctccttgcagaatttcaacatcagcaatttgcagaaatccatcagcaaccccccaggctccaacctgcggaccacttagacctagagacattaactgaatagatctgggggcaggagatggaatgctgagggggtgggtgggggtgggaagtagcctatatactaactactagtgctgcatttaactggttatttcttgccagaggggaatgtttttaatactgcattgagccctcagaatggagagtctcccccgctccagttattggaatgggagaggaaggaaagaacagcttttttgtcaaggggcagcttcagaccatgctttcctgtttatctatactcagtaatgaggatgagggctaggaaagtcttgttcataaggaagctggagaactcaatgtaaaatcaaacccatctgtaatttcgagtgggtggagctcttgcttttggtacatgccctgaatccctcactccctcaagaatccgaaccacaggacaaaaaccacctactgggctctctcctaccctgccctcctcccttttttttacccctctcttttttattttttctttgctctttagaacccagtgaaaaataccagggtactggggtgcaactctttcttatgataggtcattagtgctttaagcaaaagatattagcagctttgactgcagcattagcaattaggaaaaaaaaaaaattaagttccctgcggacatgtaactttgccatcagttttgatgtggaaacactgtgatatataaaatgttgttggacaacagtagttttaagagtaaaatatgaaacgtttaaaaagttccaaaaaaagctagctctgtcctttacttattgagacactttaactttttcctttgtatttccattgtattagataaataaatgtgaatgtaaaattgtataaattactgtacttgaatacttctgtttcccagtgttgcttgctggacattttagtgccttggacttctattgcttctgccattagcatcaacttaccagaccccagatcaataaagggcatgtggaaggaaatcgtaggtccatgtgaccccagcagtccagcagtggttatgccaaagggaaattgaaaaagtatttttttaagtcattcaacaactttgtctagagcaggtgtaagatgagtagggtgggaagttaggttggcatcagtggttaaaaacagaaagttctgtttcgggaatagtgaggagggggtgttgtaacaaaattggacaacttaaaagaatggtgtgtgctgggtgaaagacaaagactaaagaatgaggaaacaaacgtgatgcctggccagtgactgtcatataaacctttcttatttgagctaggcttgaacagacgtgacctagaagaaactgaacataaagagaagggggtggggggctagttttcaagttggggaacctgatagtgaaaagtcacagatggagaaaattgctctcagaaaaactgtttggattgctttcctcttgttgcacatgtaccatgcatttctcagcttggggtactacattttgtggaaagttaatctatctatctttccacatctgaattaatcattctaggaaagaatacttattcctactcatttcctttatgatgtccaaatggttgcaggatcataatctattgtgccacctttatttctagaagtacaactaatatgttcacattttcaaataaataatactccccgtaagtaataactgcaaccaatcagtgttattcagtgctatgcctccttgtaatgggtagttattaattattttcagagctttccggaaatactgtcctaactggctatgtttaggatctttgttatctctgaagacaaagaaagaagctaggactcttaattttggggtgcttcttgactcttagttgggaaactgaaaatatttccaaccttttacccacgtcaatggcatattctgggaatcaccaccaccaccaccactaccacagaaagaggctggaggctcctgtaccctgttcattccttaagggccctgcttcccttagtaagtaagtaagttggtctacggccctaaatatgcaaatgagagctgaaggtttttaaaaggtagaaaggaaaagggcaagggcttccacccctgctttaaaatgatttatttattctctgcttgtatttcttgtggagagagtaaggatagaaccaacaaggggctgagtagctgagaaaggggccacccaagagtgaaacatactttataccagaggagcagtggagcctcatgcagcacattatcatttgttatttgggtttaataataattttgacatcttttcactcatacacaaaaaaagtcagaactggtgttatttactgttgatttcatcctcctgtgtatgaaataacaagcctagaggaatgaactagtgctactgaactgtttaaattatttttgtgttaatagtacactttgagtatctttttccacattaaaaactttctgaattataaatgttttccttacattatttaacaatgtacactgttaaaaataaaaataaaaattcaaactttgggggtttctcagcagccgttaattgtacattttgcactaactctgggtgttgcgcttcttgtaagattgcgctttgtgcttcagtttgttacctttgtagacttatttaatgaaaccattcaaataaaccaaacttgcttttgttga

SEQ ID NO: 313954 - DNA, 4614 bp, Artificial Sequence
  derived and/or modified sequence
cggcgccgcagagaagcagagcaagaaaaaaaaaagcaggaagagagcagtctcaaacagcaggtagaacaatccagtgcttcccagacaggaatcaagcagctcccttctgctagcaccggcatacctactgcttctaccacttcagcttcagtttctacacaagtagaacctgaagaacctgaggcagatcaacatcaacaactacagtaccagcaacccagtatatctgtgttatctgatgggacggttgacagtggtcagggatcctctgtcttcacagaatctcgagtgagcagccaacagacagtttcatatggttcccaacatgaacaggcacattctacaggcacagtcccagggcatataccttctactgtccaagcacagtctcagccccatggggtatatccaccctcaagtgtgcagcagggaatacagcagacagcccctcctcaacagacagtgcagtattcactttcacagacatcaacctccagtgaggccactactgcacagccagtgagtcagcctcaagctccacaagtcttgcctcaagtatcagctggaaaacagagtactcagggagtctctcaggttgctcctgcagagccagttgcagtagcacagacccaagctacccagccgaccactttggcttcctctgtagacagtgcacattcagatgttgcttcaggtatgagtgatggcaatgagaacgtcccatcttccagtggaaggcatgaaggaagaactacaaaacggcattaccgaaaatctgtaaggagtcgctctcgacatgaaaaaacttcacgcccaaaattaagaattttgaatgtttcaaataaaggagaccgagtagtagaatgtcaattagagactcataataggaaaatggttacattcaaatttgacctagatggtgacaaccccgaggagatagcaacaattatggtgaacaatgactttattctagcaatagagagagagtcgtttgtggatcaagtgcgagaaattattgaaaaagctgatgaaatgctcagtgaggatgtcagtgtggaaccagagggtgatcagggattggagagtctacaaggaaaggatgactatggcttttcaggttctcagaaattggaaggagagttcaaacaaccaattcctgcgtcttccatgccacagcaaataggcattcctaccagttctttaactcaagttgttcattctgcgggaaggcggtttatagtgagtcctgtgccagaaagccgattacgagaatcaaaagttttccccagtgaaataacagatacagttgctgcctctacagctcagagccctggaatgaacttgtctcactctgcatcatcccttagtctacaacaggccttttctgaacttagacgtgcccaaatgacagaaggacccaacacagcacctccaaactttagtcatacaggaccaacatttccagtagtacctcctttcttaagtagcattgctggagtcccaaccacagcagcagccacagcaccagtccctgcaacaagcagccctcctaatgacatttccacatcagtaattcagtctgaggttacagtgcccactgaagaggggattgctggagttgccaccagcacaggtgtggtaacttcaggtggtctccccataccacctgtgtctgaatcaccagtactttccagcgtagtttcaagtatcacaatacctgcagttgtctcaatatctactacatccccgtcacttcaagtccccacatccacatctgagatcgttgtttctagtacagcactgtatccttcagtaacagtttcagcaacttcagcctctgcagggggcagtactgctaccccaggtcctaagcctccagctgtagtatctcagcaggcagcaggcagcactactgtgggagccacattaacatcagtttctaccaccacttcattcccaagcacagcttcacagctgtgcattcagcttagcagcagtacttctactcctactttagctgaaaccgtggtagttagcgcacactcactagataagacatctcatagcagtacaactggattggctttctccctctctgcaccatcttcctcttcctctcctggagcaggagtgtctagttatatttctcagcctggtgggctgcatcctttggtcattccatcagtgatagcttctactcctattcttccccaagcagcaggacctacttctacacctttattaccccaagtacctagtatcccacccttggtacagcctgttgccaatgtgcctgctgtacagcagacactaattcatagtcagcctcaaccagctttgcttcccaaccagccccatactcattgtcctgaagtagattctgatacacaacccaaagctcctggaattgatgacataaagactctagaagaaaagctgcggtctctgttcagtgaacacagctcatctggagctcagcatgcctctgtctcactggagacctcactagtcatagagagcactgtcacaccaggcatcccaactactgctgttgcaccaagcaaactcctgacttctaccacaagtacttgcttaccaccaaccaatttaccactaggaacagttgctttgccagttacaccagtggtcacacctgggcaagtttctaccccagtcagcactactacatcaggagtgaaacctggaactgctccctccaagccacctctaactaaggctccggtgctgccagtgggtactgaacttccagcaggtactctacccagcgagcagctgccaccttttccaggaccttctctaacccagtcccagcaacctctagaggatcttgatgctcaattgagaagaacacttagtccagagatgatcacagtgacttctgcggttggtcctgtgtccatggcggctccaacagcaatcacagaagcaggaacacagcctcagaagggtgtttctcaagtcaaagaaggccctgtcctagcaactagttcaggagctggtgtttttaagatgggacgatttcaggtttctgttgcagcagacggtgcccagaaagagggtaaaaataagtcagaagatgcaaagtctgttcattttgaatccagcacctcagagtcctcagtgctatcaagtagtagtccagagagtaccttggtgaaaccagagccgaatggcataaccatccctggtatctcttcagatgtgccagagagtgcccacaaaactactgcctcagaggcaaagtcagacactgggcagcctaccaaggttggacgttttcaggtgacaactacagcaaacaaagtgggtcgtttctctgtatcaaaaactgaggacaagatcactgacacaaagaaagaaggaccagtggcatctcctccttttatggatttggaacaagctgttcttcctgctgtgataccaaagaaagagaagcctgaactgtcagagccttcacatctaaatgggccgtcttctgacccggaggccgcttttttaagtagggatgtggatgatggttccggtagtccacactcgccccatcagctgagctcaaagagccttcctagccagaatctaagtcaaagccttagtaattcatttaactcctcttacatgagtagcgacaatgagtcagatatcgaagatgaagacttaaagttagagctgcgacgactacgagataaacatctcaaagagattcaggacctgcagagtcgccagaagcatgaaattgaatctttgtataccaaactgggcaaggtgccccctgctgttattattcccccagctgctcccctttcagggagaagacgacgacccactaaaagcaaaggcagcaaatctagtcgaagcagttccttggggaataaaagcccccagctttcaggtaacctgtctggtcagagtgcagcttcagtcttgcacccccagcagaccctccaccctcctggcaacatcccagagtccgggcagaatcagctgttacagccccttaagccatctccctccagtgacaacctctattcagccttcaccagtgatggtgccatttcagtaccaagcctttctgctccaggtcaaggaaccagcagcacaaacactgttggggcaacagtgaacagccaagccgcccaagctcagcctcctgccatgacgtccagcaggaagggcacattcacagatgacttgcacaagttggtagacaattgggcccgagatgccatgaatctctcaggcaggagaggaagcaaagggcacatgaattacgagggccctggaatggcaaggaagttctctgcacctgggcaactgtgcatctccatgacctcgaacctgggtggctctgcccccatctctgcagcatcagctacctctctaggtcacttcaccaagtctatgtgccccccacagcagtatggctttccagctaccccatttggcgctcaatggagtgggacgggtggcccagcaccacagccacttggccagttccaacctgtgggaactgcctccttgcagaatttcaacatcagcaatttgcagaaatccatcagcaaccccccaggctccaacctgcggaccacttag

SEQ ID NO: 313955 - protein, 324 aa, Artificial Sequence [sequence omitted]

SEQ ID NO: 313956 - DNA, 1182 bp, Artificial Sequence
  derived and/or modified sequence
atgagcggcggcgccgccgagaagcagagcagcacccccggcagcctgttcctgagcccccccgcccccgcccccaagaacggcagcagcagcgacagcagcgtgggcgagaagctgggcgccgccgccgccgacgccgtgaccggcagaaccgaggagtacagaagaagaagacacaccatggacaaggacagcagaggcgccgccgccaccaccaccaccaccgagcacagattcttcagaagaagcgtgatctgcgacagcaacgccaccgccctggagctgcccggcctgcccctgagcctgccccagcccagcatccccgccgccgtgccccagagcgccccccccgagccccacagagaggagaccgtgaccgccaccgccaccagccaggtggcccagcagccccccgccgccgccgcccccggcgagcaggccgtggccggccccgcccccagcaccgtgcccagcagcaccagcaaggacagacccgtgagccagcccagcctggtgggcagcaaggaggagcccccccccgccagaagcggcagcggcggcggcagcgccaaggagccccaggaggagagaagccagcagcaggacgacatcgaggagctggagaccaaggccgtgggcatgagcaacgacggcagattcctgaagttcgacatcgagatcggcagaggcagcttcaagaccgtgtacaagggcctggacaccgagaccaccgtggaggtggcctggtgcgagctgcaggacagaaagctgaccaagagcgagagacagagattcaaggaggaggccgagatgctgaagggcctgcagcaccccaacatcgtgagattctacgacagctgggagagcaccgtgaagggcaagaagtgcatcgtgctggtgaccgagctgatgaccagcggcaccctgaagacctacctgaagagattcaaggtgatgaagatcaaggtgctgagaagctggtgcagacagatcctgaagggcctgcagttcctgcacaccagaaccccccccatcatccacagagacctgaagtgcgacaacatcttcatcaccggccccaccggcagcgtgaagatcggcgacctgggcctggccaccctgaagagagccagcttcgccaagagcgtgatcggcatgttccaggtgtacctgggcgcctag

SEQ ID NO: 313957 - DNA, 975 bp, Artificial Sequence
  derived and/or modified sequence
atgagcagcgacaacgagagcgacatcgaggacgaggacctgaagctggagctgagaagactgagagacaagcacctgaaggagatccaggacctgcagagcagacagaagcacgagatcgagagcctgtacaccaagctgggcaaggtgccccccgccgtgatcatcccccccgccgcccccctgagcggcagaagaagaagacccaccaagagcaagggcagcaagagcagcagaagcagcagcctgggcaacaagagcccccagctgagcggcaacctgagcggccagagcgccgccagcgtgctgcacccccagcagaccctgcacccccccggcaacatccccgagagcggccagaaccagctgctgcagcccctgaagcccagccccagcagcgacaacctgtacagcgccttcaccagcgacggcgccatcagcgtgcccagcctgagcgcccccggccagggcaccagcagcaccaacaccgtgggcgccaccgtgaacagccaggccgcccaggcccagccccccgccatgaccagcagcagaaagggcaccttcaccgacgacctgcacaagctggtggacaactgggccagagacgccatgaacctgagcggcagaagaggcagcaagggccacatgaactacgagggccccggcatggccagaaagttcagcgcccccggccagctgtgcatcagcatgaccagcaacctgggcggcagcgcccccatcagcgccgccagcgccaccagcctgggccacttcaccaagagcatgtgccccccccagcagtacggcttccccgccacccccttcggcgcccagtggagcggcaccggcggccccgccccccagcccctgggccagttccagcccgtgggcaccgccagcctgcagaacttcaacatcagcaacctgcagaagagcatcagcaacccccccggcagcaacctgagaaccacctag

SEQ ID NO: 313958 - DNA, 1182 bp, Artificial Sequence
  derived and/or modified sequence
atgagtggaggcgccgctgagaagcagtcctctacacccgggagcctcttccttagtccgcctgcccctgcccctaaaaatggttcatcttctgattcctctgtcggcgagaaacttggtgcagccgctgccgacgccgttacaggacggactgaggagtacagacggcgcagacataccatggacaaggactcgcggggggccgctgccaccaccacaaccaccgagcaccgttttttcaggcggagtgtgatctgcgactctaatgcaaccgccctggaattgcccggcctccccctaagcctcccacagccctcgattccagccgccgtcccccagtccgcacctcccgagccacatagagaagaaaccgtgacagctaccgcaacctcccaggtcgcccagcagccccctgcggcagctgctcccggcgagcaggcagtcgccggccctgccccttcaaccgtgccttcctctacttccaaggatagacccgtgagccaaccttcattggtcggtagcaaagaggaacctccacctgccaggagcggttctgggggcggctctgctaaagaacctcaggaggaaagaagccagcagcaggacgatattgaagaactcgaaaccaaggccgtcggaatgtcgaacgatggccgtttcctaaaatttgacatcgagattggaagggggtcatttaagactgtgtacaaaggtctggatacagagacgacagtcgaagtcgcgtggtgcgagcttcaggacagaaagctgacaaaaagtgagcgacagagatttaaggaagaggccgagatgctgaagggcctgcagcacccaaatatcgtcagattctacgattcctgggagtcaactgtcaaaggtaagaagtgcatcgttctggtcactgaactcatgacaagtggcactctcaagacttacctcaaaaggttcaaagttatgaagattaaagtccttcggtcctggtgcaggcaaatcctgaagggcctgcagtttctgcacactagaacaccacctatcattcatagggatctcaagtgcgataacattttcatcacaggccccaccggatccgttaaaatcggcgatttaggactggccacgttaaaaagagcctccttcgccaagtctgttatcgggatgttccaggtgtacctgggcgcctag

SEQ ID NO: 313959 - DNA, 975 bp, Artificial Sequence
  derived and/or modified sequence
atgtcttcagacaacgagagcgacattgaggatgaggatttgaagctggaactcagacgccttcgagataaacaccttaaagagatccaagacctccagagtaggcagaagcacgaaattgagagcctctatacaaagttaggcaaagtgccccccgcagtaattataccacctgctgcacccctctctggtagacgtcgtagacctaccaagtccaagggctcgaagtccagtcggagttcaagtcttggaaacaagtccccccagctgtcaggaaacctttctggacagtccgcggcctcggtcttacacccccaacagacccttcaccctcccggaaacatcccagaatctgggcaaaaccagttgctacagccacttaagccaagccccagctcagacaatctgtattctgcctttacatcagacggtgccatcagcgttccttctttatccgccccaggacagggcacaagtagcacaaacactgtgggggccactgtcaacagtcaggcagctcaagcccaacctccagccatgacctcttccaggaagggaacctttactgacgacctccacaagctcgtagataattgggccagagacgccatgaacttaagtggcaggagaggcagtaaaggccatatgaattacgagggaccagggatggctcggaagttttctgctccaggccagctgtgcattagcatgacctcaaatctcggcggatccgcgccaatcagcgcggcctcagcaacctcactgggccatttcactaagagtatgtgtccaccacagcagtatggattccctgctacacctttcggcgcacagtggagcggtaccgggggtcctgcaccccagcctctcggccagtttcagcccgtaggcaccgcatccctgcagaactttaacatcagcaacctccagaaaagcatctcgaacccacctggctccaacctacgcactacatag

SEQ ID NO: 313960 - DNA, 1182 bp, Artificial Sequence
  derived and/or modified sequence
atgtctgggggcgctgctgagaagcagagcagcaccccaggcagcctcttcctgagccccccagccccagcccccaagaatggcagcagcagtgacagctctgtgggggagaagctgggcgctgctgctgctgatgctgtgacaggccgcacagaggagtacagaagaagaagacacaccatggacaaggacagcagaggagctgctgccaccaccaccaccacagagcaccgcttcttcagaagaagtgtcatctgtgacagcaatgccacagccctggagctgcccggcctgcccctgagcctgccccagcccagcatcccagctgctgtgccccagagcgcccctcctgagccccaccgggaggagaccgtgacagccacagccaccagccaggtggcccagcagcccccagctgctgctgcccctggagagcaggccgtggccggccctgcccccagcacagtgcccagcagcaccagcaaggacaggcctgtgtcccagcccagcctggtgggcagcaaggaggagcccccaccagcccggagcggcagcggcggcggcagcgccaaggagccccaggaggagaggagccagcagcaggatgacatcgaggagctggagaccaaggctgtgggcatgagcaatgatggccgcttcctgaagtttgatattgaaattggccggggcagcttcaagacagtgtacaagggcctggacacagagaccaccgtggaggtggcctggtgtgagctgcaggacaggaagctgaccaagtctgagcggcagcgcttcaaggaggaggccgagatgctgaagggcctgcagcaccccaacatcgtgcgcttctatgacagctgggagagcacagtgaagggcaagaagtgcatcgtgctggtgacagagctgatgaccagcggcaccctgaagacctacctgaagcgcttcaaggtgatgaagatcaaggtgctgcgctcctggtgccggcagatcctgaagggcctgcagttcctgcacaccaggaccccacccatcatccaccgggacctgaagtgtgacaacatcttcatcaccggccccactggatctgtgaagatcggggacctgggcctggccaccctgaagagggccagctttgccaagagcgtcatcggcatgttccaggtgtacctgggcgcctag

SEQ ID NO: 313961 - DNA, 975 bp, Artificial Sequence
  derived and/or modified sequence
atgagcagtgacaatgaaagtgacattgaagatgaggacctgaagctggagctgcggcggctgcgggacaagcacctgaaggagatccaggacctgcagagccggcagaagcatgaaattgagagcctgtacaccaagctgggcaaggtgcccccagctgtgatcatccccccagctgcccccctgtctggaagaagaagaagacccaccaagagcaagggcagcaagagcagccgcagcagcagcctgggcaacaagagcccccagctgagcggcaacctgagcggccagagcgctgcctctgtgctgcacccccagcagaccctgcaccccccaggcaacatccctgagagcggccagaaccagctgctgcagcccctgaagcccagccccagcagtgacaacctgtacagcgccttcaccagtgatggagccatctctgtgcccagcctgagcgcccctggccagggcaccagcagcaccaacacagtgggcgccaccgtgaacagccaggccgcccaggcccagcccccagccatgaccagcagcaggaagggcaccttcacagatgacctgcacaagctggtggacaactgggccagagatgccatgaacctgtctggaagaagaggcagcaagggccacatgaactatgagggccctggcatggccaggaagttcagcgcccctggccagctgtgcatctccatgaccagcaacctgggcggcagcgcccccatctctgctgccagcgccaccagcctgggccacttcaccaagtccatgtgccccccccagcagtatggcttccctgccaccccatttggagcccagtggagcggcaccggcggccctgccccccagcccctgggccagttccagcctgtgggcacagccagcctgcagaacttcaacatcagcaacctgcagaagagcatcagcaaccccccaggcagcaacctgcggaccacctag

SEQ ID NO: 313962 - DNA, 1182 bp, Artificial Sequence
  derived and/or modified sequence
atgagcggcggcgccgccgagaagcagagcagcacccccggcagcctgttcctctctcctcctgcgccggcacccaagaacggctctagtagcgattcatctgtgggcgaaaagctaggagcggccgcagccgatgcagtaactggccgcactgaggagtacaggagacggaggcatacgatggataaggattcacgcggggcagctgctacaactacaactacggagcacaggttcttccggaggagtgtgatttgtgacagcaatgcaaccgccctcgaactcccgggcctgcccctgtctctgcctcagccaagcataccagccgctgttcctcaatcagctccccctgagccccatagagaggaaaccgtaacagcaactgccaccagtcaagttgctcagcagccgccagccgctgccgcccctggggagcaggcggtggccggcccagccccatctactgtgccgtcttccacgagcaaggatcgtcccgtgagccagccctctctggtgggatcaaaggaggaaccacctccagccagatcaggttcaggcgggggatcagctaaagaacctcaggaggagagatctcagcaacaagacgacattgaggaacttgagactaaggctgtgggaatgtctaacgacggacgctttctgaaattcgacattgagattggccgcggctcgttcaaaacagtgtacaaagggttggacacagaaactacggttgaagtggcgtggtgtgagctgcaggatagaaagctgaccaagagtgagcgccagcgattcaaggaagaggccgagatgctcaaggggcttcagcacccaaacattgttagattttacgattcatgggaaagtaccgtgaaaggcaaaaaatgtattgtgcttgtgaccgaactcatgacgtctgggacactcaagacgtatctcaagcggttcaaggtgatgaaaatcaaggtgcttagatcttggtgtaggcagatacttaaaggcttgcagtttctccacacgcgtactcccccaattatccaccgggatctgaagtgtgataacatttttatcaccggcccaacaggatccgtcaaaatcggggacttggggctggctaccctcaagcgcgcatcattcgccaaatctgtcattgggatgttccaggtgtacctgggtgcttag

SEQ ID NO: 313963 - DNA, 975 bp, Artificial Sequence
  derived and/or modified sequence
atgagcagcgacaacgagagcgacatcgaggacgaggacctgaagctggaactgagaaggctgcgcgataagcatctgaaagaaattcaagatctccagtccaggcagaagcatgagatcgaatctctgtacaccaagctcggcaaagtgcctccagcggtgattattcccccagccgcccccctgtctggaaggagaagacgtcctaccaaatctaagggctccaaatcttctcggagctcctctctggggaacaagtctccacagctgagtggcaacctatcaggtcagagtgctgcctccgttctgcacccacagcaaacactccaccccccggggaacattcccgagagcggccagaatcaactccttcaaccactgaaaccaagcccatctagcgataatttgtacagcgctttcacgagtgacggagccatctcagttccttctttgtcagctcctgggcaaggaacatctagcacaaataccgtgggcgccaccgtaaacagccaagccgcccaggcccagcccccggctatgacaagctccagaaagggcacctttaccgatgatcttcataaactggtggataactgggccagagatgcgatgaatctatctggtcgccggggctctaaggggcatatgaattacgagggtcctggtatggcacggaagttttccgctcctggacagctgtgcatctccatgacaagcaacctcggaggcagcgcgccaatatctgcagcctcagcaacctctttgggccactttacaaagtccatgtgccctcctcaacagtatggattccccgctaccccattcggggcccagtggagtggtacaggaggccccgctccacagcccctgggacagtttcaacccgtcggtaccgcttcccttcagaactttaatataagcaacctccaaaaaagcatcagcaaccctccgggcagtaatttgagaactacatag

SEQ ID NO: 313964 - DNA, 1182 bp, Artificial Sequence
  derived and/or modified sequence
atgtccggcggtgctgctgagaagcagagcagcacgccaggcagcctcttcttgagccctcccgcacccgctccaaaaaacggttcgtcaagcgatagctctgtgggcgagaagctgggagctgcagccgctgacgccgtgactggtcgaaccgaagagtacagaaggagacggcacaccatggacaaggacagcaggggggcagctgccacaacaaccactaccgaacaccgcttctttaggaggagcgtgatctgcgacagtaatgcaaccgccctggagctcccaggactgccactgagtttaccccagccgtcgatcccggcagcagtgccccagagtgccccaccagagcctcatcgcgaggaaacggtcaccgcaacagccaccagccaggtcgcgcagcagcccccagcagccgctgcaccaggcgagcaggcggtggcagggcctgcacccagcacagttcctagttctacctccaaagataggcctgtgtcgcagccaagtctcgtgggctccaaggaagagccccctcccgcacgtagcgggagtggtggcggaagcgctaaggaaccccaggaagagaggtcacagcagcaggacgacattgaggagctggaaacaaaggctgtgggtatgagcaatgatggaagatttctcaaatttgatattgagatcggacggggaagttttaaaactgtgtacaaggggctggacaccgagactacagttgaggtagcttggtgtgaactgcaggaccgaaagctcactaaaagcgaaaggcaacggtttaaggaggaggctgaaatgcttaagggcctgcagcacccgaatatagttcggttttacgattcgtgggaatccaccgtcaaaggcaagaaatgcattgtgctggtaacagagttgatgacctcaggaacactaaaaacttatctgaagcgatttaaagtgatgaagattaaggtgctgaggtcatggtgtagacagatccttaaggggcttcagttccttcatacgaggaccccgcctattattcacagggatttaaagtgtgataacatcttcatcactggtccaactggatctgtaaaaatcggagatctgggactcgccaccctcaaaagggccagcttcgcaaagagcgtgattggcatgttccaagtgtatctgggggcatag

SEQ ID NO: 313965 - DNA, 975 bp, Artificial Sequence
  derived and/or modified sequence
atgtcgagtgacaacgaatccgacattgaggatgaagacctaaaattggaactgcgcaggcttcgggataagcatctgaaagagatccaggacctgcagagccgccaaaagcacgagattgaatctctgtacacgaaactcggcaaggtcccaccagctgtgattattcctcctgctgctcccctctcagggagaagacgacggccaaccaaatcaaagggctcaaaatcctctagaagctcaagcttgggaaataagagtccgcaactctcgggcaatctcagtggacaaagcgcggcaagtgttctgcatcctcagcagacgctgcacccccctggtaatatccccgaatcaggccagaaccagcttctgcaaccactgaagccatcgccatctagcgataacctctactctgcatttacctccgacggcgcaatttccgtgccttccttatccgcaccaggacaagggaccagcagcacaaacacggtaggcgctaccgtcaactcacaagccgctcaagctcagccaccagccatgacatccagtcgtaagggtacattcacagacgatcttcacaaactagtcgacaactgggcgagggacgcgatgaatctgagtggccgtcgtggttcaaaaggccatatgaactatgaaggcccaggaatggcgaggaagtttagcgcaccaggtcagctctgcatcagcatgacatctaacctgggcggaagcgcacccattagcgccgcatcggcgacttctcttggacacttcaccaagtcaatgtgccctcctcagcagtacgggtttccagcaactccctttggagctcagtggtctggaaccggaggtccagcgccacaacccctcggtcagtttcagccagtcgggaccgcttccctccagaatttcaacatcagcaatctgcagaagtcgatctccaaccctccaggaagcaacctcaggaccacatag

SEQ ID NO: 313966 - DNA, 1902 bp, Artificial Sequence
  derived and/or modified sequence
ccactcctctgccccggggccgccaccgcccgggcgtcggacctggtcccgtgctcgcggtgccgccgccctctgggcctagcccgcccagctcggcgagcggcggcagtgggagccgcgtccgccgcatccgcctcgactcggtgccggcccctggccctcccctcatgactgcggcgcctctgctgccaccgcccgcccggccgccgctcgccgcaggatggatgcggaccgtgcggcgctaacccccgtggctcagctcccgaatcgcccgccttcgagccctcctcgtgagccgcagcagcctcggtgccagcccccgccgcagctgggcccagcggtccgcctgtccctcgttgcggcttgtcggtgctgagtgaggcgtcgtccgggtcggcgcgaacccgcccggccgcggttccctgcagacctctgcgcgggcggctcggcccttcacgcccttttcgttcacgaatccgagcccgctcgcctctctccagcgaaccgaccatgtctggcggcgccgcagagaagcagagcagcactcccggttccctgttcctctcgccgccggctcctgcccccaagaatggctccagctccgattcctccgtgggggagaaactgggagccgcggccgccgacgctgtgaccggcaggaccgaggagtacaggcgccgccgccacactatggacaaggacagccgtggggcggccgcgaccactaccaccactgagcaccgcttcttccgccggagcgtcatctgtgactccaatgccactgcactggagcttcccggccttcctctttccctgccccagcccagcatccccgcggctgtcccgcagagtgctccaccggagccccaccgggaagagaccgtgaccgccaccgccacttcccaggtagcccagcagcctccagccgctgccgcccctggggaacaggccgtcgcgggccctgccccctcgactgtccccagcagtaccagcaaagaccgcccagtgtcccagcctagccttgtggggagcaaagaggagccgccgccggcgagaagtggcagcggcggcggcagcgccaaggagccacaggaggaacggagccagcagcaggatgatatcgaagagctggagaccaaggccgtgggaatgtctaacgatggccgctttctcaagtttgacatcgaaatcggcagaggctcctttaagacggtctacaaaggtctggacactgaaaccaccgtggaagtcgcctggtgtgaactgcaggatcgaaaattaacaaagtctgagaggcagagatttaaagaagaagctgaaatgttaaaaggtcttcagcatcccaatattgttagattttatgattcctgggaatccacagtaaaaggaaagaagtgcattgttttggtgactgaacttatgacgtctggaacacttaaaacgtatctgaaaaggtttaaagtgatgaagatcaaagttctaagaagctggtgccgtcagatccttaaaggtcttcagtttcttcatactcgaactccacctatcattcaccgcgatcttaaatgtgacaacatctttatcaccggccctactggctcagtcaagattggagacctcggtctggcaaccctgaagcgggcttcttttgccaagagtgtgataggtatgtttcaggtgtaccttggagcctgactggctttctcacattccttttatttagaatcctggctctgtcagagttttaagtgatataaaccttaagaaattcatagcttgaactcaggaggtgatccattgtacttatgagatataggattctctatatttgtgcttcttggaatcatcttagagactattggtaacattacgttacaagaaataaagtgaactttgttgataaaa

SEQ ID NO: 313967 - DNA, 441 bp, Artificial Sequence
  derived and/or modified sequence
atggacggcaaggtggccgtgcaggagtgcggcccccccgccgtgagctgggtgcccgaggagggcgagaagctggaccaggaggacgaggaccaggtgaaggacagaggccagtggaccaacaagatggagttcgtgctgagcgtggccggcgagatcatcggcctgggcaacgtgtggagattcccctacctgtgctacaagaacggcggcggcgccttcttcatcccctacttcatcttcttcttcgtgtgcggcatccccgtgttcttcctggaggtggccctgggccagtacaccagccagggcagcgtgaccgcctggagaaagatctgccccctgttccagggcatcggcctggccagcgtggtgatcgagagctacctgaacgtgtactacatcatcatcctggcctgggccctgttctacctgttcagctag

SEQ ID NO: 313968 - DNA, 441 bp, Artificial Sequence
  derived and/or modified sequence
atggacggaaaagtggcagttcaggagtgcggtccacctgcagtctcctgggtgcccgaggagggtgagaagctcgaccaggaggacgaggaccaggtaaaggatcggggccagtggactaacaaaatggagtttgtgctgtccgtggcaggtgagatcataggtctcgggaatgtctggcggtttccgtatctgtgctacaagaacggtggtggggcattttttattccatattttatctttttcttcgtatgcgggattcccgtgttctttctcgaagtggccctcggccaatacacaagccaggggtctgtgaccgcttggaggaagatttgtcccctattccaaggcattggcttggcaagcgtagtgatcgaatcctatttaaatgtctactacatcataatactggcctgggcccttttctacttgttttcttag

SEQ ID NO: 313969 - DNA, 441 bp, Artificial Sequence
  derived and/or modified sequence
atggatggcaaggtggccgtgcaggagtgtggccccccagctgtgtcctgggtgcctgaggagggggagaagctggaccaggaggatgaggaccaggtgaaggaccggggccagtggaccaacaagatggagtttgtgctgtctgtggccggggagatcatcggcctgggcaatgtgtggaggttcccctacctgtgctacaagaatggaggaggagccttcttcatcccctacttcatcttcttctttgtgtgtggcatccctgtgttcttcctggaggtggccctgggccagtacaccagccagggctctgtgacagcctggaggaagatctgccccctcttccagggcatcggcctggcctctgtggtgattgagagctacctgaatgtgtactacatcatcatcctggcctgggccctcttctacctgttctcctag

SEQ ID NO: 313970 - DNA, 441 bp, Artificial Sequence
  derived and/or modified sequence
atggacggcaaggtggccgtgcaggagtgcggcccccccgccgtgtcttgggtgccagaggaaggagagaaattggatcaagaggacgaggaccaggtcaaggatcggggacagtggaccaataaaatggaattcgtgctcagtgttgccggggagattattgggttagggaatgtctggaggtttccttacctgtgttacaaaaatggcggcggagcattctttattccgtatttcatctttttctttgtctgtgggatccccgtcttctttctggaagtggccctaggccagtatacttcccagggctccgtgaccgcctggagaaaaatctgcccactctttcaagggattggcctggcgtctgtggttattgagtcctatctgaacgtgtactacattattatcttggcttgggctcttttttatttatttagctag

SEQ ID NO: 313971 - DNA, 441 bp, Artificial Sequence
  derived and/or modified sequence
atggacggcaaagtcgctgtccaggagtgtggaccaccagcggtgtcttgggtcccagaagagggcgagaaattggaccaggaagatgaggatcaagttaaagacagggggcaatggacgaacaaaatggaattcgtgctgagcgtggctggagagatcatcggtctgggcaacgtctggcgcttcccttatctgtgttacaaaaatgggggaggagcattttttataccatacttcatcttcttctttgtgtgcggaattccagtgttttttctcgaagtggccttggggcagtacacgagtcagggctctgtgaccgcttggagaaaaatctgtccattgttccagggcataggcctcgctagcgtagtcatcgaatcctatcttaatgtctactacattataatcctggcctgggcgctgttctatctcttttcttag

SEQ ID NO: 313972 - DNA, 577 bp, Artificial Sequence
  derived and/or modified sequence
atccctgtttctctagagccttggaggagcgtggggcacttggtagacctggtcgctttgattccctcaatacccctcagaggctttggccctcgtcatcctgcccacccagcggggcttcccaacccaccacacagccatggacgggaaggtggcagtgcaagagtgtgggcctcctgcagtctcctgggtccccgaggagggagagaagttggaccaggaagacgaggaccaggtgaaggatcggggccaatggaccaacaagatggagtttgtgctgtcagtggccggggagatcattgggctgggcaatgtctggaggtttccctatctctgctacaaaaacggaggtggagccttcttcatcccctacttcatcttcttctttgtctgcggcatcccggtgttcttcctggaggtggcgttgggccaatacaccagccaagggagtgtcacagcctggaggaagatctgccccctcttccagggcattggtctggcatctgtggtcatcgagtcatatttgaatgtctactacatcatcatccttgcctgggctctcttctacctgttcagc

SEQ ID NO: 313973 - protein, 2209 aa, Artificial Sequence
  derived and/or modified sequence
MVNENTRMYIPEENHQGSNYGSPRPAHANMNANAAAGLAPEHIPTPGAALSWQAAIDAARQAKLMGSAGNATISTVSSTQRKRQQYGKPKKQGSTTATRPPRALLCLTLKNPIRRACISIVEWKPFEIIILLTIFANCVALAIYIPFPEDDSNATNSNLERVEYLFLIIFTVEAFLKVIAYGLLFHPNAYLRNGWNLLDFIIVVVGLFSAILEQATKADGANALGGKGAGFDVKALRAFRVLRPLRLVSGVPSLQVVLNSIIKAMVPLLHIALLVLFVIIIYAIIGLELFMGKMHKTCYNQEGIADVPAEDDPSPCALETGHGRQCQNGTVCKPGWDGPKHGITNFDNFAFAMLTVFQCITMEGWTDVLYWMQDAMGYELPWVYFVSLVIFGSFFVLNLVLGVLSGEFSKEREKAKARGDFQKLREKQQLEEDLKGYLDWITQAEDIDPENEDEGMDEEKPRNMSMPTSETESVNTENVAGGDIEGENCGARLAHRISKSKFSRYWRRWNRFCRRKCRAAVKSNVFYWLVIFLVFLNTLTIASEHYNQPNWLTEVQDTANKALLALFTAEMLLKMYSLGLQAYFVSLFNRFDCFVVCGGILETILVETKIMSPLGISVLRCVRLLRIFKITRYWNSLSNLVASLLNSVRSIASLLLLLFLFIIIFSLLGMQLFGGKFNFDEMQTRRSTFDNFPQSLLTVFQILTGEDWNSVMYDGIMAYGGPSFPGMLVCIYFIILFICGNYILLNVFLAIAVDNLADAESLTSAQKEEEEEKERKKLARTASPEKKQELVEKPAVGESKEEKIELKSITADGESPPATKINMDDLQPNENEDKSPYPNPETTGEEDEEEPEMPVGPRPRPLSELHLKEKAVPMPEASAFFIFSSNNRFRLQCHRIVNDTIFTNLILFFILLSSISLAAEDPVQHTSFRNHILFYFDIVFTTIFTIEIALKMTAYGAFLHKGSFCRNYFNILDLLVVSVSLISFGIQSSAINVVKILRVLRVLRPLRAINRAKGLKHVVQCVFVAIRTIGNIVIVTTLLQFMFACIGVQLFKGKLYTCSDSSKQTEAECKGNYITYKDGEVDHPIIQPRSWENSKFDFDNVLAAMMALFTVSTFEGWPELLYRSIDSHTEDKGPIYNYRVEISIFFIIYIIIIAFFMMNIFVGFVIVTFQEQGEQEYKNCELDKNQRQCVEYALKARPLRRYIPKNQHQYKVWYVVNSTYFEYLMFVLILLNTICLAMQHYGQSCLFKIAMNILNMLFTGLFTVEMILKLIAFKPKGYFSDPWNVFDFLIVIGSIIDVILSETNPAEHTQCSPSMNAEENSRISITFFRLFRVMRLVKLLSRGEGIRTLLWTFIKSFQALPYVALLIVMLFFIYAVIGMQVFGKIALNDTTEINRNNNFQTFPQAVLLLFRCATGEAWQDIMLACMPGKKCAPESEPSNSTEGETPCGSSFAVFYFISFYMLCAFLIINLFVAVIMDNFDYLTRDWSILGPHHLDEFKRIWAEYDPEAKGRIKHLDVVTLLRRIQPPLGFGKLCPHRVACKRLVSMNMPLNSDGTVMFNATLFALVRTALRIKTEGNLEQANEELRAIIKKIWKRTSMKLLDQVVPPAGDDEVTVGKFYATFLIQEYFRKFKKRKEQGLVGKPSQRNALSLQAGLRTLHDIGPEIRRAISGDLTAEEELDKAMKEAVSAASEDDIFRRAGGLFGNHVSYYQSDGRSAFPQTFTTQRPLHINKAGSSQGDTESPSHEKLVDSTFTPSSYSSTGSNANINNANNTALGRLPRPAGYPSTVSTVEGHGPPLSPAIRVQEVAWKLSSNRMHCCDMLDGGTFPPALGPRRAPPCLHQQLQGSLAGLREDTPCIVPGHASLCCSSRVGEWLPAGCTAPQHARCHSRESQAAMAGQEETSQDETYEVKMNHDTEACSEPSLLSTEMLSYQDDENRQLTLPEEDKRDIRQSPKRGFLRSASLGRRASFHLECLKRQKDRGGDISQKTVLPLHLVHHQALAVAGLSPLLQRSHSPASFPRPFATPPATPGSRGWPPQPVPTLRLEGVESSEKLNSSFPSIHCGSWAETTPGGGGSSAARRVRPVSLMVPSQAGAPGRQFHGSASSLVEAVLISEGLGQFAQDPKFIEVTTQELADACDMTIEEMESAADNILSGGAPQSPNGALLPFVNCRDAGQDRAGGEEDAGCVRARGRPSEEELQDSRVYVSSL

SEQ ID NO: 313974 - DNA, 88 bp, Artificial Sequence
  derived and/or modified sequence
ggacaaattgctagaaataaacaaattaccaaaaatgattcaagtagagacagagaatcaaaatagaactacacataagtgggccaag

SEQ ID NO: 313975 - DNA, 6630 bp, Artificial Sequence
  derived and/or modified sequence
atggtcaacgaaaacacccgaatgtacattcctgaagagaatcatcagggatcaaattacggaagccctagacctgcgcatgccaacatgaatgccaatgctgcagctggccttgcacccgaacacattcccacacccggagccgctttgtcctggcaggcggccatcgacgcggcccgccaggcgaagctgatgggcagcgctggcaatgctaccatctctaccgtgtcatcaactcaacgtaagcgtcagcagtatggcaaaccaaagaagcagggtagcactactgccacgcgcccacctagggctcttctatgcttaacgttaaagaacccaattcgcagggcgtgcatttctattgtcgagtggaagccatttgagattatcatactcctcacaatcttcgctaattgcgtagcgcttgcgatttacattccttttccagaagacgattccaacgctaccaattcaaacctagagagggtcgagtacttatttctgataatttttacagtggaagcatttttgaaagtgattgcgtatggactgctattccatccgaatgcctacctgcgtaacggctggaacctcctggactttatcatagtcgttgtcggactgttcagtgccattttggaacaggctaccaaggccgacggggccaatgcacttggcggtaagggagccggctttgatgtgaaggcattgagggccttcagggtgctgagaccactgcgcttggtgagtggagttccttctttacaagtcgtcctcaattccatcattaaggctatggttccgctgcttcacattgctcttctggttctgtttgtcatcatcatttatgctatcatcgggcttgagctgtttatgggaaagatgcataagacatgctataatcaagaaggcattgctgatgtcccagctgaggatgaccccagcccttgcgcacttgagacaggccacggaaggcagtgtcagaacggcaccgtctgtaagccgggttgggatggacccaagcacggaatcacaaacttcgataattttgcatttgcaatgctgaccgtcttccagtgtatcacaatggaagggtggacagacgtgttatactggatgcaggatgcaatggggtacgaactgccatgggtgtacttcgtatcccttgtcatctttgggagctttttcgtactgaacctggtgttgggagtcttgtccggggaattttcgaaagaacgggaaaaggcaaaggcccgaggagatttccaaaagctcagagaaaagcagcagcttgaagaggacctaaagggttacctggactggatcacccaggcagaggatattgaccccgaaaatgaggatgagggcatggacgaggagaaaccaaggaatatgtctatgcctactagcgagaccgagagcgtgaacactgagaacgtggccggcggcgatattgaaggagaaaattgtggcgccaggctggctcaccggatttccaagtccaagtttagtcgctactggaggcggtggaatcggttctgccgcaggaaatgcagagccgcagttaagtcaaacgtgttttattggttagtcatttttcttgtgtttctgaacacactcacgatcgcatctgagcattataatcaaccaaactggctgacagaggtccaagacaccgcaaataaggccctgctagctctgtttactgccgagatgctgctgaaaatgtacagcctcggtcttcaggcctatttcgtgtctctgttcaaccggtttgactgcttcgtggtatgtggtggcattctggagaccattctggtggaaacaaaaattatgagtcccctaggcattagcgtgttaagatgtgttagactgttgaggatcttcaagattacccgctattggaattcgctgagtaatcttgtggcctctctgctcaactcggtgagatcaatcgcgtccctcctgcttctcctgtttctcttcataatcatcttcagcctccttgggatgcagctattcggcggaaagttcaactttgatgaaatgcagacccggcgctccacgttcgataatttccctcagagtttgttaaccgtgttccaaatcctgacaggagaggactggaacagcgtgatgtatgatggaatcatggcatacggcggcccatcttttccaggtatgctggtgtgcatctacttcatcatactgtttatttgtggaaactacatactacttaacgttttcctggctattgccgtcgacaatcttgctgatgcggaatccctgacatctgcccagaaggaagaagaggaggagaaagagagaaagaaactagcccggactgctagcccagaaaaaaagcaggaactagtcgaaaaaccagcagtcggagaatctaaggaggaaaaaatcgaactcaagtcaattaccgcagatggggaaagtccccctgctacaaaaatcaacatggatgacctgcagcccaacgaaaacgaggataagtctccataccccaatccagaaactactggtgaggaggatgaggaagaaccggaaatgccggtgggtcctagaccaaggcccctctcggaactccatctcaaggaaaaagccgtgcccatgcccgaagcatcggccttcttcatctttagcagtaataaccgatttcggctccagtgccatagaatagtgaacgatacgattttcactaacctaattcttttctttatcttgctgtcttccatctctctagccgccgaagaccctgtccagcacacctcatttcggaatcatattctgttttatttcgatatcgtgtttaccacaattttcaccatcgagatcgccctgaagatgactgcatatggcgcattcctacacaaagggagtttttgccggaattacttcaacatcctggaccttctcgtagttagtgtgagtttgatatcctttggcatccagagctctgctattaacgtggtgaaaattctcagggtgctccgcgtgctgcggcctcttagggctattaacagagcgaagggccttaagcatgtggttcagtgcgtttttgttgcgatccgcacaatcggtaacatcgttatcgtaacaaccctactacagtttatgtttgcttgcataggcgttcagctgttcaagggcaagctttacacatgcagtgacagcagcaagcaaacggaggcagagtgcaagggcaattatatcacatacaaagacggcgaggtggaccatcctattatccagcctaggtcctgggagaatagtaaattcgacttcgataatgtcctggccgctatgatggcccttttcacagtaagtacatttgaaggctggcccgaactgctgtatcgttccatcgactcccatactgaagataagggcccaatttacaactatagagtcgaaatttccatcttcttcatcatttacatcatcatcatcgccttctttatgatgaacatctttgtcggctttgtaattgtgacatttcaggaacagggtgagcaggagtacaagaattgcgagctcgataagaatcagcgccagtgcgtagagtacgcattgaaggccaggcccctaagacgatacatacctaagaaccagcatcagtataaggtctggtacgtggtgaattcaacttacttcgagtacctgatgtttgtgctcatactgcttaacaccatttgcctggctatgcaacactatggccagagctgcctgttcaagattgctatgaacattctgaatatgctgtttacaggtctgtttactgtggaaatgattttgaagcttatcgcatttaaacccaagggctatttctccgatccgtggaatgtgttcgatttcctcatcgtaatcggctccattattgacgtgatcttgtccgagaccaacccagccgagcatactcagtgctcccctagcatgaacgctgaggaaaattctcgtatttctattactttctttcgcttgttccgagtaatgagattggtcaaacttttgtcgaggggtgagggaattcggacactgctgtggactttcatcaagtcctttcaagccctgccatatgttgccctgctcatcgtgatgctattttttatttacgcagtgattggtatgcaggtgtttggaaagatcgctcttaatgataccacagagattaaccggaataataactttcagacctttccgcaggccgtattactgctgtttcggtgcgcgactggcgaggcttggcaggacattatgctcgcatgcatgcctggaaaaaaatgcgcccctgaatccgaaccttctaactcgactgagggcgaaaccccctgcgggtcatctttcgccgtgttttactttatatcgttttatatgctatgcgcgtttctcatcatcaacctgttcgttgcagtcataatggataacttcgactatctcaccagagattggtctatcctaggccctcatcatttggacgagtttaagaggatctgggcagaatacgaccctgaggcaaaaggacgcattaagcacctggatgttgttaccctactgcgacgaatccagcctccccttggctttggcaaactgtgtccccacagggttgcttgcaagcgtctggtgtcaatgaatatgcccttgaacagtgacggtacagtgatgtttaatgcaacgctgtttgctctcgtaagaactgccctccggattaaaaccgaaggtaacctggaacaggcaaatgaggaactccgggccataattaagaaaatctggaagcgcacctcaatgaaacttttggatcaggttgtgccacctgcgggtgacgacgaggtaaccgtggggaaattttacgccaccttcttgattcaggaatacttccgcaaatttaagaagcgcaaagagcagggtctggtgggcaagccatcccagcgcaacgcgctgagcctgcaggcagggcttcggacactccatgatattggaccagaaatcagacgcgcaatcagcggggacctgactgccgaagaggaactggataaggctatgaaagaagctgtgtccgcagcttctgaggatgacatatttagacgggccggtgggttgtttggcaatcatgtgtcctattatcagagtgatggccgctcagccttcccacagacatttactacgcagagacccctccatatcaacaaggcgggcagctcccaaggcgacaccgagagtccctctcacgaaaagctggtggatagtactttcactccttcatcctactcgagcacagggagcaatgcaaacataaataatgctaataacaccgcccttggtcgccttcccaggcccgctggataccccagcaccgtatccacagtagaggggcacggtcctcctttaagtccggctatccgtgtacaggaagtggcctggaagctttcgtccaacagaatgcattgctgcgatatgctggatggcgggacctttcctccagccctgggcccccgcagagcacccccctgcttacaccagcagttgcagggatcattagctggcctgcgcgaagataccccatgcatcgtccccgggcacgcaagtctgtgttgctcatctcgggtgggggagtggctgcctgcaggatgcactgctcctcagcacgcaaggtgtcacagtcgcgagagccaggccgctatggcaggtcaggaggagacaagccaggacgaaacctacgaagtgaagatgaatcacgatacagaggcttgttccgaaccatctcttttgagcacagagatgttgtcctatcaggacgatgaaaataggcagctcaccctgccagaggaggacaagagggacatccgccagagcccaaagcgcggctttctgaggagcgcttccctgggcaggcgcgccagctttcacctagaatgccttaaacgccagaaagaccggggcggcgatattagccaaaaaactgtcctgcctctccatctagttcatcatcaggctctggctgtagctggactgagtcccctgctccagcgcagtcactctccagcctcctttccccgtccttttgccacgcccccggcgaccccaggttcccgtggctggcctccccagcctgtgcctacattgcgcctggagggcgtggagtcttcggagaagctgaacagcagcttcccctctatccattgcggctcatgggctgagacaacaccgggggggggaggctcctcagctgctcggagagttcggccagtgagtctgatggtcccgagtcaggccggtgcacctggccgccagttccacggatccgcttcatctctggtggaggcagtgctgattagcgagggcttaggtcagttcgctcaagatccgaagttcattgaagttaccacgcaggaactcgccgacgcttgcgacatgaccattgaagagatggagagtgctgccgacaacattcttagtggaggcgctcctcagtcgcccaacggagcactgctgcccttcgtgaattgtagagacgcagggcaagatagagcaggcggcgaagaggacgcaggatgtgtgcgagctcgcggacgaccctctgaagaagagctccaggactctcgagtgtacgtgtcctccctttag

SEQ ID NO: 313976 - DNA, 6630 bp, Artificial Sequence
  derived and/or modified sequence
atggtgaatgaaaacaccaggatgtacatccctgaggagaaccaccagggcagcaactacggcagccccaggcctgcccacgccaacatgaatgccaatgctgctgctggcctggcccctgagcacatccccacccctggggccgccctgtcctggcaggccgccattgatgctgcccggcaggccaagctgatgggcagcgctggaaatgccaccatcagcacagtgagcagcacccagaggaagaggcagcagtatggcaagcccaagaagcagggcagcaccacagccacccggcccccccgggccctgctgtgcctgaccctgaagaaccccatccggcgggcctgcatcagcatcgtggagtggaagccctttgagatcatcatcctgctgaccatctttgccaactgtgtggccctggccatctacatccccttcccagaagatgacagcaatgccaccaacagcaacctggagcgggtggagtacctgttcctgatcatcttcaccgtggaggccttcctgaaggtgattgcctacggcctgctcttccaccccaatgcctacctgagaaatggctggaacctgctggacttcatcatcgtggtggtgggcctcttcagcgccatcctggagcaggccaccaaggcagatggagccaatgccctgggcggcaaaggagctggctttgatgtgaaggccctgcgggccttccgggtgctgcggcccctgcggctggtgtctggagtgcccagcctgcaggtggtgctgaacagcatcatcaaggccatggtgcccctgctgcacatcgccctgctggtgctgtttgtgatcatcatctatgccatcatcggcctggagctgttcatgggcaagatgcacaagacctgctacaaccaggagggcattgctgatgtgcctgcagaagatgaccccagcccctgtgccctggagaccggccacggccggcagtgccagaatggcaccgtgtgcaagccaggctgggatggccccaagcacggcatcaccaactttgacaactttgcctttgccatgctgactgtgttccagtgcatcaccatggagggctggacagatgtgctgtactggatgcaggatgccatgggctatgagctgccctgggtgtactttgtgtccctggtgatcttcggcagcttctttgtgctgaacctggtgctgggcgtgctgtctggagagttcagcaaggagcgggagaaggccaaggcccggggggacttccagaagctgcgggagaagcagcagctggaggaggacctgaagggctacctggactggatcacccaggctgaagatattgatcctgaaaatgaagatgagggcatggatgaggagaagcccaggaacatgtccatgcccaccagcgagacagaatctgtgaacacagaaaatgtggccggcggggacatcgagggggagaactgtggggcccggctggcccaccgcatcagcaagagcaagttcagccgctactggaggcgctggaaccgcttctgcaggaggaagtgcagagctgctgtgaagagcaatgtgttctactggctggtgatcttcctggtgttcctgaacaccctgaccatcgccagcgagcactacaaccagcccaactggctgacagaggtgcaggacacagccaacaaggccctgctggccctcttcaccgctgagatgctgctgaagatgtacagcctgggcctgcaggcctactttgtgtccctcttcaacagatttgactgctttgtggtgtgtggcggcatcctggagaccatcctggtggagaccaagatcatgagccccctgggcatctctgtgctgcgctgtgtgcggctgctgcgcatcttcaagatcacccgctactggaacagcctgagcaacctggtggccagcctgctgaacagcgtgcgcagcatcgccagcctgctgctgctgctcttcctgttcatcatcatcttcagcctgctgggcatgcagctgtttggaggcaagttcaactttgatgagatgcagaccaggaggagcacctttgacaacttcccccagagcctgctgaccgtcttccagatcctgaccggggaggactggaacagcgtgatgtatgatggcatcatggcctatggaggccccagcttccctggcatgctggtgtgcatctacttcatcatcctcttcatctgtggcaactacatcctgctgaatgtgttcctggccatcgctgtggacaacctggctgatgctgagagcctgaccagcgcccagaaggaggaggaggaggagaaggagaggaagaagctggccaggacagccagccctgagaagaagcaggagctggtggagaagccagctgtgggggagagcaaggaggagaagattgagctgaagagcatcacagcagatggagagagccccccagccaccaagatcaacatggatgacctgcagcccaatgaaaatgaagacaagagcccctaccccaaccctgagaccactggagaggaggatgaggaggagcctgagatgcctgtgggcccccggccccggcccctgtctgagctgcacctgaaggagaaggctgtgcccatgcctgaggccagcgccttcttcatcttcagcagcaacaaccgcttccggctgcagtgccaccgcatcgtgaatgacaccatcttcaccaacctgatcctcttcttcatcctgctgagcagcatcagcctggccgctgaggaccctgtgcagcacaccagcttcaggaaccacatcctcttctactttgacatcgtgttcaccaccatcttcaccatcgagatcgccctgaagatgacagcctatggagccttcctgcacaagggcagcttctgcaggaactacttcaacatcctggacctgctggtggtgtctgtgtccctcatcagctttggcatccagagcagcgccatcaacgtggtgaagatcctgcgggtgctgcgggtgctgcggcccctgcgggccatcaacagagccaagggcctgaagcacgtggtgcagtgtgtgtttgtggccatccgcaccatcggcaacatcgtcatcgtgaccaccctgctgcagttcatgtttgcctgcatcggcgtgcagctgttcaagggcaagctgtacacctgcagcgacagcagcaagcagacagaagctgagtgcaagggcaactacatcacctacaaggatggagaggtggaccaccccatcatccagcccaggtcctgggagaacagcaagtttgattttgacaacgtgctggccgccatgatggccctcttcaccgtgtccacctttgagggctggccagagctgctgtaccgcagcattgacagccacacagaggacaagggccccatctacaactacagagtggagatcagcatcttcttcatcatctacatcatcatcatcgccttcttcatgatgaacatctttgtgggcttcgtcatcgtgaccttccaggagcagggcgagcaggagtacaagaactgtgagctggacaagaaccagaggcagtgtgtggagtatgccctgaaggcccggcccctgcggcgctacatccccaagaaccagcaccagtacaaggtgtggtacgtggtgaacagcacctactttgagtacctgatgtttgtgctgatcctgctgaacaccatctgcctggccatgcagcactacggccagagctgcctcttcaagatcgccatgaacatcctgaacatgctgttcaccggcctcttcaccgtggagatgatcctgaagctgattgccttcaagcccaagggctacttcagtgacccctggaatgtgtttgacttcctgattgtcatcggcagcatcattgatgtgatcctgtctgagaccaacccagctgagcacacccagtgcagccccagcatgaatgctgaggagaacagccgcatcagcatcaccttcttccgcctcttccgggtgatgaggctggtgaagctgctgagcagaggagagggcatccgcaccctgctgtggaccttcatcaagagcttccaggccctgccctacgtggccctgctgattgtgatgctgttcttcatctatgctgtgattggcatgcaggtgtttgggaagatcgccctgaatgacaccacagagatcaacagaaacaacaacttccagaccttcccccaggccgtgctgctgctcttccgctgtgccaccggggaggcctggcaggacatcatgctggcctgcatgcctgggaagaagtgtgcccctgagagcgagcccagcaacagcacagaaggagagaccccctgtggcagcagctttgctgtgttctacttcatctccttctacatgctgtgtgccttcctgatcatcaacctgtttgtggccgtcatcatggacaactttgactacctgacccgggactggagcatcctgggcccccaccacctggatgagttcaagaggatctgggccgagtatgaccctgaggccaagggccgcatcaagcacctggatgtggtgaccctgctgcggcgcatccagccccccctgggctttgggaagctgtgcccccaccgggtggcctgcaagaggctggtgtccatgaacatgcccctgaacagtgatggcaccgtgatgtttaatgccaccctgtttgccctggtgaggacagccctgcgcatcaagacagagggcaacctggagcaggccaatgaggagctgcgggccatcatcaagaagatctggaagaggacctccatgaagctgctggaccaggtggtgcccccagctggagatgatgaggtgacagtgggcaagttctacgccaccttcctgatccaggagtacttcaggaagttcaagaagaggaaggagcagggcctggtgggcaagcccagccagagaaatgccctgagcctgcaggccggcctgcggaccctgcatgacatcggccctgagatccggcgggccatcagcggggacctgacagctgaggaggagctggacaaggccatgaaggaggccgtgtctgctgcctctgaagatgacatcttcagaagagctgggggcctgtttggaaaccacgtgtcctactaccagagtgatggccgcagcgccttcccccagaccttcaccacccagaggcccctgcacatcaacaaggccggcagcagccagggcgacacagagagccccagccatgagaagctggtggacagcaccttcacccccagcagctacagcagcacaggcagcaatgccaacatcaacaatgccaacaacacagccctgggccgcctgcccaggcctgctggctaccccagcacagtgtccacagtggagggccacggcccccccctgagccctgccatccgggtgcaggaggtggcctggaagctgagcagcaacaggatgcactgctgtgacatgctggatggcggcaccttccccccagccctgggcccccggcgggccccaccctgcctgcaccagcagctgcagggcagcctggccggcctgcgggaggacaccccctgcatcgtgcccggccacgccagcctgtgctgcagcagccgggtgggggagtggctgcctgctggctgcacagccccccagcacgcccgctgccacagccgggagagccaggccgccatggccggccaggaggagaccagccaggatgagacctatgaggtgaagatgaaccacgacacagaggcctgcagcgagcccagcctgctgagcacagagatgctgagctaccaggatgatgagaaccggcagctgaccctgcctgaggaggacaagagggacatccggcagagccccaagaggggcttcctgcggagcgccagcctgggccggcgggccagcttccacctggagtgcctgaagaggcagaaggaccggggcggggacatcagccagaagacagtgctgcccctgcacctggtgcaccaccaggccctggccgtggccggcctgagccccctgctgcagaggagccacagccctgccagcttcccccggccctttgccaccccaccagccaccccaggcagccggggctggccaccccagcctgtgcccaccctgcggctggagggcgtggagagcagcgagaagctgaacagcagcttccccagcatccactgcggctcctgggccgagaccaccccaggcggcggcggcagcagcgctgcccggcgggtgcggcctgtgtccctgatggtgcccagccaggccggggcccctggccggcagttccacggcagcgccagcagcctggtggaggccgtgctgatcagcgagggcctgggccagtttgcccaggaccccaagttcatcgaggtgaccacccaggagctggctgatgcctgtgacatgaccatcgaggagatggagagcgctgctgacaacatcctgagcggcggggccccccagagccccaacggggccctgctgccctttgtgaactgcagagatgctggccaggacagagctggaggagaagaagatgctggctgtgtgcgggcccggggccggcccagcgaggaggagctgcaggacagccgggtgtatgtgagcagcctgtag

SEQ ID NO: 313977 - DNA, 6630 bp, Artificial Sequence
  derived and/or modified sequence
atggtgaacgagaacacccggatgtacatccccgaggagaaccaccagggaagcaactacggatcacccaggcctgcgcatgctaatatgaacgctaatgctgccgccggactggcacccgagcacattcctacgccgggcgcagccctttcctggcaggctgcaattgatgctgcaaggcaggcaaagctgatgggctctgcagggaacgcaaccattagcaccgtctccagcacccagcgcaagaggcagcaatacggcaaacctaaaaagcagggaagcacaactgccacaaggccccctagagcactcttgtgcctcaccctcaagaatcctatcagaagagcctgcatcagcatagtggagtggaagcccttcgagatcattatactccttacaatcttcgccaattgcgtcgctctcgcgatctatattccgttcccagaggatgatagtaacgcaactaattcaaatctcgaaagagtcgagtatttatttttgataattttcaccgtggaggcttttcttaaggtgatagcttacgggcttcttttccacccaaatgcataccttagaaatggctggaacctgctggactttatcatagtcgtcgtaggccttttttccgcaatcctcgaacaggctaccaaggcagatggagctaacgcactcggtgggaagggagcaggatttgatgtaaaagccctgagggccttccgggtgctacgcccccttcggctcgtaagtggcgtcccaagcctacaggtagtactgaactcgatcataaaagctatggtgcctctgttgcatattgcgttgctggtgctgttcgtaataatcatttacgccatcattggattggaactgttcatgggaaagatgcacaaaacatgttacaaccaagaggggattgctgacgtgcctgcagaggacgatccctccccctgtgctttggagactggtcacgggcgtcagtgccagaatggcacagtgtgtaaacccggctgggacggccccaaacatggcatcacaaacttcgacaatttcgcattcgcaatgctgacggtgtttcagtgtatcaccatggaaggctggacagacgttctgtattggatgcaggacgcgatgggctacgagctaccttgggtctactttgtcagcctggtcatcttcggaagcttctttgtgctcaacctggttctaggggttcttagcggtgaattctctaaggagcgcgagaaggcaaaggcgaggggggatttccaaaagctgagggaaaaacagcagctggaggaggacctcaagggataccttgattggatcacccaggccgaggatatcgatccagaaaatgaggatgagggcatggacgaggaaaaaccacgtaatatgtctatgcctacctccgagactgagtcagtgaacacagagaacgtggctggaggagatattgagggggagaattgcggcgcccgtctggctcatcggattagcaagagcaagttttcccggtactggcggcgatggaatagattttgtcggagaaaatgtcgcgcggctgttaaatcaaacgtcttttactggttggtcatctttctcgtctttctcaacaccctgacgatcgcttcagaacactacaatcagcctaactggctaacggaggttcaggatacagcaaacaaggcactactcgctctgtttactgccgagatgctgctcaagatgtacagtctgggtctccaggcttactttgttagcctgtttaacagatttgattgttttgtcgtgtgcggggggatcttagagaccattctcgtcgagacaaaaataatgtcacccctgggcattagtgtattgcggtgcgttaggttattgcgcattttcaagattacgaggtactggaatagcctgtccaatctggtcgcatccctcctgaacagcgtgaggtccattgcttccctgttattactgctttttctcttcattattatattttctctactcggaatgcagctgtttgggggaaagtttaactttgacgaaatgcagacccgaagatctactttcgataactttcctcagagtctccttactgtgttccagatcctgaccggggaggactggaatagcgtaatgtacgatggaatcatggcatacggaggcccctcttttcctggcatgctggtttgtatctacttcattatcctcttcatctgtggcaactatatcttgttaaatgtgttcctggcaattgctgtggacaaccttgctgacgcggaatcgctgacatcagcccagaaagaggaggaggaagaaaaagaacggaagaaactggcaagaaccgccagccctgagaagaagcaagagctggtcgaaaagccggcggtcggagagtccaaagaggaaaagatcgagctcaaatctatcacagccgatggggagtcacctccagccacgaaaataaacatggatgaccttcagcccaacgaaaacgaagataaatcgccatatcccaatccagagaccaccggggaagaggacgaggaagagcccgagatgccggtaggcccccggccaaggccgctgtccgaacttcacctcaaagaaaaagctgtccccatgcctgaagcttctgctttcttcatcttcagctcgaataaccggttcaggctccaatgccataggattgtcaatgacacaatctttaccaatctaattctgttctttatacttttgagctctattagcctggctgctgaagacccggtgcagcacacatcgttccggaatcacatcctcttctacttcgacatcgtgtttaccaccattttcaccatcgaaatcgccctcaagatgacagcttacggagccttcctccacaaagggtcattttgcagaaactacttcaacattctggacctgctggtcgtgagtgtgtcgttgatcagcttcggaatccagtcgagtgcaatcaacgttgttaagatcctgcgggtgctgagggtgctcaggccccttagagccattaatcgcgccaaagggcttaagcacgtagtccagtgcgtctttgttgccattcgtacaattggaaacatagtgatcgttactacgctcttgcagttcatgttcgcgtgcatcggagttcagcttttcaagggcaagctatacacatgttctgattcttcaaagcagacagaggccgagtgtaagggaaattacatcacatacaaagatggagaagtggaccatcccatcattcagcctagatcatgggaaaatagcaagttcgattttgacaacgtgttggctgccatgatggcattgttcaccgtatctaccttcgagggctggcctgagctcctgtatcgtagcatcgactctcataccgaggataaaggacccatttacaattatcgagtagagatatcaattttttttataatatacatcatcataattgccttttttatgatgaatatctttgtcggttttgtgatagtcacgttccaggagcagggggagcaggagtacaaaaactgcgagctcgacaaaaatcagcgtcagtgcgttgagtacgccttgaaggcaagaccactgcgtaggtacatccccaaaaaccagcaccaatataaggtgtggtatgtggtaaacagtacctatttcgaataccttatgtttgtactgatcctgctcaacacaatttgtctagcaatgcaacattacggacagtcttgcctgtttaagatagcgatgaatattctaaacatgctgtttacagggttattcaccgtcgagatgatcctgaaacttatagccttcaagccaaaggggtacttctccgacccctggaacgtgtttgatttccttattgtcataggctctataattgacgttattttgtccgagaccaacccagccgaacacacccagtgcagtccctctatgaatgctgaagagaactcccgcattagcattaccttctttcgcctcttcagagtgatgagactggtgaagcttctgagtagaggggaaggaattcggactctcttatggactttcataaaatcctttcaggcactgccgtatgtggcccttctgatcgtgatgctcttctttatctacgctgtgatcggaatgcaagtgttcgggaagatagcccttaacgacaccacagaaattaatcgaaataacaatttccagacttttccacaggcggtcctgctgctcttccgatgcgcaacaggcgaggcttggcaggacatcatgttggcatgcatgcccgggaagaagtgtgccccggagtccgaaccaagcaatagcacagaaggcgagaccccctgtggatccagcttcgcagtattctatttcatttctttctacatgctgtgcgcattcctgatcattaatctgtttgttgccgtgattatggacaacttcgactatctgactcgcgattggtctatccttggacctcaccatctcgacgagttcaaacgtatttgggcagagtacgaccccgaggcgaaaggccgcattaagcacctggacgtggttacacttctccgaagaattcagccacctctgggtttcggcaagttgtgccctcatcgcgtggcctgcaagcgactcgtgtcaatgaacatgcccttgaattctgatggtacagttatgtttaacgctaccttgtttgccctcgtgcggacggcccttcgtatcaagactgaagggaacctggaacaagccaacgaagaactgagggctataattaagaagatatggaaaaggacatctatgaaattgttagatcaggttgttccgccggccggggatgatgaagtgacagtgggcaaattctacgccacttttctcatccaggaatattttagaaagtttaaaaaaagaaaagagcaagggctcgttgggaagccatctcagagaaacgccttgtctctacaggcaggcctccgcacgttacatgatataggccctgaaatcagaagagccatctcaggggacctcacagcagaggaggagctggataaggcaatgaaagaagctgtaagcgcggcaagcgaggacgatatctttaggagagcggggggtctgtttggaaatcacgtatcctattaccagtctgatggaaggtccgcttttccccaaactttcaccactcagagacctctgcacattaacaaagctggcagctctcagggtgacacagaaagtcctagccacgagaagctggtcgatagtacctttactccgtcaagttattcttcaactgggagcaatgctaacatcaataacgcaaataacaccgccctaggtcgtttacctcgccctgccggatatccttccactgtgagcactgttgagggccacgggcctccactatccccagcaattagagtccaagaagtcgcctggaaattgagttcgaaccggatgcattgctgtgacatgctcgatggtggcacgtttccccccgccttgggccctcgcagagccccgccatgcctccatcaacagcttcaaggttcgctggcagggttgagagaggatacaccttgtattgtccccggacatgcgtctctatgttgctcttcaagggttggtgagtggcttccggccggttgtacagctccacagcacgcgcggtgtcacagccgcgagagccaggcagcaatggcaggccaggaagagacctcccaagatgaaacttacgaggtcaagatgaaccatgatactgaagcatgtagtgagccgtccctcctgtcaaccgaaatgctctcataccaggatgatgaaaataggcagctcacactgcccgaggaagataaacgcgacattagacagagtcctaaacgggggttcctcagaagcgccagcctaggccgtcgggctagttttcaccttgaatgtctcaagcgacagaaggaccgaggaggtgacatatcacagaaaacagtcctgccacttcacctcgtccaccatcaagccctggccgtggccgggctctcacctctactgcagcggtcacacagtccggccagcttccctaggcccttcgccactccgccagcaactcccgggtctcgggggtggcccccacaacccgtgccaaccttgaggctcgagggcgtagaaagtagcgaaaaattgaatagtagtttccctagtatacactgcggctcttgggccgagactacccccggtggcggagggtctagcgccgcccggagggtgcgcccagtgtccctgatggtgccatctcaggctggggcccccggccgccagtttcacgggtctgcctcatccctcgtggaagctgttcttataagcgaaggcctgggacagtttgcccaggaccccaagtttatcgaagtaacaacacaggaactggcggatgcatgcgacatgacaatagaagagatggagtcagctgcggacaacatcctttccgggggggcacctcaaagcccaaatggcgcactgctccctttcgtgaactgtcgcgacgctggtcaggacagagcaggcggtgaggaagacgcgggatgcgttcgggctaggggccgaccatccgaggaggaattgcaggacagccgggtttacgtgtcctccctttag

SEQ ID NO: 313978 - DNA, 6629 bp, Artificial Sequence
  derived and/or modified sequence
atggtaaacgagaatacccggatgtatataccggaagagaaccatcaggggtcgaactatggaagtcccaggcccgctcacgccaatatgaatgcaaacgctgccgctgggttggccccagagcacatccccactcccggagcagcgctctcctggcaggccgcaatagatgctgccagacaggcaaaacttatggggtctgctggaaatgcaacaattagcacagtctcgagcacccagcggaaacgacagcaatacgggaagcccaaaaagcagggatccacaactgccactcgacctcctcgggcactactgtgcttgacactcaagaatcctattcggcgagcctgcatttcgattgtggagtggaaaccgtttgagatcattattcttttgacgatatttgcaaactgtgtggccttggctatttatattcctttcccagaggatgatagcaatgcaaccaactctaatctcgagcgcgtagaatacctattcctgatcatttttacagtggaggccttccttaaagtaatcgcttatggcctgttgtttcacccaaatgcatatctgcgcaacgggtggaacctcctcgatttcattatcgtagtcgtcgggctcttttctgctatcttggagcaggccaccaaggccgacggggcaaatgccctcgggggaaaaggggctggctttgatgttaaggccctcagagctttcagggtgctgcgcccactgcgactagtctccggcgtcccatccctgcaggtagtccttaatagtattataaaagctatggtgccgctgctccacattgcgcttctcgtgctctttgtgatcattatatacgcaataatcggtctggagctgtttatggggaaaatgcacaaaacctgctacaatcaggaaggtatcgcagatgttcccgcagaggacgacccatctccgtgtgctctggagactggacacggaagacaatgccagaatgggaccgtgtgcaagccgggatgggacgggcctaagcatgggataacaaactttgacaacttcgctttcgctatgttgaccgtgtttcaatgcatcaccatggaggggtggactgatgtgctgtattggatgcaggatgccatgggctacgaactgccctgggtgtattttgtatctctggtgatcttcggctcgttctttgtcttgaacctagtgctgggcgtgctttcaggggaattcagtaaggaaagagagaaggccaaggccagaggtgactttcagaaactccgggagaagcagcagctggaggaagatttgaagggttacctagattggatcacccaagcagaggacattgaccctgaaaatgaggatgaaggaatggatgaggaaaaacccaggaacatgagcatgcccaccagtgagactgaatctgttaatactgaaaacgttgccggaggtgacattgagggtgagaactgtggagcacggttagcccacagaatctctaagtccaaattttcaagatattggagaagatggaaccggttctgcaggaggaagtgccgggcagcagtgaagtcaaacgtgttctattggttggtcatcttcctcgtatttcttaatactctgacaattgcctccgagcactataatcaaccgaactggcttaccgaagtacaagacaccgccaataaggccttacttgctctttttacagcggaaatgcttttgaaaatgtacagcctaggtctgcaggcatattttgtctcgctattcaataggtttgactgctttgtggtgtgtggagggattctagagacaatcctagtcgagacgaagattatgtcacctctcggaattagcgtgttgcggtgcgtcagactcctgcggatcttcaagattacaagatattggaactctttgagcaatctcgtggcttccctgctcaacagtgttaggtccatcgcgtccttgttattgctgctgtttctgttcattatcatcttctcactacttggcatgcagcttttcggaggcaaatttaacttcgacgaaatgcagactcgcaggagtacctttgacaacttcccccagtcattgctcacggtcttccagatactgaccggcgaggactggaacagcgtgatgtacgacggaattatggcttacggcggaccaagcttccccggaatgcttgtgtgtatatattttatcatcctattcatctgtgggaactatatcctcttaaatgtgttcctcgccatcgccgtggacaacctcgccgacgcggaatctttaaccagtgcccagaaggaagaagaggaagagaaggaaaggaaaaagctcgcccgaaccgcttctccagagaagaaacaagaattggtcgagaaacctgccgtaggtgagagcaaagaggagaagattgagctcaagagcatcacagccgacggagaatccccacccgcaactaagatcaacatggacgacctgcagcccaacgaaaacgaagacaaatctccatacccgaacccggagaccaccggcgaggaggacgaggaggagcccgaaatgcccgtcggccctcgacccaggcctttgagtgaactccacctcaaagagaaagctgtgcccatgccagaggctagcgcgtttttcatctttagctctaataatcggttcaggctacagtgccatcgaattgtgaatgataccatattcacgaatcttattctgttttttatattactcagttcaatctccttggctgcagaggacccagtgcaacatacttcttttcggaaccacatcctgttctactttgatattgtttttacaactatttttacaatcgaaatcgcgttgaagatgactgcatacggcgcttttctgcataaaggatctttttgtcggaactatttcaatattctggacttgttggttgtgagtgtatccctgatcagcttcggaattcagtccagcgcaatcaatgtcgtaaagattctgagagtactgagagtcctgcgtcccctgagagcaatcaaccgagccaaaggcctgaagcacgttgtccagtgcgtctttgtcgcaatcagaacaatcgggaatattgtgatcgttacgacgctcctgcagttcatgttcgcatgtatcggagtccagctctttaaaggtaaactctacacatgtagcgattcaagcaagcagacagaggctgagtgcaaaggtaattacataacttataaggacggggaggtggatcatccaataattcagcccagatcttgggaaaactccaaattcgactttgataatgtgttggccgctatgatggcactgttcacggtcagcactttcgaaggctggccggagcttctctataggtctattgattcccataccgaagacaaaggacccatctacaactatcgagtggagatcagtattttttttatcatctacatcatcatcatcgctttctttatgatgaacatatttgtcgggtttgtgatcgtgaccttccaggaacaaggtgagcaggagtataaaaattgtgaactggacaaaaaccagcgacaatgcgtcgaatatgctttgaaggctaggccgcttcggaggtatatacccaagaaccagcatcagtataaagtgtggtatgtggtcaattccacctatttcgaatacctgatgtttgtgctgatcctgttgaataccatctgcctggctatgcagcactatggtcagtcgtgtttattcaagatcgcaatgaatatcctaaacatgctgttcactggtctgtttaccgtcgagatgatcctgaaactgattgcatttaagcctaagggatacttttccgacccatggaatgtgttcgactttctcatcgtgattggctcgattatcgacgtcattttatcagagactaaccccgctgagcatacccagtgtagtccgagtatgaacgccgaagagaactcaagaatatcaatcaccttcttcaggctattcagggtgatgcgactggtgaaactgttgtcccgcggtgagggcattcgtacccttctctggactttcatcaaatctttccaggcactgccgtacgtcgctctgctcatcgttatgctctttttcatctacgcggttatcgggatgcaagtgtttgggaagatcgccctgaacgacacaaccgagattaatagaaacaataattttcagaccttccctcaggctgtgttgctcctcttcaggtgcgcaacaggtgaagcctggcaggacattatgcttgcctgtatgcctggcaagaaatgcgcccctgaaagtgagccttcaaacagcaccgagggagagactccttgcggatcgtccttcgccgtcttctattttatttccttctacatgctatgcgcttttctcatcattaatctgtttgttgcagttataatggacaactttgattacttgacaagagactggtcaatcctcggaccacatcacctcgacgagtttaagcggatatgggccgaatacgaccccgaggctaaaggacgcatcaaacatctggatgttgtcacactactgagacggatccaacctcctctgggcttcggtaaattatgtccccatcgggtcgcctgtaaacggcttgtgagtatgaacatgccattaaattcagacggcaccgtgatgtttaatgccacgctgtttgccctcgtgcggaccgctctcaggattaaaactgaggggaatttggaacaggccaatgaggaattgcgcgctattattaagaaaatctggaagcggacaagcatgaagctccttgaccaggtggttccgccagctggcgatgacgaggtgactgtcgggaagttttacgccacttttttgatccaggagtatttcaggaaattcaaaaaacggaaagaacagggcctggtcgggaagccatcccagcggaatgccctgtcactccaggctggcctgagaactctgcatgacattggacctgagatccgcagggctatctccggtgatttaacagccgaagaggagcttgataaggctatgaaggaagctgtgtctgctgcaagtgaagacgacatcttcaggagggcgggtggacttttcggcaaccatgtgagctattatcaaagcgacggtagaagtgccttcccccagacttttacaacacaaaggccattgcatataaacaaggctggctcgtcccaaggcgacaccgagtctcccagccatgaaaaactggttgactctacctttaccccatcaagctattcgtccaccggttctaacgccaacatcaacaatgcaaacaacaccgcccttgggaggctcccgaggccagcgggatacccctctactgtttcaaccgttgagggtcatggacctccgctttcccccgctattcgcgtgcaagaggtggcatggaagctttcatccaaccgtatgcattgctgcgacatgcttgatggcggaaccttccctccggctctaggtccaaggagagcccctccttgccttcatcagcagttgcagggtagcctggcgggactaagagaggatacgccctgtatagtgcccggtcacgccagtctttgctgttcatccagggtgggcgaatggctgcccgcaggctgtaccgcaccccaacacgcgagatgccacagcagagaatcacaagcagccatggcaggacaagaggagacgtcgcaagatgagacctatgaggtgaaaatgaatcacgatacagaagcctgtagcgagcctagcttgctgtccacagagatgctatcttaccaggatgacgagaaccgacaattaaccttgccggaggaggacaagagagacatacggcagagccctaagcgtggcttcctgaggagcgcttcacttggtagacgcgctagctttcacttggagtgcctcaaacgccaaaaggatcggggaggcgacataagccaaaagactgttttacctcttcacctggtgcaccaccaggctctggcagttgcgggattatcgccacttctgcagcggagccattcgcctgcctctttccccaggccttttgcgacccctccagccactcctggctctcgcggttggccgccacagcctgtccccacccttcgcttggagggggtcgaaagttctgagaaattgaatagcagcttcccaagcattcactgtggatcctgggccgaaacaacacctggcggtggaggatccagcgccgctcgccgtgtgaggcccgtcagcctcatggtgcctagccaggccggagcgcctggacgccagtttcacggttccgcctccagcttggtggaggcagtgctcatctctgagggtttgggccaatttgcgcaggacccgaaatttattgaggtgacaacccaagaacttgcggatgcctgcgatatgaccattgaggaaatggagtctgctgctgataatatactgagtggaggggctccacagagccctaatggagccctcttaccattcgttaattgccgtgatgccggtcaggatagagctgggggagaagaggacgcaggatgcgtgagagccaggggaagaccctctgaggaggaactgcaggacagccgggtgtacgtgtcgagcctcta

SEQ ID NO: 313979 - DNA, 7590 bp, Artificial Sequence
  derived and/or modified sequence
atggtcaatgagaatacgaggatgtacattccagaggaaaaccaccaaggttccaactatgggagcccacgccccgcccatgccaacatgaatgccaatgcggcagcggggctggcccctgagcacatccccaccccgggggctgccctgtcgtggcaggcggccatcgacgcagcccggcaggctaagctgatgggcagcgctggcaatgcgaccatctccacagtcagctccacgcagcggaagcggcagcaatatgggaaacccaagaagcagggcagcaccacggccacacgcccgccccgagccctgctctgcctgaccctgaagaaccccatccggagggcctgcatcagcattgtcgaatggaaaccatttgaaataattattttactgactatttttgccaattgtgtggccttagcgatctatattccctttccagaagatgattccaacgccaccaattccaacctggaacgagtggaatatctctttctcataatttttacggtggaagcgtttttaaaagtaatcgcctatggactcctctttcaccccaatgcctacctccgcaacggctggaacctactagattttataattgtggttgtggggctttttagtgcaattttagaacaagcaaccaaagcagatggggcaaacgctctcggagggaaaggggccggatttgatgtgaaggcgctgagggccttccgcgtgctgcgccccctgcggctggtgtccggagtcccaagtctccaggtggtcctgaattccatcatcaaggccatggtccccctgctgcacatcgccctgcttgtgctgtttgtcatcatcatctacgccatcatcggcttggagctcttcatggggaagatgcacaagacctgctacaaccaggagggcatagcagatgttccagcagaagatgacccttccccttgtgcgctggaaacgggccacgggcggcagtgccagaacggcacggtgtgcaagcccggctgggatggtcccaagcacggcatcaccaactttgacaactttgccttcgccatgctcacggtgttccagtgcatcaccatggagggctggacggacgtgctgtactggatgcaggacgctatgggctatgagttaccctgggtgtattttgtcagtctggtcatctttggatcctttttcgttctaaatctggttctcggtgtgttgagcggagagttttccaaagagagggagaaggccaaggcccggggagatttccagaagctgcgggagaagcagcagctagaagaggatctcaaaggctacctggattggatcactcaggccgaagacatcgatcctgagaatgaggacgaaggcatggatgaggagaagccccgaaacatgagcatgcccaccagtgagaccgagtccgtcaacaccgaaaacgtggctggaggtgacatcgagggagaaaactgcggggccaggctggcccaccggatctccaagtcaaagttcagccgctactggcgccggtggaatcggttctgcagaaggaagtgccgcgccgcagtcaagtctaatgtcttctactggctggtgattttcctggtgttcctcaacacgctcaccattgcctctgagcactacaaccagcccaactggctcacagaagtccaagacacggcaaacaaggccctgctggccctgttcacggcagagatgctcctgaagatgtacagcctgggcctgcaggcctacttcgtgtccctcttcaaccgctttgactgcttcgtcgtgtgtggcggcatcctggagaccatcctggtggagaccaagatcatgtccccactgggcatctccgtgctcagatgcgtccggctgctgaggattttcaagatcacgaggtactggaactccttgagcaacctggtggcatccttgctgaactctgtgcgctccatcgcctccctgctccttctcctcttcctcttcatcatcatcttctccctcctggggatgcagctctttggaggaaagttcaactttgatgagatgcagacccggaggagcacattcgataacttcccccagtccctcctcactgtgtttcagatcctgaccggggaggactggaattcggtgatgtatgatgggatcatggcttatggcggcccctcttttccagggatgttagtctgtatttacttcatcatcctcttcatctgtggaaactatatcctactgaatgtgttcttggccattgctgtggacaacctggctgatgctgagagcctcacatctgcccaaaaggaggaggaagaggagaaggagagaaagaagctggccaggactgccagcccagagaagaaacaagagttggtggagaagccggcagtgggggaatccaaggaggagaagattgagctgaaatccatcacggctgacggagagtctccacccgccaccaagatcaacatggatgacctccagcccaatgaaaatgaggataagagcccctaccccaacccagaaactacaggagaagaggatgaggaggagccagagatgcctgtcggccctcgcccacgaccactctctgagcttcaccttaaggaaaaggcagtgcccatgccagaagccagcgcgtttttcatcttcagctctaacaacaggtttcgcctccagtgccaccgcattgtcaatgacacgatcttcaccaacctgatcctcttcttcattctgctcagcagcatttccctggctgctgaggacccggtccagcacacctccttcaggaaccatattctgttttattttgatattgtttttaccaccattttcaccattgaaattgctctgaagatgactgcttatggggctttcttgcacaagggttctttctgccggaactacttcaacatcctggacctgctggtggtcagcgtgtccctcatctcctttggcatccagtccagtgcaatcaatgtcgtgaagatcttgcgagtcctgcgagtactcaggcccctgagggccatcaacagggccaaggggctaaagcatgtggttcagtgtgtgtttgtcgccatccggaccatcgggaacatcgtgattgtcaccaccctgctgcagttcatgtttgcctgcatcggggtccagctcttcaagggaaagctgtacacctgttcagacagttccaagcagacagaggcggaatgcaagggcaactacatcacgtacaaagacggggaggttgaccaccccatcatccaaccccgcagctgggagaacagcaagtttgactttgacaatgttctggcagccatgatggccctcttcaccgtctccaccttcgaagggtggccagagctgctgtaccgctccatcgactcccacacggaagacaagggccccatctacaactaccgtgtggagatctccatcttcttcatcatctacatcatcatcatcgccttcttcatgatgaacatcttcgtgggcttcgtcatcgtcacctttcaggagcagggggagcaggagtacaagaactgtgagctggacaagaaccagcgacagtgcgtggaatacgccctcaaggcccggcccctgcggaggtacatccccaagaaccagcaccagtacaaagtgtggtacgtggtcaactccacctacttcgagtacctgatgttcgtcctcatcctgctcaacaccatctgcctggccatgcagcactacggccagagctgcctgttcaaaatcgccatgaacatcctcaacatgctcttcactggcctcttcaccgtggagatgatcctgaagctcattgccttcaaacccaagggttactttagtgatccctggaatgtttttgacttcctcatcgtaattggcagcataattgacgtcattctcagtgagactaatccagctgaacatacccaatgctctccctctatgaacgcagaggaaaactcccgcatctccatcaccttcttccgcctgttccgggtcatgcgtctggtgaagctgctgagccgtggggagggcatccggacgctgctgtggaccttcatcaagtccttccaggccctgccctatgtggccctcctgatcgtgatgctgttcttcatctacgcggtgatcgggatgcaggtgtttgggaaaattgccctgaatgataccacagagatcaaccggaacaacaactttcagaccttcccccaggccgtgctgctcctcttcaggtgtgccaccggggaggcctggcaggacatcatgctggcctgcatgccaggcaagaagtgtgccccagagtccgagcccagcaacagcacggagggtgaaacaccctgtggtagcagctttgctgtcttctacttcatcagcttctacatgctctgtgccttcctgatcatcaacctctttgtagctgtcatcatggacaactttgactacctgacaagggactggtccatccttggtccccaccacctggatgagtttaaaagaatctgggcagagtatgaccctgaagccaagggtcgtatcaaacacctggatgtggtgaccctcctccggcggattcagccgccactaggttttgggaagctgtgccctcaccgcgtggcttgcaaacgcctggtctccatgaacatgcctctgaacagcgacgggacagtcatgttcaatgccaccctgtttgccctggtcaggacggccctgaggatcaaaacagaagggaacctagaacaagccaatgaggagctgcgggcgatcatcaagaagatctggaagcggaccagcatgaagctgctggaccaggtggtgccccctgcaggtgatgatgaggtcaccgttggcaagttctacgccacgttcctgatccaggagtacttccggaagttcaagaagcgcaaagagcagggccttgtgggcaagccctcccagaggaacgcgctgtctctgcaggctggcttgcgcacactgcatgacatcgggcctgagatccgacgggccatctctggagatctcaccgctgaggaggagctggacaaggccatgaaggaggctgtgtccgctgcttctgaagatgacatcttcaggagggccggtggcctgttcggcaaccacgtcagctactaccaaagcgacggccggagcgccttcccccagaccttcaccactcagcgcccgctgcacatcaacaaggcgggcagcagccagggcgacactgagtcgccatcccacgagaagctggtggactccaccttcaccccgagcagctactcgtccaccggctccaacgccaacatcaacaacgccaacaacaccgccctgggtcgcctccctcgccccgccggctaccccagcacggtcagcactgtggagggccacgggccccccttgtcccctgccatccgggtgcaggaggtggcgtggaagctcagctccaacaggatgcactgctgtgacatgctggatggtgggaccttccctcccgccctgggcccccgcagggctcctccctgtctgcatcagcagctccagggttccctggcggggctgagagaggacacaccctgcatcgtgcctggccacgcttcactgtgctgctcttccagagtaggagagtggctcccagcaggctgcacagccccccagcatgccaggtgccactcccgggagagccaggcagccatggcgggtcaggaggagacgtctcaggatgagacctatgaagtgaagatgaaccatgacacggaggcctgcagtgagcccagcctgctctccacagagatgctctcctaccaggatgacgaaaatcggcaactgacgctcccagaggaggacaagagggacatccggcaatctccgaagaggggtttcctccgctctgcctcactaggtcgaagggcctccttccacctggaatgtctgaagcgacagaaggaccgagggggagacatctctcagaagacagtcctgcccttgcatctggttcatcatcaggcattggcagtggcaggcctgagccccctcctccagagaagccattcccctgcctcattccctaggccttttgccaccccaccagccacacctggcagccgaggctggcccccacagcccgtccccaccctgcggcttgagggggtcgagtccagtgagaaactcaacagcagcttcccatccatccactgcggctcctgggctgagaccacccccggtggcgggggcagcagcgccgcccggagagtccggcccgtctccctcatggtgcccagccaggctggggccccagggaggcagttccacggcagtgccagcagcctggtggaagcggtcttgatttcagaaggactggggcagtttgctcaagatcccaagttcatcgaggtcaccacccaggagctggccgacgcctgcgacatgaccatagaggagatggagagcgcggccgacaacatcctcagcgggggcgccccacagagccccaatggcgccctcttaccctttgtgaactgcagggacgcggggcaggaccgagccgggggcgaagaggacgcgggctgtgtgcgcgcgcggggtcgaccgagtgaggaggagctccaggacagcagggtctacgtcagcagcctgtagtgggcgctgccagatgcgggcttttttttatttgtttcaatgttcctaatgggttcgtttcagaagtgcctcactgttctcgtgacctggagttaaccggaacagcgtcttcattcatttctgttgggaccagacgcggagcctgggtgcgcgagccgccctccgggaggaaggcgcccggctgcgtctgcagaggcggggagaggaggcggcgagggtcccggggcgcgaggaaggcgcctgccctctcccagctcgcaggccccgggcccggccgcgcctccgcggggagagcaccccggcttcccgcgcgccctcaccaaaaggaccctacagcaaacgggtgtctttcgactctgcttgtagaaaccatttgcacatattctgtacgagcctcgctgtctccctagagccagggccctgcggatttggagaagggagcggggcaggacttccaggaggaccccaacccggcccggagagggaggaggaggcctccaggggcgcggagctctggggatgggcgtcgggccggcagtggtgcggctcactccgtccctgcccacctgcgacgggatcccccgaccggcacgggccacgccgagctcccggccagccgccggcccgcaggcagcgcgagggaggagctgcgccgccggctccgcccaaccaggtggtgctgagcttccgctgagcgctcttttgttttgtggtttgacacttttcttgacagcatgttgcagtttcttttcggttttggttttttttaaatgttttattttgctttcccagcgggaggggaggaagaagagtgtttacaaagtcctgtagccccctcacctttctgttttcacttttgccaatgtacatcgggtttggttttcttgtattatttaaacggttgtggtttcctttttccacggaggttcaatagaagccgctgcaggagagttttaccaa

SEQ ID NO: 313980 - DNA, 6630 bp, Artificial Sequence
  derived and/or modified sequence
atggtgaacgagaacaccagaatgtacatccccgaggagaaccaccagggcagcaactacggcagccccagacccgcccacgccaacatgaacgccaacgccgccgccggcctggcccccgagcacatccccacccccggcgccgccctgagctggcaggccgccatcgacgccgccagacaggccaagctgatgggcagcgccggcaacgccaccatcagcaccgtgagcagcacccagagaaagagacagcagtacggcaagcccaagaagcagggcagcaccaccgccaccagaccccccagagccctgctgtgcctgaccctgaagaaccccatcagaagagcctgcatcagcatcgtggagtggaagcccttcgagatcatcatcctgctgaccatcttcgccaactgcgtggccctggccatctacatccccttccccgaggacgacagcaacgccaccaacagcaacctggagagagtggagtacctgttcctgatcatcttcaccgtggaggccttcctgaaggtgatcgcctacggcctgctgttccaccccaacgcctacctgagaaacggctggaacctgctggacttcatcatcgtggtggtgggcctgttcagcgccatcctggagcaggccaccaaggccgacggcgccaacgccctgggcggcaagggcgccggcttcgacgtgaaggccctgagagccttcagagtgctgagacccctgagactggtgagcggcgtgcccagcctgcaggtggtgctgaacagcatcatcaaggccatggtgcccctgctgcacatcgccctgctggtgctgttcgtgatcatcatctacgccatcatcggcctggagctgttcatgggcaagatgcacaagacctgctacaaccaggagggcatcgccgacgtgcccgccgaggacgaccccagcccctgcgccctggagaccggccacggcagacagtgccagaacggcaccgtgtgcaagcccggctgggacggccccaagcacggcatcaccaacttcgacaacttcgccttcgccatgctgaccgtgttccagtgcatcaccatggagggctggaccgacgtgctgtactggatgcaggacgccatgggctacgagctgccctgggtgtacttcgtgagcctggtgatcttcggcagcttcttcgtgctgaacctggtgctgggcgtgctgagcggcgagttcagcaaggagagagagaaggccaaggccagaggcgacttccagaagctgagagagaagcagcagctggaggaggacctgaagggctacctggactggatcacccaggccgaggacatcgaccccgagaacgaggacgagggcatggacgaggagaagcccagaaacatgagcatgcccaccagcgagaccgagagcgtgaacaccgagaacgtggccggcggcgacatcgagggcgagaactgcggcgccagactggcccacagaatcagcaagagcaagttcagcagatactggagaagatggaacagattctgcagaagaaagtgcagagccgccgtgaagagcaacgtgttctactggctggtgatcttcctggtgttcctgaacaccctgaccatcgccagcgagcactacaaccagcccaactggctgaccgaggtgcaggacaccgccaacaaggccctgctggccctgttcaccgccgagatgctgctgaagatgtacagcctgggcctgcaggcctacttcgtgagcctgttcaacagattcgactgcttcgtggtgtgcggcggcatcctggagaccatcctggtggagaccaagatcatgagccccctgggcatcagcgtgctgagatgcgtgagactgctgagaatcttcaagatcaccagatactggaacagcctgagcaacctggtggccagcctgctgaacagcgtgagaagcatcgccagcctgctgctgctgctgttcctgttcatcatcatcttcagcctgctgggcatgcagctgttcggcggcaagttcaacttcgacgagatgcagaccagaagaagcaccttcgacaacttcccccagagcctgctgaccgtgttccagatcctgaccggcgaggactggaacagcgtgatgtacgacggcatcatggcctacggcggccccagcttccccggcatgctggtgtgcatctacttcatcatcctgttcatctgcggcaactacatcctgctgaacgtgttcctggccatcgccgtggacaacctggccgacgccgagagcctgaccagcgcccagaaggaggaggaggaggagaaggagagaaagaagctggccagaaccgccagccccgagaagaagcaggagctggtggagaagcccgccgtgggcgagagcaaggaggagaagatcgagctgaagagcatcaccgccgacggcgagagcccccccgccaccaagatcaacatggacgacctgcagcccaacgagaacgaggacaagagcccctaccccaaccccgagaccaccggcgaggaggacgaggaggagcccgagatgcccgtgggccccagacccagacccctgagcgagctgcacctgaaggagaaggccgtgcccatgcccgaggccagcgccttcttcatcttcagcagcaacaacagattcagactgcagtgccacagaatcgtgaacgacaccatcttcaccaacctgatcctgttcttcatcctgctgagcagcatcagcctggccgccgaggaccccgtgcagcacaccagcttcagaaaccacatcctgttctacttcgacatcgtgttcaccaccatcttcaccatcgagatcgccctgaagatgaccgcctacggcgccttcctgcacaagggcagcttctgcagaaactacttcaacatcctggacctgctggtggtgagcgtgagcctgatcagcttcggcatccagagcagcgccatcaacgtggtgaagatcctgagagtgctgagagtgctgagacccctgagagccatcaacagagccaagggcctgaagcacgtggtgcagtgcgtgttcgtggccatcagaaccatcggcaacatcgtgatcgtgaccaccctgctgcagttcatgttcgcctgcatcggcgtgcagctgttcaagggcaagctgtacacctgcagcgacagcagcaagcagaccgaggccgagtgcaagggcaactacatcacctacaaggacggcgaggtggaccaccccatcatccagcccagaagctgggagaacagcaagttcgacttcgacaacgtgctggccgccatgatggccctgttcaccgtgagcaccttcgagggctggcccgagctgctgtacagaagcatcgacagccacaccgaggacaagggccccatctacaactacagagtggagatcagcatcttcttcatcatctacatcatcatcatcgccttcttcatgatgaacatcttcgtgggcttcgtgatcgtgaccttccaggagcagggcgagcaggagtacaagaactgcgagctggacaagaaccagagacagtgcgtggagtacgccctgaaggccagacccctgagaagatacatccccaagaaccagcaccagtacaaggtgtggtacgtggtgaacagcacctacttcgagtacctgatgttcgtgctgatcctgctgaacaccatctgcctggccatgcagcactacggccagagctgcctgttcaagatcgccatgaacatcctgaacatgctgttcaccggcctgttcaccgtggagatgatcctgaagctgatcgccttcaagcccaagggctacttcagcgacccctggaacgtgttcgacttcctgatcgtgatcggcagcatcatcgacgtgatcctgagcgagaccaaccccgccgagcacacccagtgcagccccagcatgaacgccgaggagaacagcagaatcagcatcaccttcttcagactgttcagagtgatgagactggtgaagctgctgagcagaggcgagggcatcagaaccctgctgtggaccttcatcaagagcttccaggccctgccctacgtggccctgctgatcgtgatgctgttcttcatctacgccgtgatcggcatgcaggtgttcggcaagatcgccctgaacgacaccaccgagatcaacagaaacaacaacttccagaccttcccccaggccgtgctgctgctgttcagatgcgccaccggcgaggcctggcaggacatcatgctggcctgcatgcccggcaagaagtgcgcccccgagagcgagcccagcaacagcaccgagggcgagaccccctgcggcagcagcttcgccgtgttctacttcatcagcttctacatgctgtgcgccttcctgatcatcaacctgttcgtggccgtgatcatggacaacttcgactacctgaccagagactggagcatcctgggcccccaccacctggacgagttcaagagaatctgggccgagtacgaccccgaggccaagggcagaatcaagcacctggacgtggtgaccctgctgagaagaatccagccccccctgggcttcggcaagctgtgcccccacagagtggcctgcaagagactggtgagcatgaacatgcccctgaacagcgacggcaccgtgatgttcaacgccaccctgttcgccctggtgagaaccgccctgagaatcaagaccgagggcaacctggagcaggccaacgaggagctgagagccatcatcaagaagatctggaagagaaccagcatgaagctgctggaccaggtggtgccccccgccggcgacgacgaggtgaccgtgggcaagttctacgccaccttcctgatccaggagtacttcagaaagttcaagaagagaaaggagcagggcctggtgggcaagcccagccagagaaacgccctgagcctgcaggccggcctgagaaccctgcacgacatcggccccgagatcagaagagccatcagcggcgacctgaccgccgaggaggagctggacaaggccatgaaggaggccgtgagcgccgccagcgaggacgacatcttcagaagagccggcggcctgttcggcaaccacgtgagctactaccagagcgacggcagaagcgccttcccccagaccttcaccacccagagacccctgcacatcaacaaggccggcagcagccagggcgacaccgagagccccagccacgagaagctggtggacagcaccttcacccccagcagctacagcagcaccggcagcaacgccaacatcaacaacgccaacaacaccgccctgggcagactgcccagacccgccggctaccccagcaccgtgagcaccgtggagggccacggcccccccctgagccccgccatcagagtgcaggaggtggcctggaagctgagcagcaacagaatgcactgctgcgacatgctggacggcggcaccttcccccccgccctgggccccagaagagcccccccctgcctgcaccagcagctgcagggcagcctggccggcctgagagaggacaccccctgcatcgtgcccggccacgccagcctgtgctgcagcagcagagtgggcgagtggctgcccgccggctgcaccgccccccagcacgccagatgccacagcagagagagccaggccgccatggccggccaggaggagaccagccaggacgagacctacgaggtgaagatgaaccacgacaccgaggcctgcagcgagcccagcctgctgagcaccgagatgctgagctaccaggacgacgagaacagacagctgaccctgcccgaggaggacaagagagacatcagacagagccccaagagaggcttcctgagaagcgccagcctgggcagaagagccagcttccacctggagtgcctgaagagacagaaggacagaggcggcgacatcagccagaagaccgtgctgcccctgcacctggtgcaccaccaggccctggccgtggccggcctgagccccctgctgcagagaagccacagccccgccagcttccccagacccttcgccaccccccccgccacccccggcagcagaggctggcccccccagcccgtgcccaccctgagactggagggcgtggagagcagcgagaagctgaacagcagcttccccagcatccactgcggcagctgggccgagaccacccccggcggcggcggcagcagcgccgccagaagagtgagacccgtgagcctgatggtgcccagccaggccggcgcccccggcagacagttccacggcagcgccagcagcctggtggaggccgtgctgatcagcgagggcctgggccagttcgcccaggaccccaagttcatcgaggtgaccacccaggagctggccgacgcctgcgacatgaccatcgaggagatggagagcgccgccgacaacatcctgagcggcggcgccccccagagccccaacggcgccctgctgcccttcgtgaactgcagagacgccggccaggacagagccggcggcgaggaggacgccggctgcgtgagagccagaggcagacccagcgaggaggagctgcaggacagcagagtgtacgtgagcagcctgtag

SEQ ID NO: 313981 - protein, 2163 aa, Artificial Sequence
  derived and/or modified sequence
MVNENTRMYIPEENHQGSNYGSPRPAHANMNANAAAGLAPEHIPTPGAALSWQAAIDAARQAKLMGSAGNATISTVSSTQRKRQQYGKPKKQGSTTATRPPRALLCLTLKNPIRRACISIVEWKPFEIIILLTIFANCVALAIYIPFPEDDSNATNSNLERVEYLFLIIFTVEAFLKVIAYGLLFHPNAYLRNGWNLLDFIIVVVGLFSAILEQATKADGANALGGKGAGFDVKALRAFRVLRPLRLVSGVPSLQVVLNSIIKAMVPLLHIALLVLFVIIIYAIIGLELFMGKMHKTCYNQEGIADVPAEDDPSPCALETGHGRQCQNGTVCKPGWDGPKHGITNFDNFAFAMLTVFQCITMEGWTDVLYWVNDAVGRDWPWIYFVTLIIIGSFFVLNLVLGVLSGEFSKEREKAKARGDFQKLREKQQLEEDLKGYLDWITQAEDIDPENEDEGMDEEKPRNRGTPAGMLDQKKGKFAWFSHSTETHVSMPTSETESVNTENVAGGDIEGENCGARLAHRISKSKFSRYWRRWNRFCRRKCRAAVKSNVFYWLVIFLVFLNTLTIASEHYNQPNWLTEVQDTANKALLALFTAEMLLKMYSLGLQAYFVSLFNRFDCFVVCGGILETILVETKIMSPLGISVLRCVRLLRIFKITRYWNSLSNLVASLLNSVRSIASLLLLLFLFIIIFSLLGMQLFGGKFNFDEMQTRRSTFDNFPQSLLTVFQILTGEDWNSVMYDGIMAYGGPSFPGMLVCIYFIILFICGNYILLNVFLAIAVDNLADAESLTSAQKEEEEEKERKKLARTASPEKKQELVEKPAVGESKEEKIELKSITADGESPPATKINMDDLQPNENEDKSPYPNPETTGEEDEEEPEMPVGPRPRPLSELHLKEKAVPMPEASAFFIFSSNNRFRLQCHRIVNDTIFTNLILFFILLSSISLAAEDPVQHTSFRNHILFYFDIVFTTIFTIEIALKMTAYGAFLHKGSFCRNYFNILDLLVVSVSLISFGIQSSAINVVKILRVLRVLRPLRAINRAKGLKHVVQCVFVAIRTIGNIVIVTTLLQFMFACIGVQLFKGKLYTCSDSSKQTEAECKGNYITYKDGEVDHPIIQPRSWENSKFDFDNVLAAMMALFTVSTFEGWPELLYRSIDSHTEDKGPIYNYRVEISIFFIIYIIIIAFFMMNIFVGFVIVTFQEQGEQEYKNCELDKNQRQCVEYALKARPLRRYIPKNQHQYKVWYVVNSTYFEYLMFVLILLNTICLAMQHYGQSCLFKIAMNILNMLFTGLFTVEMILKLIAFKPKHYFCDAWNTFDALIVVGSIVDIAITEVNPAEHTQCSPSMNAEENSRISITFFRLFRVMRLVKLLSRGEGIRTLLWTFIKSFQALPYVALLIVMLFFIYAVIGMQVFGKIALNDTTEINRNNNFQTFPQAVLLLFRCATGEAWQDIMLACMPGKKCAPESEPSNSTEGETPCGSSFAVFYFISFYMLCAFLIINLFVAVIMDNFDYLTRDWSILGPHHLDEFKRIWAEYDPEAKGRIKHLDVVTLLRRIQPPLGFGKLCPHRVACKRLVSMNMPLNSDGTVMFNATLFALVRTALRIKTEGNLEQANEELRAIIKKIWKRTSMKLLDQVVPPAGDDEVTVGKFYATFLIQEYFRKFKKRKEQGLVGKPSQRNALSLQAGLRTLHDIGPEIRRAISGDLTAEEELDKAMKEAVSAASEDDIFRRAGGLFGNHVSYYQSDGRSAFPQTFTTQRPLHINKAGSSQGDTESPSHEKLVDSTFTPSSYSSTGSNANINNANNTALGRLPRPAGYPSTVSTVEGHGPPLSPAIRVQEVAWKLSSNRCHSRESQAAMAGQEETSQDETYEVKMNHDTEACSEPSLLSTEMLSYQDDENRQLTLPEEDKRDIRQSPKRGFLRSASLGRRASFHLECLKRQKDRGGDISQKTVLPLHLVHHQALAVAGLSPLLQRSHSPASFPRPFATPPATPGSRGWPPQPVPTLRLEGVESSEKLNSSFPSIHCGSWAETTPGGGGSSAARRVRPVSLMVPSQAGAPGRQFHGSASSLVEAVLISEGLGQFAQDPKFIEVTTQELADACDMTIEEMESAADNILSGGAPQSPNGALLPFVNCRDAGQDRAGGEEDAGCVRARGRPSEEELQDSRVYVSSL
